United States Patent Application Publication US 2023/0026259 A1 - sequence listing, part 6

SEQ ID NO: 23830 - protein, 69 aa, Homo sapiens
  Payload ID: 4762
  Gene Symbol: DENND5A
  Gene Name: DENN/MADD domain containing 5A
  ENSP ID: ENSP00000433925
MSGGGGGGGSAPSRFADYFVICGLDTETGLEPDELSALCQYIQASKARDGASPFISSTTEEIIEMHSLF

SEQ ID NO: 23831 - protein, 186 aa, Homo sapiens
  Payload ID: 4762
  Gene Symbol: DENND5A
  Gene Name: DENN/MADD domain containing 5A
  ENSP ID: ENSP00000434237
  MOD_RES (1)..(1): Any amino acid
XGHAGPRRCSSPPVSSGGLLPSHPTTSPRGSLTLLLCGECGLVSALEQAFQHGFKSPRLFKNVFIWDFLEKAQTYYETLEKNEVVPEENWHTRARNFCRFVTAINNTPRNIGKDGKFQMLVCLGARDHLLHHWIALLADCPITAHMYEDVALIKDHTLVNSLIRVLQTLQEFNITLETSLVKGIDI

SEQ ID NO: 23832 - protein, 104 aa, Homo sapiens
  Payload ID: 4762
  Gene Symbol: DENND5A
  Gene Name: DENN/MADD domain containing 5A
  ENSP ID: ENSP00000434397
PSQDKESWFTNREQMQNFDKASFLSDQPEPYLPFLSRFLETQMFASFIDNKIMCHDDDDKDPVLRVFDSRVDKIRLLNVRTPTLRTSMYQKCTTVDEAGQNHII

SEQ ID NO: 23833 - protein, 63 aa, Homo sapiens
  Payload ID: 4762
  Gene Symbol: DENND5A
  Gene Name: DENN/MADD domain containing 5A
  ENSP ID: ENSP00000435038
  MOD_RES (1)..(1): Any amino acid
XGKARAWVRLSMEKKLLSRHLKQLLSDHELTNDPVPHSDRTKQEAGGLHVHCQPMDLYIRRIG

SEQ ID NO: 23834 - protein, 195 aa, Homo sapiens
  Payload ID: 4762
  Gene Symbol: DENND5A
  Gene Name: DENN/MADD domain containing 5A
  ENSP ID: ENSP00000435368
  MOD_RES (1)..(1): Any amino acid
XEAVNGIVKHFHKPEKERGSLTLLLCGECGLVSALEQAFQHGFKSPRLFKNVFIWDFLEKAQTYYETLEKNEVVPEENWHTRARNFCRFVTAINNTPRNIGKDGKFQMLVCLGARVIMKIKSLMSVPAHAECYVRDHLLHHWIALLADCPITAHMYEDVALIKDHTLVNSLIRVLQTLQEFNITLETSLVKGIDI

SEQ ID NO: 23835 - protein, 1241 aa, Homo sapiens
  Payload ID: 4762
  Gene Symbol: DENND5A
  Gene Name: DENN/MADD domain containing 5A
  Uniprot ID: Q6IQ26
  ENSP ID: ENSP00000435866
MSGGGGGGGSAPSRFADYFVICGLDTETGLEPDELSALCQYIQASKARDGASPFISSTTEGENFEQTPLRRTFKSKVLARYPENVEWNPFDQDAVGMLCMPKGLAFKTQADPREPQFHAFIITREDGSRTFGFALTFYEEVTSKQICSAMQTLYHMHNAEYDVLHAPPADDRDQSSMEDGEDTPVTKLQRFNSYDISRDTLYVSKCICLITPMSFMKACRSVLEQLHQAVTSPQPPPLPLESYIYNVLYEVPLPPPGRSLKFSGVYGPIICQRPSTNELPLFDFPVKEVFELLGVENVFQLFTCALLEFQILLYSQHYQRLMTVAETITALMFPFQWQHVYVPILPASLLHFLDAPVPYLMGLHSNGLDDRSKLELPQEANLCFVDIDNHFIELPEDLPQFPNKLEFVQEVSEILMAFGIPPEGNLHCSESASKLKRLRASELVSDKRNGNIAGSPLHSYELLKENETIARLQALVKRTGVSLEKLEVREDPSSNKDLKVQCDEEELRIYQLNIQIREVFANRFTQMFADYEVFVIQPSQDKESWFTNREQMQNFDKASFLSDQPEPYLPFLSRFLETQMFASFIDNKIMCHDDDDKDPVLRVFDSRVDKIRLLNVRTPTLRTSMYQKCTTVDEAEKAIELRLAKIDHTAIHPHLLDMKIGQGKYEPGFFPKLQSDVLSTGPASNKWTKRNAPAQWRRKDRQKQHTEHLRLDNDQREKYIQEARTMGSTIRQPKLSNLSPSVIAQTNWKFVEGLLKECRNKTKRMLVEKMGREAVELGHGEVNITGVEENTLIASLCDLLERIWSHGLQVKQGKSALWSHLLHYQDNRQRKLTSGSLSTSGILLDSERRKSDASSLMPPLRISLIQDMRHIQNIGEIKTDVGKARAWVRLSMEKKLLSRHLKQLLSDHELTKKLYKRYAFLRCDDEKEQFLYHLLSFNAVDYFCFTNVFTTILIPYHILIVPSKKLGGSMFTANPWICISGELGETQIMQIPRNVLEMTFECQNLGKLTTVQIGHDNSGLYAKWLVEYVMVRNEITGHTYKFPCGRWLGKGMDDGSLERILVGELLTSQPEVDERPCRTPPLQQSPSVIRRLVTISPNNKPKLNTGQIQESIGEAVNGIVKHFHKPEKERGSLTLLLCGECGLVSALEQAFQHGFKSPRLFKNVFIWDFLEKAQTYYETLEKNEVVPEENWHTRARNFCRFVTAINNTPRNIGKDEITSYTTGLPCWLTAPSLHTCMRMWH

SEQ ID NO: 23836 - protein, 807 aa, Homo sapiens
  Payload ID: 4762
  Gene Symbol: DENND5A
  Gene Name: DENN/MADD domain containing 5A
  ENSP ID: ENSP00000436780
MSGGGGGGGSAPSRFADYFVICGLDTETGLEPDELSGENFEQTPLRRTFKSKVLARYPENVEWNPFDQDAVGMLCMPKGLAFKTQADPREPQFHAFIITREDGSRTFGFALTFYEEVTSKQICSAMQTLYHMHNAEYDVLHAPPADDRDQSSMEDGEDTPVTKLQRFNSYDISRDTLYVSKCICLITPMSFMKACRSVLEQLHQAVTSPQPPPLPLESYIYNVLYEVPLPPPGRSLKFSGVYGPIICQRPSTNELPLFDFPVKEVFELLGVENVFQLFTCALLEFQILLYSQHYQRLMTVAETITALMFPFQWQHVYVPILPASLLHFLDAPVPYLMGLHSNGLDDRSKLELPQEANLCFVDIDNHFIELPEDLPQFPNKLEFVQEVSEILMAFGIPPEGNLHCSESASKLKRLRASELVSDKRNGNIAGSPLHSYELLKENETIARLQALVKRTGVSLEKLEVREDPSSNKDLKVQCDEEELRIYQLNIQIREVFANRFTQMFADYEVFVIQPSQDKESWFTNREQMQNFDKASFLSDQPEPYLPFLSRFLETQMFASFIDNKIMCHDDDDKDPVLRVFDSRVDKIRLLNVRTPTLRTSMYQKCTTVDEAEKAIELRLAKIDHTAIHPHLLDMKIGQGKYEPGFFPKLQSDVLSTGPASNKWTKRNAPAQWRRKDRQKQHTEHLRLDNDQREKYIQEARTMGSTIRQPKLSNLSPSVIAQTNWKFVEGLLKECRNKTKRMLVEKMGREAVELGHGEVNITGVEENTLIASLCDLLERIWSHGLQVKQEYFLIQNVGSLMPAHSCLP

SEQ ID NO: 23837 - protein, 738 aa, Homo sapiens
  Payload ID: 4763
  Gene Symbol: DENND5B
  Gene Name: DENN/MADD domain containing 5B
  Uniprot ID: Q6ZUT9
  ENSP ID: ENSP00000346238
MSGSCAAPGPGSGSSPAACRFAHYFVLCGIDADSGLEPDELAVLYQWLEADRHGKSQGAANTTSGENFDQSPLRRTFKSKVLAHYPQNIEWNPFDQDAVNMLCMPKGLSFRTQTDNKDPQFHSFIITREDGSRTYGFVLTFYEEVTSKQICTAMQTLYQMHNAEHYSSVYASSSCSMDSLASSLDEGDTTSLLKLQRYNSYDISRDTLYVSKSICLITPLPFMQACKKFLIQLYKAVTSQQPPPLPLESYIHNILYEVPLPPPGRSLKFYGVYEPVICQRPGPSELPLSDYPLREAFELLGLENLVQVFTCVLLEMQILLYSQDYQRLMTVAEGITTLLFPFQWQHVYVPILPASLLHFLDAPVPYLMGLQSKEGTDRSKLELPQEANLCFVDIDNHFIELPEEFPQFPNKVDFIQELSEVLVQFGIPPEGSLHCSESTSKLKNMVLKDLVNDKKNGNVCTNNISMYELLKGNETIARLQALAKRTGVAVEKMDLSASLGEKDKDLKLHCEEAELRDYQLNVQLREVFANRFTQMFADYEAFVIQTAQDMESWLTNREQMQNFDKASFLSDQPEPYLPFLSRFIETQMFATFIDNKIMSQWEEKDPLLRVFDTRIDKIRLYNVRAPTLRTSIYQKCSTLKEAAQSIEQRLMKMDHTAIHPHLLDMKIGQGKYEQGFFPKLQSDVLATGPTSNNRWVSRSATAQRRKERLRQHSEHVGLDNDLREVCGLPSWGASQQAP

SEQ ID NO: 23838 - protein, 1274 aa, Homo sapiens
  Payload ID: 4763
  Gene Symbol: DENND5B
  Gene Name: DENN/MADD domain containing 5B
  Uniprot ID: Q6ZUT9
  ENSP ID: ENSP00000373734
MSGSCAAPGPGSGSSPAACRFAHYFVLCGIDADSGLEPDELAGENFDQSPLRRTFKSKVLAHYPQNIEWNPFDQDAVNMLCMPKGLSFRTQTDNKDPQFHSFIITREDGSRTYGFVLTFYEEVTSKQICTAMQTLYQMHNAEHYSSVYASSSCSMDSLASSLDEGDTTSLLKLQRYNSYDISRDTLYVSKSICLITPLPFMQACKKFLIQLYKAVTSQQPPPLPLESYIHNILYEVPLPPPGRSLKFYGVYEPVICQRPGPSELPLSDYPLREAFELLGLENLVQVFTCVLLEMQILLYSQDYQRLMTVAEGITTLLFPFQWQHVYVPILPASLLHFLDAPVPYLMGLQSKEGTDRSKLELPQEANLCFVDIDNHFIELPEEFPQFPNKVDFIQELSEVLVQFGIPPEGSLHCSESTSKLKNMVLKDLVNDKKNGNVCTNNISMYELLKGNETIARLQALAKRTGVAVEKMDLSASLGEKDKDLKLHCEEAELRDYQLNVQLREVFANRFTQMFADYEAFVIQTAQDMESWLTNREQMQNFDKASFLSDQPEPYLPFLSRFIETQMFATFIDNKIMSQWEEKDPLLRVFDTRIDKIRLYNVRAPTLRTSIYQKCSTLKEAAQSIEQRLMKMDHTAIHPHLLDMKIGQGKYEQGFFPKLQSDVLATGPTSNNRWVSRSATAQRRKERLRQHSEHVGLDNDLREKYMQEARSLGKNLRQPKLSDLSPAVIAQTNCKFVEGLLKECRMKTKRMLVEKMGHEAVELGHGEANITGLEENTLIASLCDLLERIWSHGLQVKQGKSALWSHLIQFQDREEKQEHLAESPVALGPERRKSDSGVMLPTLRVSLIQDMRHIQNMSEIKTDVGRARAWIRLSLEKKLLSQHLKQLLSNQPLTKKLYKRYAFLRCEEEREQFLYHLLSLNAVDYFCFTSVFTTIMIPYRSVIIPIKKLSNAIITSNPWICVSGELGDTGVMQIPKNLLEMTFECQNLGKLTTVQIGHDNSGLLAKWLVDCVMVRNEITGHTYRFPCGRWLGKGIDDGSLERILIGELMTSASDEDLVKQCRTPPQQKSPTTARRLSITSLTGKNNKPNAGQIQEGIGEAVNNIVKHFHKPEKERGSLTVLLCGENGLVAALEQVFHHGFKSARIFHKNVFIWDFIEKVVAYFETTDQILDNEDDVLIQKSSCKTFCHYVNAINTAPRNIGKDGKFQILVCLGTRDRLLPQWIPLLAECPAITRMYEESALLRDRMTVNSLIRILQTIQDFTIVLEGSLIKGVDV

SEQ ID NO: 23839 - protein, 537 aa, Homo sapiens
  Payload ID: 4763
  Gene Symbol: DENND5B
  Gene Name: DENN/MADD domain containing 5B
  ENSP ID: ENSP00000442938
SPLRRTFKSKVLAHYPQNIEWNPFDQDAVNMLCMPKGLSFRTQTDNKDPQFHSFIITREDGSRTYGFVLTFYEEVTSKQICTAMQTLYQMHNAEHYSSVYASSSCSMDSLASSLDEGDTTSLLKLQRYNSYDISRDTLYVSKSICLITPLPFMQACKKFLIQLYKAVTSQQPPPLPLESYIHNILYEVPLPPPGRSLKFYGVYEPVICQRPGPSELPLSDYPLREAFELLGLENLVQVFTCVLLEMQILLYSQDYQRLMTVAEGITTLLFPFQWQHVYVPILPASLLHFLDAPVPYLMGLQSKEGTDRSKLELPQEANLCFVDIDNHFIELPEEFPQFPNKVDFIQELSEVLVQFGIPPEGSLHCSESTSKLKNMVLKDLVNDKKNGNVCTNNISMYELLKGNETIARLQALAKRTGVAVEKMDLSASLGEKDKDLKLHCEEAELRDYQLNVQLREVFANRFTQMFADYEAFVIQTAQDMESWLTNREQMQNFDKVKRTIVFLLWLLVALLLILTFLNFLFFCAYAYPYIIDFVNLF

SEQ ID NO: 23840 - protein, 1309 aa, Homo sapiens
  Payload ID: 4763
  Gene Symbol: DENND5B
  Gene Name: DENN/MADD domain containing 5B
  ENSP ID: ENSP00000444889
MGTHHHAQLIFVFLVEMRFHHVDQAGLELLTSSNSPASASRSAEITVVSQHAQPGFLYQWLEADRHGKSQGAANTTSGENFDQSPLRRTFKSKVLAHYPQNIEWNPFDQDAVNMLCMPKGLSFRTQTDNKDPQFHSFIITREDGSRTYGFVLTFYEEVTSKQICTAMQTLYQMHNAEHYSSVYASSSCSMDSLASSLDEGDTTSLLKLQRYNSYDISRDTLYVSKSICLITPLPFMQACKKFLIQLYKAVTSQQPPPLPLESYIHNILYEVPLPPPGRSLKFYGVYEPVICQRPGPSELPLSDYPLREAFELLGLENLVQVFTCVLLEMQILLYSQDYQRLMTVAEGITTLLFPFQWQHVYVPILPASLLHFLDAPVPYLMGLQSKEGTDRSKLELPQEANLCFVDIDNHFIELPEEFPQFPNKVDFIQELSEVLVQFGIPPEGSLHCSESTSKLKNMVLKDLVNDKKNGNVCTNNISMYELLKGNETIARLQALAKRTGVAVEKMDLSASLGEKDKDLKLHCEEAELRDYQLNVQLREVFANRFTQMFADYEAFVIQTAQDMESWLTNREQMQNFDKASFLSDQPEPYLPFLSRFIETQMFATFIDNKIMSQWEEKDPLLRVFDTRIDKIRLYNVRAPTLRTSIYQKCSTLKEAAQSIEQRLMKMDHTAIHPHLLDMKIGQGKYEQGFFPKLQSDVLATGPTSNNRWVSRSATAQRRKERLRQHSEHVGLDNDLREKYMQEARSLGKNLRQPKLSDLSPAVIAQTNCKFVEGLLKECRMKTKRMLVEKMGHEAVELGHGEANITGLEENTLIASLCDLLERIWSHGLQVKQGKSALWSHLIQFQDREEKQEHLAESPVALGPERRKSDSGVMLPTLRVSLIQDMRHIQNMSEIKTDVGRARAWIRLSLEKKLLSQHLKQLLSNQPLTKKLYKRYAFLRCEEEREQFLYHLLSLNAVDYFCFTSVFTTIMIPYRSVIIPIKKLSNAIITSNPWICVSGELGDTGVMQIPKNLLEMTFECQNLGKLTTVQIGHDNSGLLAKWLVDCVMVRNEITGHTYRFPCGRWLGKGIDDGSLERILIGELMTSASDEDLVKQCRTPPQQKSPTTARRLSITSLTGKNNKPNAGQIQEGIGEAVNNIVKHFHKPEKERGSLTVLLCGENGLVAALEQVFHHGFKSARIFHKNVFIWDFIEKVVAYFETTDQILDNEDDVLIQKSSCKTFCHYVNAINTAPRNIGKDGKFQILVCLGTRDRLLPQWIPLLAECPAITRMYEESALLRDRMTVNSLIRILQTIQDFTIVLEGSLIKGVDV

SEQ ID NO: 23841 - protein, 63 aa, Homo sapiens
  Payload ID: 4763
  Gene Symbol: DENND5B
  Gene Name: DENN/MADD domain containing 5B
  ENSP ID: ENSP00000445113
MSGSCAAPGPGSGSSPAACRFAHYFVLCGIDADSGLEPDELAEIRGQPSFFCVKISSFPSTID

SEQ ID NO: 23842 - protein, 1309 aa, Homo sapiens; identical to SEQ ID NO: 23840
  Payload ID: 4763
  Gene Symbol: DENND5B
  Gene Name: DENN/MADD domain containing 5B
  ENSP ID: ENSP00000486530

SEQ ID NO: 23843 - protein, 608 aa, Homo sapiens
  Payload ID: 4764
  Gene Symbol: DENND6A
  Gene Name: DENN/MADD domain containing 6A
  Uniprot ID: Q8IWF6
  ENSP ID: ENSP00000311401
MALRGPAGLGPGSRRPLDEAVAGAEGREAPALVAAGGAPEDDEEDDGRGRGLLRWDSFSAWLHCVCVVGFDLELGQAVEVIYPQHSKLTDREKTNICYLSFPDSNSGCLGDTQFCFRFRQSSGRRVSLHCLLDQFDKDLPVYLKKDPAYFYGYVYFRQVRDKTLKRGYFQKSLVLISKLPYIHFFHTVLKQIAPEYFEKNEPYLEAACNDVDRWPAPVPGKTLHLPIMGVVMKVRIPTCHDKPGTTQIVQLTQQVDTNISVILPTVHEVDIFRCFCPVFLHSQMLWELVLLGEPLVVMAPSPSESSETVLALVNCISPLKYFSDFRPYFTIHDSEFKEYTTRTQAPPSVILGVTNPFFAKTLQHWPHIIRIGDLKPTGEIPKQVKVKKLKNLKTLDSKPGVYTSYKPYLNRDEEIIKQLQKGVQQKRPSEAQSVILRRYFLELTQSFIIPLERYVASLMPLQKSISPWKSPPQLRQFLPEEFMKTLEKTGPQLTSRIKGDWIGLYRHFLKSPNFDGWFKTRRKEMTQKLEALHLEALCEEDLLLWIQKHTEVETVDLVLKLKNKLLQADREHLPVKPDTMEKLRTHIDAIILALPEDLQGILLKTGMT

SEQ ID NO: 23844 - protein, 168 aa, Homo sapiens
  Payload ID: 4764
  Gene Symbol: DENND6A
  Gene Name: DENN/MADD domain containing 6A
  ENSP ID: ENSP00000419334
  MOD_RES (1)..(1): Any amino acid
XDRWPAPVPGKTLHLPIMGVVMKVDTNISVILPTVHEVDIFRCFCPVFLHSQMLWELVLLGEPLVVMAPSPSESSETVLALVNCISPLKYFSDFRPYFTIHDSEFKEYTTRTQAPPSVILGVTNPFFAKTLQHWPHIIRIGDLKPTGEIPKQVKVKKLKNLKTLDSKP

SEQ ID NO: 23845 - protein, 125 aa, Homo sapiens
  Payload ID: 4764
  Gene Symbol: DENND6A
  Gene Name: DENN/MADD domain containing 6A
  ENSP ID: ENSP00000419570
  MOD_RES (1)..(1): Any amino acid
XEAQSVILRRYFLELTQSFIIPLERYVASLMPLQKSISPWKSPPQLRQFLPEEFMKTLEKTGPQLTSRIKGDWIGLYRHFLKSPNFDGWFKTRRKEMTQKLEALHLEALCEEVRKLCVCVMINNC

SEQ ID NO: 23846 - protein, 585 aa, Homo sapiens
  Payload ID: 4765
  Gene Symbol: DENND6B
  Gene Name: DENN/MADD domain containing 6B
  Uniprot ID: Q8NEG7
  ENSP ID: ENSP00000391524
MDALLGTGPRRARGCLGAAGPTSSGRAARTPAAPWARFSAWLECVCVVTFDLELGQALELVYPNDFRLTDKEKSSICYLSFPDSHSGCLGDTQFSFRMRQCGGQRSPWHADDRHYNSRAPVALQREPAHYFGYVYFRQVKDSSVKRGYFQKSLVLVSRLPFVRLFQALLSLIAPEYFDKLAPCLEAVCSEIDQWPAPAPGQTLNLPVMGVVVQVRIPSRVDKSESSPPKQFDQENLLPAPVVLASVHELDLFRCFRPVLTHMQTLWELMLLGEPLLVLAPSPDVSSEMVLALTSCLQPLRFCCDFRPYFTIHDSEFKEFTTRTQAPPNVVLGVTNPFFIKTLQHWPHILRVGEPKMSGDLPKQVKLKKPSRLKTLDTKPGLYTAYTAHLHRDKALLKRLLKGVQKKRPSDVQSALLRRHLLELTQSFIIPLEHYMASLMPLQKSITPWKTPPQIQPFSQDDFLRSLEHAGPQLTCILKGDWLGLYRRFFKSPHFDGWYRQRHKEMALKLEALHLEAICEANIETWMKDKSEVEVVDLVLKLREKLVRAQGHQLPVKEATLQRAQLYIETVIGSLPKDLQAVLCPP

SEQ ID NO: 23847 - protein, 298 aa, Homo sapiens
  Payload ID: 4765
  Gene Symbol: DENND6B
  Gene Name: DENN/MADD domain containing 6B
  ENSP ID: ENSP00000414072
MLSRGVASSDRWCHQALCLPLQLVYPNDFRLTDKEKSSICYLSFPDSHSGCLGDTQFSFRMRQCGGQRSPWHADDRHYNSRAPVALQREPAHYFGYVYFRQVKDSSVKRGYFQKALGSSPTGRHPGSSVLGFLLSNNSGVQVRRSWGSCPVKLVGRATLGQLQSLVLVSRLPFVRLFQALLSLIAPEYFDKLAPCLEAVCSEIDQWPAPAPGQTLNLPVMGVVVQVRIPSRVDKSESSPPKQFDQENLLPAPVVLASVHELDLFRCFRPVLTHMQTLWELMLLGEPLLVLAPSPDVSS

SEQ ID NO: 23848 - protein, 198 aa, Homo sapiens
  Payload ID: 4766
  Gene Symbol: DENR
  Gene Name: density-regulated protein
  Uniprot ID: O43583
  ENSP ID: ENSP00000280557
MAADISESSGADCKGDPRNSAKLDADYPLRVLYCGVCSLPTEYCEYMPDVAKCRQWLEKNFPNEFAKLTVENSPKQEAGISEGQGTAGEEEEKKKQKRGGRGQIKQKKKTVPQKVTIAKIPRAKKKYVTRVCGLATFEIDLKEAQRFFAQKFSCGASVTGEDEIIIQGDFTDDIIDVIQEKWPEVDDDSIEDLGEVKK

SEQ ID NO: 23849 - protein, 160 aa, Homo sapiens
  Payload ID: 4766
  Gene Symbol: DENR
  Gene Name: density-regulated protein
  ENSP ID: ENSP00000413661
MAADISESSGADCKGDPRNSAKLDADYPLRVLYCGVCSLPTEYCEYMPDVAKCRQWLEKNFPNEFAKLTVENSPKQEAGISEGQGTAGEEEEKKKQKRGGRGQIKQKKKTVPQKVTIAKIPRAKKKYVTRVCGLATFEIDLKEAQRFFAQKFSCGASPPK

SEQ ID NO: 23850 - protein, 730 aa, Homo sapiens
  Payload ID: 4767
  Gene Symbol: DTL
  Gene Name: denticleless E3 ubiquitin protein ligase homolog (Drosophila)
  Uniprot ID: Q9NZJ0
  ENSP ID: ENSP00000355958
MLFNSVLRQPQLGVLRNGWSSQYPLQSLLTGYQCSGNDEHTSYGETGVPVPPFGCTFSSAPNMEHVLAVANEEGFVRLYNTESQSFRKKCFKEWMAHWNAVFDLAWVPGELKLVTAAGDQTAKFWDVKAGELIGTCKGHQCSLKSVAFSKFEKAVFCTGGRDGNIMVWDTRCNKKDGFYRQVNQISGAHNTSDKQTPSKPKKKQNSKGLAPSVDFQQSVTVVLFQDENTLVSAGAVDGIIKVWDLRKNYTAYRQEPIASKSFLYPGSSTRKLGYSSLILDSTGSTLFANCTDDNIYMFNMTGLKTSPVAIFNGHQNSTFYVKSSLSPDDQFLVSGSSDEAAYIWKVSTPWQPPTVLLGHSQEVTSVCWCPSDFTKIATCSDDNTLKIWRLNRGLEEKPGGDKLSTVGWASQKKKESRPGLVTVTSSQSTPAKAPRAKCNPSNSSPSSAACAPSCAGDLPLPSNTPTFSIKTSPAKARSPINRRGSVSSVSPKPPSSFKMSIRNWVTRTPSSSPPITPPASETKIMSPRKALIPVSQKSSQAEACSESRNRVKRRLDSSCLESVKQKCVKSCNCVTELDGQVENLHLDLCCLAGNQEDLSKDSLGPTKSSKIEGAGTSISEPPSPISPYASESCGTLPLPLRPCGEGSEMVGKENSSPENKNWLLAMAAKRKAENPSPRSPSSQTPNSRRQSGKKLPSPVTITPSSMRKICTYFHRKSQEDFCGPEHSTEL

SEQ ID NO: 23851 - protein, 688 aa, Homo sapiens
  Payload ID: 4767
  Gene Symbol: DTL
  Gene Name: denticleless E3 ubiquitin protein ligase homolog (Drosophila)
  ENSP ID: ENSP00000443870
MLFNSVLRQPQLGVLRNAPNMEHVLAVANEEGFVRLYNTESQSFRKKCFKEWMAHWNAVFDLAWVPGELKLVTAAGDQTAKFWDVKAGELIGTCKGHQCSLKSVAFSKFEKAVFCTGGRDGNIMVWDTRCNKKDGFYRQVNQISGAHNTSDKQTPSKPKKKQNSKGLAPSVDFQQSVTVVLFQDENTLVSAGAVDGIIKVWDLRKNYTAYRQEPIASKSFLYPGSSTRKLGYSSLILDSTGSTLFANCTDDNIYMFNMTGLKTSPVAIFNGHQNSTFYVKSSLSPDDQFLVSGSSDEAAYIWKVSTPWQPPTVLLGHSQEVTSVCWCPSDFTKIATCSDDNTLKIWRLNRGLEEKPGGDKLSTVGWASQKKKESRPGLVTVTSSQSTPAKAPRAKCNPSNSSPSSAACAPSCAGDLPLPSNTPTFSIKTSPAKARSPINRRGSVSSVSPKPPSSFKMSIRNWVTRTPSSSPPITPPASETKIMSPRKALIPVSQKSSQAEACSESRNRVKRRLDSSCLESVKQKCVKSCNCVTELDGQVENLHLDLCCLAGNQEDLSKDSLGPTKSSKIEGAGTSISEPPSPISPYASESCGTLPLPLRPCGEGSEMVGKENSSPENKNWLLAMAAKRKAENPSPRSPSSQTPNSRRQSGKKLPSPVTITPSSMRKICTYFHRKSQEDFCGPEHSTEL

SEQ ID NO: 23852 - protein, 497 aa, Homo sapiens
  Payload ID: 4768
  Gene Symbol: DMP1
  Gene Name: dentin matrix acidic phosphoprotein 1
  Uniprot ID: Q13316
  ENSP ID: ENSP00000282479
MKISILLMFLWGLSCALPVTRYQNNESEDSEEWKGHLAQAPTPPLANEDPSDSTQSEEGLGSDDHQYIYRLAGGFSRSTGKGGDDKDDDEDDSGDDTFGDDDSGPGPKDRQEGGNSRLGSDEDSDDTIQASEESAPQGQDSAQDTTSESRELDNEDRVDSKPEGGDSTQESESEEHWVGGGSDGESSHGDGSELDDEGMQSDDPESIRSERGNSRMNSAGMKSKESGENSEQANTQDSGGSQLLEHPSRKIFRKSRISEEDDRSELDDNNTMEEVKSDSTENSNSRDTGLSQPRRDSKGDSQEDSKENLSQEESQNVDGPSSESSQEANLSSQENSSESQEEVVSESRGDNPDPTTSYVEDQEDSDSSEEDSSHTLSHSKSESREEQADSESSESLNFSEESPESPEDENSSSQEGLQSHSSSAESQSEESHSEEDDSDSQDSSRSKEDSNSTESKSSSEEDGQLKNIEIESRKLTVDAYHNKPIGDQDDNDCQDGY

SEQ ID NO: 23853 - protein, 513 aa, Homo sapiens
  Payload ID: 4768
  Gene Symbol: DMP1
  Gene Name: dentin matrix acidic phosphoprotein 1
  Uniprot ID: Q13316
  ENSP ID: ENSP00000340935
MKISILLMFLWGLSCALPVTRYQNNESEDSEEWKGHLAQAPTPPLESSESSEGSKVSSEEQANEDPSDSTQSEEGLGSDDHQYIYRLAGGFSRSTGKGGDDKDDDEDDSGDDTFGDDDSGPGPKDRQEGGNSRLGSDEDSDDTIQASEESAPQGQDSAQDTTSESRELDNEDRVDSKPEGGDSTQESESEEHWVGGGSDGESSHGDGSELDDEGMQSDDPESIRSERGNSRMNSAGMKSKESGENSEQANTQDSGGSQLLEHPSRKIFRKSRISEEDDRSELDDNNTMEEVKSDSTENSNSRDTGLSQPRRDSKGDSQEDSKENLSQEESQNVDGPSSESSQEANLSSQENSSESQEEVVSESRGDNPDPTTSYVEDQEDSDSSEEDSSHTLSHSKSESREEQADSESSESLNFSEESPESPEDENSSSQEGLQSHSSSAESQSEESHSEEDDSDSQDSSRSKEDSNSTESKSSSEEDGQLKNIEIESRKLTVDAYHNKPIGDQDDNDCQDGY

SEQ ID NO: 23854 - protein, 1301 aa, Homo sapiens
  Payload ID: 4769
  Gene Symbol: DSPP
  Gene Name: dentin sialophosphoprotein
  Uniprot ID: Q9NZW4
  ENSP ID: ENSP00000282478
MKIITYFCIWAVAWAIPVPQSKPLERHVEKSMNLHLLARSNVSVQDELNASGTIKESGVLVHEGDRGRQENTQDGHKGEGNGSKWAEVGGKSFSTYSTLANEEGNIEGWNGDTGKAETYGHDGIHGKEENITANGIQGQVSIIDNAGATNRSNTNGNTDKNTQNGDVGDAGHNEDVAVVQEDGPQVAGSNNSTDNEDEIIENSCRNEGNTSEITPQINSKRNGTKEAEVTPGTGEDAGLDNSDGSPSGNGADEDEDEGSGDDEDEEAGNGKDSSNNSKGQEGQDHGKEDDHDSSIGQNSDSKEYYDPEGKEDPHNEVDGDKTSKSEENSAGIPEDNGSQRIEDTQKLNHRESKRVENRITKESETHAVGKSQDKGIEIKGPSSGNRNITKEVGKGNEGKEDKGQHGMILGKGNVKTQGEVVNIEGPGQKSEPGNKVGHSNTGSDSNSDGYDSYDFDDKSMQGDDPNSSDESNGNDDANSESDNNSSSRGDASYNSDESKDNGNGSDSKGAEDDDSDSTSDTNNSDSNGNGNNGNDDNDKSDSGKGKSDSSDSDSSDSSNSSDSSDSSDSDSSDSNSSSDSDSSDSDSSDSSDSDSSDSSNSSDSSDSSDSSDSSDSSDSSDSKSDSSKSESDSSDSDSKSDSSDSNSSDSSDNSDSSDSSNSSNSSDSSDSSDSSDSSSSSDSSNSSDSSDSSDSSNSSESSDSSDSSDSDSSDSSDSSNSNSSDSDSSNSSDSSDSSNSSDSSDSSDSSNSSDSSDSSDSSNSSDSSDSSDSSDSSDSSNSSDSNDSSNSSDSSDSSNSSDSSNSSDSSDSSDSSDSDSSNSSDSSNSSDSSDSSNSSDSSDSSDSSDGSDSDSSNRSDSSNSSDSSDSSDSSNSSDSSDSSDSNESSNSSDSSDSSNSSDSDSSDSSNSSDSSDSSNSSDSSESSNSSDNSNSSDSSNSSDSSDSSDSSNSSDSSNSSDSSNSSDSSDSNSSDSSDSSNSSDSSDSSDSSDSSDSSDSSNSSDSSDSSDSSDSSNSSDSSNSSDSSNSSDSSDSSDSSDSSDSSDSSDSSDSSNSSDSSDSSDSSDSSDSSDSSDSSDSSESSDSSDSSNSSDSSDSSDSSDSSDSSDSSDSSDSSDSSNSSDSSDSSDSSDSSDSSNSSDSSDSSESSDSSDSSDSSDSSDSSDSSDSSDSSDSSNSSDSSDSSDSSDSSDSSDSSDSSDSSDSSDSSDSSDSSDSSDSSDSSDSSDSNESSDSSDSSDSSDSSNSSDSSDSSDSSDSTSDSNDESDSQSKSGNGNNNGSDSDSDSEGSDSNHSTSDD

SEQ ID NO: 23855 - protein, 1301 aa, Homo sapiens; identical to SEQ ID NO: 23854
  Payload ID: 4769
  Gene Symbol: DSPP
  Gene Name: dentin sialophosphoprotein
  Uniprot ID: Q9NZW4
  ENSP ID: ENSP00000382213

SEQ ID NO: 23856 - protein, 260 aa, Homo sapiens [sequence omitted]

SEQ ID NO: 23857 - protein, 317 aa, Homo sapiens
  Payload ID: 4770
  Gene Symbol: DCK
  Gene Name: deoxycytidine kinase
  ENSP ID: ENSP00000421508
MATPPKRSCPSFSASSEGTRIKKISIEGNIAAGKSTFVNILKQLCEDWEVVPEPVARWCNVQSTQDEFEELTMSQKNGGNVLQMMYEKPERWSFTFQTYACLSRIRAQLASLNGKLKDAEKPVLFFERSVYSDRYIFASNLYESECMNETEWTIYQDWHDWMNNQFGQSLELDGIIYLQATPETCLHRIYLRGRNEEQGIPLEYLEKLHYKHESWLLHRTLKTNFDYLQEVPILTLDVNEDFKDKYESLVEKSCSVAQAGVQWHNLGSLPSPPPRFNQFCLSLLSQRVFEYFVILLKTTGSQMVPDTSALCIFVTSY

SEQ ID NO: 23858 - protein, 15 aa, Homo sapiens
  Payload ID: 4770
  Gene Symbol: DCK
  Gene Name: deoxycytidine kinase
  ENSP ID: ENSP00000422971
MATPPKRSCPSFSAS

SEQ ID NO: 23859 - protein, 199 aa, Homo sapiens
  Payload ID: 4770
  Gene Symbol: DCK
  Gene Name: deoxycytidine kinase
  ENSP ID: ENSP00000425578
MATPPKRSCPSFSASSEGTRIKKISIEGNIAAGKSTFVNILKQLCEDWEVVPEPVARWCNVQSTQDEFEELTMSQKNGGNVLQMMYEKPERWSFTFQTYACLSRIRAQLASLNGKLKDAEKPVLFFERSVYSDRYIFASNLYESECMNETEWTIYQDWHDWMNNQFGQSLELDGIIYLQATPENQLRLSSRGAYLNTGC

SEQ ID NO: 23860 - protein, 48 aa, Homo sapiens
  Payload ID: 4770
  Gene Symbol: DCK
  Gene Name: deoxycytidine kinase
  ENSP ID: ENSP00000426389
MATPPKRSCPSFSASSEGTRIKKISIEGNIGKEPPEMWDARLGCRGSG

SEQ ID NO: 23861 - protein, 277 aa, Homo sapiens
  Payload ID: 4771
  Gene Symbol: DGUOK
  Gene Name: deoxyguanosine kinase
  Uniprot ID: Q16854
  ENSP ID: ENSP00000264093
MAAGRLFLSRLRAPFSSMAKSPLEGVSSSRGLHAGRGPRRLSIEGNIAVGKSTFVKLLTKTYPEWHVATEPVATWQNIQAAGTQKACTAQSLGNLLDMMYREPARWSYTFQTFSFLSRLKVQLEPFPEKLLQARKPVQIFERSVYSDRYIFAKNLFENGSLSDIEWHIYQDWHSFLLWEFASRITLHGFIYLQASPQVCLKRLYQRAREEEKGIELAYLEQLHGQHEAWLIHKTTKLHFEALMNIPVLVLDVNDDFSEEVTKQEDLMREVNTFVKNL

SEQ ID NO: 23862 - protein, 189 aa, Homo sapiens
  Payload ID: 4771
  Gene Symbol: DGUOK
  Gene Name: deoxyguanosine kinase
  Uniprot ID: Q16854
  ENSP ID: ENSP00000306964
MAAGRLFLSRLRAPFSSMAKSPLEGVSSSRGLHAGRGPRRLSIEGNIAVGKSTFVKLLTKTYPEWHVATEPVATWQNIQAAGTQKACTAQSLGNLLDMMYREPARWSYTFQTFSFLSRLKVQLEPFPEKLLQARKPVQIFERSVYSDRLHFEALMNIPVLVLDVNDDFSEEVTKQEDLMREVNTFVKNL

SEQ ID NO: 23863 - protein, 89 aa, Homo sapiens
  Payload ID: 4771
  Gene Symbol: DGUOK
  Gene Name: deoxyguanosine kinase
  Uniprot ID: Q16854
  ENSP ID: ENSP00000408209
MAAGRLFLSRLRAPFSSMAKSPLEGVSSSRGLHAGRGPRRLSIEGNIGLHCPKSWKLAGYDVPGASTMVLHIPDIFLFEPPESTAGALP

SEQ ID NO: 23864 - protein, 89 aa, Homo sapiens; identical to SEQ ID NO: 23863
  Payload ID: 4771
  Gene Symbol: DGUOK
  Gene Name: deoxyguanosine kinase
  Uniprot ID: Q16854
  ENSP ID: ENSP00000487122

SEQ ID NO: 23865 - protein, 302 aa, Homo sapiens
  Payload ID: 4772
  Gene Symbol: DOHH
  Gene Name: deoxyhypusine hydroxylase/monooxygenase
  Uniprot ID: Q9BU89
  ENSP ID: ENSP00000250937
MVTEQEVDAIGQTLVDPKQPLQARFRALFTLRGLGGPGAIAWISQAFDDDSALLKHELAYCLGQMQDARAIPMLVDVLQDTRQEPMVRHEAGEALGAIGDPEVLEILKQYSSDPVIEVAETCQLAVRRLEWLQQHGGEPAAGPYLSVDPAPPAEERDVGRLREALLDESRPLFERYRAMFALRNAGGEEAALALAEGLHCGSALFRHEVGYVLGQLQHEAAVPQLAAALARCTENPMVRHECAEALGAIARPACLAALQAHADDPERVVRESCEVALDMYEHETGRAFQYADGLEQLRGAPS

SEQ ID NO: 23866 - protein, 302 aa, Homo sapiens; identical to SEQ ID NO: 23865
  Payload ID: 4772
  Gene Symbol: DOHH
  Gene Name: deoxyhypusine hydroxylase/monooxygenase
  Uniprot ID: Q9BU89
  ENSP ID: ENSP00000398882

SEQ ID NO: 23867 - protein, 223 aa, Homo sapiens
  Payload ID: 4772
  Gene Symbol: DOHH
  Gene Name: deoxyhypusine hydroxylase/monooxygenase
  ENSP ID: ENSP00000464905
MVTEQEVDAIGQTLVDPKQPLQARFRALFTLRGLGGPGAIAWISQAFDDDSALLKHELAYCLGQMQDARAIPMLVDVLQDTRQEPMVRHEAGEALGAIGDPEVLEILKQYSSDPVIEVAETCQLAVRRLEWLQQHGGEPAAGPYLSVDPAPPAEERDVGRLREALLDESRPLFERYRAMFALRNAGGEEAALALAEGLHCGSALFRHEVGYVLGQLQHEAAVP

SEQ ID NO: 23868 - protein, 195 aa, Homo sapiens
  Payload ID: 4772
  Gene Symbol: DOHH
  Gene Name: deoxyhypusine hydroxylase/monooxygenase
  ENSP ID: ENSP00000468416
  MOD_RES (1)..(1): Any amino acid
XDSALLKHELAYCLGQMQDARAIPMLVDVLQDTRQEPMVRHEAGEALGAIGDPEVLEILKQYSSDPVIEVAETCQLAVRRLEWLQQHGGEPAAGPYLSVDPAPPAEERDVGRLREALLDESRPLFERYRAMFALRNAGGEEAALALAEGEEGLLGWGPGQCLAVRFSDGICAVGPRPAPGNGIPGLAPSISHGAS

SEQ ID NO: 23869 - protein, 369 aa, Homo sapiens
  Payload ID: 4773
  Gene Symbol: DHPS
  Gene Name: deoxyhypusine synthase
  Uniprot ID: P49366
  ENSP ID: ENSP00000210060
MEGSLEREAPAGALAAVLKHSSTLPPESTQVRGYDFNRGVNYRALLEAFGTTGFQATNFGRAVQQVNAMIEKKLEPLSQDEDQHADLTQSRRPLTSCTIFLGYTSNLISSGIRETIRYLVQHNMVDVLVTTAGGVEEDLIKCLAPTYLGEFSLRGKELRENGINRIGNLLVPNENYCKFEDWLMPILDQMVMEQNTEGVKWTPSKMIARLGKEINNPESVYYWAQKNHIPVFSPALTDGSLGDMIFFHSYKNPGLVLDIVEDLRLINTQAIFAKCTGMIILGGGVVKHHIANANLMRNGADYAVYINTAQEFDGSDSGARPDEAVSWGKIRVDAQPVKVYADASLVFPLLVAETFAQKMDAFMHEKNED

SEQ ID NO: 23870 - protein, 322 aa, Homo sapiens
  Payload ID: 4773
  Gene Symbol: DHPS
  Gene Name: deoxyhypusine synthase
  Uniprot ID: P49366
  ENSP ID: ENSP00000221303
MEGSLEREAPAGALAAVLKHSSTLPPESTQVRGYDFNRGVNYRALLEAFGTTGFQATNFGRAVQQVNAMIEKKLEPLSQDEDQHADLTQSRRPLTSCTIFLGYTSNLISSGIRETIRYLVQHNMVDVLVTTAGGVEEDLIKCLAPTYLGEFSLRGKELRENGINRIGNLLVPNENYCKFEDWLMPILDQMVMEQNTEGVKWTPSKMIARLGKEINNPESVYYWAQKNHIPVFSPALTDGSLGDMIFFHSYKNPGLVLDIVEAQEFDGSDSGARPDEAVSWGKIRVDAQPVKVYADASLVFPLLVAETFAQKMDAFMHEKNED

SEQ ID NO: 23871 - protein, 132 aa, Homo sapiens
  Payload ID: 4773
  Gene Symbol: DHPS
  Gene Name: deoxyhypusine synthase
  ENSP ID: ENSP00000468889
MEGSLEREAPAGALAAVLKHSSTLPPESTQVRGYDFNRGVNYRALLEAFGTTGFQATNFGRAVQQVNAMIEKKLEPLSQDEDQHADLTQSRRPLTSCTIFLGYTSNLISSGIRETIRYLVQHNMVGTWWTYW

SEQ ID NO: 23872 - protein, 139 aa, Homo sapiens
  Payload ID: 4773
  Gene Symbol: DHPS
  Gene Name: deoxyhypusine synthase
  ENSP ID: ENSP00000468993
MEGSLEREAPAGALAAVLKHSSTLPPESTQVRGYDFNRGVNYRALLEAFGTTGFQATNFGRAVQQVNAMIEKKLEPLSQDEDQHADLTQSRRPLTSCTIFLGYTSNLISSGIRGRIGDHSWRRGGRPHQVPGAHILGRV

SEQ ID NO: 23873 - protein, 27 aa, Homo sapiens
  Payload ID: 4773
  Gene Symbol: DHPS
  Gene Name: deoxyhypusine synthase
  ENSP ID: ENSP00000469366
  MOD_RES (1)..(1): Any amino acid
XPDEAVSWGKIRVDAQPVKVPPYPGLC

SEQ ID NO: 23874 - protein, 90 aa, Homo sapiens
  Payload ID: 4773
  Gene Symbol: DHPS
  Gene Name: deoxyhypusine synthase
  ENSP ID: ENSP00000470188
MPIIPAFWEAEAGGSREEEFETSLANMIEKKLEPLSQDEDQHADLTQSRRPLTSCTIFLGYTSNLISSGIRETIRYLVQHNMVGTWWTYW

SEQ ID NO: 23875 - protein, 56 aa, Homo sapiens
  Payload ID: 4773
  Gene Symbol: DHPS
  Gene Name: deoxyhypusine synthase
  ENSP ID: ENSP00000470754
  MOD_RES (1)..(1): Any amino acid
XADLTQSRRPLTSCTIFLGYTSNLISSGIRGRIGDHSWRRGGRPHQVPGAHILGRV

SEQ ID NO: 23876 - protein, 68 aa, Homo sapiens
  Payload ID: 4773
  Gene Symbol: DHPS
  Gene Name: deoxyhypusine synthase
  ENSP ID: ENSP00000471280
  MOD_RES (1)..(1): Any amino acid
XMIEKKLEPLSQDEDQHADLTQSRRPLTSCTIFLGYTSNLISSGIRETIRYLVQHNMQSSLIRVTGQG

SEQ ID NO: 23877 - protein, 159 aa, Homo sapiens
  Payload ID: 4773
  Gene Symbol: DHPS
  Gene Name: deoxyhypusine synthase
  ENSP ID: ENSP00000471466
  MOD_RES (1)..(1): Any amino acid
XMIARLGKEINNPESVYYWAQKNHIPVFSPALTDGSLGDMIFFHSYKNPGLVLDIVEDLRLINTQAIFAKCTGMIILGGGVVKHHIANANLMVPDQTRLSPGARSGWMHSPSRSMLTPPWSSPCLWLKPLPRRWMPSCMRRTRTERLRSQEGLTPSSIY

SEQ ID NO: 23878 - protein, 327 aa, Homo sapiens
  Payload ID: 4773
  Gene Symbol: DHPS
  Gene Name: deoxyhypusine synthase
  Uniprot ID: P49366
  ENSP ID: ENSP00000471886
MPIIPAFWEAEAGGSREEEFETSLANMIEKKLEPLSQDEDQHADLTQSRRPLTSCTIFLGYTSNLISSGIRETIRYLVQHNMVDVLVTTAGGVEEDLIKCLAPTYLGEFSLRGKELRENGINRIGNLLVPNENYCKFEDWLMPILDQMVMEQNTEGVKWTPSKMIARLGKEINNPESVYYWAQKNHIPVFSPALTDGSLGDMIFFHSYKNPGLVLDIVEDLRLINTQAIFAKCTGMIILGGGVVKHHIANANLMRNGADYAVYINTAQEFDGSDSGARPDEAVSWGKIRVDAQPVKVYADASLVFPLLVAETFAQKMDAFMHEKNED

SEQ ID NO: 23879 - protein, 138 aa, Homo sapiens
  Payload ID: 4773
  Gene Symbol: DHPS
  Gene Name: deoxyhypusine synthase
  ENSP ID: ENSP00000472094
MVDVLVTTAGGVEEDLIKCLAPTYLGEFSLRGKELRENGINRIGNLLVPNENYCKFEDWLMPILDQMVMEQNTEGVKWTPSKMIARLGKEINNPESVYYWAQKNHIPVFSPALTDGSLGDMIFFHSYKNPGLVLDIVE

SEQ ID NO: 23880 - protein, 115 aa, Homo sapiens
  Payload ID: 4773
  Gene Symbol: DHPS
  Gene Name: deoxyhypusine synthase
  ENSP ID: ENSP00000472096
VKWTPSKMIARLGKEINNPESVYYWAQKNHIPVFSPALTDGSLGDMIFFHSYKNPGLVLDIVEGARPDEAVSWGKIRVDAQPVKVYADASLVFPLLVAETFAQKMDAFMHEKNED

SEQ ID NO: 23881 - protein, 277 aa, Homo sapiens
  Payload ID: 4773
  Gene Symbol: DHPS
  Gene Name: deoxyhypusine synthase
  ENSP ID: ENSP00000472122
MEGSLEREAPAGALAAVLKHSSTLPPESTQVRGYDFNRGVNYRALLEAFGTTGFQATNFGRAVQQVNAMIEKKLEPLSQDEDQHADLTQSRRPLTSCTIFLGYTSNLISSGIRETIRYLVQHNMVDVLVTTAGGVEEDLIKCLAPTYLGEFSLRGKELRENGINRIGNLLVPNENYCKFEDWLMPILDQMVMEQNTEGVKWTPSKMIARLGKEINNPESVYYWAQKNHIPVFSPALTDGSLGDMIFFHSYKNPGLVLDIVEAERGRLRCLHQHSPGV

SEQ ID NO: 23882 - protein, 132 aa, Homo sapiens
  Payload ID: 4773
  Gene Symbol: DHPS
  Gene Name: deoxyhypusine synthase
  ENSP ID: ENSP00000472330
MEGSLEREAPAGALAAVLKHSSTLPPESTQVRGYDFNRGVNYRALLEAFGTTGFQATNFGRAVQQVNAMIEKKLEPLSQDEDQHADLTQSRRPLTSCTIFLGYTSNLISSGIRETIRYLVQHNMDRKPAGAQ

SEQ ID NO: 23883 - protein, 182 aa, Homo sapiens
  Payload ID: 4773
  Gene Symbol: DHPS
  Gene Name: deoxyhypusine synthase
  ENSP ID: ENSP00000472348
MLIEKKLEPLSQDEDQHADLTQSRRPLTSCTIFLGYTSNLISSGIRETIRYLVQHNMVDVLVTTAGGVEEDLIKCLAPTYLGEFSLRGKELRENGINRIGNLLVPNENYCKFEDWLMPILDQMVMEQNTEGVKWTPSKMIARLGKEINNPESVYYWAQKNHIPVFSPALTDGSLGDMIFFHS

SEQ ID NO: 23884 - protein, 370 aa, Homo sapiens [sequence omitted]

SEQ ID NO: 23885 - protein, 329 aa, Homo sapiens
  Payload ID: 4774
  Gene Symbol: DNTTIP1
  Gene Name: deoxynucleotidyltransferase, terminal, interacting protein 1
  Uniprot ID: Q9H147
  ENSP ID: ENSP00000361705
MGATGDAEQPRGPSGAERGGLELGDAGAAGQLVLTNPWNIMIKHRQVQRRGRRSQMTTSFTDPAISMDLLRAVLQPSINEEIQTVFNKYMKFFQKAALNVRDNVGEEVDAEQLIQEACRSCLEQAKLLFSDGEKVIPRLTHELPGIKRGRQAEEECAHRGSPLPKKRKGRPPGHILSSDRAAAGMVWKPKSCEPIRREGPKWDPARLNESTTFVLGSRANKALGMGGTRGRIYIKHPHLFKYAADPQDKHWLAEQHHMRATGGKMAYLLIEEDIRDLAASDDYRGCLDLKLEELKSFVLPSWMVEKMRKYMETLRTENEHRAVEAPPQT

SEQ ID NO: 23886 - protein, 145 aa, Homo sapiens
  Payload ID: 4774
  Gene Symbol: DNTTIP1
  Gene Name: deoxynucleotidyltransferase, terminal, interacting protein 1
  ENSP ID: ENSP00000392509
MIKHRQVQRRGRRSQMTTSFTDPAISMDLLRAVLQPSINEEIQTVFNKYMKFFQKAALNVRDNVGEEVDAEQLIQEACRSCLEQAKLLFSDGEKVIPRLTHELPGIKRGRQAEEECAHRGSPLPKKRKGRPPGHILSSDRAAAGM

SEQ ID NO: 23887 - protein, 150 aa, Homo sapiens
  Payload ID: 4774
  Gene Symbol: DNTTIP1
  Gene Name: deoxynucleotidyltransferase, terminal, interacting protein 1
  ENSP ID: ENSP00000395609
DAEQPRGPSGAERGGLELGDAGAAGQLVLTNPWNIMIKHRQVQRRGRRSQMTTSFTDPAISMDLLRAVLQPSINEEIQTVFNKYMKFFQKAALNVRDNVGEEVDAEQLIQEACRSCLEQVRGGSSYHGPIWYHGDEHPAASLPLWCGQEA

SEQ ID NO: 23888 - protein, 232 aa, Homo sapiens
  Payload ID: 4774
  Gene Symbol: DNTTIP1
  Gene Name: deoxynucleotidyltransferase, terminal, interacting protein 1
  ENSP ID: ENSP00000400573
  MOD_RES (1)..(1): Any amino acid
XQPSINEEIQTVFNKYMKFFQKAALNVRDNVGEEVDAEQLIQEACRSCLEQAKLLFSDGEKVIPRLTHELPGIKRGRQAEEECAHRGSPLPKKRKGRPPGHILSSDRAAAGMVWKPKSCEPIRREGPKWDPARLNESTTFVLGSRANKALGMGGTRGRIYIKHPHLFKAYLLIEEDIRDLAASDDYRGCLDLKLEELKSFVLPSWMVEKMRKYMETLRTENEHRAVEAPPQT

SEQ ID NO: 23889 - protein, 280 aa, Homo sapiens
  Payload ID: 4774
  Gene Symbol: DNTTIP1
  Gene Name: deoxynucleotidyltransferase, terminal, interacting protein 1
  ENSP ID: ENSP00000401024
  MOD_RES (1)..(1): Any amino acid
XRGGLELGDAGAAGQLVLTNPWNIMIKHRQVQRRGRRSQMTTSFTDPAISMDLLRAVLQPSINEEIQTVFNKYMKAKLLFSDGEKVIPRLTHELPGIKRGRQAEEECAHRGSPLPKKRKGRPPGHILSSDRAAAGMVWKPKSCEPIRREGPKWDPARLNESTTFVLGSRANKALGMGGTRGRIYIKHPHLFKYAADPQDKHWLAEQHHMRATGGKMAYLLIEEDIRDLAASDDYRGCLDLKLEELKSFVLPSWMVEKMRKYMETLRTENEHRAVEAPPQT

SEQ ID NO: 23890 - protein, 601 aa, Homo sapiens
  Payload ID: 4775
  Gene Symbol: DNTTIP2
  Gene Name: deoxynucleotidyltransferase, terminal, interacting protein 2
  ENSP ID: ENSP00000352137
MVVTRSARAKASIQAASAESSGQKSFAANGIQAHPESSTGSDARTTAESQTTGKQSLIPRTPKARKRKSRTTGSLPKGTEPSTDGETSEAESNYSVSEHHDTILRVTRRRQILIACSPVSSVRKKPKVTPTKESYTEEIVSEAESHVSGISRIVLPTEKTTGARRSKAKSLTDPSQESHTEAISDAETSSSDISFSGIATRRTRSMQRKLKAQTEKKDSKIVPGNEKQIVGTPVNSEDSDTRQTSHLQARSLSEINKPNFYNNDFDDDFSHRSSENILTVHEQANVESLKETKQNCKDLDEDANGITDEGKEINEKSSQLKNLSELQDTSLQQLVSQRHSTPQNKNAVSVHSNLNSEAVMKSLTQTFATVEVGRWNNNKKSPIKASDLTKFGDCGGSDDEEESTVISVSEDMNSEGNVDFECDTKLYTSAPNTSQGKDNSVLLVLSSDESQQSENSENEEDTLCFVENSGQRESLSGDTGSLSCDNALFVIDTTPGMSADKNFYLEEEDKASEVAIEEEKEEEEDEKSEEDSSDHDENEDEFSDEEDFLNSTKAKLFCRKPSLHLILKKTTVFHHIVNQSINFRKNAEKNDKKQQGMAGLV

SEQ ID NO: 23891 - protein, 756 aa, Homo sapiens
  Payload ID: 4775
  Gene Symbol: DNTTIP2
  Gene Name: deoxynucleotidyltransferase, terminal, interacting protein 2
  Uniprot ID: Q5QJE6
  ENSP ID: ENSP00000411010
MVVTRSARAKASIQAASAESSGQKSFAANGIQAHPESSTGSDARTTAESQTTGKQSLIPRTPKARKRKSRTTGSLPKGTEPSTDGETSEAESNYSVSEHHDTILRVTRRRQILIACSPVSSVRKKPKVTPTKESYTEEIVSEAESHVSGISRIVLPTEKTTGARRSKAKSLTDPSQESHTEAISDAETSSSDISFSGIATRRTRSMQRKLKAQTEKKDSKIVPGNEKQIVGTPVNSEDSDTRQTSHLQARSLSEINKPNFYNNDFDDDFSHRSSENILTVHEQANVESLKETKQNCKDLDEDANGITDEGKEINEKSSQLKNLSELQDTSLQQLVSQRHSTPQNKNAVSVHSNLNSEAVMKSLTQTFATVEVGRWNNNKKSPIKASDLTKFGDCGGSDDEEESTVISVSEDMNSEGNVDFECDTKLYTSAPNTSQGKDNSVLLVLSSDESQQSENSENEEDTLCFVENSGQRESLSGDTGSLSCDNALFVIDTTPGMSADKNFYLEEEDKASEVAIEEEKEEEEDEKSEEDSSDHDENEDEFSDEEDFLNSTKAKLLKLTSSSIDPGLSIKQLGGLYINFNADKLQSNKRTLTQIKEKKKNELLQKAVITPDFEKNHCVPPYSESKYQLQKKRRKERQKTAGDGWFGMKAPEMTNELKNDLKALKMRASMDPKRFYKKNDRDGFPKYFQIGTIVDNPADFYHSRIPKKQRKRTIVEELLADSEFRRYNRRKYSEIMAEKAANAAGKKFRKKKKFRN

SEQ ID NO: 23892 - protein, 161 aa, Homo sapiens
  Payload ID: 4775
  Gene Symbol: DNTTIP2
  Gene Name: deoxynucleotidyltransferase, terminal, interacting protein 2
  ENSP ID: ENSP00000434261
MVVTRSARAKASIQAASAESSGQKCVFSGLQSFAANGIQAHPESSTGSDARTTAESQTTGKQSLIPRTPKARKRKSRTTGSLPKGTEPSTDGETSEAESNYSVSEHHDTILRVTRRRQILIACSPVSSVRKKPKVTPTKESYTEEIVSEAESHVSGISRIV

SEQ ID NO: 23893 - protein, 282 aa, Homo sapiens [sequence omitted]

SEQ ID NO: 23894 - protein, 282 aa, Homo sapiens [sequence omitted]

SEQ ID NO: 23895 - protein, 86 aa, Homo sapiens
  Payload ID: 4776
  Gene Symbol: DNASE1
  Gene Name: deoxyribonuclease I
  ENSP ID: ENSP00000458467
MRGMKLLGALLALAALLQGAVSLKIAAFNIQTFGETKMSNATLVSYIVQILSRYDIALVQEVRDSHLTAVGKLLDNLNQWVTVAGS

SEQ ID NO: 23896 - protein, 90 aa, Homo sapiens
  Payload ID: 4776
  Gene Symbol: DNASE1
  Gene Name: deoxyribonuclease I
  ENSP ID: ENSP00000458959
  MOD_RES (1)..(1): Any amino acid
XHYVVSEPLGRNSYKERYLFVYRPDQVSAVDSYYYDDGCEPCGNDTFNREPAIVRFFSRFTGSVPHTTWLSPQRSGSLPLFPCMRPRGTQ

SEQ ID NO: 23897 - protein, 108 aa, Homo sapiens
  Payload ID: 4776
  Gene Symbol: DNASE1
  Gene Name: deoxyribonuclease I
  ENSP ID: ENSP00000459507
NREPAIVRFFSRFTEVREFAIVPLHAAPGDAVAEIDALYDVYLDVQEKWGLEDVMLMGDFNAGCSYVRPSQWSSIRLWTSPTFQWLIPDSADTTATPTHCAYDRLPMA

SEQ ID NO: 23898 - protein, 60 aa, Homo sapiens
  Payload ID: 4776
  Gene Symbol: DNASE1
  Gene Name: deoxyribonuclease I
  ENSP ID: ENSP00000459850
MRGMKLLGALLALAALLQGAVSLKIAAFNIQTFGETKMSNATLVSYIVQGCTRHLSLRGQ

SEQ ID NO: 23899 - protein, 72 aa, Homo sapiens
  Payload ID: 4776
  Gene Symbol: DNASE1
  Gene Name: deoxyribonuclease I
  ENSP ID: ENSP00000461129
SIRLWTSPTFQWLIPDSADTTATPTHCAYDRIVVAGMLLRGAVVPDSALPFNFQAAYGLSDQLVCVLPCTAT

SEQ ID NO: 23900 - protein, 65 aa, Homo sapiens
  Payload ID: 4776
  Gene Symbol: DNASE1
  Gene Name: deoxyribonuclease I
  ENSP ID: ENSP00000461153
  MOD_RES (1)..(1): Any amino acid
XTFQWLIPDSADTTATPTHCAYDRIVVAGMLLRGAVVPDSALPFNFQAAYGLSDQLVCVLPCTAT

SEQ ID NO: 23901 - protein, 75 aa, Homo sapiens
  Payload ID: 4776
  Gene Symbol: DNASE1
  Gene Name: deoxyribonuclease I
  ENSP ID: ENSP00000461527
  MOD_RES (1)..(1): Any amino acid
XRYLFVYRPDQVSAVDSYYYDDGCEPCGNDTFNREPAIVRFFSRFTGSVPHTTWLSPQRSGSLPLFPCMRPRGTQ

SEQ ID NO: 23902 - protein, 60 aa, Homo sapiens; identical to SEQ ID NO: 23898
  Payload ID: 4776
  Gene Symbol: DNASE1
  Gene Name: deoxyribonuclease I
  ENSP ID: ENSP00000461725

SEQ ID NO: 23903 - protein, 60 aa, Homo sapiens; identical to SEQ ID NO: 23898
  Payload ID: 4776
  Gene Symbol: DNASE1
  Gene Name: deoxyribonuclease I
  ENSP ID: ENSP00000461745

SEQ ID NO: 23904 - protein, 153 aa, Homo sapiens
  Payload ID: 4777
  Gene Symbol: DNASE2B
  Gene Name: deoxyribonuclease II beta
  Uniprot ID: Q8WZ79
  ENSP ID: ENSP00000359696
MPQLCTRASSSEIPGRLLTTLQSAQGQKFLHFAKSDSFLDDIFAAWMAQRLKTHLLTETWQRKRQELPSNCSLPYHVYNIKAIKLSRHSYFSSYQDHAKWCISQKGTKNRWTCIGDLNRSPHQAFRSGGFICTQNWQIYQAFQGLVLYYESCK

SEQ ID NO: 23905 - protein, 361 aa, Homo sapiens
  Payload ID: 4777
  Gene Symbol: DNASE2B
  Gene Name: deoxyribonuclease II beta
  Uniprot ID: Q8WZ79
  ENSP ID: ENSP00000359699
MKQKMMARLLRTSFALLFLGLFGVLGAATISCRNEEGKAVDWFTFYKLPKRQNKESGETGLEYLYLDSTTRSWRKSEQLMNDTKSVLGRTLQQLYEAYASKSNNTAYLIYNDGVPKPVNYSRKYGHTKGLLLWNRVQGFWLIHSIPQFPPIPEEGYDYPPTGRRNGQSGICITFKYNQYEAIDSQLLVCNPNVYSCSIPATFHQELIHMPQLCTRASSSEIPGRLLTTLQSAQGQKFLHFAKSDSFLDDIFAAWMAQRLKTHLLTETWQRKRQELPSNCSLPYHVYNIKAIKLSRHSYFSSYQDHAKWCISQKGTKNRWTCIGDLNRSPHQAFRSGGFICTQNWQIYQAFQGLVLYYESCK

SEQ ID NO: 23906 - protein, 360 aa, Homo sapiens
  Payload ID: 4778
  Gene Symbol: DNASE2
  Gene Name: deoxyribonuclease II, lysosomal
  Uniprot ID: O00115
  ENSP ID: ENSP00000222219
MIPLLLAALLCVPAGALTCYGDSGQPVDWFVVYKLPALRGSGEAAQRGLQYKYLDESSGGWRDGRALINSPEGAVGRSLQPLYRSNTSQLAFLLYNDQPPQPSKAQDSSMRGHTKGVLLLDHDGGFWLVHSVPNFPPPASSAAYSWPHSACTYGQTLLCVSFPFAQFSKMGKQLTYTYPWVYNYQLEGIFAQEFPDLENVVKGHHVSQEPWNSSITLTSQAGAVFQSFAKFSKFGDDLYSGWLAAALGTNLQVQFWHKTVGILPSNCSDIWQVLNVNQIAFPGPAGPSFNSTEDHSKWCVSPKGPWTCVGDMNRNQGEEQRGGGTLCAQLPALWKAFQPLVKNYQPCNGMARKPSRAYKI

SEQ ID NO: 23907 - protein, 218 aa, Homo sapiens
  Payload ID: 4778
  Gene Symbol: DNASE2
  Gene Name: deoxyribonuclease II, lysosomal
  ENSP ID: ENSP00000466912
MIPLLLAALLCVPAGALTCYGDSGQPVDWFVVYKLPALRGSGEAAQRGLQYKYLDESSGGWRDGRALINSPEGAVGRSLQPLYRSNTSQLAFLLYNDQPPQPSKAQDSSMRGHTKGKQLTYTYPWVYNYQLEGIFAQEFPDLENVVKGHHVSQEPWNSSITLTSQAGAVFQSFAKFSKFGDDLYSGWLAAALGTNLQVQFWHKTVGILPSNCSDIWQV

SEQ ID NO: 23908 - protein, 302 aa, Homo sapiens
  Payload ID: 4779
  Gene Symbol: DNASE1L1
  Gene Name: deoxyribonuclease I-like 1
  Uniprot ID: P49184
  ENSP ID: ENSP00000014935
MHYPTALLFLILANGAQAFRICAFNAQRLTLAKVAREQVMDTLVRILARCDIMVLQEVVDSSGSAIPLLLRELNRFDGSGPYSTLSSPQLGRSTYMETYVYFYRSHKTQVLSSYVYNDEDDVFAREPFVAQFSLPSNVLPSLVLVPLHTTPKAVEKELNALYDVFLEVSQHWQSKDVILLGDFNADCASLTKKRLDKLELRTEPGFHWVIADGEDTTVRASTHCTYDRVVLHGERCRSLLHTAAAFDFPTSFQLTEEEALNISDHYPVEVELKLSQAHSVQPLSLTVLLLLSLLSPQLCPAA

SEQ ID NO: 23909 - protein, 302 aa, Homo sapiens; identical to SEQ ID NO: 23908
  Payload ID: 4779
  Gene Symbol: DNASE1L1
  Gene Name: deoxyribonuclease I-like 1
  Uniprot ID: P49184
  ENSP ID: ENSP00000309168

SEQ ID NO: 23910 - protein, 302 aa, Homo sapiens; identical to SEQ ID NO: 23908
  Payload ID: 4779
  Gene Symbol: DNASE1L1
  Gene Name: deoxyribonuclease I-like 1
  Uniprot ID: P49184
  ENSP ID: ENSP00000358822

SEQ ID NO: 23911 - protein, 302 aa, Homo sapiens; identical to SEQ ID NO: 23908
  Payload ID: 4779
  Gene Symbol: DNASE1L1
  Gene Name: deoxyribonuclease I-like 1
  Uniprot ID: P49184
  ENSP ID: ENSP00000358823

SEQ ID NO: 23912 - protein, 302 aa, Homo sapiens; identical to SEQ ID NO: 23908
  Payload ID: 4779
  Gene Symbol: DNASE1L1
  Gene Name: deoxyribonuclease I-like 1
  Uniprot ID: P49184
  ENSP ID: ENSP00000358824

SEQ ID NO: 23913 - protein, 302 aa, Homo sapiens; identical to SEQ ID NO: 23908
  Payload ID: 4779
  Gene Symbol: DNASE1L1
  Gene Name: deoxyribonuclease I-like 1
  Uniprot ID: P49184
  ENSP ID: ENSP00000377255

SEQ ID NO: 23914 - protein, 103 aa, Homo sapiens
  Payload ID: 4779
  Gene Symbol: DNASE1L1
  Gene Name: deoxyribonuclease I-like 1
  ENSP ID: ENSP00000393000
MHYPTALLFLILANGAQAFRICAFNAQRLTLAKVAREQVMDTLVRILARCDIMVLQEVVDSSGSAIPLLLRELNRFDGSGPYSTLSSPQLGRSTYMETYVYFY

SEQ ID NO: 23915 - protein, 208 aa, Homo sapiens
  Payload ID: 4779
  Gene Symbol: DNASE1L1
  Gene Name: deoxyribonuclease I-like 1
  ENSP ID: ENSP00000393346
MHYPTALLFLILANGAQAFRICAFNAQRLTLAKVAREQVMDTLVRILARCDIMVLQEVVDSSGSAIPLLLRELNRFDGSGPYSTLSSPQLGRSTYMETYVYFYRSHKTQVLSSYVYNDEDDVFAREPFVAQFSLPSNVLPSLVLVPLHTTPKAVEKELNALYDVFLEVSQHWQSKDVILLGDFNADCASLTKKRLDKLELRTEPGFHW

SEQ ID NO: 23916 - protein, 85 aa, Homo sapiens
  Payload ID: 4779
  Gene Symbol: DNASE1L1
  Gene Name: deoxyribonuclease I-like 1
  ENSP ID: ENSP00000395591
MHYPTALLFLILANGAQAFRICAFNAQRLTLAKVAREQVMDTLVRALNISDHYPVEVELKLSQAHSVQPLSLTVLLLLSLLSPQL

SEQ ID NO: 23917 - protein, 26 aa, Homo sapiens
  Payload ID: 4779
  Gene Symbol: DNASE1L1
  Gene Name: deoxyribonuclease I-like 1
  ENSP ID: ENSP00000410281
MHYPTALLFLILANGAQAFRICAFNA

SEQ ID NO: 23918 - protein, 62 aa, Homo sapiens
  Payload ID: 4779
  Gene Symbol: DNASE1L1
  Gene Name: deoxyribonuclease I-like 1
  ENSP ID: ENSP00000416881
MHYPTALLFLILANGAQAFRICAFNAQRLTLAKVAREQVMDTLVRDVILLGDFNADCASLTK

SEQ ID NO: 23919 - protein, 299 aa, Homo sapiens
  Payload ID: 4780
  Gene Symbol: DNASE1L2
  Gene Name: deoxyribonuclease I-like 2
  Uniprot ID: Q92874
  ENSP ID: ENSP00000316938
MGGPRALLAALWALEAAGTAALRIGAFNIQSFGDSKVSDPACGSIIAKILAGYDLALVQEVRDPDLSAVSALMEQINSVSEHEYSFVSSQPLGRDQYKEMYLFVYRKDAVSVVDTYLYPDPEDVFSREPFVVKFSAPGTGERAPPLPSRRALTPPPLPAAAQNLVLIPLHAAPHQAVAEIDALYDVYLDVIDKWGTDDMLFLGDFNADCSYVRAQDWAAIRLRSSEVFKWLIPDSADTTVGNSDCAYDRIVACGARLRRSLKPQSATVHDFQEEFGLDQTQALAISDHFPVEVTLKFHR

SEQ ID NO: 23920 - protein, 278 aa, Homo sapiens
  Payload ID: 4780
  Gene Symbol: DNASE1L2
  Gene Name: deoxyribonuclease I-like 2
  Uniprot ID: Q92874
  ENSP ID: ENSP00000371874
MGGPRALLAALWALEAAGTAALRIGAFNIQSFGDSKVSDPACGSIIAKILAGYDLALVQEVRDPDLSAVSALMEQINSVSEHEYSFVSSQPLGRDQYKEMYLFVYRKDAVSVVDTYLYPDPEDVFSREPFVVKFSAPGTAQNLVLIPLHAAPHQAVAEIDALYDVYLDVIDKWGTDDMLFLGDFNADCSYVRAQDWAAIRLRSSEVFKWLIPDSADTTVGNSDCAYDRIVACGARLRRSLKPQSATVHDFQEEFGLDQTQALAISDHFPVEVTLKFHR

SEQ ID NO: 23921 - protein, 299 aa, Homo sapiens; identical to SEQ ID NO: 23919
  Payload ID: 4780
  Gene Symbol: DNASE1L2
  Gene Name: deoxyribonuclease I-like 2
  Uniprot ID: Q92874
  ENSP ID: ENSP00000454562

SEQ ID NO: 23922 - protein, 299 aa, Homo sapiens; identical to SEQ ID NO: 23919
  Payload ID: 4780
  Gene Symbol: DNASE1L2
  Gene Name: deoxyribonuclease I-like 2
  Uniprot ID: Q92874
  ENSP ID: ENSP00000455358

SEQ ID NO: 23923 - protein, 254 aa, Homo sapiens
  Payload ID: 4780
  Gene Symbol: DNASE1L2
  Gene Name: deoxyribonuclease I-like 2
  ENSP ID: ENSP00000455478
PRALLAALWALEAAGTAALRIGAFNIQSFGDSKVSDPACGSIIAKILAGYDLALVQEVRDPDLSAVSALMEQINSVSEHEYSFVSSQPLGRDQYKEMYLFVYRKDAVSVVDTYLYPDPEDVFSREPFVVKFSAPGTGERAPPLPSRRALTPPPLPAAAQNLVLIPLHAAPHQAVAEIDALYDVYLDVIDKWGTDDWAAIRLRSSEVFKWLIPDSADTTVGNSDCAYDRIVACGARLRRSLKPQSATVHDFQEEF

SEQ ID NO: 23924 - protein, 278 aa, Homo sapiens; identical to SEQ ID NO: 23920
  Payload ID: 4780
  Gene Symbol: DNASE1L2
  Gene Name: deoxyribonuclease I-like 2
  Uniprot ID: Q92874
  ENSP ID: ENSP00000482627

SEQ ID NO: 23925 - protein, 305 aa, Homo sapiens
  Payload ID: 4781
  Gene Symbol: DNASE1L3
  Gene Name: deoxyribonuclease I-like 3
  Uniprot ID: Q13609
  ENSP ID: ENSP00000378053
MSRELAPLLLLLLSIHSALAMRICSFNVRSFGESKQEDKNAMDVIVKVIKRCDIILVMEIKDSNNRICPILMEKLNRNSRRGITYNYVISSRLGRNTYKEQYAFLYKEKLVSVKRSYHYHDYQDGDADVFSREPFVVWFQSPHTAVKDFVIIPLHTTPETSVKEIDELVEVYTDVKHRWKAENFIFMGDFNAGCSYVPKKAWKNIRLRTDPRFVWLIGDQEDTTVKKSTNCAYDRIVLRGQEIVSSVVPKSNSVFDFQKAYKLTEEEALDVSDHFPVEFKLQSSRAFTNSKKSVTLRKKTKSKRS

SEQ ID NO: 23926 - protein, 288 aa, Homo sapiens
  Payload ID: 4781
  Gene Symbol: DNASE1L3
  Gene Name: deoxyribonuclease I-like 3
  ENSP ID: ENSP00000417047
MSRELAPLLLLLLSIHSALAMRICSFNVRSFGESKQEDKNAMDVIVKVIKRCDIILVMEIKDSNNRICPILMEKLNRNSRRGITYNYVISSRLGRNTYKEQYAFLYKEKLVSVKRSYHYHDYQDGDADVFSREPFVVWFQSPHTAVKDFVIIPLHTTPETSVKEIDELVEVYTDVKHRWKAENFIFMGDFNAGCSYVPKKAWKNIRLRTDPRFVWLIGDQEDTTVKKSTNCAYDRIVLRGQEIVSSVVPKSNSVFDFQKAYKLTEEEVRLPSCLSMPLSWKDELAWAT

SEQ ID NO: 23927 - protein, 137 aa, Homo sapiens
  Payload ID: 4781
  Gene Symbol: DNASE1L3
  Gene Name: deoxyribonuclease I-like 3
  ENSP ID: ENSP00000417976
ADVFSREPFVVWFQSPHTAVKDFVIIPLHTTPETSVKEIDELVEVYTDVKHRWKAENFIFMGDFNAGCSYVPKKAWKNIRLRTDPRFVWLIGDQEDTTVKKSTNCAYDRPWMSATTFQLNLNYSLQGPSPTAKNLSL

SEQ ID NO: 23928 - protein, 157 aa, Homo sapiens
  Payload ID: 4781
  Gene Symbol: DNASE1L3
  Gene Name: deoxyribonuclease I-like 3
  ENSP ID: ENSP00000418113
MSRELAPLLLLLLSIHSALAMRICSFNVRSFGESKQEDKNAMDVIVKVIKRCDIILVMEIKDSNNRICPILMEKLNRNSRRGITYNYVISSRLGRNTYKEQYAFLYKEKLVSVKRSYHYHDYQDGDADVFSREPFVVWFQSPHTAVKDFVIIPLHTT

SEQ ID NO: 23929 - protein, 100 aa, Homo sapiens
  Payload ID: 4781
  Gene Symbol: DNASE1L3
  Gene Name: deoxyribonuclease I-like 3
  ENSP ID: ENSP00000418509
MSRELAPLLLLLLSIHSALAMRICSFNVRSFGESKQEDKNAMDVIVKVIKRCDIILVMEIKDSNNRICPILMEKLNRNSRRGITYNYVISSRLGRNTYKE

SEQ ID NO: 23930 - protein, 275 aa, Homo sapiens
  Payload ID: 4781
  Gene Symbol: DNASE1L3
  Gene Name: deoxyribonuclease I-like 3
  Uniprot ID: Q13609
  ENSP ID: ENSP00000419052
MSRELAPLLLLLLSIHSALAMRICSFNVRSFGESKQEDKNAMDVIVKVIKRCDIILVMEIKDSNNRICPILMEKLNREKLVSVKRSYHYHDYQDGDADVFSREPFVVWFQSPHTAVKDFVIIPLHTTPETSVKEIDELVEVYTDVKHRWKAENFIFMGDFNAGCSYVPKKAWKNIRLRTDPRFVWLIGDQEDTTVKKSTNCAYDRIVLRGQEIVSSVVPKSNSVFDFQKAYKLTEEEALDVSDHFPVEFKLQSSRAFTNSKKSVTLRKKTKSKRS

SEQ ID NO: 23931 - protein, 318 aa, Homo sapiens
  Payload ID: 4782
  Gene Symbol: DERA
  Gene Name: deoxyribose-phosphate aldolase (putative)
  Uniprot ID: Q9Y315
  ENSP ID: ENSP00000416583
MSAHNRGTELDLSWISKIQVNHPAVLRRAEQIQARRTVKKEWQAAWLLKAVTFIDLTTLSGDDTSSNIQRLCYKAKYPIREDLLKALNMHDKGITTAAVCVYPARVCDAVKALKAAGCNIPVASVAAGFPAGQTHLKTRLEEIRLAVEDGATEIDVVINRSLVLTGQWEALYDEIRQFRKACGEAHLKTILATGELGTLTNVYKASMIAMMAGSDFIKTSTGKETVNATFPVAIVMLRAIRDFFWKTGNKIGFKPAGGIRSAKDSLAWLSLVKEELGDEWLKPELFRIGASTLLSDIERQIYHHVTGRYAAYHDLPMS

SEQ ID NO: 23932 - protein, 230 aa, Homo sapiens
  Payload ID: 4782
  Gene Symbol: DERA
  Gene Name: deoxyribose-phosphate aldolase (putative)
  ENSP ID: ENSP00000431757
MHDKGITTAAVCVYPARVCDAVKALKAAGCNIPVASVAAGFPAGQTHLKTRLEEIRLAVEDGATEIDVVINRSLVLTGQWEALYDEIRQFRKACGEAHLKTILATGELGTLTNVYKASMIAMMAGSDFIKTSTGKETVNATFPVAIVMLRAIRDFFWKTGNKIGFKPAGGIRSAKDSLAWLSLVKEELGDEWLKPELFRIGASTLLSDIERQIYHHVTGRYAAYHDLPMS

SEQ ID NO: 23933 - protein, 98 aa, Homo sapiens
  Payload ID: 4782
  Gene Symbol: DERA
  Gene Name: deoxyribose-phosphate aldolase (putative)
  ENSP ID: ENSP00000432633
MHDKGITTAAVCVYPARVCDAVKALKAAGCNIPVASVAAGFPAGQTHLKTRLEEIRLAVEDGATEIDVVINRSLVLTGQWEALYDEIRQFRKACGEAH

SEQ ID NO: 23934 - protein, 236 aa, Homo sapiens
  Payload ID: 4782
  Gene Symbol: DERA
  Gene Name: deoxyribose-phosphate aldolase (putative)
  ENSP ID: ENSP00000433051
MSAHNRGTELARWLENPTTQKTKPKTNNPQADLSWISKIQVNHPAVLRRAEQIQARRTVKKEWQAAWLLKAVTFIDLTTLSGDDTSSNIQRLCYKAKYPIREDLLKALNMHDKGITTAAVCVYPARVCDAVKALKAAGCNIPVASVAAGFPAGQTHLKTRLEEIRLAVEDGATEIDVVINRSLVLTGQWEALYDEIRQFRKACGEAHLKTILATGELGTLTNVYKASMIAMMAGSD

SEQ ID NO: 23935 - protein, 66 aa, Homo sapiens
  Payload ID: 4782
  Gene Symbol: DERA
  Gene Name: deoxyribose-phosphate aldolase (putative)
  ENSP ID: ENSP00000433801
MSAHNRGTELDLSWISKIQVNHPAVLRRAEQIQARRTVKKEWQVMIHLPTFKGSVIKPNTQSGKIS

SEQ ID NO: 23936 - protein, 163 aa, Homo sapiens
  Payload ID: 4782
  Gene Symbol: DERA
  Gene Name: deoxyribose-phosphate aldolase (putative)
  ENSP ID: ENSP00000434973
MHDKGITTAAVCVYPARVCDAVKALKAAGCNIPVASVAAGFPAGQTHLKTRLEEIRLAVEDGATEIDVVINRSLVLTGQWEALYDEIRQFRKACGEAHLKTILATGELGTLTNVYKASMIAMMAGSDFIKTSTGKETVNATFPVAIVMLRAIRDFFWKTGNKV

SEQ ID NO: 23937 - protein, 60 aa, Homo sapiens
  Payload ID: 4782
  Gene Symbol: DERA
  Gene Name: deoxyribose-phosphate aldolase (putative)
  ENSP ID: ENSP00000435683
MSAHNRGTELDLSWISKIQVNHPAVLRRAEQIQARRTVKKEWQALLQPPFVFIPPGCVML

SEQ ID NO: 23938 - protein, 275 aa, Homo sapiens
  Payload ID: 4782
  Gene Symbol: DERA
  Gene Name: deoxyribose-phosphate aldolase (putative)
  ENSP ID: ENSP00000436999
MSAHNRGTELDLSWISKIQVNHPAVLRRAEQIQARRTVKKEWQAAWLLKAVTFIDLTTLSGDDTSSNIQRLCYKAKYPIREDLLKALNMHDKGITTAAVCVYPARVCDAVKALKAAGCNIPVASVAAGFPAGQTHLKTRLEEIRLAVEDGATEIDVVINRSLVLTGQWEGSDFIKTSTGKETVNATFPVAIVMLRAIRDFFWKTGNKIGFKPAGGIRSAKDSLAWLSLVKEELGDEWLKPELFRIGASTLLSDIERQIYHHVTGRYAAYHDLPMS

SEQ ID NO: 23939 - protein, 212 aa, Homo sapiens
  Payload ID: 4783
  Gene Symbol: DTYMK
  Gene Name: deoxythymidylate kinase (thymidylate kinase)
  Uniprot ID: P23919
  ENSP ID: ENSP00000304802
MAARRGALIVLEGVDRAGKSTQSRKLVEALCAAGHRAELLRFPERSTEIGKLLSSYLQKKSDVEDHSVHLLFSANRWEQVPLIKEKLSQGVTLVVDRYAFSGVAFTGAKENFSLDWCKQPDVGLPKPDLVLFLQLQLADAAKRGAFGHERYENGAFQERALRCFHQLMKDTTLNWKMVDASKSIEAVHEDIRVLSEDAIRTATEKPLGELWK

SEQ ID NO: 23940 - protein, 83 aa, Homo sapiens
  Payload ID: 4783
  Gene Symbol: DTYMK
  Gene Name: deoxythymidylate kinase (thymidylate kinase)
  ENSP ID: ENSP00000383581
MAARRGALIVLEGVDRAGKSTQSRKLVEALCAAGHRAELLRFPERSTEIGKLLSSYLQKKSDVEDHSVHLLFSANRWEQVIFP

SEQ ID NO: 23941 - protein, 192 aa, Homo sapiens
  Payload ID: 4783
  Gene Symbol: DTYMK
  Gene Name: deoxythymidylate kinase (thymidylate kinase)
  ENSP ID: ENSP00000387379
  MOD_RES (1)..(1): Any amino acid
XRSTEIGKLLSSYLQKKSDVEDHSVHLLFSANRWEQVFILVAQTGVQWGDLGSLQPTPRRFKRFSCLSLSSSCDHRPLIKEKLSQGVTLVVDRYAFSGVAFTGAKENFSLDWCKQPDVGLPKPDLVLFLQLQLADAAKRGAFGHERYENGAFQERALRCFHQLMKDTTLNWKMVDASKSIEAVHEDIRVLSE

SEQ ID NO: 23942 - protein, 170 aa, Homo sapiens
  Payload ID: 4783
  Gene Symbol: DTYMK
  Gene Name: deoxythymidylate kinase (thymidylate kinase)
  ENSP ID: ENSP00000408939
  MOD_RES (1)..(1): Any amino acid
XKLVEALCAAGHRAELLRFPERSTEIGKLLSSYLQKKSDVEDHSVHLLFSANRWEQVRFPLHSTLNVDNFSLDWCKQPDVGLPKPDLVLFLQLQLADAAKRGAFGHERYENGAFQERALRCFHQLMKDTTLNWKMVDASKSIEAVHEDIRVLSEDAIRTATEKPLGELWK

SEQ ID NO: 23943 - protein, 101 aa, Homo sapiens
  Payload ID: 4783
  Gene Symbol: DTYMK
  Gene Name: deoxythymidylate kinase (thymidylate kinase)
  ENSP ID: ENSP00000410647
  MOD_RES (1)..(1): Any amino acid
XDRAGKSTQSRKLVEALCAAGHRAELLRFPERSTEIGKLLSSYLQKKSDVEDHSVHLLFSANRWEQVQGLCVMQAECSAQSQLTAASTSRVQVIFPPQPPK

SEQ ID NO: 23944 - protein, 252 aa, Homo sapiens
  Payload ID: 4784
  Gene Symbol: DUT
  Gene Name: deoxyuridine triphosphatase
  Uniprot ID: P33316
  ENSP ID: ENSP00000370376
MTPLCPRPALCYHFLTSLLRSAMQNARGARQRAEAAVLSGPGPPLGRAAQHGIPRPLSSAGRLSQGCRGASTVGAAGWKGELPKAGGSPAPGPETPAISPSKRARPAEVGGMQLRFARLSEHATAPTRGSARAAGYDLYSAYDYTIPPMEKAVVKTDIQIALPSGCYGRVAPRSGLAAKHFIDVGAGVIDEDYRGNVGVVLFNFGKEKFEVKKGDRIAQLICERIFYPEIEEVQALDDTERGSGGFGSTGKN

SEQ ID NO: 23945 - protein, 164 aa, Homo sapiens
  Payload ID: 4784
  Gene Symbol: DUT
  Gene Name: deoxyuridine triphosphatase
  Uniprot ID: P33316
  ENSP ID: ENSP00000405160
MPCSEETPAISPSKRARPAEVGGMQLRFARLSEHATAPTRGSARAAGYDLYSAYDYTIPPMEKAVVKTDIQIALPSGCYGRVAPRSGLAAKHFIDVGAGVIDEDYRGNVGVVLFNFGKEKFEVKKGDRIAQLICERIFYPEIEEVQALDDTERGSGGFGSTGKN

SEQ ID NO: 23946 - protein, 221 aa, Homo sapiens
  Payload ID: 4784
  Gene Symbol: DUT
  Gene Name: deoxyuridine triphosphatase
  ENSP ID: ENSP00000452749
MTPLCPRPALCYHFLTSLLRSAMQNARGARQRAEAAVLSGPGPPLGRAAQHGIPRPLSSAGRLSQGCRGAKTPAISPSKRARPAEVGGMQLRFARLSEHATAPTRGSARAAGYDLYSAYDYTIPPMEKAVVKTDIQIALPSGCYGRVAPRSGLAAKHFIDVGAGVIDEDYRGNVGVVLFNFGKEKFEVKKGDRIAQLICERIFYPEIEEVQALDDTERGSG

SEQ ID NO: 23947 - protein, 226 aa, Homo sapiens
  Payload ID: 4784
  Gene Symbol: DUT
  Gene Name: deoxyuridine triphosphatase
  ENSP ID: ENSP00000452814
MTPLCPRPALCYHFLTSLLRSAMQNARGARQRAEAAVLSGPGPPLGRAAQHGIPRPLSSAGRLSQGCRGASTVGAAGWKGELPKAGGSPAPGPETPAISPSKRARPAEVGGMQLRFARLSEHATAPTRGSARAAGYDLYSAYDYTIPPMEKAVVKTDIQIALPSGCYGRVAPRSGLAAKHFIDVGAGVIDEDYRGNVGVVLFNFGKEKFEGYGECVSNVSNKLFFL

SEQ ID NO: 23948 - protein, 133 aa, Homo sapiens
  Payload ID: 4784
  Gene Symbol: DUT
  Gene Name: deoxyuridine triphosphatase
  ENSP ID: ENSP00000453667
MAAGGAAPETPAISPSKRARPAEVGGMQLRFARLSEHATAPTRGSARAAGYDLYSAYDYTIPPMEKAVVKTDIQIALPSGCYGRVAPRSGLAAKHFIDVGAGVIDEDYRGNVGVVLFNFGKEKFEDRIWRMCQ

SEQ ID NO: 23949 - protein, 107 aa, Homo sapiens
  Payload ID: 4784
  Gene Symbol: DUT
  Gene Name: deoxyuridine triphosphatase
  ENSP ID: ENSP00000453683
MLCSIEKPSAYDYTIPPMEKAVVKTDIQIALPSGCYGRVAPRSGLAAKHFIDVGAGVIDEDYRGNVGVVLFNFGKEKFEVKKGDRIAQLICERIFYPEIEEVQALDD

SEQ ID NO: 23950 - protein, 141 aa, Homo sapiens
  Payload ID: 4784
  Gene Symbol: DUT
  Gene Name: deoxyuridine triphosphatase
  ENSP ID: ENSP00000453717
MQLRFARLSEHATAPTRGSARAAGYDLYSAYDYTIPPMEKAVVKTDIQIALPSGCYGRVAPRSGLAAKHFIDVGAGVIDEDYRGNVGVVLFNFGKEKFEVKKGDRIAQLICERIFYPEIEEVQALDDTERGSGGFGSTGKN

SEQ ID NO: 23951 - protein, 143 aa, Homo sapiens
  Payload ID: 4784
  Gene Symbol: DUT
  Gene Name: deoxyuridine triphosphatase
  ENSP ID: ENSP00000454041
MPCSEETPAISPSKRARPAEVGGMQLRFARLSEHATAPTRGSARAAGYDLYSAYDYTIPPMEKAVVKTDIQIALPSGCYGRVAPRSGLAAKHFIDVGAGVIDEDYRGNVGVVLFNFGKEKFEGMLNIYIHIILVNFQSHVCVN

SEQ ID NO: 23952 - protein, 167 aa, Homo sapiens
  Payload ID: 4784
  Gene Symbol: DUT
  Gene Name: deoxyuridine triphosphatase
  ENSP ID: ENSP00000454183
MAAGGAAPETPAISPSKRARPAEVGGMQLRFARLSEHATAPTRGSARAAGYDLYSAYDYTIPPMEKAVVKTDIQIALPSGCYGRVAPRSGLAAKHFIDVGAGVIDEDYRGNVGVVLFNFGKEKFEVKKGDRIAQLICERIFYPEIEEVQALDDTERGSGGFGSTGKN

SEQ ID NO: 23953 - protein, 527 aa, Homo sapiens
  Payload ID: 4785
  Gene Symbol: DEPDC1
  Gene Name: DEP domain containing 1
  Uniprot ID: Q5TB30
  ENSP ID: ENSP00000360005
MESQGVPPGPYRATKLWNEVTTSFRAGMPLRKHRQHFKKYGNCFTAGEAVDWLYDLLRNNSNFGPEVTRQQTIQLLRKFLKNHVIEDIKGRWGSENVDDNNQLFRFPATSPLKTLPRRYPELRKNNIENFSKDKDSIFKLRNLSRRTPKRHGLHLSQENGEKIKHEIINEDQENAIDNRELSQEDVEEVWRYVILIYLQTILGVPSLEEVINPKQVIPQYIMYNMANTSKRGVVILQNKSDDLPHWVLSAMKCLANWPRSNDMNNPTYVGFERDVFRTIADYFLDLPEPLLTFEYYELFVNILGLLQPHLERVAIDALQLCCLLLPPPNRRKLQLLMRMISRMSQNVDMPKLHDAMGTRSLMIHTFSRCVLCCAEEVDLDELLAGRLVSFLMDHHQEILQVPSYLQTAVEKHLDYLKKGHIENPGDGLFAPLPTYSYCKQISAQEFDEQKVSTSQAAIAELLENIIKNRSLPLKEKRKKLKQFQKEYPLIYQKRFPTTESEAALFGDKPTIKQPMLILRKPKFRSLR

SEQ ID NO: 23954 - protein, 811 aa, Homo sapiens
  Payload ID: 4785
  Gene Symbol: DEPDC1
  Gene Name: DEP domain containing 1
  Uniprot ID: Q5TB30
  ENSP ID: ENSP00000412292
MESQGVPPGPYRATKLWNEVTTSFRAGMPLRKHRQHFKKYGNCFTAGEAVDWLYDLLRNNSNFGPEVTRQQTIQLLRKFLKNHVIEDIKGRWGSENVDDNNQLFRFPATSPLKTLPRRYPELRKNNIENFSKDKDSIFKLRNLSRRTPKRHGLHLSQENGEKIKHEIINEDQENAIDNRELSQEDVEEVWRYVILIYLQTILGVPSLEEVINPKQVIPQYIMYNMANTSKRGVVILQNKSDDLPHWVLSAMKCLANWPRSNDMNNPTYVGFERDVFRTIADYFLDLPEPLLTFEYYELFVNILVVCGYITVSDRSSGIHKIQDDPQSSKFLHLNNLNSFKSTECLLLSLLHREKNKEESDSTERLQISNPGFQERCAKKMQLVNLRNRRVSANDIMGGSCHNLIGLSNMHDLSSNSKPRCCSLEGIVDVPGNSSKEASSVFHQSFPNIEGQNNKLFLESKPKQEFLLNLHSEENIQKPFSAGFKRTSTLTVQDQEELCNGKCKSKQLCRSQSLLLRSSTRRNSYINTPVAEIIMKPNVGQGSTSVQTAMESELGESSATINKRLCKSTIELSENSLLPASSMLTGTQSLLQPHLERVAIDALQLCCLLLPPPNRRKLQLLMRMISRMSQNVDMPKLHDAMGTRSLMIHTFSRCVLCCAEEVDLDELLAGRLVSFLMDHHQEILQVPSYLQTAVEKHLDYLKKGHIENPGDGLFAPLPTYSYCKQISAQEFDEQKVSTSQAAIAELLENIIKNRSLPLKEKRKKLKQFQKEYPLIYQKRFPTTESEAALFGDKPTIKQPMLILRKPKFRSLR

SEQ ID NO: 23955 - protein, 34 aa, Homo sapiens
  Payload ID: 4785
  Gene Symbol: DEPDC1
  Gene Name: DEP domain containing 1
  ENSP ID: ENSP00000431477
MYNMANTSKRGVVILQNKSDDLPHWVLSAMKCLA

SEQ ID NO: 23956 - protein, 308 aa, Homo sapiens
  Payload ID: 4785
  Gene Symbol: DEPDC1
  Gene Name: DEP domain containing 1
  ENSP ID: ENSP00000436464
  MOD_RES (1)..(1): Any amino acid
XTIQLLRKFLKNHVIEDIKGRWGSENVDDNNQLFRFPATSPLKTLPRRTPKRHGLHLSQENGEKIKHEIINEDQENAIDNRELSQEDVEEVWRYVILIYLQTILGVPSLEEVINPKQVIPQYIMYNMANTSKRGVVILQNKSDDLPHWVLSAMKCLANWPRSNDMNNPTYVGFERDVFRTIADYFLDLPEPLLTFEYYELFVNILGNFKDFRSSIPVVCGYITVSDRSSGIHKIQDDPQSSKFLHLNNLNSFKSTECLLLSLLHREKNKEESDSTERLQISNPGFQERCAKKMQLVNLRNRRACCNLI

SEQ ID NO: 23957 - protein, 529 aa, Homo sapiens
  Payload ID: 4786
  Gene Symbol: DEPDC1B
  Gene Name: DEP domain containing 1B
  Uniprot ID: Q8WUY9
  ENSP ID: ENSP00000265036
MEHRIVGPGPYRATRLWNETVELFRAKMPLRKHRCRFKSYEHCFTAAEAVDWLHELLRCSQNFGPEVTRKQTVQLLKKFLKNHVIEDIKGKWGEEDFEDNRHLYRFPPSSPLKPYPKKPPNQKDVIKFPEWNDLPPGTSQENIPVRPVVMNSEMWYKRHSIAIGEVPACRLVHRRQLTEANVEEIWKSMTLSYLQKILGLDSLEEVLDVKLVNSKFIIHNVYSVSKQGVVILDDKSKELPHWVLSAMKCLANWPNCSDLKQPMYLGFEKDVFKTIADYYGHLKEPLLTFHLFDAFVSVLGLLQKEKVAVEAFQICCLLLPPENRRKLQLLMRMMARICLNKEMPPLCDGFGTRTLMVQTFSRCILCSKDEVDLDELLAARLVTFLMDNYQEILKVPLALQTSIEERVAHLRRVQIKYPGADMDITLSAPSFCRQISPEEFEYQRSYGSQEPLAALLEEVITDAKLSNKEKKKKLKQFQKSYPEVYQERFPTPESAALLFPEKPKPKPQLLMWALKKPFQPFQRTRSFRM

SEQ ID NO: 23958 - protein, 467 aa, Homo sapiens
  Payload ID: 4786
  Gene Symbol: DEPDC1B
  Gene Name: DEP domain containing 1B
  Uniprot ID: Q8WUY9
  ENSP ID: ENSP00000389101
MEHRIVGPGPYRATRLWNETVELFRAKMPLRKHRCRFKSYEHCFTAAEAVDWLHELLRCSQNFGPEVTRKQTVQLLKKFLKNHVIEDIKGKWGEEDFEDNRHLYRFPPSSPLKPYPKKPPNQKDVIKFPEWNDLPPGTSQENIPVRPVVMNSEMWYKRHSIAIGEVPACRLVHRRQLTEANVEEIWKSMTLSYLQKILGLDSLEEVLDVKLVNSKFIIHNVYSVSKQGVVILDDKSKELPHWVLSAMKCLANWPNCSDLKQPMYLGFEKDVFKTIADYYGHLKEPLLTFHLFDAFVSVLGLLQKEKVAVEAFQICCLLLPPENRRKLQLLMRMMARICLNKEMPPLCDGFGTRTLMVQTFSRCILCSKDEVDLDELLAARLVTFLMDNYQEILKVPLALQTSIEERVAHLRRVQFQKSYPEVYQERFPTPESAALLFPEKPKPKPQLLMWALKKPFQPFQRTRSFRM

SEQ ID NO: 23959 - protein, 36 aa, Homo sapiens
  Payload ID: 4786
  Gene Symbol: DEPDC1B
  Gene Name: DEP domain containing 1B
  ENSP ID: ENSP00000426979
MEHRIVGPGPYRATRLFLFLRPGAVAHSCNSSTLGG

SEQ ID NO: 23960 - protein, 22 aa, Homo sapiens
  Payload ID: 4786
  Gene Symbol: DEPDC1B
  Gene Name: DEP domain containing 1B
  ENSP ID: ENSP00000427527
MEHRIVGPGPYRATRLGLILLS

SEQ ID NO: 23961 - protein, 57 aa, Homo sapiens
  Payload ID: 4787
  Gene Symbol: DEPDC4
  Gene Name: DEP domain containing 4
  Uniprot ID: Q8N2C3
  ENSP ID: ENSP00000299185
MVPGEEPARELMAVLLTPRFRRLVSQNELPGPGLNGPSSRNRRDGFCRKRRTDQDMK

SEQ ID NO: 23962 - protein, 294 aa, Homo sapiens
  Payload ID: 4787
  Gene Symbol: DEPDC4
  Gene Name: DEP domain containing 4
  Uniprot ID: Q8N2C3
  ENSP ID: ENSP00000367490
MVPGEEPARELMAVLLTPRFRRLVSQNELPGPGLNGPSSRNRRDGFCRKRRTGCSGPFQATQLWDGIIHSLQAQVEIKRRRHHLQTYKDCFTGSDAVDVVLSHLMQNTCLSSNDISCLKGVHLCQVLMNHKVFEPVGMKKLFKKEKELEFEDSNISLYRFLGNKSSYDCCKRQKDAENEFNETLRPGYEMISNPLAQEIGEERIEELIHTINGNPALCPNITVQKPFLRLSKEDVWKEQTLLCLLQLIHLPFLDNILEPPVKTQNLQLNKEEDLVITNTCLDRELIPSLCLPEK

SEQ ID NO: 23963 - protein, 294 aa, Homo sapiens; identical to SEQ ID NO: 23962
  Payload ID: 4787
  Gene Symbol: DEPDC4
  Gene Name: DEP domain containing 4
  Uniprot ID: Q8N2C3
  ENSP ID: ENSP00000396234

SEQ ID NO: 23964 - protein, 57 aa, Homo sapiens; identical to SEQ ID NO: 23961
  Payload ID: 4787
  Gene Symbol: DEPDC4
  Gene Name: DEP domain containing 4
  Uniprot ID: Q8N2C3
  ENSP ID: ENSP00000447392

SEQ ID NO: 23965 - protein, 333 aa, Homo sapiens
  Payload ID: 4787
  Gene Symbol: DEPDC4
  Gene Name: DEP domain containing 4
  ENSP ID: ENSP00000448338
MVPGEEPARELMAVLLTPRFRRLVSQNELPGPGLNGPSSRNRRDGFCRKRRTGVHLCQVLMNHKVFEPVGMKKLFKKEKELEFEDSNISLYRFLGNKSSYDCCKRQKDAENEFNETLRPGYEMISNPLAQEIGEERIEELIHTINGNPALCPNITVQKPFLRLSKEGVSFYTAITSDKTDVWKEQTLLCLLQLIHLPFLDNILEPPVKTQNLQLNKEEDLVITNTCLDRELIPSLCLPEIDNWLNAAIECLEYFPDQLIVTVSQQLMQNRNEETRLNSQKKILFDVIAKYYAQERDCLLTDEYFDIHSGIIELLENEKRAEALEATQLYLRLL

SEQ ID NO: 23966 - protein, 387 aa, Homo sapiens
  Payload ID: 4787
  Gene Symbol: DEPDC4
  Gene Name: DEP domain containing 4
  ENSP ID: ENSP00000448385
MVPGEEPARELMAVLLTPRFRRLVSQNELPGPGLNGPSSRNRRDGFCRKRRTGCSGPFQATQLWDGIIHSLQAQVEIKRRRHHLQTYKDCFTGSDAVDVVLSHLMQNTCLSSNDISCLKGVHLCQVLMNHKVFEPVGMKKLFKKEKELEFEDSNISLYRFLGNKSSYDCCKRQKDAENEFNETLRPGYEMISNPLAQEIGEERIEELIHTINGNPALCPNITVQKPFLRLSKEDVWKEQTLLCLLQLIHLPFLDNILEPPVKTQNLQLNKEEDLVITNTCLDRELIPSLCLPEIDNWLNAAIECLEYFPDQLIVTVSQQLMQNRNEETRLNSQKKILFDVIAKYYAQERDCLLTDEYFDIHSGIIELLENEKRAEALEATQLYLRLL

SEQ ID NO: 23967 - protein, 105 aa, Homo sapiens
  Payload ID: 4787
  Gene Symbol: DEPDC4
  Gene Name: DEP domain containing 4
  ENSP ID: ENSP00000448728
  MOD_RES (1)..(1): Any amino acid
XIEELIHTINGNPALCPNITVQKPFLRLSKEGVSFYTAITSDKTDVWKEQTLLCLLQLIHLPFLDNILEPPVKTQNLQLNKEEDLVITNTCLDRELIPSLCLPEK

SEQ ID NO: 23968 - protein, 286 aa, Homo sapiens
  Payload ID: 4787
  Gene Symbol: DEPDC4
  Gene Name: DEP domain containing 4
  ENSP ID: ENSP00000449590
ARELMAVLLTPRFRRLVSQNELPGPGLNGPSSRNRRDGFCRKRRTGCSGPFQATQLWDGIIHSLQAQVEIKRRRHHLQTYKDCFTGSDAVDVVLSHLMQNTCLSSNDISCLKGVHLCQVLMNHKVFEPVGMKKLFKKEKELEFEDSNISLYRFLGNKSSYDCCKRQKDAENEFNETLRPGYEMISNPLAQEIGEERIEELIHTINGNPALCPNITVQKPFLRLSKEDVWKEQTLLCLLQLIHLPFLDNILEPPVKTQNLQLNKEEDLVITNTCLDRELIPSLCLPE

SEQ ID NO: 23969 - protein, 1552 aa, Homo sapiens
  Payload ID: 4788
  Gene Symbol: DEPDC5
  Gene Name: DEP domain containing 5
  Uniprot ID: O75140
  ENSP ID: ENSP00000371545
MRTTKVYKLVIHKKGFGGSDDELVVNPKVFPHIKLGDIVEIAHPNDEYSPLLLQVKSLKEDLQKETISVDQTVTQVFRLRPYQDVYVNVVDPKDVTLDLVELTFKDQYIGRGDMWRLKKSLVSTCAYITQKVEFAGIRAQAGELWVKNEKVMCGYISEDTRVVFRSTSAMVYIFIQMSCEMWDFDIYGDLYFEKAVNGFLADLFTKWKEKNCSHEVTVVLFSRTFYDAKSVDEFPEINRASIRQDHKGRFYEDFYKVVVQNERREEWTSLLVTIKKLFIQYPVLVRLEQAEGFPQGDNSTSAQGNYLEAINLSFNVFDKHYINRNFDRTGQMSVVITPGVGVFEVDRLLMILTKQRMIDNGIGVDLVCMGEQPLHAVPLFKLHNRSAPRDSRLGDDYNIPHWINHSFYTSKSQLFCNSFTPRIKLAGKKPASEKAKNGRDTSLGSPKESENALPIQVDYDAYDAQVFRLPGPSRAQCLTTCRSVRERESHSRKSASSCDVSSSPSLPSRTLPTEEVRSQASDDSSLGKSANILMIPHPHLHQYEVSSSLGYTSTRDVLENMMEPPQRDSSAPGRFHVGSAESMLHVRPGGYTPQRALINPFAPSRMPMKLTSNRRRWMHTFPVGPSGEAIQIHHQTRQNMAELQGSGQRDPTHSSAELLELAYHEAAGRHSNSRQPGDGMSFLNFSGTEELSVGLLSNSGAGMNPRTQNKDSLEDSVSTSPDPILTLSAPPVVPGFCCTVGVDWKSLTTPACLPLTTDYFPDRQGLQNDYTEGCYDLLPEADIDRRDEDGVQMTAQQVFEEFICQRLMQGYQIIVQPKTQKPNPAVPPPLSSSPLYSRGLVSRNRPEEEDQYWLSMGRTFHKVTLKDKMITVTRYLPKYPYESAQIHYTYSLCPSHSDSEFVSCWVEFSHERLEEYKWNYLDQYICSAGSEDFSLIESLKFWRTRFLLLPACVTATKRITEGEAHCDIYGDRPRADEDEWQLLDGFVRFVEGLNRIRRRHRSDRMMRKGTAMKGLQMTGPISTHSLESTAPPVGKKGTSALSALLEMEASQKCLGEQQAAVHGGKSSAQSAESSSVAMTPTYMDSPRKDGAFFMEFVRSPRTASSAFYPQVSVDQTATPMLDGTSLGICTGQSMDRGNSQTFGNSQNIGEQGYSSTNSSDSSSQQLVASSLTSSSTLTEILEAMKHPSTGVQLLSEQKGLSPYCFISAEVVHWLVNHVEGIQTQAMAIDIMQKMLEEQLITHASGEAWRTFIYGFYFYKIVTDKEPDRVAMQQPATTWHTAGVDDFASFQRKWFEVAFVAEELVHSEIPAFLLPWLPSRPASYASRHSSFSRSFGGRSQAAALLAATVPEQRTVTLDVDVNNRTDRLEWCSCYYHGNFSLNAAFEIKLHWMAVTAAVLFEMVQGWHRKATSCGFLLVPVLEGPFALPSYLYGDPLRAQLFIPLNISCLLKEGSEHLFDSLGLYKINILPLLLTSLLRTSLSISTLQEQCFCSCPTPSASSQGSSGGGGTPPAPPTRTCSARSGSATTGPTTPCSPKHGAPAPQGMKSLLIGC

SEQ ID NO: 23970 - protein, 1594 aa, Homo sapiens
  Payload ID: 4788
  Gene Symbol: DEPDC5
  Gene Name: DEP domain containing 5
  Uniprot ID: O75140
  ENSP ID: ENSP00000371546
MRTTKVYKLVIHKKGFGGSDDELVVNPKVFPHIKLGDIVEIAHPNDEYSPLLLQVKSLKEDLQKETISVDQTVTQVFRLRPYQDVYVNVVDPKDVTLDLVELTFKDQYIGRGDMWRLKKSLVSTCAYITQKVEFAGIRAQAGELWVKNEKVMCGYISEDTRVVFRSTSAMVYIFIQMSCEMWDFDIYGDLYFEKAVNGFLADLFTKWKEKNCSHEVTVVLFSRTFYDAKSVDEFPEINRASIRQDHKGRFYEDFYKVVVQNERREEWTSLLVTIKKLFIQYPVLVRLEQAEGFPQGDNSTSAQGNYLEAINLSFNVFDKHYINRNFDRTGQMSVVITPGVGVFEVDRLLMILTKQRMIDNGIGVDLVCMGEQPLHAVPLFKLHNRSAPRDSRLGDDYNIPHWINHSFYTSKSQLFCNSFTPRIKLAGKKPASEKAKNGRDTSLGSPKESENALPIQVDYDAYDAQVFRLPGPSRAQCLTTCRSVRERESHSRKSASSCDVSSSPSLPSRTLPTEEVRSQASDDSSLGKSANILMIPHPHLHQYEVSSSLGYTSTRDVLENMMEPPQRDSSAPGRFHVGSAESMLHVRPGGYTPQRALINPFAPSRMPMKLTSNRRRWMHTFPVGPSGEAIQIHHQTRQNMAELQGSGQRDPTHSSAELLELAYHEAAGRHSNSRQPGDGMSFLNFSGTEELSVGLLSNSGAGMNPRTQNKDSLEDSVSTSPDPMPGFCCTVGVDWKSLTTPACLPLTTDYFPDRQGLQNDYTEGCYDLLPEADIDRRDEDGVQMTAQQVFEEFICQRLMQGYQIIVQPKTQKPNPAVPPPLSSSPLYSRGLVSRNRPEEEDQYWLSMGRTFHKVTLKDKMITVTRYLPKYPYESAQIHYTYSLCPSHSDSEFVSCWVEFSHERLEEYKWNYLDQYICSAGSEDFSLIESLKFWRTRFLLLPACVTATKRITEGEAHCDIYGDRPRADEDEWQLLDGFVRFVEGLNRIRRRHRSDRMMRKGTAMKGLQMTGPISTHSLESTAPPVGKKGTSALSALLEMEASQKCLGEQQAAVHGGKSSAQSAESSSVAMTPTYMDSPRKDGAFFMEFVRSPRTASSAFYPQVSVDQTATPMLDGTSLGICTGQSMDRGNSQTFGNSQNIGEQGYSSTNSSDSSSQQLVASSLTSSSTLTEILEAMKHPSTGVQLLSEQKGLSPYCFISAEVVHWLVNHVEGIQTQAMAIDIMQKMLEEQLITHASGEAWRTFIYGFYFYKIVTDKEPDRVAMQQPATTWHTAGVDDFASFQRKWFEVAFVAEELVHSEIPAFLLPWLPSRPASYASRHSSFSRSFGGRSQAAALLAATVPEQRTVTLDVDVNNRTDRLEWCSCYYHGNFSLNAAFEIKLHWMAVTAAVLFEMVQGWHRKATSCGFLLVPVLEGPFALPSYLYGDPLRAQLFIPLNISCLLKEGSEHLFDSFEPETYWDRMHLFQEAIAHRFGFVQDKYSASAFNFPAENKPQYIHVTGTVFLQLPYSKRKFSGQQRRRRNSTSSTNQNMFCEERVGYNWAYNTMLTKTWRSSATGDEKFADRLLKDFTDFCINRDNRLVTFWTSCLEKMHASAP

SEQ ID NO: 23971 - protein, 559 aa, Homo sapiens
  Payload ID: 4788
  Gene Symbol: DEPDC5
  Gene Name: DEP domain containing 5
  Uniprot ID: O75140
  ENSP ID: ENSP00000383101
MRTTKVYKLVIHKKGFGGSDDELVVNPKVFPHIKLGDIVEIAHPNDEYSPLLLQVKSLKEDLQKETISVDQTVTQVFRLRPYQDVYVNVVDPKDVTLDLVELTFKDQYIGRGDMWRLKKSLVSTCAYITQKVEFAGIRAQAGELWVKNEKVMCGYISEDTRVVFRSTSAMVYIFIQMSCEMWDFDIYGDLYFEKAVNGFLADLFTKWKEKNCSHEVTVVLFSRTFYDAKSVDEFPEINRASIRQDHKGRFYEDFYKVVVQNERREEWTSLLVTIKKLFIQYPVLVRLEQAEGFPQGDNSTSAQGNYLEAINLSFNVFDKHYINRNFDRTGQMSVVITPGVGVFEVDRLLMILTKQRMIDNGIGVDLVCMGEQPLHAVPLFKLHNRSAPRDSRLGDDYNIPHWINHSFYTSKSQLFCNSFTPRIKLAGKKPASEKAKNGRDTSLGSPKESENALPIQVDYDAYDAQVFRLPGPSRAQCLTTCRSVRERESHSRKSASSCDVSSSPSLPSRTLPTEEVRSQASDDSSLGKSANILMIPHPHLHQYEVSSSLGYTSTREHLG

SEQ ID NO: 23972 - protein, 1603 aa, Homo sapiens
  Payload ID: 4788
  Gene Symbol: DEPDC5
  Gene Name: DEP domain containing 5
  Uniprot ID: O75140
  ENSP ID: ENSP00000383105
MRTTKVYKLVIHKKGFGGSDDELVVNPKVFPHIKLGDIVEIAHPNDEYSPLLLQVKSLKEDLQKETISVDQTVTQVFRLRPYQDVYVNVVDPKDVTLDLVELTFKDQYIGRGDMWRLKKSLVSTCAYITQKVEFAGIRAQAGELWVKNEKVMCGYISEDTRVVFRSTSAMVYIFIQMSCEMWDFDIYGDLYFEKAVNGFLADLFTKWKEKNCSHEVTVVLFSRTFYDAKSVDEFPEINRASIRQDHKGRFYEDFYKVVVQNERREEWTSLLVTIKKLFIQYPVLVRLEQAEGFPQGDNSTSAQGNYLEAINLSFNVFDKHYINRNFDRTGQMSVVITPGVGVFEVDRLLMILTKQRMIDNGIGVDLVCMGEQPLHAVPLFKLHNRSAPRDSRLGDDYNIPHWINHSFYTSKSQLFCNSFTPRIKLAGKKPASEKAKNGRDTSLGSPKESENALPIQVDYDAYDAQVFRLPGPSRAQCLTTCRSVRERESHSRKSASSCDVSSSPSLPSRTLPTEEVRSQASDDSSLGKSANILMIPHPHLHQYEVSSSLGYTSTRDVLENMMEPPQRDSSAPGRFHVGSAESMLHVRPGGYTPQRALINPFAPSRMPMKLTSNRRRWMHTFPVGPSGEAIQIHHQTRQNMAELQGSGQRDPTHSSAELLELAYHEAAGRHSNSRQPGDGMSFLNFSGTEELSVGLLSNSGAGMNPRTQNKDSLEDSVSTSPDPILTLSAPPVVPGFCCTVGVDWKSLTTPACLPLTTDYFPDRQGLQNDYTEGCYDLLPEADIDRRDEDGVQMTAQQVFEEFICQRLMQGYQIIVQPKTQKPNPAVPPPLSSSPLYSRGLVSRNRPEEEDQYWLSMGRTFHKVTLKDKMITVTRYLPKYPYESAQIHYTYSLCPSHSDSEFVSCWVEFSHERLEEYKWNYLDQYICSAGSEDFSLIESLKFWRTRFLLLPACVTATKRITEGEAHCDIYGDRPRADEDEWQLLDGFVRFVEGLNRIRRRHRSDRMMRKGTAMKGLQMTGPISTHSLESTAPPVGKKGTSALSALLEMEASQKCLGEQQAAVHGGKSSAQSAESSSVAMTPTYMDSPRKDGAFFMEFVRSPRTASSAFYPQVSVDQTATPMLDGTSLGICTGQSMDRGNSQTFGNSQNIGEQGYSSTNSSDSSSQQLVASSLTSSSTLTEILEAMKHPSTGVQLLSEQKGLSPYCFISAEVVHWLVNHVEGIQTQAMAIDIMQKMLEEQLITHASGEAWRTFIYGFYFYKIVTDKEPDRVAMQQPATTWHTAGVDDFASFQRKWFEVAFVAEELVHSEIPAFLLPWLPSRPASYASRHSSFSRSFGGRSQAAALLAATVPEQRTVTLDVDVNNRTDRLEWCSCYYHGNFSLNAAFEIKLHWMAVTAAVLFEMVQGWHRKATSCGFLLVPVLEGPFALPSYLYGDPLRAQLFIPLNISCLLKEGSEHLFDSFEPETYWDRMHLFQEAIAHRFGFVQDKYSASAFNFPAENKPQYIHVTGTVFLQLPYSKRKFSGQQRRRRNSTSSTNQNMFCEERVGYNWAYNTMLTKTWRSSATGDEKFADRLLKDFTDFCINRDNRLVTFWTSCLEKMHASAP

SEQ ID NO: 23973 - protein, 1572 aa, Homo sapiens
  Payload ID: 4788
  Gene Symbol: DEPDC5
  Gene Name: DEP domain containing 5
  Uniprot ID: O75140
  ENSP ID: ENSP00000383107
MRTTKVYKLVIHKKGFGGSDDELVVNPKVFPHIKLGDIVEIAHPNDEYSPLLLQVKSLKEDLQKETISVDQTVTQVFRLRPYQDVYVNVVDPKDVTLDLVELTFKDQYIGRGDMWRLKKSLVSTCAYITQKVEFAGIRAQAGELWVKNEKVMCGYISEDTRVVFRSTSAMVYIFIQMSCEMWDFDIYGDLYFEKAVNGFLADLFTKWKEKNCSHEVTVVLFSRTFYDAKSVDEFPEINRASIRQDHKGRFYEDFYKVVVQNERREEWTSLLVTIKKLFIQYPVLVRLEQAEGFPQGDNSTSAQGNYLEAINLSFNVFDKHYINRNFDRTGQMSVVITPGVGVFEVDRLLMILTKQRMIDNGIGVDLVCMGEQPLHAVPLFKLHNRSAPRDSRLGDDYNIPHWINHSFYTSKSQLFCNSFTPRIKLAGKKPASEKAKNGRDTSLGSPKESENALPIQVDYDAYDAQVFRLPGPSRAQCLTTCRSVRERESHSRKSASSCDVSSSPSLPSRTLPTEEVRSQASDDSSLGKSANILMIPHPHLHQYEVSSSLGYTSTRDVLENMMEPPQRDSSAPGRFHVGSAESMLHVRPGGYTPQRALINPFAPSRMPMKLTSNRRRWMHTFPVGPSGEAIQIHHQTRQNMAELQGSGQRDPTHSSAELLELAYHEAAGRHSNSRQPGDGMSFLNFSGTEELSVGLLSNSGAGMNPRTQNKDSLEDSVSTSPDPMPGFCCTVGVDWKSLTTPACLPLTTDYFPDRQGLQNDYTEGCYDLLPEADIDRRDEDGVQMTAQQVFEEFICQRLMQGYQIIVQPKTQKPNPAVPPPLSSSPLYSRGLVSRNRPEEEDQYWLSMGRTFHKVTLKDKMITVTRYLPKYPYESAQIHYTYSLCPSHSDSEFVSCWVEFSHERLEEYKWNYLDQYICSAGSEDFSLIESLKFWRTRFLLLPACVTATKRITEGEAHCDIYGDRPRADEDEWQLLDGFVRFVEGLNRIRRRHRSDRMMRKGTAMKGLQMTGPISTHSLESTAPPVGKKGTSALSALLEMEASQKCLGEQQAAVHGGKSSAQSAESSSVAMTPTYMDSPRKVSVDQTATPMLDGTSLGICTGQSMDRGNSQTFGNSQNIGEQGYSSTNSSDSSSQQLVASSLTSSSTLTEILEAMKHPSTGVQLLSEQKGLSPYCFISAEVVHWLVNHVEGIQTQAMAIDIMQKMLEEQLITHASGEAWRTFIYGFYFYKIVTDKEPDRVAMQQPATTWHTAGVDDFASFQRKWFEVAFVAEELVHSEIPAFLLPWLPSRPASYASRHSSFSRSFGGRSQAAALLAATVPEQRTVTLDVDVNNRTDRLEWCSCYYHGNFSLNAAFEIKLHWMAVTAAVLFEMVQGWHRKATSCGFLLVPVLEGPFALPSYLYGDPLRAQLFIPLNISCLLKEGSEHLFDSFEPETYWDRMHLFQEAIAHRFGFVQDKYSASAFNFPAENKPQYIHVTGTVFLQLPYSKRKFSGQQRRRRNSTSSTNQNMFCEERVGYNWAYNTMLTKTWRSSATGDEKFADRLLKDFTDFCINRDNRLVTFWTSCLEKMHASAP

SEQ ID NO: 23974 - protein, 1572 aa, Homo sapiens; identical to SEQ ID NO: 23973
  Payload ID: 4788
  Gene Symbol: DEPDC5
  Gene Name: DEP domain containing 5
  Uniprot ID: O75140
  ENSP ID: ENSP00000383108

SEQ ID NO: 23975 - protein, 659 aa, Homo sapiens
  Payload ID: 4788
  Gene Symbol: DEPDC5
  Gene Name: DEP domain containing 5
  ENSP ID: ENSP00000402173
APGRFHVGSAESMLHVRPGGYTPQRALINPFAPSRMPMKLTSNRRRWMHTFPVGMNPRTQNKDSLEDSVSTSPDPILTLSAPPVVPGFCCTVGVDWKSLTTPACLPLTTDYFPDRQGLQNDYTEGCYDLLPEADIDRRDEDGVQMTAQQVFEEFICQRLMQGYQIIVQPKTQKPNPAVPPPLSSSPLYSRGLVSRNRPEEEDQYWLSMGRTFHKVTLKDKMITVTRYLPKYPYESAQIHYTYSLCPSHSDSEFVSCWVEFSHERLEEYKWNYLDQYICSAGSEDFSLIESLKFWRTRFLLLPACVTATKRITEGEAHCDIYGDRPRADEDEWQLLDGFVRFVEGLNRIRRRHRSDRMMRKGTAMKGLQMTGPISTHSLESTAPPVGKKGTSALSALLEMEASQKCLGEQQAAVHGGKSSAQSAESSSVAMTPTYMDSPRKDGAFFMEFVRSPRTASSAFYPQVSVDQTATPMLDGTSLGICTGQSMDRGNSQTFGNSQNIGEQGYSSTNSSDSSSQQLVASSLTSSSTLTEILEAMKHPSTGVQLLSEQKGLSPYCFISAEVVHWLVNHVEGIQTQAMAIDIMQWPCSSPPPPGTQQEWTTSPASSASGLRWPLWQKSSCTLRFLPFSCPGCLAGQPPMQVGTAPLAEVLEDGARRQHF

SEQ ID NO: 23976 - protein, 26 aa, Homo sapiens
  Payload ID: 4788
  Gene Symbol: DEPDC5
  Gene Name: DEP domain containing 5
  ENSP ID: ENSP00000405351
MRTTKVYKLVIHKKGFGGSVAELSFR

SEQ ID NO: 23977 - protein, 979 aa, Homo sapiens
  Payload ID: 4788
  Gene Symbol: DEPDC5
  Gene Name: DEP domain containing 5
  ENSP ID: ENSP00000410544
  MOD_RES (1)..(1): Any amino acid
XSRMPMKLTSNRRRWMHTFPVGPSGEAIQIHHQTRQNMAELQGSGQRDPTHSSAELLELAYHEAAGRHSNSRQPGDGMSFLNFSGTEELSVGLLSNSGAGMNPRTQNKDSLEDSVSTSPDPILTLSAPPVVPGFCCTVGVDWKSLTTPACLPLTTDYFPDRQGLQNDYTEGCYDLLPEADIDRRDEDGVQMTAQQVFEEFICQRLMQGYQIIVQPKTQKPNPAVPPPLSSSPLYSRGLVSRNRPEEEDQYWLSMGRTFHKVTLKDKMITVTRYLPKYPYESAQIHYTYSLCPSHSDSEFVSCWVEFSHERLEEYKWNYLDQYICSAGSEDFSLIESLKFWRTRFLLLPACVTATKRITEGEAHCDIYGDRPRADEDEWQLLDGFVRFVEGLNRIRRRHRSDRMMRKGTAMKGLQMTGPISTHSLESTAPPVGKKGTSALSALLEMEASQKCLGEQQAAVHGGKSSAQSAESSSVAMTPTYMDSPRKVSVDQTATPMLDGTSLGICTGQSMDRGNSQTFGNSQNIGEQGYSSTNSSDSSSQQLVASSLTSSSTLTEILEAMKHPSTGVQLLSEQKGLSPYCFISAEVVHWLVNHVEGIQTQAMAIDIMQKMLEEQLITHASGEAWRTFIYGFYFYKIVTDKEPDRVAMQQPATTWHTAGVDDFASFQRKWFEVAFVAEELVHSEIPAFLLPWLPSRPASYASRHSSFSRSFGGRSQAAALLAATVPEQRTVTLDVDVNNRTDRLEWCSCYYHGNFSLNAAFEIKLHWMAVTAAVLFEMVQGWHRKATSCGFLLVPVLEGPFALPSYLYGDPLRAQLFIPLNISCLLKEGSEHLFDSFEPETYWDRMHLFQEAIAHRFGFVQDKYSASAFNFPAENKPQYIHVTGTVFLQLPYSKRKFSGQQRRRRNSTSSTNQNMFCEERVGYNWAYNTMLTKTWRSSATGDEKFADRLLKDFTDFCINRDNRLVTFWTSCLEKMHASAP

SEQ ID NO: 23978 - protein, 60 aa, Homo sapiens
  Payload ID: 4788
  Gene Symbol: DEPDC5
  Gene Name: DEP domain containing 5
  ENSP ID: ENSP00000412057
  MOD_RES (1)..(1): Any amino acid
XAGIRAQAGELWVKNEKVMCGYISEDTRVVFRSTSAMVYIFIQMSCEMWDFDIYGTVSMC

SEQ ID NO: 23979 - protein, 45 aa, Homo sapiens
  Payload ID: 4788
  Gene Symbol: DEPDC5
  Gene Name: DEP domain containing 5
  ENSP ID: ENSP00000416314
MRTTKVYKLVIHKKGFGGSDDELVVNPKVFPHIKLGDIVEIAHPN

SEQ ID NO: 23980 - protein, 1503 aa, Homo sapiens
  Payload ID: 4788
  Gene Symbol: DEPDC5
  Gene Name: DEP domain containing 5
  Uniprot ID: O75140
  ENSP ID: ENSP00000440210
MRTTKVYKLVIHKKGFGGSDDELVVNPKVFPHIKLGDIVEIAHPNDEYSPLLLQVKSLKEDLQKETISVDQTVTQVFRLRPYQDVYVNVVDPKDVTLDLVELTFKDQYIGRGDMWRLKKSLVSTCAYITQKVEFAGIRAQAGELWVKNEKVMCGYISEDTRVVFRSTSAMVYIFIQMSCEMWDFDIYGDLYFEKAVNGFLADLFTKWKEKNCSHEVTVVLFSRTFYDAKSVDEFPEINRASIRQDHKGRFYEDFYKVVVQNERREEWTSLLVTIKKLFIQYPVLVRLEQAEGFPQGDNSTSAQGNYLEAINLSFNVFDKHYINRNFDRTGQMSVVITPGVGVFEVDRLLMILTKQRMIDNGIGVDLVCMGEQPLHAVPLFKLHNRSAPRDSRLGDDYNIPHWINHSFYTSKSQLFCNSFTPRIKLAGKKPASEKAKNGRDTSLGSPKESENALPIQVDYDAYDAQVFRLPGPSRAQCLTTCRSVRERESHSRKSASSCDVSSSPSLPSRTLPTEEVRSQASDDSSLGKSANILMIPHPHLHQYEVSSSLGYTSTRDVLENMMEPPQRDSSAPGRFHVGSAESMLHVRPGGYTPQRALINPFAPSRMPMKLTSNRRRWMHTFPVGMNPRTQNKDSLEDSVSTSPDPILTLSAPPVVPGFCCTVGVDWKSLTTPACLPLTTDYFPDRQGLQNDYTEGCYDLLPEADIDRRDEDGVQMTAQQVFEEFICQRLMQGYQIIVQPKTQKPNPAVPPPLSSSPLYSRGLVSRNRPEEEDQYWLSMGRTFHKVTLKDKMITVTRYLPKYPYESAQIHYTYSLCPSHSDSEFVSCWVEFSHERLEEYKWNYLDQYICSAGSEDFSLIESLKFWRTRFLLLPACVTATKRITEGEAHCDIYGDRPRADEDEWQLLDGFVRFVEGLNRIRRRHRSDRMMRKGTAMKGLQMTGPISTHSLESTAPPVGKKGTSALSALLEMEASQKCLGEQQAAVHGGKSSAQSAESSSVAMTPTYMDSPRKVSVDQTATPMLDGTSLGICTGQSMDRGNSQTFGNSQNIGEQGYSSTNSSDSSSQQLVASSLTSSSTLTEILEAMKHPSTGVQLLSEQKGLSPYCFISAEVVHWLVNHVEGIQTQAMAIDIMQKMLEEQLITHASGEAWRTFIYGFYFYKIVTDKEPDRVAMQQPATTWHTAGVDDFASFQRKWFEVAFVAEELVHSEIPAFLLPWLPSRPASYASRHSSFSRSFGGRSQAAALLAATVPEQRTVTLDVDVNNRTDRLEWCSCYYHGNFSLNAAFEIKLHWMAVTAAVLFEMVQGWHRKATSCGFLLVPVLEGPFALPSYLYGDPLRAQLFIPLNISCLLKEGSEHLFDSFEPETYWDRMHLFQEAIAHRFGFVQDKYSASAFNFPAENKPQYIHVTGTVFLQLPYSKRKFSGQQRRRRNSTSSTNQNMFCEERVGYNWAYNTMLTKTWRSSATGDEKFADRLLKDFTDFCINRDNRLVTFWTSCLEKMHASAP

SEQ ID NO: 23981 - protein, 511 aa, Homo sapiens
  Payload ID: 4789
  Gene Symbol: DEPDC7
  Gene Name: DEP domain containing 7
  Uniprot ID: Q96QD5
  ENSP ID: ENSP00000241051
MATVQEKAAALNLSALHSPAHRPPGFSVAQKPFGATYVWSSIINTLQTQVEVKKRRHRLKRHNDCFVGSEAVDVIFSHLIQNKYFGDVDIPRAKVVRVCQALMDYKVFEAVPTKVFGKDKKPTFEDSSCSLYRFTTIPNQDSQLGKENKLYSPARYADALFKSSDIRSASLEDLWENLSLKPANSPHVNISATLSPQVINEVWQEETIGRLLQLVDLPLLDSLLKQQEAVPKIPQPKRQSTMVNSSNYLDRGILKAYSDSQEDEWLSAAIDCLEYLPDQMVVEISRSFPEQPDRTDLVKELLFDAIGRYYSSREPLLNHLSDVHNGIAELLVNGKTEIALEATQLLLKLLDFQNREEFRRLLYFMAVAANPSEFKLQKESDNRMVVKRIFSKAIVDNKNLSKGKTDLLVLFLMDHQKDVFKIPGTLHKIVSVKLMAIQNGRDPNRDAGYIYCQRIDQRDYSNNTEKTTKDELLNLLKTLDEDSKLSAKEKKKLLGQFYKCHPDIFIEHFGD

SEQ ID NO: 23982 - protein, 502 aa, Homo sapiens
  Payload ID: 4789
  Gene Symbol: DEPDC7
  Gene Name: DEP domain containing 7
  Uniprot ID: Q96QD5
  ENSP ID: ENSP00000308971
MRGLCEFYWQEFGIKGFSVAQKPFGATYVWSSIINTLQTQVEVKKRRHRLKRHNDCFVGSEAVDVIFSHLIQNKYFGDVDIPRAKVVRVCQALMDYKVFEAVPTKVFGKDKKPTFEDSSCSLYRFTTIPNQDSQLGKENKLYSPARYADALFKSSDIRSASLEDLWENLSLKPANSPHVNISATLSPQVINEVWQEETIGRLLQLVDLPLLDSLLKQQEAVPKIPQPKRQSTMVNSSNYLDRGILKAYSDSQEDEWLSAAIDCLEYLPDQMVVEISRSFPEQPDRTDLVKELLFDAIGRYYSSREPLLNHLSDVHNGIAELLVNGKTEIALEATQLLLKLLDFQNREEFRRLLYFMAVAANPSEFKLQKESDNRMVVKRIFSKAIVDNKNLSKGKTDLLVLFLMDHQKDVFKIPGTLHKIVSVKLMAIQNGRDPNRDAGYIYCQRIDQRDYSNNTEKTTKDELLNLLKTLDEDSKLSAKEKKKLLGQFYKCHPDIFIEHFGD

SEQ ID NO: 23983 - protein, 533 aa, Homo sapiens
  Payload ID: 4789
  Gene Symbol: DEPDC7
  Gene Name: DEP domain containing 7
  ENSP ID: ENSP00000479957
MARGRSSLAHFVLQTARSQESACLPRLFLGGMRGLCEFYWQEFGIKGFSVAQKPFGATYVWSSIINTLQTQVEVKKRRHRLKRHNDCFVGSEAVDVIFSHLIQNKYFGDVDIPRAKVVRVCQALMDYKVFEAVPTKVFGKDKKPTFEDSSCSLYRFTTIPNQDSQLGKENKLYSPARYADALFKSSDIRSASLEDLWENLSLKPANSPHVNISATLSPQVINEVWQEETIGRLLQLVDLPLLDSLLKQQEAVPKIPQPKRQSTMVNSSNYLDRGILKAYSDSQEDEWLSAAIDCLEYLPDQMVVEISRSFPEQPDRTDLVKELLFDAIGRYYSSREPLLNHLSDVHNGIAELLVNGKTEIALEATQLLLKLLDFQNREEFRRLLYFMAVAANPSEFKLQKESDNRMVVKRIFSKAIVDNKNLSKGKTDLLVLFLMDHQKDVFKIPGTLHKIVSVKLMAIQNGRDPNRDAGYIYCQRIDQRDYSNNTEKTTKDELLNLLKTLDEDSKLSAKEKKKLLGQFYKCHPDIFIEHFGD

SEQ ID NO: 23984 - protein, 409 aa, Homo sapiens
  Payload ID: 4790
  Gene Symbol: DEPTOR
  Gene Name: DEP domain containing MTOR-interacting protein
  Uniprot ID: Q8TB45
  ENSP ID: ENSP00000286234
MEEGGSTGSAGSDSSTSGSGGAQQRELERMAEVLVTGEQLRLRLHEEKVIKDRRHHLKTYPNCFVAKELIDWLIEHKEASDRETAIKLMQKLADRGIIHHVCDEHKEFKDVKLFYRFRKDDGTFPLDNEVKAFMRGQRLYEKLMSPENTLLQPREEEGVKYERTFMASEFLDWLVQEGEATTRKEAEQLCHRLMEHGIIQHVSNKHPFVDSNLLYQFRMNFRRRRRLMELLNEKSPSSQETHDSPFCLRKQSHDNRKSTSFMSVSPSKEIKIVSAVRRSSMSSCGSSGYFSSSPTLSSSPPVLCNPKSVLKRPVTSEELLTPGAPYARKTFTIVGDAVGWGFVVRGSKPCHIQAVDPSGPAAAAGMKVCQFVVSVNGLNVLHVDYRTVSNLILTGPRTIVMEVMEELEC

SEQ ID NO: 23985 - protein, 308 aa, Homo sapiens
  Payload ID: 4790
  Gene Symbol: DEPTOR
  Gene Name: DEP domain containing MTOR-interacting protein
  Uniprot ID: Q8TB45
  ENSP ID: ENSP00000430457
MEEGGSTGSAGSDSSTSGSGGAQQRELERMAEVLVTGEQLRLMSPENTLLQPREEEGVKYERTFMASEFLDWLVQEGEATTRKEAEQLCHRLMEHGIIQHVSNKHPFVDSNLLYQFRMNFRRRRRLMELLNEKSPSSQETHDSPFCLRKQSHDNRKSTSFMSVSPSKEIKIVSAVRRSSMSSCGSSGYFSSSPTLSSSPPVLCNPKSVLKRPVTSEELLTPGAPYARKTFTIVGDAVGWGFVVRGSKPCHIQAVDPSGPAAAAGMKVCQFVVSVNGLNVLHVDYRTVSNLILTGPRTIVMEVMEELEC

SEQ ID NO: 23986 - protein, 231 aa, Homo sapiens
  Payload ID: 4791
  Gene Symbol: DCAKD
  Gene Name: dephospho-CoA kinase domain containing
  Uniprot ID: Q8WVC6
  ENSP ID: ENSP00000308515
MFLVGLTGGIASGKSSVIQVFQQLGCAVIDVDVMARHVVQPGYPAHRRIVEVFGTEVLLENGDINRKVLGDLIFNQPDRRQLLNAITHPEIRKEMMKETFKYFLRGYRYVILDIPLLFETKKLLKYMKHTVVVYCDRDTQLARLMRRNSLNRKDAEARINAQLPLTDKARMARHVLDNSGEWSVTKRQVILLHTELERSLEYLPLRFGVLTGLAAIASLLYLLTHYLLPYA

SEQ ID NO: 23987 - protein, 231 aa, Homo sapiens; identical to SEQ ID NO: 23986
  Payload ID: 4791
  Gene Symbol: DCAKD
  Gene Name: dephospho-CoA kinase domain containing
  Uniprot ID: Q8WVC6
  ENSP ID: ENSP00000341504

SEQ ID NO: 23988 - protein, 231 aa, Homo sapiens; identical to SEQ ID NO: 23986
  Payload ID: 4791
  Gene Symbol: DCAKD
  Gene Name: dephospho-CoA kinase domain containing
  Uniprot ID: Q8WVC6
  ENSP ID: ENSP00000413483

SEQ ID NO: 23989 - protein, 231 aa, Homo sapiens; identical to SEQ ID NO: 23986
  Payload ID: 4791
  Gene Symbol: DCAKD
  Gene Name: dephospho-CoA kinase domain containing
  Uniprot ID: Q8WVC6
  ENSP ID: ENSP00000467913

SEQ ID NO: 23990 - protein, 209 aa, Homo sapiens
  Payload ID: 4791
  Gene Symbol: DCAKD
  Gene Name: dephospho-CoA kinase domain containing
  ENSP ID: ENSP00000468809
MFLVGLTGGIASGKSSVIQVFQQLGCAVIDVDVMARHVVQPGYPAHRRIVEVFGTEVLLENGDINRKVLGDLIFNQPDRRQLLNAITHPEIRKEMMKETFKYFLRGYRYVILDIPLLFETKKLLKYMKHTVVVYCDRDTQLARLMRRNSLNRKDAEARINAQLPLTDKARMARHVLDNSGEWSVTKRQVILLHTELERSLEYLPLRFGV

SEQ ID NO: 23991 - protein, 231 aa, Homo sapiens; identical to SEQ ID NO: 23986
  Payload ID: 4791
  Gene Symbol: DCAKD
  Gene Name: dephospho-CoA kinase domain containing
  Uniprot ID: Q8WVC6
  ENSP ID: ENSP00000478909

SEQ ID NO: 23992 - protein, 251 aa, Homo sapiens
  Payload ID: 4792
  Gene Symbol: DERL1
  Gene Name: derlin 1
  Uniprot ID: Q9BUN8
  ENSP ID: ENSP00000259512
MSDIGDWFRSIPAITRYWFAATVAVPLVGKLGLISPAYLFLWPEAFLYRFQIWRPITATFYFPVGPGTGFLYLVNLYFLYQYSTRLETGAFDGRPADYLFMLLFNWICIVITGLAMDMQLLMIPLIMSVLYVWAQLNRDMIVSFWFGTRFKACYLPWVILGFNYIIGGSVINELIGNLVGHLYFFLMFRYPMDLGGRNFLSTPQFLYRWLPSRRGGVSGFGVPPASMRRAADQNGGGGRHNWGQGFRLGDQ

SEQ ID NO: 23993 - protein, 231 aa, Homo sapiens
  Payload ID: 4792
  Gene Symbol: DERL1
  Gene Name: derlin 1
  Uniprot ID: Q9BUN8
  ENSP ID: ENSP00000384289
MSDIGDWFRSIPAITRYWFAATVAVPLVGKLGLISPAYLFLWPEAFLYRFQIWRPITATFYFPVGPGTGFLYLVNLYFLYQYSTRLETGAFDGRPADYLFMLLFNWICIVITGLAMDMQLLMIPLIMSVLYVWAQLNRDMIVSFWFGTRFKACYLPWVILGFNYIIGGSYPMDLGGRNFLSTPQFLYRWLPSRRGGVSGFGVPPASMRRAADQNGGGGRHNWGQGFRLGDQ

SEQ ID NO: 23994 - protein, 151 aa, Homo sapiens
  Payload ID: 4792
  Gene Symbol: DERL1
  Gene Name: derlin 1
  ENSP ID: ENSP00000389965
MSDIGDWFRSIPAITRYWFAATVAVPLVGKLGLISPAYLFLWPEAFLYRFQACYLPWVILGFNYIIGGSVINELIGNLVGHLYFFLMFRYPMDLGGRNFLSTPQFLYRWLPSRRGGVSGFGVPPASMRRAADQNGGGGRHNWGQGFRLGDQ

SEQ ID NO: 23995 - protein, 151 aa, Homo sapiens
  Payload ID: 4792
  Gene Symbol: DERL1
  Gene Name: derlin 1
  ENSP ID: ENSP00000429199
MLLFNWICIVITGLAMDMQLLMIPLIMSVLYVWAQLNRDMIVSFWFGTRFKACYLPWVILGFNYIIGGSVINELIGNLVGHLYFFLMFRYPMDLGGRNFLSTPQFLYRWLPSRRGGVSGFGVPPASMRRAADQNGGGGRHNWGQGFRLGDQ

SEQ ID NO: 23996 - protein, 151 aa, Homo sapiens; identical to SEQ ID NO: 23995
  Payload ID: 4792
  Gene Symbol: DERL1
  Gene Name: derlin 1
  ENSP ID: ENSP00000430086

SEQ ID NO: 23997 - protein, 239 aa, Homo sapiens
  Payload ID: 4793
  Gene Symbol: DERL2
  Gene Name: derlin 2
  Uniprot ID: Q9GZP9
  ENSP ID: ENSP00000158771
MAYQSLRLEYLQIPPVSRAYTTACVLTTAAVQLELITPFQLYFNPELIFKHFQIWRLITNFLFFGPVGFNFLFNMIFLYRYCRMLEEGSFRGRTADFVFMFLFGGFLMTLFGLFVSLVFLGQAFTIMLVYVWSRRNPYVRMNFFGLLNFQAPFLPWVLMGFSLLLGNSIIVDLLGIAVGHIYFFLEDVFPNQPGGIRILKTPSILKAIFDTPDEDPNYNPLPEERPGGFAWGEGQRLGG

SEQ ID NO: 23998 - protein, 200 aa, Homo sapiens
  Payload ID: 4793
  Gene Symbol: DERL2
  Gene Name: derlin 2
  ENSP ID: ENSP00000458296
MAYQSLRLEYLQIPPVSRAYTTACVLTTAAVQLELITPFQLYFNPELIFKHFQIWRLITNFLFFGPVGFNFLFNMIFLYRYCRMLEEGSFRGRTADFVFMFLFGGFLMTQSDRMSKSKELLTQAFTIMLVYVWSRRNPYVRMNFFGLLNFQAPFLPWVLMGFSLLLGNSIIVDLLGIAVGHIYFFLEDVFPNQPGGIRIL

SEQ ID NO: 23999 - protein, 103 aa, Homo sapiens
  Payload ID: 4793
  Gene Symbol: DERL2
  Gene Name: derlin 2
  ENSP ID: ENSP00000458448
MAYQSLRLEYLQIPPVSRAYTTACVLTTAAVVSSCSATFSLSGLDMTGSSGNWGLGLGEAQRGWSRGWVEAYRDYSGVRVGAKNAYPVTREGSAASWGVSSWN

SEQ ID NO: 24000 - protein, 144 aa, Homo sapiens
  Payload ID: 4793
  Gene Symbol: DERL2
  Gene Name: derlin 2
  ENSP ID: ENSP00000459072
MAYQSLRLEYLQIPPVSRAYTTACVLTTAAVQLELITPFQLYFNPELIFKHFQIWRLITNFLFFGPVGFNFLFNMIFLYRYCRMLEEGSFRGRTADFVFMFLFGGFLMTQSDRMSKSKELLTQVLQLDTYIFSWKMYFPINLVE

SEQ ID NO: 24001 - protein, 158 aa, Homo sapiens
  Payload ID: 4793
  Gene Symbol: DERL2
  Gene Name: derlin 2
  ENSP ID: ENSP00000459083
WRLITNFLFFGPVGFNFLFNMIFLYRYCRMLEEGSFRGRTADFVFMFLFGGFLMTQSDRMSKSKELLTQAPFLPWVLMGFSLLLGNSIIVDLLGIAVGHIYFFLEDVFPNQPGGIRILKTPSILKAIFDTPDEDPNYNPLPEERPGGFAWGEGQRLGG

SEQ ID NO: 24002 - protein, 103 aa, Homo sapiens; identical to SEQ ID NO: 23999
  Payload ID: 4793
  Gene Symbol: DERL2
  Gene Name: derlin 2
  ENSP ID: ENSP00000459154

SEQ ID NO: 24003 - protein, 74 aa, Homo sapiens
  Payload ID: 4793
  Gene Symbol: DERL2
  Gene Name: derlin 2
  ENSP ID: ENSP00000460671
MAYQSLRLEYLQIPPVSRAYTTACVLTTAAVQLELITPFQLYFNPELIFKHFQVLQLDTYIFSWKMYFPINLVE

SEQ ID NO: 24004 - protein, 79 aa, Homo sapiens
  Payload ID: 4793
  Gene Symbol: DERL2
  Gene Name: derlin 2
  ENSP ID: ENSP00000461603
  MOD_RES (1)..(1): Any amino acid
XLRLEYLQIPPVSRAYTTACVLTTAAVQLELITPFQLYFNPELIFKHFQIWRLITNFLFFGPVGFNFLFNMIFLFLVCL

SEQ ID NO: 24005 - protein, 82 aa, Homo sapiens
  Payload ID: 4793
  Gene Symbol: DERL2
  Gene Name: derlin 2
  ENSP ID: ENSP00000467794
  MOD_RES (1)..(1): Any amino acid
XAYQSLRLEYLQIPPVSRAYTTACVLTTAAVQLELITPFQLYFNPELIFKHFQIWRLITNFLFFGPVGFNFLFNMIFLSRTG

SEQ ID NO: 24006 - protein, 235 aa, Homo sapiens
  Payload ID: 4794
  Gene Symbol: DERL3
  Gene Name: derlin 3
  Uniprot ID: Q96Q80
  ENSP ID: ENSP00000315303
MAWQGLAAEFLQVPAVTRAYTAACVLTTAAVQLELLSPFQLYFNPHLVFRKFQVWRLVTNFLFFGPLGFSFFFNMLFVFRYCRMLEEGSFRGRTADFVFMFLFGGVLMTLLGLLGSLFFLGQALMAMLVYVWSRRSPRVRVNFFGLLTFQAPFLPWALMGFSLLLGNSILVDLLGIAVGHIYYFLEDVFPNQPGGKRLLQTPGFLKLLLDAPAEDPNYLPLPEEQPGPHLPPPQQ

SEQ ID NO: 24007 - protein, 178 aa, Homo sapiens
  Payload ID: 4794
  Gene Symbol: DERL3
  Gene Name: derlin 3
  ENSP ID: ENSP00000384473
MAWQGLAAEFLQVPAVTRAYTAACVLTTAAVFQVRPPRAAHLWARPTHPAPDRPSPVGLEARHQLPLLRAPGIQLLLQHALRVPLLPHAGRGLLPRPHGRLRLHVSLRGRPYDPAGTPGQPVLPGPGSAGLGLWAVEGDPTVRGCLTGIAVGHIYYFLEDVFPNQPGGKRLLQTPGFL

SEQ ID NO: 24008 - protein, 239 aa, Homo sapiens
  Payload ID: 4794
  Gene Symbol: DERL3
  Gene Name: derlin 3
  Uniprot ID: Q96Q80
  ENSP ID: ENSP00000384744
MAWQGLAAEFLQVPAVTRAYTAACVLTTAAVQLELLSPFQLYFNPHLVFRKFQVWRLVTNFLFFGPLGFSFFFNMLFVFRYCRMLEEGSFRGRTADFVFMFLFGGVLMTLLGLLGSLFFLGQALMAMLVYVWSRRSPRVRVNFFGLLTFQAPFLPWALMGFSLLLGNSILVDLLGIAVGHIYYFLEDVFPNQPGGKRLLQTPGFLGLQSSKAPAGSSLTIWTQQSQGGPGTAGELAAPS

SEQ ID NO: 24009 - protein, 205 aa, Homo sapiens
  Payload ID: 4794
  Gene Symbol: DERL3
  Gene Name: derlin 3
  Uniprot ID: Q96Q80
  ENSP ID: ENSP00000419399
MAWQGLAAEFLQVPAVTRAYTAACVLTTAAVQLELLSPFQLYFNPHLVFRKFQVWRLVTNFLFFGPLGFSFFFNMLFVFRYCRMLEEGSFRGRTADFVFMFLFGGVLMTLLGLLGSLFFLGQALMAMLVYVWSRRSPRVRVNFFGLLTFQAPFLPWALMGFSLLLGNSILVDLLGIAVGHIYYFLEDVFPNQPGGKRLLQTPGFL

SEQ ID NO: 24010 - protein, 178 aa, Homo sapiens; identical to SEQ ID NO: 24007
  Payload ID: 4794
  Gene Symbol: DERL3
  Gene Name: derlin 3
  ENSP ID: ENSP00000483251

SEQ ID NO: 24011 - protein, 239 aa, Homo sapiens; identical to SEQ ID NO: 24008
  Payload ID: 4794
  Gene Symbol: DERL3
  Gene Name: derlin 3
  Uniprot ID: Q96Q80
  ENSP ID: ENSP00000483693

SEQ ID NO: 24012 - protein, 205 aa, Homo sapiens; identical to SEQ ID NO: 24009
  Payload ID: 4794
  Gene Symbol: DERL3
  Gene Name: derlin 3
  Uniprot ID: Q96Q80
  ENSP ID: ENSP00000485763

SEQ ID NO: 24013 - protein, 235 aa, Homo sapiens; identical to SEQ ID NO: 24006
  Payload ID: 4794
  Gene Symbol: DERL3
  Gene Name: derlin 3
  Uniprot ID: Q96Q80
  ENSP ID: ENSP00000486587

SEQ ID NO: 24014 - protein, 958 aa, Homo sapiens [sequence omitted]

SEQ ID NO: 24015 - protein, 958 aa, Homo sapiens [sequence omitted]

SEQ ID NO: 24016 - protein, 144 aa, Homo sapiens
  Payload ID: 4795
  Gene Symbol: DSE
  Gene Name: dermatan sulfate epimerase
  ENSP ID: ENSP00000397597
MRTHTRGAPSVFFIYLLCFVSAYITDENPEVMIPFTNANYDSHPMLYFSRAEVAELQLRAASSHEHIAARLTEAVHTMLSSPLEYLPPWDPKDYSARWNEIFGNNLGALAMFCVLYPENIEARDMAKDYMERMAAQPSWLVKDA

SEQ ID NO: 24017 - protein, 958 aa, Homo sapiens [sequence omitted]

SEQ ID NO: 24018 - protein, 1222 aa, Homo sapiens
  Payload ID: 4796
  Gene Symbol: DSEL
  Gene Name: dermatan sulfate epimerase-like
  Uniprot ID: Q8IZU8
  ENSP ID: ENSP00000310565
MPKGGAPPWIMALMFTGHLLFLALLMFAFSTFEESVSNYSEWAVFTDDIDQFKTQKVQDFRPNQKLKKSMLHPSLYFDAGEIQAMRQKSRASHLHLFRAIRSAVTVMLSNPTYYLPPPKHADFAAKWNEIYGNNLPPLALYCLLCPEDKVAFEFVLEYMDRMVGYKDWLVENAPGDEVPIGHSLTGFATAFDFLYNLLDNHRRQKYLEKIWVITEEMYEYSKVRSWGKQLLHNHQATNMIALLTGALVTGVDKGSKANIWKQAVVDVMEKTMFLLNHIVDGSLDEGVAYGSYTAKSVTQYVFLAQRHFNINNLDNNWLKMHFWFYYATLLPGFQRTVGIADSNYNWFYGPESQLVFLDKFILKNGAGNWLAQQIRKHRPKDGPMVPSTAQRWSTLHTEYIWYDPQLTPQPPADYGTAKIHTFPNWGVVTYGAGLPNTQTNTFVSFKSGKLGGRAVYDIVHFQPYSWIDGWRSFNPGHEHPDQNSFTFAPNGQVFVSEALYGPKLSHLNNVLVFAPSPSSQCNKPWEGQLGECAQWLKWTGEEVGDAAGEIITASQHGEMVFVSGEAVSAYSSAMRLKSVYRALLLLNSQTLLVVDHIERQEDSPINSVSAFFHNLDIDFKYIPYKFMNRYNGAMMDVWDAHYKMFWFDHHGNSPMASIQEAEQAAEFKKRWTQFVNVTFQMEPTITRIAYVFYGPYINVSSCRFIDSSNPGLQISLNVNNTEHVVSIVTDYHNLKTRFNYLGFGGFASVADQGQITRFGLGTQAIVKPVRHDRIIFPFGFKFNIAVGLILCISLVILTFQWRFYLSFRKLMRWILILVIALWFIELLDVWSTCSQPICAKWTRTEAEGSKKSLSSEGHHMDLPDVVITSLPGSGAEILKQLFFNSSDFLYIRVPTAYIDIPETELEIDSFVDACEWKVSDIRSGHFRLLRGWLQSLVQDTKLHLQNIHLHEPNRGKLAQYFAMNKDKKRKFKRRESLPEQRSQMKGAFDRDAEYIRALRRHLVYYPSARPVLSLSSGSWTLKLHFFQEVLGASMRALYIVRDPRAWIYSMLYNSKPSLYSLKNVPEHLAKLFKIEGGKGKCNLNSGYAFEYEPLRKELSKSKSNAVSLLSHLWLANTAAALRINTDLLPTSYQLVKFEDIVHFPQKTTERIFAFLGIPLSPASLNQILFATSTNLFYLPYEGEISPTNTNVWKQNLPRDEIKLIENICWTLMDRLGYPKFMD

SEQ ID NO: 24019 - protein, 1222 aa, Homo sapiens; identical to SEQ ID NO: 24018
  Payload ID: 4796
  Gene Symbol: DSEL
  Gene Name: dermatan sulfate epimerase-like
  Uniprot ID: Q8IZU8
  ENSP ID: ENSP00000460321

SEQ ID NO: 24020 - protein, 201 aa, Homo sapiens
  Payload ID: 4797
  Gene Symbol: DPT
  Gene Name: dermatopontin
  Uniprot ID: Q07507
  ENSP ID: ENSP00000356791
MDLSLLWVLLPLVTMAWGQYGDYGYPYQQYHDYSDDGWVNLNRQGFSYQCPQGQVIVAVRSIFSKKEGSDRQWNYACMPTPQSLGEPTECWWEEINRAGMEWYQTCSNNGLVAGFQSRYFESVLDREWQFYCCRYSKRCPYSCWLTTEYPGHYGEEMDMISYNYDYYIRGATTTFSAVERDRQWKFIMCRMTEYDCEFANV

SEQ ID NO: 24021 - protein, 110 aa, Homo sapiens
  Payload ID: 4798
  Gene Symbol: DCD
  Gene Name: dermcidin
  Uniprot ID: P81605
  ENSP ID: ENSP00000293371
MRFMTLLFLTALAGALVCAYDPEAASAPGSGNPCHEASAAQKENAGEDPGLARQAPKPRKQRSSLLEKGLDGAKKAVGGLGKLGKDAVEDLESVGKGAVHDVKDVLDSVL

SEQ ID NO: 24022 - protein, 121 aa, Homo sapiens
  Payload ID: 4798
  Gene Symbol: DCD
  Gene Name: dermcidin
  Uniprot ID: P81605
  ENSP ID: ENSP00000406773
MRFMTLLFLTALAGALVCAYDPEAASAPGSGNPCHEASAAQKENAGEDPGLARQAPKPRKQRSSLLEKGLDGAKKAVGGLGKLGKDAVEDLESVGKGGEERLVFGAPVNLTSIPLTSVSRP

SEQ ID NO: 24023 - protein, 77 aa, Homo sapiens
  Payload ID: 4798
  Gene Symbol: DCD
  Gene Name: dermcidin
  Uniprot ID: P81605
  ENSP ID: ENSP00000450415
MRFMTLLFLTALAGALVCAYDPEAASAPGSGNHKQMDCLQLQKPPSETAKFLSSSTNLPRREKLVPSAKPPHTRGLV

SEQ ID NO: 24024 - protein, 476 aa, Homo sapiens
  Payload ID: 4799
  Gene Symbol: DMKN
  Gene Name: dermokine
  Uniprot ID: Q6E0U4
  ENSP ID: ENSP00000342012
MKFQGPLACLLLALCLGSGEAGPLQSGEESTGTNIGEALGHGLGDALSEGVGKAIGKEAGGAAGSKVSEALGQGTREAVGTGVRQVPGFGVADALGNRVGEAAHALGNTGHEIGRQAEDVIRHGADAVRGSWQGVPGHNGAWETSGGHGIFGSQGGLGGQGQGNPGGLGTPWVHGYPGNSAGSFGMNPQGAPWGQGGNGGPPNFGTNTQGAVAQPGYGSVRASNQNEGCTNPPPSGSGGGSSNSGGGSGSQSGSSGSGSNGDNNNGSSSGGSSSGSSSGGSSGGSSGGSSGNSGGSRGDSGSESSWGSSTGSSSGNHGGSGGGNGHKPGCEKPGNEARGSGESGIQNSETSPGMFNFDTFWKNFKSKLGFINWDAINKNQVPPPSTRALLYFSRLWEDFKQNTPFLNWKAIIEGADASSLQKRAGRDDQNYNYNQHAYPTAYGGKYSVKTPAKGGVSPSSSASRVQPGLLQWVKFW

SEQ ID NO: 24025 - protein, 99 aa, Homo sapiens
  Payload ID: 4799
  Gene Symbol: DMKN
  Gene Name: dermokine
  ENSP ID: ENSP00000376042
MLGITSCSDQQAKEGEGLEGSSTGSSSGNHGGSGGGNGHKPGCEKPGNEARGSGESGIQNSETSPGMFNFDTFWKNFKSKLGFINWDAINKDQRSSRIP

SEQ ID NO: 24026 - protein, 203 aa, Homo sapiens
  Payload ID: 4799
  Gene Symbol: DMKN
  Gene Name: dermokine
  ENSP ID: ENSP00000384509
MLGITSCSDQQAKEGEGLEGSSTGSSSGNHGGSGGGNGHKPGCEKPGNEARGSGESGIQNSETSPGMFNFDTFWKNFKSKLGFINWDAINKNQVPPPSTRALLYFSRLWEDFKQNTPFLNWKAIIEGADASSLQKRAGRDDQPGAGWQEVAAVTSKNYNYNQHAYPTAYGGKYSVKTPAKGGVSPSSSASRVQPGLLQWVKFW

SEQ ID NO: 24027 - protein, 90 aa, Homo sapiens
  Payload ID: 4799
  Gene Symbol: DMKN
  Gene Name: dermokine
  Uniprot ID: Q6E0U4
  ENSP ID: ENSP00000386225
MNMKPATASALLLLLLGLAWTQGSHGWGADASSLQKRAGRDDQNYNYNQHAYPTAYGGKYSVKTPAKGGVSPSSSASRVQPGLLQWVKFW

SEQ ID NO: 24028 - protein, 201 aa, Homo sapiens
  Payload ID: 4799
  Gene Symbol: DMKN
  Gene Name: dermokine
  ENSP ID: ENSP00000388378
  MOD_RES (1)..(1): Any amino acid
XGGGNGHKPGCEKPGNEARGSGESGIQGFRGQGVSSNMREISKEGNRLLGGSGDNYRNSETSPGMFNFDTFWKNFKSKLGFINWDAINKNQVPPPSTRALLYFSRLWEDFKQNTPFLNWKAIIEGADASSLQKRAGRDDQPGAGWQEVAAVTSKNYNYNQHAYPTAYGGKYSVKTPAKGGVSPSSSASRVQPGLLQWVKFW

SEQ ID NO: 24029 - protein, 398 aa, Homo sapiens
  Payload ID: 4799
  Gene Symbol: DMKN
  Gene Name: dermokine
  Uniprot ID: Q6E0U4
  ENSP ID: ENSP00000388404
MKFQGPLACLLLALCLGSGEAGPLQSGEESTGTNIGEALGHGLGDALSEGVGKAIGKEAGGAAGSKVSEALGQGTREAVGTGVRQVPGFGVADALGNRVGEAAHALGNTGHEIGRQAEDVIRHGADAVRGSWQGVPGHNGAWETSGGHGIFGSQGGLGGQGQGNPGGLGTPWVHGYPGNSAGSFGMNPQGAPWGQGGNGGPPNFGTNTQGAVAQPGYGSVRASNQNEGCTNPPPSGSGGGSSNSGGGSGSQSGSSGSGSNGDNNNGSSSGGSSSGSSSGGSSGGSSGGSSGNSGGSRGDSGSESSWGSSTGSSSGNHGGSGGGNGHKPGCEKPGNEARGSGESGIQGFRGQGVSSNMRNSETSPGMFNFDTFWKNFKSKLGFINWDAINKDQRSSRIP

SEQ ID NO: 24030 - protein, 465 aa, Homo sapiens
  Payload ID: 4799
  Gene Symbol: DMKN
  Gene Name: dermokine
  Uniprot ID: Q6E0U4
  ENSP ID: ENSP00000391036
MKFQGPLACLLLALCLGSGEAGPLQSGEESTGTNIGEALGHGLGDALSEGVGKAIGKEAGGAAGSKVSEALGQGTREAVGTGVRQVPGFGVADALGNRVGEAAHALGNTGHEIGRQAEDVIRHGADAVRGSWQGVPGHNGAWETSGGHGIFGSQGGLGGQGQGNPGGLGTPWVHGYPGNSAGSFGMNPQGAPWGQGGNGGPPNFGTNTQGAVAQPGYGSVRASNQNEGCTNPPPSGSGGGSSNSGGSSTGSSSGNHGGSGGGNGHKPGCEKPGNEARGSGESGIQGFRGQGVSSNMREISKEGNRLLGGSGDNYRGQGSSWGSGGGDAVGGVNTVNSETSPGMFNFDTFWKNFKSKLGFINWDAINKNQVPPPSTRALLYFSRLWEDFKQNTPFLNWKAIIEGADASSLQKRAGRDDQNYNYNQHAYPTAYGGKYSVKTPAKGGVSPSSSASRVQPGLLQWVKFW

SEQ ID NO: 24031 - protein, 189 aa, Homo sapiens
  Payload ID: 4799
  Gene Symbol: DMKN
  Gene Name: dermokine
  Uniprot ID: Q6E0U4
  ENSP ID: ENSP00000392222
MLGITSCSDQQAKEGEGLEGSSTGSSSGNHGGSGGGNGHKPGCEKPGNEARGSGESGIQNSETSPGMFNFDTFWKNFKSKLGFINWDAINKNQVPPPSTRALLYFSRLWEDFKQNTPFLNWKAIIEGADASSLQKRAGRDDQNYNYNQHAYPTAYGGKYSVKTPAKGGVSPSSSASRVQPGLLQWVKFW

SEQ ID NO: 24032 - protein, 436 aa, Homo sapiens
  Payload ID: 4799
  Gene Symbol: DMKN
  Gene Name: dermokine
  Uniprot ID: Q6E0U4
  ENSP ID: ENSP00000394908
MKFQGPLACLLLALCLGSGEAGPLQSGEESTGTNIGEALGHGLGDALSEGVGKAIGKEAGGAAGSKVSEALGQGTREAVGTGVRQVPGFGVADALGNRVGEAAHALGNTGHEIGRQAEDVIRHGADAVRGSWQGVPGHNGAWETSGGHGIFGSQGGLGGQGQGNPGGLGTPWVHGYPGNSAGSFGMNPQGAPWGQGGNGGPPNFGTNTQGAVAQPGYGSVRASNQNEGCTNPPPSGSGGGSSNSGGGSGSQSGSSGSGSNGDNNNGSSSGGSSSGSSSGGSSGGSSGGSSGNSGGSRGDSGSESSWGSSTGSSSGNHGGSGGGNGHKPGCEKPGNEARGSGESGIQGFRGQGVSSNMREISKEGNRLLGGSGDNYRGQGSSWGSGGGDAVGGVNTVNSETSPGMFNFDTFWKNFKSKLGFINWDAINKDQRSSRIP

SEQ ID NO: 24033 - protein, 116 aa, Homo sapiens
  Payload ID: 4799
  Gene Symbol: DMKN
  Gene Name: dermokine
  ENSP ID: ENSP00000397005
MLGITSCSDQQAKEGEGLEGSSTGSSSGNHGGSGGGNGHKPGCEKPGNEARGSGESGIQGQGSSWGSGGGDAVGGVNTVNSETSPGMFNFDTFWKNFKSKLGFINWDAINKDQRSS

SEQ ID NO: 24034 - protein, 131 aa, Homo sapiens
  Payload ID: 4799
  Gene Symbol: DMKN
  Gene Name: dermokine
  ENSP ID: ENSP00000403957
MLGITSCSDQQAKEGEGLEGSSTGSSSGNHGGSGGGNGHKPGCEKPGNEARGSGESGIQGFRGQGVSSNMRGQGSSWGSGGGDAVGGVNTVNSETSPGMFNFDTFWKNFKSKLGFINWDAINKDQRSSRIP

SEQ ID NO: 24035 - protein, 449 aa, Homo sapiens
  Payload ID: 4799
  Gene Symbol: DMKN
  Gene Name: dermokine
  Uniprot ID: Q6E0U4
  ENSP ID: ENSP00000405503
MKFQGPLACLLLALCLGSGEAGPLQSGEESTGTNIGEALGHGLGDALSEGVGKAIGKEAGGAAGSKVSEALGQGTREAVGTGVRQVPGFGVADALGNRVGEAAHALGNTGHEIGRQAEDVIRHGADAVRGSWQGVPGHNGAWETSGGHGIFGSQGGLGGQGQGNPGGLGTPWVHGYPGNSAGSFGMNPQGAPWGQGGNGGPPNFGTNTQGAVAQPGYGSVRASNQNEGCTNPPPSGSGGGSSNSGGSSTGSSSGNHGGSGGGNGHKPGCEKPGNEARGSGESGIQGQGSSWGSGGGDAVGGVNTVNSETSPGMFNFDTFWKNFKSKLGFINWDAINKNQVPPPSTRALLYFSRLWEDFKQNTPFLNWKAIIEGADASSLQKRAGRDDQPGAGWQEVAAVTSKNYNYNQHAYPTAYGGKYSVKTPAKGGVSPSSSASRVQPGLLQWVKFW

SEQ ID NO: 24036 - protein, 253 aa, Homo sapiens
  Payload ID: 4799
  Gene Symbol: DMKN
  Gene Name: dermokine
  ENSP ID: ENSP00000406864
MLGITSCSDQQAKEGEGLEGSSTGSSSGNHGGSGGGNGHKPGCEKPGNEARGSGESGIQGFRGQGVSSNMREISKEGNRLLGGSGDNYRGQGSSWGSGGGDAVGGVNTVNSETSPGMFNFDTFWKNFKSKLGFINWDAINKNQVPPPSTRALLYFSRLWEDFKQNTPFLNWKAIIEGADASSLQKRAGRDDQPGAGWQEVAAVTSKNYNYNQHAYPTAYGGKYSVKTPAKGGVSPSSSASRVQPGLLQWVKFW

SEQ ID NO: 24037 - protein, 369 aa, Homo sapiens
  Payload ID: 4799
  Gene Symbol: DMKN
  Gene Name: dermokine
  Uniprot ID: Q6E0U4
  ENSP ID: ENSP00000409513
MKFQGPLACLLLALCLGSGEAGPLQSGEESTGTNIGEALGHGLGDALSEGVGKAIGKEAGGAAGSKVSEALGQGTREAVGTGVRQVPGFGVADALGNRVGEAAHALGNTGHEIGRQAEDVIRHGADAVRGSWQGVPGHNGAWETSGGHGIFGSQGGLGGQGQGNPGGLGTPWVHGYPGNSAGSFGMNPQGAPWGQGGNGGPPNFGTNTQGAVAQPGYGSVRASNQNEGCTNPPPSGSGGGSSNSGGGSGSQSGSSGSGSNGDNNNGSSSGGSSSGSSSGGSSGGSSGGSSGNSGGSRGDSGSESSWGSSTGSSSGNHGGSGGGNGHKPGNSETSPGMFNFDTFWKNFKSKLGFINWDAINKDQRSSRIP

SEQ ID NO: 24038 - protein, 172 aa, Homo sapiens
  Payload ID: 4799
  Gene Symbol: DMKN
  Gene Name: dermokine
  ENSP ID: ENSP00000412075
MLGITSCSDQQAKEGEGLEGSSTGSSSGNHGGSGGGNGHKPGNSETSPGMFNFDTFWKNFKSKLGFINWDAINKNQVPPPSTRALLYFSRLWEDFKQNTPFLNWKAIIEGADASSLQKRAGRDDQNYNYNQHAYPTAYGGKYSVKTPAKGGVSPSSSASRVQPGLLQWVKFW

SEQ ID NO: 24039 - protein, 386 aa, Homo sapiens
  Payload ID: 4799
  Gene Symbol: DMKN
  Gene Name: dermokine
  Uniprot ID: Q6E0U4
  ENSP ID: ENSP00000414743
MKFQGPLACLLLALCLGSGEAGPLQSGEESTGTNIGEALGHGLGDALSEGVGKAIGKEAGGAAGSKVSEALGQGTREAVGTGVRQVPGFGVADALGNRVGEAAHALGNTGHEIGRQAEDVIRHGADAVRGSWQGVPGHNGAWETSGGHGIFGSQGGLGGQGQGNPGGLGTPWVHGYPGNSAGSFGMNPQGAPWGQGGNGGPPNFGTNTQGAVAQPGYGSVRASNQNEGCTNPPPSGSGGGSSNSGGGSGSQSGSSGSGSNGDNNNGSSSGGSSSGSSSGGSSGGSSGGSSGNSGGSRGDSGSESSWGSSTGSSSGNHGGSGGGNGHKPGCEKPGNEARGSGESGIQNSETSPGMFNFDTFWKNFKSKLGFINWDAINKDQRSSRIP

SEQ ID NO: 24040 - protein, 36 aa, Homo sapiens
  Payload ID: 4799
  Gene Symbol: DMKN
  Gene Name: dermokine
  ENSP ID: ENSP00000468840
MLGITSCSDQQAKEGEGIQHRLLLRQPRWERRRKWT

SEQ ID NO: 24041 - protein, 36 aa, Homo sapiens; identical to SEQ ID NO: 24040
  Payload ID: 4799
  Gene Symbol: DMKN
  Gene Name: dermokine
  ENSP ID: ENSP00000468987

SEQ ID NO: 24042 - protein, 36 aa, Homo sapiens; identical to SEQ ID NO: 24040
  Payload ID: 4799
  Gene Symbol: DMKN
  Gene Name: dermokine
  ENSP ID: ENSP00000469824

SEQ ID NO: 24043 - protein, 36 aa, Homo sapiens; identical to SEQ ID NO: 24040
  Payload ID: 4799
  Gene Symbol: DMKN
  Gene Name: dermokine
  ENSP ID: ENSP00000469845

SEQ ID NO: 24044 - protein, 36 aa, Homo sapiens; identical to SEQ ID NO: 24040
  Payload ID: 4799
  Gene Symbol: DMKN
  Gene Name: dermokine
  ENSP ID: ENSP00000469923

SEQ ID NO: 24045 - protein, 36 aa, Homo sapiens; identical to SEQ ID NO: 24040
  Payload ID: 4799
  Gene Symbol: DMKN
  Gene Name: dermokine
  ENSP ID: ENSP00000470033

SEQ ID NO: 24046 - protein, 36 aa, Homo sapiens; identical to SEQ ID NO: 24040
  Payload ID: 4799
  Gene Symbol: DMKN
  Gene Name: dermokine
  ENSP ID: ENSP00000470425

SEQ ID NO: 24047 - protein, 36 aa, Homo sapiens; identical to SEQ ID NO: 24040
  Payload ID: 4799
  Gene Symbol: DMKN
  Gene Name: dermokine
  ENSP ID: ENSP00000470510

SEQ ID NO: 24048 - protein, 36 aa, Homo sapiens; identical to SEQ ID NO: 24040
  Payload ID: 4799
  Gene Symbol: DMKN
  Gene Name: dermokine
  ENSP ID: ENSP00000470775

SEQ ID NO: 24049 - protein, 36 aa, Homo sapiens; identical to SEQ ID NO: 24040
  Payload ID: 4799
  Gene Symbol: DMKN
  Gene Name: dermokine
  ENSP ID: ENSP00000470881

SEQ ID NO: 24050 - protein, 201 aa, Homo sapiens
  Payload ID: 4799
  Gene Symbol: DMKN
  Gene Name: dermokine
  ENSP ID: ENSP00000471112
MLGITSCSDQQAKEGEGLEGSSTGSSSGNHGGSGGGNGHKPGCEKPGNEARGSGESGIQGFRGQGVSSNMRNSETSPGMFNFDTFWKNFKSKLGFINWDAINKNQVPPPSTRALLYFSRLWEDFKQNTPFLNWKAIIEGADASSLQKRAGRDDQNYNYNQHAYPTAYGGKYSVKTPAKGGVSPSSSASRVQPGLLQWVKFW

SEQ ID NO: 24051 - protein, 36 aa, Homo sapiens; identical to SEQ ID NO: 24040
  Payload ID: 4799
  Gene Symbol: DMKN
  Gene Name: dermokine
  ENSP ID: ENSP00000471288

SEQ ID NO: 24052 - protein, 36 aa, Homo sapiens; identical to SEQ ID NO: 24040
  Payload ID: 4799
  Gene Symbol: DMKN
  Gene Name: dermokine
  ENSP ID: ENSP00000471451

SEQ ID NO: 24053 - protein, 108 aa, Homo sapiens
  Payload ID: 4799
  Gene Symbol: DMKN
  Gene Name: dermokine
  ENSP ID: ENSP00000471487
  MOD_RES (1)..(1): Any amino acid
XPATASALLLLLLGLAWTQGSHGWVGTAGCTGCGRVITAETCRQRRSELQLQPACVSHCLWWEVLSQDPCKGGSLTFFLGFPGATWPAAVGEVLVGNFLQPPPRPRKA

SEQ ID NO: 24054 - protein, 36 aa, Homo sapiens; identical to SEQ ID NO: 24040
  Payload ID: 4799
  Gene Symbol: DMKN
  Gene Name: dermokine
  ENSP ID: ENSP00000471670

SEQ ID NO: 24055 - protein, 74 aa, Homo sapiens
  Payload ID: 4799
  Gene Symbol: DMKN
  Gene Name: dermokine
  ENSP ID: ENSP00000471968
  MOD_RES (1)..(1): Any amino acid
XALLLLLLGLAWTQGSHGWGADASSLQKRAGRDDQNYNYNQHAYPTAYGGKYSVKTPAKASRVQPGLLQWVKFW

SEQ ID NO: 24056 - protein, 36 aa, Homo sapiens; identical to SEQ ID NO: 24040
  Payload ID: 4799
  Gene Symbol: DMKN
  Gene Name: dermokine
  ENSP ID: ENSP00000472127

SEQ ID NO: 24057 - protein, 36 aa, Homo sapiens; identical to SEQ ID NO: 24040
  Payload ID: 4799
  Gene Symbol: DMKN
  Gene Name: dermokine
  ENSP ID: ENSP00000472262

SEQ ID NO: 24058 - protein, 36 aa, Homo sapiens; identical to SEQ ID NO: 24040
  Payload ID: 4799
  Gene Symbol: DMKN
  Gene Name: dermokine
  ENSP ID: ENSP00000472344

SEQ ID NO: 24059 - protein, 184 aa, Homo sapiens
  Payload ID: 4799
  Gene Symbol: DMKN
  Gene Name: dermokine
  ENSP ID: ENSP00000472349
MLGITSCSDQQAKEGEGLEGSSTGSSSGNHGGSGGGNGHKPGCEKPGNEARGSGESGIQNSETSPGMFNFDTFWKNFKSKLGFINWDAINKDFKQNTPFLNWKAIIEGADASSLQKRAGRDDQPGAGWQEVAAVTSKNYNYNQHAYPTAYGGKYSVKTPAKGGVSPSSSASRVQPGLLQWVKFW

SEQ ID NO: 24060 - protein, 82 aa, Homo sapiens
  Payload ID: 4799
  Gene Symbol: DMKN
  Gene Name: dermokine
  ENSP ID: ENSP00000473191
MLGITSCSDQQAKEGEGLEGSSTGSSSGNHGGSGGGNGHKPGNSETSPGMFNFDTFWKNFKSKLGFINWDAINKDQRSSRIP

SEQ ID NO: 24061 - protein, 94 aa, Homo sapiens
  Payload ID: 4799
  Gene Symbol: DMKN
  Gene Name: dermokine
  ENSP ID: ENSP00000473296
MFNFDTFWKNFKSKLGFINWDAINKNQVPPPSTRALLYFSRLWEDFKQNTPFLNWKAIIEGADASSLQKRAGRDDQNYNYNQHAYPTAYGGKYS

SEQ ID NO: 24062 - protein, 123 aa, Homo sapiens
  Payload ID: 4799
  Gene Symbol: DMKN
  Gene Name: dermokine
  Uniprot ID: Q6E0U4
  ENSP ID: ENSP00000473341
MFNFDTFWKNFKSKLGFINWDAINKNQVPPPSTRALLYFSRLWEDFKQNTPFLNWKAIIEGADASSLQKRAGRDDQNYNYNQHAYPTAYGGKYSVKTPAKGGVSPSSSASRVQPGLLQWVKFW

SEQ ID NO: 24063 - protein, 203 aa, Homo sapiens; identical to SEQ ID NO: 24026
  Payload ID: 4799
  Gene Symbol: DMKN
  Gene Name: dermokine
  ENSP ID: ENSP00000473526

SEQ ID NO: 24064 - protein, 96 aa, Homo sapiens
  Payload ID: 4799
  Gene Symbol: DMKN
  Gene Name: dermokine
  ENSP ID: ENSP00000473734
  MOD_RES (1)..(1): Any amino acid
XPPPSTRALLYFSRLWEDFKQNTPFLNWKAIIEGADASSLQKRAGRDDQNYNYNQHAYPTAYGGKYSVKTPAKGGVSPSSSASRVQPGLLQWVKFW

SEQ ID NO: 24065 - protein, 33 aa, Homo sapiens
  Payload ID: 4799
  Gene Symbol: DMKN
  Gene Name: dermokine
  ENSP ID: ENSP00000474098
MFNFDTFWKNFKSKLGFINWDAINKDQRSSRIP

SEQ ID NO: 24066 - protein, 33 aa, Homo sapiens; identical to SEQ ID NO: 24065
  Payload ID: 4799
  Gene Symbol: DMKN
  Gene Name: dermokine
  ENSP ID: ENSP00000474123

SEQ ID NO: 24067 - protein, 123 aa, Homo sapiens; identical to SEQ ID NO: 24062
  Payload ID: 4799
  Gene Symbol: DMKN
  Gene Name: dermokine
  Uniprot ID: Q6E0U4
  ENSP ID: ENSP00000474419

SEQ ID NO: 24068 - protein, 152 aa, Homo sapiens
  Payload ID: 4799
  Gene Symbol: DMKN
  Gene Name: dermokine
  ENSP ID: ENSP00000474491
SSTGSSSGNHGGSGGGNGHKPGNSETSPGMFNFDTFWKNFKSKLGFINWDAINKNQVPPPSTRALLYFSRLWEDFKQNTPFLNWKAIIEGADASSLQKRAGRDDQNYNYNQHAYPTAYGGKYSVKTPAKGGVSPSSSASRVQPGLLQWVKFW

SEQ ID NO: 24069 - protein, 36 aa, Homo sapiens
  Payload ID: 4799
  Gene Symbol: DMKN
  Gene Name: dermokine
  ENSP ID: ENSP00000474995
SGNHGGSGGGNGHKPGISRLWLTKWVLLSSHISLVP

SEQ ID NO: 24070 - protein, 36 aa, Homo sapiens; identical to SEQ ID NO: 24040
  Payload ID: 4799
  Gene Symbol: DMKN
  Gene Name: dermokine
  ENSP ID: ENSP00000476043

SEQ ID NO: 24071 - protein, 396 aa, Homo sapiens
  Payload ID: 4800
  Gene Symbol: DHH
  Gene Name: desert hedgehog
  Uniprot ID: O43323
  ENSP ID: ENSP00000266991
MALLTNLLPLCCLALLALPAQSCGPGRGPVGRRRYARKQLVPLLYKQFVPGVPERTLGASGPAEGRVARGSERFRDLVPNYNPDIIFKDEENSGADRLMTERCKERVNALAIAVMNMWPGVRLRVTEGWDEDGHHAQDSLHYEGRALDITTSDRDRNKYGLLARLAVEAGFDWVYYESRNHVHVSVKADNSLAVRAGGCFPGNATVRLWSGERKGLRELHRGDWVLAADASGRVVPTPVLLFLDRDLQRRASFVAVETEWPPRKLLLTPWHLVFAARGPAPAPGDFAPVFARRLRAGDSVLAPGGDALRPARVARVAREEAVGVFAPLTAHGTLLVNDVLASCYAVLESHQWAHRAFAPLRLLHALGALLPGGAVQPTGMHWYSRLLYRLAEELLG

SEQ ID NO: 24072 - protein, 470 aa, Homo sapiens
  Payload ID: 4801
  Gene Symbol: DES
  Gene Name: desmin
  Uniprot ID: P17661
  ENSP ID: ENSP00000363071
MSQAYSSSQRVSSYRRTFGGAPGFPLGSPLSSPVFPRAGFGSKGSSSSVTSRVYQVSRTSGGAGGLGSLRASRLGTTRTPSSYGAGELLDFSLADAVNQEFLTTRTNEKVELQELNDRFANYIEKVRFLEQQNAALAAEVNRLKGREPTRVAELYEEELRELRRQVEVLTNQRARVDVERDNLLDDLQRLKAKLQEEIQLKEEAENNLAAFRADVDAATLARIDLERRIESLNEEIAFLKKVHEEEIRELQAQLQEQQVQVEMDMSKPDLTAALRDIRAQYETIAAKNISEAEEWYKSKVSDLTQAANKNNDALRQAKQEMMEYRHQIQSYTCEIDALKGTNDSLMRQMRELEDRFASEASGYQDNIARLEEEIRHLKDEMARHLREYQDLLNVKMALDVEIATYRKLLEGEESRINLPIQTYSALNFRETSPEQRGSEVHTKKTVMIKTIETRDGEVVSEATQQQHEVL

SEQ ID NO: 24073 - protein, 840 aa, Homo sapiens
  Payload ID: 4802
  Gene Symbol: DSC1
  Gene Name: desmocollin 1
  Uniprot ID: Q08554
  ENSP ID: ENSP00000257197
MALASAAPGSIFCKQLLFSLLVLTLLCDACQKVYLRVPSHLQAETLVGKVNLEECLKSASLIRSSDPAFRILEDGSIYTTHDLILSSERKSFSIFLSDGQRREQQEIKVVLSARENKSPKKRHTKDTALKRSKRRWAPIPASLMENSLGPFPQHVQQIQSDAAQNYTIFYSISGPGVDKEPFNLFYIEKDTGDIFCTRSIDREKYEQFALYGYATTADGYAPEYPLPLIIKIEDDNDNAPYFEHRVTIFTVPENCRSGTSVGKVTATDLDEPDTLHTRLKYKILQQIPDHPKHFSIHPDTGVITTTTPFLDREKCDTYQLIMEVRDMGGQPFGLFNTGTITISLEDENDNPPSFTETSYVTEVEENRIDVEILRMKVQDQDLPNTPHSKAVYKILQGNENGNFIISTDPNTNEGVLCVVKPLNYEVNRQVILQVGVINEAQFSKAASSQTPTMCTTTVTVKIIDSDEGPECHPPVKVIQSQDGFPAGQELLGYKALDPEISSGEGLRYQKLGDEDNWFEINQHTGDLRTLKVLDRESKFVKNNQYNISVVAVDAVGRSCTGTLVVHLDDYNDHAPQIDKEVTICQNNEDFAVLKPVDPDGPENGPPFQFFLDNSASKNWNIEEKDGKTAILRQRQNLDYNYYSVPIQIKDRHGLVATHMLTVRVCDCSTPSECRMKDKSTRDVRPNVILGRWAILAMVLGSVLLLCILFTCFCVTAKRTVKKCFPEDIAQQNLIVSNTEGPGEEVTEANIRLPMQTSNICDTSMSVGTVGGQGIKTQQSFEMVKGGYTLDSNKGGGHQTLESVKGVGQGDTGRYAYTDWQSFTQPRLGEESIRGHTLIKN

SEQ ID NO: 24074 - protein, 894 aa, Homo sapiens
  Payload ID: 4802
  Gene Symbol: DSC1
  Gene Name: desmocollin 1
  Uniprot ID: Q08554
  ENSP ID: ENSP00000257198
MALASAAPGSIFCKQLLFSLLVLTLLCDACQKVYLRVPSHLQAETLVGKVNLEECLKSASLIRSSDPAFRILEDGSIYTTHDLILSSERKSFSIFLSDGQRREQQEIKVVLSARENKSPKKRHTKDTALKRSKRRWAPIPASLMENSLGPFPQHVQQIQSDAAQNYTIFYSISGPGVDKEPFNLFYIEKDTGDIFCTRSIDREKYEQFALYGYATTADGYAPEYPLPLIIKIEDDNDNAPYFEHRVTIFTVPENCRSGTSVGKVTATDLDEPDTLHTRLKYKILQQIPDHPKHFSIHPDTGVITTTTPFLDREKCDTYQLIMEVRDMGGQPFGLFNTGTITISLEDENDNPPSFTETSYVTEVEENRIDVEILRMKVQDQDLPNTPHSKAVYKILQGNENGNFIISTDPNTNEGVLCVVKPLNYEVNRQVILQVGVINEAQFSKAASSQTPTMCTTTVTVKIIDSDEGPECHPPVKVIQSQDGFPAGQELLGYKALDPEISSGEGLRYQKLGDEDNWFEINQHTGDLRTLKVLDRESKFVKNNQYNISVVAVDAVGRSCTGTLVVHLDDYNDHAPQIDKEVTICQNNEDFAVLKPVDPDGPENGPPFQFFLDNSASKNWNIEEKDGKTAILRQRQNLDYNYYSVPIQIKDRHGLVATHMLTVRVCDCSTPSECRMKDKSTRDVRPNVILGRWAILAMVLGSVLLLCILFTCFCVTAKRTVKKCFPEDIAQQNLIVSNTEGPGEEVTEANIRLPMQTSNICDTSMSVGTVGGQGIKTQQSFEMVKGGYTLDSNKGGGHQTLESVKGVGQGDTGRYAYTDWQSFTQPRLGEKVYLCGQDEEHKHCEDYVCSYNYEGKGSLAGSVGCCSDRQEEEGLEFLDHLEPKFRTLAKTCIKK

SEQ ID NO: 24075 - protein, 847 aa, Homo sapiens
  Payload ID: 4803
  Gene Symbol: DSC2
  Gene Name: desmocollin 2
  Uniprot ID: Q02487
  ENSP ID: ENSP00000251081
MEAARPSGSWNGALCRLLLLTLAILIFASDACKNVTLHVPSKLDAEKLVGRVNLKECFTAANLIHSSDPDFQILEDGSVYTTNTILLSSEKRSFTILLSNTENQEKKKIFVFLEHQTKVLKKRHTKEKVLRRAKRRWAPIPCSMLENSLGPFPLFLQQVQSDTAQNYTIYYSIRGPGVDQEPRNLFYVERDTGNLYCTRPVDREQYESFEIIAFATTPDGYTPELPLPLIIKIEDENDNYPIFTEETYTFTIFENCRVGTTVGQVCATDKDEPDTMHTRLKYSIIGQVPPSPTLFSMHPTTGVITTTSSQLDRELIDKYQLKIKVQDMDGQYFGLQTTSTCIINIDDVNDHLPTFTRTSYVTSVEENTVDVEILRVTVEDKDLVNTANWRANYTILKGNENGNFKIVTDAKTNEGVLCVVKPLNYEEKQQMILQIGVVNEAPFSREASPRSAMSTATVTVNVEDQDEGPECNPPIQTVRMKENAEVGTTSNGYKAYDPETRSSSGIRYKKLTDPTGWVTIDENTGSIKVFRSLDREAETIKNGIYNITVLASDQGGRTCTGTLGIILQDVNDNSPFIPKKTVIICKPTMSSAEIVAVDPDEPIHGPPFDFSLESSTSEVQRMWRLKAINDTAARLSYQNDPPFGSYVVPITVRDRLGMSSVTSLDVTLCDCITENDCTHRVDPRIGGGGVQLGKWAILAILLGIALLFCILFTLVCGASGTSKQPKVIPDDLAQQNLIVSNTEAPGDDKVYSANGFTTQTVGASAQGVCGTVGSGIKNGGQETIEMVKGGHQTSESCRGAGHHHTLDSCRGGHTEVDNCRYTYSEWHSFTQPRLGEESIRGHTLIKN

SEQ ID NO: 24076 - protein, 901 aa, Homo sapiens
  Payload ID: 4803
  Gene Symbol: DSC2
  Gene Name: desmocollin 2
  Uniprot ID: Q02487
  ENSP ID: ENSP00000280904
MEAARPSGSWNGALCRLLLLTLAILIFASDACKNVTLHVPSKLDAEKLVGRVNLKECFTAANLIHSSDPDFQILEDGSVYTTNTILLSSEKRSFTILLSNTENQEKKKIFVFLEHQTKVLKKRHTKEKVLRRAKRRWAPIPCSMLENSLGPFPLFLQQVQSDTAQNYTIYYSIRGPGVDQEPRNLFYVERDTGNLYCTRPVDREQYESFEIIAFATTPDGYTPELPLPLIIKIEDENDNYPIFTEETYTFTIFENCRVGTTVGQVCATDKDEPDTMHTRLKYSIIGQVPPSPTLFSMHPTTGVITTTSSQLDRELIDKYQLKIKVQDMDGQYFGLQTTSTCIINIDDVNDHLPTFTRTSYVTSVEENTVDVEILRVTVEDKDLVNTANWRANYTILKGNENGNFKIVTDAKTNEGVLCVVKPLNYEEKQQMILQIGVVNEAPFSREASPRSAMSTATVTVNVEDQDEGPECNPPIQTVRMKENAEVGTTSNGYKAYDPETRSSSGIRYKKLTDPTGWVTIDENTGSIKVFRSLDREAETIKNGIYNITVLASDQGGRTCTGTLGIILQDVNDNSPFIPKKTVIICKPTMSSAEIVAVDPDEPIHGPPFDFSLESSTSEVQRMWRLKAINDTAARLSYQNDPPFGSYVVPITVRDRLGMSSVTSLDVTLCDCITENDCTHRVDPRIGGGGVQLGKWAILAILLGIALLFCILFTLVCGASGTSKQPKVIPDDLAQQNLIVSNTEAPGDDKVYSANGFTTQTVGASAQGVCGTVGSGIKNGGQETIEMVKGGHQTSESCRGAGHHHTLDSCRGGHTEVDNCRYTYSEWHSFTQPRLGEKVYLCNQDENHKHAQDYVLTYNYEGRGSVAGSVGCCSERQEEDGLEFLDNLEPKFRTLAEACMKR

SEQ ID NO: 24077 - protein, 896 aa, Homo sapiens
  Payload ID: 4804
  Gene Symbol: DSC3
  Gene Name: desmocollin 3
  Uniprot ID: Q14574
  ENSP ID: ENSP00000353608
MAAAGPRRSVRGAVCLHLLLTLVIFSRAGEACKKVILNVPSKLEADKIIGRVNLEECFRSADLIRSSDPDFRVLNDGSVYTARAVALSDKKRSFTIWLSDKRKQTQKEVTVLLEHQKKVSKTRHTRETVLRRAKRRWAPIPCSMQENSLGPFPLFLQQVESDAAQNYTVFYSISGRGVDKEPLNLFYIERDTGNLFCTRPVDREEYDVFDLIAYASTADGYSADLPLPLPIRVEDENDNHPVFTEAIYNFEVLESSRPGTTVGVVCATDRDEPDTMHTRLKYSILQQTPRSPGLFSVHPSTGVITTVSHYLDREVVDKYSLIMKVQDMDGQFFGLIGTSTCIITVTDSNDNAPTFRQNAYEAFVEENAFNVEILRIPIEDKDLINTANWRVNFTILKGNENGHFKISTDKETNEGVLSVVKPLNYEENRQVNLEIGVNNEAPFARDIPRVTALNRALVTVHVRDLDEGPECTPAAQYVRIKENLAVGSKINGYKAYDPENRNGNGLRYKKLHDPKGWITIDEISGSIITSKILDREVETPKNELYNITVLAIDKDDRSCTGTLAVNIEDVNDNPPEILQEYVVICKPKMGYTDILAVDPDEPVHGAPFYFSLPNTSPEISRLWSLTKVNDTAARLSYQKNAGFQEYTIPITVKDRAGQAATKLLRVNLCECTHPTQCRATSRSTGVILGKWAILAILLGIALLFSVLLTLVCGVFGATKGKRFPEDLAQQNLIISNTEAPGDDRVCSANGFMTQTTNNSSQGFCGTMGSGMKNGGQETIEMMKGGNQTLESCRGAGHHHTLDSCRGGHTEVDNCRYTYSEWHSFTQPRLGEKLHRCNQNEDRMPSQDYVLTYNYEGRGSPAGSVGCCSEKQEEDGLDFLNNLEPKFITLAEACTKR

SEQ ID NO: 24078 - protein, 839 aa, Homo sapiens
  Payload ID: 4804
  Gene Symbol: DSC3
  Gene Name: desmocollin 3
  Uniprot ID: Q14574
  ENSP ID: ENSP00000392068
MAAAGPRRSVRGAVCLHLLLTLVIFSRAGEACKKVILNVPSKLEADKIIGRVNLEECFRSADLIRSSDPDFRVLNDGSVYTARAVALSDKKRSFTIWLSDKRKQTQKEVTVLLEHQKKVSKTRHTRETVLRRAKRRWAPIPCSMQENSLGPFPLFLQQVESDAAQNYTVFYSISGRGVDKEPLNLFYIERDTGNLFCTRPVDREEYDVFDLIAYASTADGYSADLPLPLPIRVEDENDNHPVFTEAIYNFEVLESSRPGTTVGVVCATDRDEPDTMHTRLKYSILQQTPRSPGLFSVHPSTGVITTVSHYLDREVVDKYSLIMKVQDMDGQFFGLIGTSTCIITVTDSNDNAPTFRQNAYEAFVEENAFNVEILRIPIEDKDLINTANWRVNFTILKGNENGHFKISTDKETNEGVLSVVKPLNYEENRQVNLEIGVNNEAPFARDIPRVTALNRALVTVHVRDLDEGPECTPAAQYVRIKENLAVGSKINGYKAYDPENRNGNGLRYKKLHDPKGWITIDEISGSIITSKILDREVETPKNELYNITVLAIDKDDRSCTGTLAVNIEDVNDNPPEILQEYVVICKPKMGYTDILAVDPDEPVHGAPFYFSLPNTSPEISRLWSLTKVNDTAARLSYQKNAGFQEYTIPITVKDRAGQAATKLLRVNLCECTHPTQCRATSRSTGVILGKWAILAILLGIALLFSVLLTLVCGVFGATKGKRFPEDLAQQNLIISNTEAPGDDRVCSANGFMTQTTNNSSQGFCGTMGSGMKNGGQETIEMMKGGNQTLESCRGAGHHHTLDSCRGGHTEVDNCRYTYSEWHSFTQPRLGEESIRGHTG

SEQ ID NO: 24079 - protein, 214 aa, Homo sapiens
  Payload ID: 4804
  Gene Symbol: DSC3
  Gene Name: desmocollin 3
  ENSP ID: ENSP00000464283
  MOD_RES (1)..(1): Any amino acid
XKVNDTAARLSYQKNAGFQEYTIPITVKDRAGQAATKLLRVNLCECTHPTQCRATSRSTGVILGKWAILAILLGIALLFSVLLTLVCGVFGATKGKRFPEDLAQQNLIISNTEAPGDDRVCSANGFMTQTTNNSSQGFCGTMGSGMKNGGQETIEMMKGGNQTLESCRGAGHHHTLDSCRGGHTEVDNCRYTYSEWHSFTQPRLGEESIRGHTG

SEQ ID NO: 24080 - protein, 1049 aa, Homo sapiens
  Payload ID: 4805
  Gene Symbol: DSG1
  Gene Name: desmoglein 1
  Uniprot ID: Q02413
  ENSP ID: ENSP00000257192
MDWSFFRVVAMLFIFLVVVEVNSEFRIQVRDYNTKNGTIKWHSIRRQKREWIKFAAACREGEDNSKRNPIAKIHSDCAANQQVTYRISGVGIDQPPYGIFVINQKTGEINITSIVDREVTPFFIIYCRALNSMGQDLERPLELRVRVLDINDNPPVFSMATFAGQIEENSNANTLVMILNATDADEPNNLNSKIAFKIIRQEPSDSPMFIINRNTGEIRTMNNFLDREQYGQYALAVRGSDRDGGADGMSAECECNIKILDVNDNIPYMEQSSYTIEIQENTLNSNLLEIRVIDLDEEFSANWMAVIFFISGNEGNWFEIEMNERTNVGILKVVKPLDYEAMQSLQLSIGVRNKAEFHHSIMSQYKLKASAISVTVLNVIEGPVFRPGSKTYVVTGNMGSNDKVGDFVATDLDTGRPSTTVRYVMGNNPADLLAVDSRTGKLTLKNKVTKEQYNMLGGKYQGTILSIDDNLQRTCTGTININIQSFGNDDRTNTEPNTKITTNTGRQESTSSTNYDTSTTSTDSSQVYSSEPGNGAKDLLSDNVHFGPAGIGLLIMGFLVLGLVPFLMICCDCGGAPRSAAGFEPVPECSDGAIHSWAVEGPQPEPRDITTVIPQIPPDNANIIECIDNSGVYTNEYGGREMQDLGGGERMTGFELTEGVKTSGMPEICQEYSGTLRRNSMRECREGGLNMNFMESYFCQKAYAYADEDEGRPSNDCLLIYDIEGVGSPAGSVGCCSFIGEDLDDSFLDTLGPKFKKLADISLGKESYPDLDPSWPPQSTEPVCLPQETEPVVSGHPPISPHFGTTTVISESTYPSGPGVLHPKPILDPLGYGNVTVTESYTTSDTLKPSVHVHDNRPASNVVVTERVVGPISGADLHGMLEMPDLRDGSNVIVTERVIAPSSSLPTSLTIHHPRESSNVVVTERVIQPTSGMIGSLSMHPELANAHNVIVTERVVSGAGVTGISGTTGISGGIGSSGLVGTSMGAGSGALSGAGISGGGIGLSSLGGTASIGHMRSSSDHHFNQTIGSASPSTARSRITKYSTVQYSK

SEQ ID NO: 24081 - protein, 408 aa, Homo sapiens
  Payload ID: 4805
  Gene Symbol: DSG1
  Gene Name: desmoglein 1
  Uniprot ID: Q02413
  ENSP ID: ENSP00000462666
MQDLGGGERMTGFELTEGVKTSGMPEICQEYSGTLRRNSMRECREGGLNMNFMESYFCQKAYAYADEDEGRPSNDCLLIYDIEGVGSPAGSVGCCSFIGEDLDDSFLDTLGPKFKKLADISLGKESYPDLDPSWPPQSTEPVCLPQETEPVVSGHPPISPHFGTTTVISESTYPSGPGVLHPKPILDPLGYGNVTVTESYTTSDTLKPSVHVHDNRPASNVVVTERVVGPISGADLHGMLEMPDLRDGSNVIVTERVIAPSSSLPTSLTIHHPRESSNVVVTERVIQPTSGMIGSLSMHPELANAHNVIVTERVVSGAGVTGISGTTGISGGIGSSGLVGTSMGAGSGALSGAGISGGGIGLSSLGGTASIGHMRSSSDHHFNQTIGSASPSTARSRITKYSTVQYSK

SEQ ID NO: 24082 - protein, 1118 aa, Homo sapiens
  Payload ID: 4806
  Gene Symbol: DSG2
  Gene Name: desmoglein 2
  Uniprot ID: Q14126
  ENSP ID: ENSP00000261590
MARSPGRAYALLLLLICFNVGSGLHLQVLSTRNENKLLPKHPHLVRQKRAWITAPVALREGEDLSKKNPIAKIHSDLAEERGLKITYKYTGKGITEPPFGIFVFNKDTGELNVTSILDREETPFFLLTGYALDARGNNVEKPLELRIKVLDINDNEPVFTQDVFVGSVEELSAAHTLVMKINATDADEPNTLNSKISYRIVSLEPAYPPVFYLNKDTGEIYTTSVTLDREEHSSYTLTVEARDGNGEVTDKPVKQAQVQIRILDVNDNIPVVENKVLEGMVEENQVNVEVTRIKVFDADEIGSDNWLANFTFASGNEGGYFHIETDAQTNEGIVTLIKEVDYEEMKNLDFSVIVANKAAFHKSIRSKYKPTPIPIKVKVKNVKEGIHFKSSVISIYVSESMDRSSKGQIIGNFQAFDEDTGLPAHARYVKLEDRDNWISVDSVTSEIKLAKLPDFESRYVQNGTYTVKIVAISEDYPRKTITGTVLINVEDINDNCPTLIEPVQTICHDAEYVNVTAEDLDGHPNSGPFSFSVIDKPPGMAEKWKIARQESTSVLLQQSEKKLGRSEIQFLISDNQGFSCPEKQVLTLTVCECLHGSGCREAQHDSYVGLGPAAIALMILAFLLLLLVPLLLLMCHCGKGAKGFTPIPGTIEMLHPWNNEGAPPEDKVVPSFLPVDQGGSLVGRNGVGGMAKEATMKGSSSASIVKGQHEMSEMDGRWEEHRSLLSGRATQFTGATGAIMTTETTKTARATGASRDMAGAQAAAVALNEEFLRNYFTDKAASYTEEDENHTAKDCLLVYSQEETESLNASIGCCSFIEGELDDRFLDDLGLKFKTLAEVCLGQKIDINKEIEQRQKPATETSMNTASHSLCEQTMVNSENTYSSGSSFPVPKSLQEANAEKVTQEIVTERSVSSRQAQKVATPLPDPMASRNVIATETSYVTGSTMPPTTVILGPSQPQSLIVTERVYAPASTLVDQPYANEGTVVVTERVIQPHGGGSNPLEGTQHLQDVPYVMVRERESFLAPSSGVQPTLAMPNIAVGQNVTVTERVLAPASTLQSSYQIPTENSMTARNTTVSGAGVPGPLPDFGLEESGHSNSTITTSSTRVTKHSTVQHSYS

SEQ ID NO: 24083 - protein, 232 aa, Homo sapiens
  Payload ID: 4806
  Gene Symbol: DSG2
  Gene Name: desmoglein 2
  ENSP ID: ENSP00000462503
MARSPGRAYALLLLLICFNVGSGLHLQVLSTRNENKLLPKHPHLVRQKRAWITAPVALREGEDLSKKNPIAKIHSDLAEERGLKITYKYTGKGITEPPFGIFVFNKDTGELNVTSILDREETPFFLLTGYALDARGNNVEKPLELRIKVLDINDNEPVFTQDVFVGSVEELSAAHTLVMKINATDADEPNTLNSKISYRIVSLEPAYPPVFYLNKDTGEIYTTSVTLDREVS

SEQ ID NO: 24084 - protein, 999 aa, Homo sapiens
  Payload ID: 4807
  Gene Symbol: DSG3
  Gene Name: desmoglein 3
  Uniprot ID: P32926
  ENSP ID: ENSP00000257189
MMGLFPRTTGALAIFVVVILVHGELRIETKGQYDEEEMTMQQAKRRQKREWVKFAKPCREGEDNSKRNPIAKITSDYQATQKITYRISGVGIDQPPFGIFVVDKNTGDINITAIVDREETPSFLITCRALNAQGLDVEKPLILTVKILDINDNPPVFSQQIFMGEIEENSASNSLVMILNATDADEPNHLNSKIAFKIVSQEPAGTPMFLLSRNTGEVRTLTNSLDREQASSYRLVVSGADKDGEGLSTQCECNIKVKDVNDNFPMFRDSQYSARIEENILSSELLRFQVTDLDEEYTDNWLAVYFFTSGNEGNWFEIQTDPRTNEGILKVVKALDYEQLQSVKLSIAVKNKAEFHQSVISRYRVQSTPVTIQVINVREGIAFRPASKTFTVQKGISSKKLVDYILGTYQAIDEDTNKAASNVKYVMGRNDGGYLMIDSKTAEIKFVKNMNRDSTFIVNKTITAEVLAIDEYTGKTSTGTVYVRVPDFNDNCPTAVLEKDAVCSSSPSVVVSARTLNNRYTGPYTFALEDQPVKLPAVWSITTLNATSALLRAQEQIPPGVYHISLVLTDSQNNRCEMPRSLTLEVCQCDNRGICGTSYPTTSPGTRYGRPHSGRLGPAAIGLLLLGLLLLLLAPLLLLTCDCGAGSTGGVTGGFIPVPDGSEGTIHQWGIEGAHPEDKEITNICVPPVTANGADFMESSEVCTNTYARGTAVEGTSGMEMTTKLGAATESGGAAGFATGTVSGAASGFGAATGVGICSSGQSGTMRTRHSTGGTNKDYADGAISMNFLDSYFSQKAFACAEEDDGQEANDCLLIYDNEGADATGSPVGSVGCCSFIADDLDDSFLDSLGPKFKKLAEISLGVDGEGKEVQPPSKDSGYGIESCGHPIEVQQTGFVKCQTLSGSQGASALSTSGSVQPAVSIPDPLQHGNYLVTETYSASGSLVQPSTAGFDPLLTQNVIVTERVICPISSVPGNLAGPTQLRGSHTMLCTEDPCSRLI

SEQ ID NO: 24085 - protein, 1040 aa, Homo sapiens
  Payload ID: 4808
  Gene Symbol: DSG4
  Gene Name: desmoglein 4
  Uniprot ID: Q86SJ6
  ENSP ID: ENSP00000311859
MDWLFFRNICLLIILMVVMEVNSEFIVEVKEFDIENGTTKWQTVRRQKREWIKFAAACREGEDNSKRNPIAKIRSDCESNQKITYRISGVGIDRPPYGVFTINPRTGEINITSVVDREITPLFLIYCRALNSRGEDLERPLELRVKVMDINDNAPVFSQSVYTASIEENSDANTLVVKLCATDADEENHLNSKIAYKIVSQEPSGAPMFILNRYTGEVCTMSSFLDREQHSMYNLVVRGSDRDGAADGLSSECDCRIKVLDVNDNFPTLEKTSYSASIEENCLSSELIRLQAIDLDEEGTDNWLAQYLILSGNDGNWFDIQTDPQTNEGILKVVKMLDYEQAPNIQLSIGVKNQADFHYSVASQFQMHPTPVRIQVVDVREGPAFHPSTMAFSVREGIKGSSLLNYVLGTYTAIDLDTGNPATDVRYIIGHDAGSWLKIDSRTGEIQFSREFDKKSKYIINGIYTAEILAIDDGSGKTATGTICIEVPDINDYCPNIFPERRTICIDSPSVLISVNEHSYGSPFTFCVVDEPPGIADMWDVRSTNATSAILTAKQVLSPGFYEIPILVKDSYNRACELAQMVQLYACDCDDNHMCLDSGAAGIYTEDITGDTYGPVTEDQAGVSNVGLGPAGIGMMVLGILLLILAPLLLLLCCCKQRQPEGLGTRFAPVPEGGEGVMQSWRIEGAHPEDRDVSNICAPMTASNTQDRMDSSEIYTNTYAAGGTVEGGVSGVELNTGMGTAVGLMAAGAAGASGAARKRSSTMGTLRDYADADINMAFLDSYFSEKAYAYADEDEGRPANDCLLIYDHEGVGSPVGSIGCCSWIVDDLDESCMETLDPKFRTLAEICLNTEIEPFPSHQACIPISTDLPLLGPNYFVNESSGLTPSEVEFQEEMAASEPVVHGDIIVTETYGNADPCVQPTTIIFDPQLAPNVVVTEAVMAPVYDIQGNICVPAELADYNNVIYAERVLASPGVPDMSNSSTTEGCMGPVMSGNILVGPEIQVMQMMSPDLPIGQTVGSTSPMTSRHRVTRYSNIHYTQQ

SEQ ID NO: 24086 - protein, 1059 aa, Homo sapiens
  Payload ID: 4808
  Gene Symbol: DSG4
  Gene Name: desmoglein 4
  Uniprot ID: Q86SJ6
  ENSP ID: ENSP00000352785
MDWLFFRNICLLIILMVVMEVNSEFIVEVKEFDIENGTTKWQTVRRQKREWIKFAAACREGEDNSKRNPIAKIRSDCESNQKITYRISGVGIDRPPYGVFTINPRTGEINITSVVDREITPLFLIYCRALNSRGEDLERPLELRVKVMDINDNAPVFSQSVYTASIEENSDANTLVVKLCATDADEENHLNSKIAYKIVSQEPSGAPMFILNRYTGEVCTMSSFLDREQHSMYNLVVRGSDRDGAADGLSSECDCRIKVLDVNDNFPTLEKTSYSASIEENCLSSELIRLQAIDLDEEGTDNWLAQYLILSGNDGNWFDIQTDPQTNEGILKVVKMLDYEQAPNIQLSIGVKNQADFHYSVASQFQMHPTPVRIQVVDVREGPAFHPSTMAFSVREGIKGSSLLNYVLGTYTAIDLDTGNPATDVRYIIGHDAGSWLKIDSRTGEIQFSREFDKKSKYIINGIYTAEILAIDDGSGKTATGTICIEVPDINDYCPNIFPERRTICIDSPSVLISVNEHSYGSPFTFCVVDEPPGIADMWDVRSTNATSAILTAKQVLSPGFYEIPILVKDSYNRACELAQMVQLYACDCDDNHMCLDSGAAGIYTEDITGDTYGPVTEDQAGVSNVGLGPAGIGMMVLGILLLILAPLLLLLCCCKQRQPEGLGTRFAPVPEGGEGVMQSWRIEGAHPEDRLFSAYALPGGGGTADGGGSVLGRCALQATPALLNQHPPFSEIYTNTYAAGGTVEGGVSGVELNTGMGTAVGLMAAGAAGASGAARKRSSTMGTLRDYADADINMAFLDSYFSEKAYAYADEDEGRPANDCLLIYDHEGVGSPVGSIGCCSWIVDDLDESCMETLDPKFRTLAEICLNTEIEPFPSHQACIPISTDLPLLGPNYFVNESSGLTPSEVEFQEEMAASEPVVHGDIIVTETYGNADPCVQPTTIIFDPQLAPNVVVTEAVMAPVYDIQGNICVPAELADYNNVIYAERVLASPGVPDMSNSSTTEGCMGPVMSGNILVGPEIQVMQMMSPDLPIGQTVGSTSPMTSRHRVTRYSNIHYTQQ

SEQ ID NO: 24087 - protein, 2871 aa, Homo sapiens
  Payload ID: 4809
  Gene Symbol: DSP
  Gene Name: desmoplakin
  Uniprot ID: P15924
  ENSP ID: ENSP00000369129
MSCNGGSHPRINTLGRMIRAESGPDLRYEVTSGGGGTSRMYYSRRGVITDQNSDGYCQTGTMSRHQNQNTIQELLQNCSDCLMRAELIVQPELKYGDGIQLTRSRELDECFAQANDQMEILDSLIREMRQMGQPCDAYQKRLLQLQEQMRALYKAISVPRVRRASSKGGGGYTCQSGSGWDEFTKHVTSECLGWMRQQRAEMDMVAWGVDLASVEQHINSHRGIHNSIGDYRWQLDKIKADLREKSAIYQLEEEYENLLKASFERMDHLRQLQNIIQATSREIMWINDCEEEELLYDWSDKNTNIAQKQEAFSIRMSQLEVKEKELNKLKQESDQLVLNQHPASDKIEAYMDTLQTQWSWILQITKCIDVHLKENAAYFQFFEEAQSTEAYLKGLQDSIRKKYPCDKNMPLQHLLEQIKELEKEREKILEYKRQVQNLVNKSKKIVQLKPRNPDYRSNKPIILRALCDYKQDQKIVHKGDECILKDNNERSKWYVTGPGGVDMLVPSVGLIIPPPNPLAVDLSCKIEQYYEAILALWNQLYINMKSLVSWHYCMIDIEKIRAMTIAKLKTMRQEDYMKTIADLELHYQEFIRNSQGSEMFGDDDKRKIQSQFTDAQKHYQTLVIQLPGYPQHQTVTTTEITHHGTCQDVNHNKVIETNRENDKQETWMLMELQKIRRQIEHCEGRMTLKNLPLADQGSSHHITVKINELKSVQNDSQAIAEVLNQLKDMLANFRGSEKYCYLQNEVFGLFQKLENINGVTDGYLNSLCTVRALLQAILQTEDMLKVYEARLTEEETVCLDLDKVEAYRCGLKKIKNDLNLKKSLLATMKTELQKAQQIHSQTSQQYPLYDLDLGKFGEKVTQLTDRWQRIDKQIDFRLWDLEKQIKQLRNYRDNYQAFCKWLYDAKRRQDSLESMKFGDSNTVMRFLNEQKNLHSEISGKRDKSEEVQKIAELCANSIKDYELQLASYTSGLETLLNIPIKRTMIQSPSGVILQEAADVHARYIELLTRSGDYYRFLSEMLKSLEDLKLKNTKIEVLEEELRLARDANSENCNKNKFLDQNLQKYQAECSQFKAKLASLEELKRQAELDGKSAKQNLDKCYGQIKELNEKITRLTYEIEDEKRRRKSVEDRFDQQKNDYDQLQKARQCEKENLGWQKLESEKAIKEKEYEIERLRVLLQEEGTRKREYENELAKVRNHYNEEMSNLRNKYETEINITKTTIKEISMQKEDDSKNLRNQLDRLSRENRDLKDEIVRLNDSILQATEQRRRAEENALQQKACGSEIMQKKQHLEIELKQVMQQRSEDNARHKQSLEEAAKTIQDKNKEIERLKAEFQEEAKRRWEYENELSKVRNNYDEEIISLKNQFETEINITKTTIHQLTMQKEEDTSGYRAQIDNLTRENRSLSEEIKRLKNTLTQTTENLRRVEEDIQQQKATGSEVSQRKQQLEVELRQVTQMRTEESVRYKQSLDDAAKTIQDKNKEIERLKQLIDKETNDRKCLEDENARLQRVQYDLQKANSSATETINKLKVQEQELTRLRIDYERVSQERTVKDQDITRFQNSLKELQLQKQKVEEELNRLKRTASEDSCKRKKLEEELEGMRRSLKEQAIKITNLTQQLEQASIVKKRSEDDLRQQRDVLDGHLREKQRTQEELRRLSSEVEALRRQLLQEQESVKQAHLRNEHFQKAIEDKSRSLNESKIEIERLQSLTENLTKEHLMLEEELRNLRLEYDDLRRGRSEADSDKNATILELRSQLQISNNRTLELQGLINDLQRERENLRQEIEKFQKQALEASNRIQESKNQCTQVVQERESLLVKIKVLEQDKARLQRLEDELNRAKSTLEAETRVKQRLECEKQQIQNDLNQWKTQYSRKEEAIRKIESEREKSEREKNSLRSEIERLQAEIKRIEERCRRKLEDSTRETQSQLETERSRYQREIDKLRQRPYGSHRETQTECEWTVDTSKLVFDGLRKKVTAMQLYECQLIDKTTLDKLLKGKKSVEEVASEIQPFLRGAGSIAGASASPKEKYSLVEAKRKKLISPESTVMLLEAQAATGGIIDPHRNEKLTVDSAIARDLIDFDDRQQIYAAEKAITGFDDPFSGKTVSVSEAIKKNLIDRETGMRLLEAQIASGGVVDPVNSVFLPKDVALARGLIDRDLYRSLNDPRDSQKNFVDPVTKKKVSYVQLKERCRIEPHTGLLLLSVQKRSMSFQGIRQPVTVTELVDSGILRPSTVNELESGQISYDEVGERIKDFLQGSSCIAGIYNETTKQKLGIYEAMKIGLVRPGTALELLEAQAATGFIVDPVSNLRLPVEEAYKRGLVGIEFKEKLLSAERAVTGYNDPETGNIISLFQAMNKELIEKGHGIRLLEAQIATGGIIDPKESHRLPVDIAYKRGYFNEELSEILSDPSDDTKGFFDPNTEENLTYLQLKERCIKDEETGLCLLPLKEKKKQVQTSQKNTLRKRRVVIVDPETNKEMSVQEAYKKGLIDYETFKELCEQECEWEEITITGSDGSTRVVLVDRKTGSQYDIQDAIDKGLVDRKFFDQYRSGSLSLTQFADMISLKNGVGTSSSMGSGVSDDVFSSSRHESVSKISTISSVRNLTIRSSSFSDTLEESSPIAAIFDTENLEKISITEGIERGIVDSITGQRLLEAQACTGGIIHPTTGQKLSLQDAVSQGVIDQDMATRLKPAQKAFIGFEGVKGKKKMSAAEAVKEKWLPYEAGQRFLEFQYLTGGLVDPEVHGRISTEEAIRKGFIDGRAAQRLQDTSSYAKILTCPKTKLKISYKDAINRSMVEDITGLRLLEAASVSSKGLPSPYNMSSAPGSRSGSRSGSRSGSRSGSRSGSRRGSFDATGNSSYSYSYSFSSSSIGH

SEQ ID NO: 24088 - protein, 2272 aa, Homo sapiens
  Payload ID: 4809
  Gene Symbol: DSP
  Gene Name: desmoplakin
  Uniprot ID: P15924
  ENSP ID: ENSP00000396591
MSCNGGSHPRINTLGRMIRAESGPDLRYEVTSGGGGTSRMYYSRRGVITDQNSDGYCQTGTMSRHQNQNTIQELLQNCSDCLMRAELIVQPELKYGDGIQLTRSRELDECFAQANDQMEILDSLIREMRQMGQPCDAYQKRLLQLQEQMRALYKAISVPRVRRASSKGGGGYTCQSGSGWDEFTKHVTSECLGWMRQQRAEMDMVAWGVDLASVEQHINSHRGIHNSIGDYRWQLDKIKADLREKSAIYQLEEEYENLLKASFERMDHLRQLQNIIQATSREIMWINDCEEEELLYDWSDKNTNIAQKQEAFSIRMSQLEVKEKELNKLKQESDQLVLNQHPASDKIEAYMDTLQTQWSWILQITKCIDVHLKENAAYFQFFEEAQSTEAYLKGLQDSIRKKYPCDKNMPLQHLLEQIKELEKEREKILEYKRQVQNLVNKSKKIVQLKPRNPDYRSNKPIILRALCDYKQDQKIVHKGDECILKDNNERSKWYVTGPGGVDMLVPSVGLIIPPPNPLAVDLSCKIEQYYEAILALWNQLYINMKSLVSWHYCMIDIEKIRAMTIAKLKTMRQEDYMKTIADLELHYQEFIRNSQGSEMFGDDDKRKIQSQFTDAQKHYQTLVIQLPGYPQHQTVTTTEITHHGTCQDVNHNKVIETNRENDKQETWMLMELQKIRRQIEHCEGRMTLKNLPLADQGSSHHITVKINELKSVQNDSQAIAEVLNQLKDMLANFRGSEKYCYLQNEVFGLFQKLENINGVTDGYLNSLCTVRALLQAILQTEDMLKVYEARLTEEETVCLDLDKVEAYRCGLKKIKNDLNLKKSLLATMKTELQKAQQIHSQTSQQYPLYDLDLGKFGEKVTQLTDRWQRIDKQIDFRLWDLEKQIKQLRNYRDNYQAFCKWLYDAKRRQDSLESMKFGDSNTVMRFLNEQKNLHSEISGKRDKSEEVQKIAELCANSIKDYELQLASYTSGLETLLNIPIKRTMIQSPSGVILQEAADVHARYIELLTRSGDYYRFLSEMLKSLEDLKLKNTKIEVLEEELRLARDANSENCNKNKFLDQNLQKYQAECSQFKAKLASLEELKRQAELDGKSAKQNLDKCYGQIKELNEKITRLTYEIEDEKRRRKSVEDRFDQQKNDYDQLQKARQCEKENLGWQKLESEKAIKEKEYEIERLRVLLQEEGTRKREYENELAKASNRIQESKNQCTQVVQERESLLVKIKVLEQDKARLQRLEDELNRAKSTLEAETRVKQRLECEKQQIQNDLNQWKTQYSRKEEAIRKIESEREKSEREKNSLRSEIERLQAEIKRIEERCRRKLEDSTRETQSQLETERSRYQREIDKLRQRPYGSHRETQTECEWTVDTSKLVFDGLRKKVTAMQLYECQLIDKTTLDKLLKGKKSVEEVASEIQPFLRGAGSIAGASASPKEKYSLVEAKRKKLISPESTVMLLEAQAATGGIIDPHRNEKLTVDSAIARDLIDFDDRQQIYAAEKAITGFDDPFSGKTVSVSEAIKKNLIDRETGMRLLEAQIASGGVVDPVNSVFLPKDVALARGLIDRDLYRSLNDPRDSQKNFVDPVTKKKVSYVQLKERCRIEPHTGLLLLSVQKRSMSFQGIRQPVTVTELVDSGILRPSTVNELESGQISYDEVGERIKDFLQGSSCIAGIYNETTKQKLGIYEAMKIGLVRPGTALELLEAQAATGFIVDPVSNLRLPVEEAYKRGLVGIEFKEKLLSAERAVTGYNDPETGNIISLFQAMNKELIEKGHGIRLLEAQIATGGIIDPKESHRLPVDIAYKRGYFNEELSEILSDPSDDTKGFFDPNTEENLTYLQLKERCIKDEETGLCLLPLKEKKKQVQTSQKNTLRKRRVVIVDPETNKEMSVQEAYKKGLIDYETFKELCEQECEWEEITITGSDGSTRVVLVDRKTGSQYDIQDAIDKGLVDRKFFDQYRSGSLSLTQFADMISLKNGVGTSSSMGSGVSDDVFSSSRHESVSKISTISSVRNLTIRSSSFSDTLEESSPIAAIFDTENLEKISITEGIERGIVDSITGQRLLEAQACTGGIIHPTTGQKLSLQDAVSQGVIDQDMATRLKPAQKAFIGFEGVKGKKKMSAAEAVKEKWLPYEAGQRFLEFQYLTGGLVDPEVHGRISTEEAIRKGFIDGRAAQRLQDTSSYAKILTCPKTKLKISYKDAINRSMVEDITGLRLLEAASVSSKGLPSPYNMSSAPGSRSGSRSGSRSGSRSGSRSGSRRGSFDATGNSSYSYSYSFSSSSIGH

SEQ ID NO: 24089 - protein, 165 aa, Homo sapiens
  Payload ID: 4810
  Gene Symbol: DSTN
  Gene Name: destrin (actin depolymerizing factor)
  Uniprot ID: P60981
  ENSP ID: ENSP00000246069
MASGVQVADEVCRIFYDMKVRKCSTPEEIKKRKKAVIFCLSADKKCIIVEEGKEILVGDVGVTITDPFKHFVGMLPEKDCRYALYDASFETKESRKEELMFFLWAPELAPLKSKMIYASSKDAIKKKFQGIKHECQANGPEDLNRACIAEKLGGSLIVAFEGCPV

SEQ ID NO: 24090 - protein, 135 aa, Homo sapiens
  Payload ID: 4810
  Gene Symbol: DSTN
  Gene Name: destrin (actin depolymerizing factor)
  ENSP ID: ENSP00000434355
MASGVQVADEVCRIFYDMKVRKCSTPEEIKKRKKAVIFCLSADKKCIIVEEGKEILVGDVGVTITDPFKHFVGMLPEKDCRYALYDASFETKESRKEELMFFLWAPELAPLKSKMIYASSKDAIKKKFQGKCTHS

SEQ ID NO: 24091 - protein, 148 aa, Homo sapiens
  Payload ID: 4810
  Gene Symbol: DSTN
  Gene Name: destrin (actin depolymerizing factor)
  Uniprot ID: P60981
  ENSP ID: ENSP00000476975
MKVRKCSTPEEIKKRKKAVIFCLSADKKCIIVEEGKEILVGDVGVTITDPFKHFVGMLPEKDCRYALYDASFETKESRKEELMFFLWAPELAPLKSKMIYASSKDAIKKKFQGIKHECQANGPEDLNRACIAEKLGGSLIVAFEGCPV

SEQ ID NO: 24092 - protein, 168 aa, Homo sapiens
  Payload ID: 4811
  Gene Symbol: DESI1
  Gene Name: desumoylating isopeptidase 1
  Uniprot ID: Q6ICB0
  ENSP ID: ENSP00000263256
MEPPNLYPVKLYVYDLSKGLARRLSPIMLGKQLEGIWHTSIVVHKDEFFFGSGGISSCPPGGTLLGPPDSVVDVGSTEVTEEIFLEYLSSLGESLFRGEAYNLFEHNCNTFSNEVAQFLTGRKIPSYITDLPSEVLSTPFGQALRPLLDSIQIQPPGGSSVGRPNGQS

SEQ ID NO: 24093 - protein, 161 aa, Homo sapiens
  Payload ID: 4812
  Gene Symbol: DESI2
  Gene Name: desumoylating isopeptidase 2
  Uniprot ID: Q9BSY9
  ENSP ID: ENSP00000263831
MGANQLVVLNVYDMYWMNEYTSSIGIGVFHSGIEVYGRAVVLGSTDFLEDDIEKIVEELGKEYKGNAYHLMHKNCNHFSSALSEILCGKEIPRWINRLAYFSSCIPFLQSCLPKEWLTPAALQSSVSQELQDELEEAEDAAASASVASTAAGSRPGRHTKL

SEQ ID NO: 24094 - protein, 194 aa, Homo sapiens
  Payload ID: 4812
  Gene Symbol: DESI2
  Gene Name: desumoylating isopeptidase 2
  Uniprot ID: Q9BSY9
  ENSP ID: ENSP00000306528
MGANQLVVLNVYDMYWMNEYTSSIGIGVFHSGIEVYGREFAYGGHPYPFSGIFEISPGNASELGETFKFKEAVVLGSTDFLEDDIEKIVEELGKEYKGNAYHLMHKNCNHFSSALSEILCGKEIPRWINRLAYFSSCIPFLQSCLPKEWLTPAALQSSVSQELQDELEEAEDAAASASVASTAAGSRPGRHTKL

SEQ ID NO: 24095 - protein, 101 aa, Homo sapiens
  Payload ID: 4812
  Gene Symbol: DESI2
  Gene Name: desumoylating isopeptidase 2
  ENSP ID: ENSP00000394555
MRLTFLKKIAQLNYLEILVVLLSYTLKTTFQYWMNEYTSSIGIGVFHSGIEVYGREFAYGGHPYPFSGIFEISPGNASELGETFKFKEAVVLGSTDFLEDD

SEQ ID NO: 24096 - protein, 102 aa, Homo sapiens
  Payload ID: 4813
  Gene Symbol: DDA1
  Gene Name: DET1 and DDB1 associated 1
  Uniprot ID: Q9BW61
  ENSP ID: ENSP00000352928
MADFLKGLPVYNKSNFSRFHADSVCKASNRRPSVYLPTREYPSEQIIVTEKTNILLRYLHQQWDKKNAAKKRDQEQVELEGESSAPPRKVARTDSPDMHEDT

SEQ ID NO: 24097 - protein, 102 aa, Homo sapiens; identical to SEQ ID NO: 24096
  Payload ID: 4813
  Gene Symbol: DDA1
  Gene Name: DET1 and DDB1 associated 1
  Uniprot ID: Q9BW61
  ENSP ID: ENSP00000472171

SEQ ID NO: 24098 - protein, 102 aa, Homo sapiens; identical to SEQ ID NO: 24096
  Payload ID: 4813
  Gene Symbol: DDA1
  Gene Name: DET1 and DDB1 associated 1
  Uniprot ID: Q9BW61
  ENSP ID: ENSP00000473086

SEQ ID NO: 24099 - protein, 343 aa, Homo sapiens
  Payload ID: 4814
  Gene Symbol: DBX1
  Gene Name: developing brain homeobox 1
  Uniprot ID: A6NMT0
  ENSP ID: ENSP00000436881
MMFPGLLAPPAGYPSLLRPTPTLTLPQSLQSAFSGHSSFLVEDLIRISRPPAYLPRSVPTASMSPPRQGAPTALTDTGASDLGSPGPGSRRGGSPPTAFSPASETTFLKFGVNAILSSGPRTETSPALLQSVPPKTFAFPYFEGSFQPFIRSSYFPASSSVVPIPGTFSWPLAARGKPRRGMLRRAVFSDVQRKALEKMFQKQKYISKPDRKKLAAKLGLKDSQVKIWFQNRRMKWRNSKERELLSSGGCREQTLPTKLNPHPDLSDVGQKGPGNEEEEEGPGSPSHRLAYHASSDPQHLRDPRLPGPLPPSPAHSSSPGKPSDFSDSEEEEEGEEQEEITVS

SEQ ID NO: 24100 - protein, 339 aa, Homo sapiens
  Payload ID: 4815
  Gene Symbol: DBX2
  Gene Name: developing brain homeobox 2
  Uniprot ID: Q6ZNG2
  ENSP ID: ENSP00000331470
MLPSAVAAHAGAYWDVVASSALLNLPAAPGFGNLGKSFLIENLLRVGGAPTPRLQPPAPHDPATALATAGAQLRPLPASPVPLKLCPAAEQVSPAGAPYGTRWAFQVLSPSADSARLPGRAPGDRDCTFQPSAPAPSKPFLLSTPPFYSACCGGSCRRPASSTAFPREESMLPLLTQDSNSKARRGILRRAVFSEDQRKALEKMFQKQKYISKTDRKKLAINLGLKESQVKIWFQNRRMKWRNSKEKEVLSNRCIQEVGLQEDPLSRSALGFPSPCPSIWDVPQQHSSPRWRENSPEPSERLIQESSGAPPPEANSLQGALYLCSEEEAGSKGVLTGAV

SEQ ID NO: 24101 - protein, 298 aa, Homo sapiens
  Payload ID: 4816
  Gene Symbol: DPPA2
  Gene Name: developmental pluripotency associated 2
  Uniprot ID: Q7Z7J5
  ENSP ID: ENSP00000417710
MSDANLDSSKKNFLEGEVDDEESVILTLVPVKDDANMEQMEPSVSSTSDVKLEKPKKYNPGHLLQTNEQFTAPQKARCKIPALPLPTILPPINKVCRDTLRDWCQQLGLSTNGKKIEVYLRLHRHAYPEQRQDMPEMSQETRLQRCSRKRKAVTKRARLQRSYEMNERAEETNTVEVITSAPGAMLASWARIAARAVQPKALNSCSIPVSVEAFLMQASGVRWCVVHGRLLSADTKGWVRLQFHAGQAWVPTTHRRMISLFLLPACIFPSPGIEDNMLCPDCAKRNKKMMKRLMTVEK

SEQ ID NO: 24102 - protein, 159 aa, Homo sapiens
  Payload ID: 4817
  Gene Symbol: DPPA3
  Gene Name: developmental pluripotency associated 3
  Uniprot ID: Q6W0C5
  ENSP ID: ENSP00000339250
MDPSQFNPTYIPGSPQMLTEENSRDDSGASQISSETLIKNLSNLTINASSESVSPLSEALLRRESVGAAVLREIEDEWLYSRRGVRTLLSVQREKMARLRYMLLGGVRTHERRPTNKEPKGVKKESRPFKCPCSFCVSNGWDPSENARIGNQDTKPLQP

SEQ ID NO: 24103 - protein, 304 aa, Homo sapiens
  Payload ID: 4818
  Gene Symbol: DPPA4
  Gene Name: developmental pluripotency associated 4
  Uniprot ID: Q7L190
  ENSP ID: ENSP00000335306
MLRGSASSTSMEKAKGKEWTSTEKSREEDQQASNQPNSIALPGTSAKRTKEKMSIKGSKVLCPKKKAEHTDNPRPQKKIPIPPLPSKLPPVNLIHRDILRAWCQQLKLSSKGQKLDAYKRLCAFAYPNQKDFPSTAKEAKIRKSLQKKLKVEKGETSLQSSETHPPEVALPPVGEPPALENSTALLEGVNTVVVTTSAPEALLASWARISARARTPEAVESPQEASGVRWCVVHGKSLPADTDGWVHLQFHAGQAWVPEKQEGRVSALFLLPASNFPPPHLEDNMLCPKCVHRNKVLIKSLQWE

SEQ ID NO: 24104 - protein, 35 aa, Homo sapiens
  Payload ID: 4818
  Gene Symbol: DPPA4
  Gene Name: developmental pluripotency associated 4
  ENSP ID: ENSP00000418313
MSIKGSKVLCPKKKAEHTDNPRPQKKIPIPPLPSK

SEQ ID NO: 24105 - protein, 68 aa, Homo sapiens
  Payload ID: 4818
  Gene Symbol: DPPA4
  Gene Name: developmental pluripotency associated 4
  ENSP ID: ENSP00000420581
MLRGSASSTSMEKAKGKEEHQQREPKKKCLSKAVKCSALRKRQSTLTTPDLRRRYQSLHYLLNCHLLI

SEQ ID NO: 24106 - protein, 116 aa, Homo sapiens
  Payload ID: 4819
  Gene Symbol: DPPA5
  Gene Name: developmental pluripotency associated 5
  Uniprot ID: A6NC42
  ENSP ID: ENSP00000359396
MGTLPARRHIPPWVKVPEDLKDPEVFQVQTRLLKAIFGPDGSRIPYIEQVSKAMLELKALESSDLTEVVVYGSYLYKLRTKWMLQSMAEWHRQRQERGMLKLAEAMNALELGPWMK

SEQ ID NO: 24107 - protein, 367 aa, Homo sapiens
  Payload ID: 4820
  Gene Symbol: DRG1
  Gene Name: developmentally regulated GTP binding protein 1
  Uniprot ID: Q9Y295
  ENSP ID: ENSP00000329715
MSSTLAKIAEIEAEMARTQKNKATAHHLGLLKARLAKLRRELITPKGGGGGGPGEGFDVAKTGDARIGFVGFPSVGKSTLLSNLAGVYSEVAAYEFTTLTTVPGVIRYKGAKIQLLDLPGIIEGAKDGKGRGRQVIAVARTCNLILIVLDVLKPLGHKKIIENELEGFGIRLNSKPPNIGFKKKDKGGINLTATCPQSELDAETVKSILAEYKIHNADVTLRSDATADDLIDVVEGNRVYIPCIYVLNKIDQISIEELDIIYKVPHCVPISAHHRWNFDDLLEKIWDYLKLVRIYTKPKGQLPDYTSPVVLPYSRTTVEDFCMKIHKNLIKEFKYALVWGLSVKHNPQKVGKDHTLEDEDVIQIVKK

SEQ ID NO: 24108 - protein, 63 aa, Homo sapiens
  Payload ID: 4820
  Gene Symbol: DRG1
  Gene Name: developmentally regulated GTP binding protein 1
  ENSP ID: ENSP00000408091
MSSTLAKIAEIEAEMARTQKNKATAHHLGLLKARLAKLRRELITPKGGGGGGPGEAPGSPRYH

SEQ ID NO: 24109 - protein, 56 aa, Homo sapiens
  Payload ID: 4820
  Gene Symbol: DRG1
  Gene Name: developmentally regulated GTP binding protein 1
  ENSP ID: ENSP00000448252
  MOD_RES (1)..(1): Any amino acid
XLLEKIWDYLKLVRIYTKPKGQLPDYTSPVVLPYSRTTVEDFCMKIHKNLIKEFKY

SEQ ID NO: 24110 - protein, 364 aa, Homo sapiens
  Payload ID: 4821
  Gene Symbol: DRG2
  Gene Name: developmentally regulated GTP binding protein 2
  Uniprot ID: P55039
  ENSP ID: ENSP00000225729
MGILEKISEIEKEIARTQKNKATEYHLGLLKAKLAKYRAQLLEPSKSASSKGEGFDVMKSGDARVALIGFPSVGKSTFLSLMTSTASEAASYEFTTLTCIPGVIEYKGANIQLLDLPGIIEGAAQGKGRGRQVIAVARTADVIIMMLDATKGEVQRSLLEKELESVGIRLNKHKPNIYFKPKKGGGISFNSTVTLTQCSEKLVQLILHEYKIFNAEVLFREDCSPDEFIDVIVGNRVYMPCLYVYNKIDQISMEEVDRLARKPNSVVISCGMKLNLDYLLEMLWEYLALTCIYTKKRGQRPDFTDAIILRKGASVEHVCHRIHRSLASQFKYALVWGTSTKYSPQRVGLTHTMEHEDVIQIVKK

SEQ ID NO: 24111 - protein, 343 aa, Homo sapiens
  Payload ID: 4821
  Gene Symbol: DRG2
  Gene Name: developmentally regulated GTP binding protein 2
  ENSP ID: ENSP00000379076
MGILEKISEIEKEIARTQKNKATEYHLGLLKAKLAKYRAQLLEPSKSASSKGEGFDVMKSGDARVALIGFPSVGKSTFLSLMTSTASEAASYEFTTLTCIPGVIEYKGANIQLLDLPGIIEGAAQGKGRGRQVIAVARTADVIIMMLDATKGEVQRSLLEKELESVGIRLNKHKPNIYFKPKKGGGISFNSTVTLTQCSEKLVQLILHEYKIFNAEVLFREDCSPDEFIDVIVGNRVYMPCLYVYNKIDQISMEEVDRLARKPNSVVISCGMKLNLDYLLEMLWEYLALTCIYTKKRGQRPDFTDAIILRKGASVEHVCHRIHRSLASQFKAPAPSTVRSGWA

SEQ ID NO: 24112 - protein, 113 aa, Homo sapiens
  Payload ID: 4821
  Gene Symbol: DRG2
  Gene Name: developmentally regulated GTP binding protein 2
  ENSP ID: ENSP00000462060
MGILEKISEIEKEIARTQKNKATEYHLGLLKAKLAKYRAQLLEPSKSASSKGEGFDVMKSGDARVALIGFPSVGKPKKGGGISFNSTVTLTQCSEKLVQLILHEYKIFNAEVL

SEQ ID NO: 24113 - protein, 90 aa, Homo sapiens
  Payload ID: 4821
  Gene Symbol: DRG2
  Gene Name: developmentally regulated GTP binding protein 2
  ENSP ID: ENSP00000462978
MGILEKISEIEKEIARTQKNKATEYHLGLLKAKLAKYRAQLLEPSKSASSKGEGFDVMKSGDARVALIGFPSVVHILESDDLHGQRGSVL

SEQ ID NO: 24114 - protein, 161 aa, Homo sapiens
  Payload ID: 4821
  Gene Symbol: DRG2
  Gene Name: developmentally regulated GTP binding protein 2
  ENSP ID: ENSP00000463256
MGILEKISEIEKEIARTQKNKATEYHLGLLKAKLAKYRAQLLEPSKSASSKGEGFDVMKSGDARVALIGFPSVGKLRHEAEPGLSAGDALGVLGPDLHLHQEERTEARLHRRHHSPERGLSGARVPPHPPVTRQPVQVRPGVGHQHQVQSAAGGPDPHHGA

SEQ ID NO: 24115 - protein, 244 aa, Homo sapiens
  Payload ID: 4821
  Gene Symbol: DRG2
  Gene Name: developmentally regulated GTP binding protein 2
  ENSP ID: ENSP00000463268
MGILEKISEIEKEIARTQKNKATEYHLGLLKAKLAKYRAQLLEPSKSASSKGEGFDVMKSGDARVALIGFPSVGKSTFLSLMTSTASEAASYEFTTLTCIPGVIEYKGANIQLLDLPGIIEGAAQGKGRGRQVIAVARTADVIIMMLDATKGEVQRSLLEKELESVGIRLNKHKPNIYFKPKKGGGISFNSTVTLTQCSEKLVQLILHEYNLQCRSAFPRRLLPGRVHRCDRGQPGVHALPVCL

SEQ ID NO: 24116 - protein, 112 aa, Homo sapiens
  Payload ID: 4821
  Gene Symbol: DRG2
  Gene Name: developmentally regulated GTP binding protein 2
  ENSP ID: ENSP00000463436
MGILEKISEIEKEIARTQKNKATEYHLGLLKAKLAKYRAQLLEPSKSASSKGEGFDVMKSGDARVALIGFPSVGKSTFLSLMTSTASEAASYEFTTLTCIPGVIEEKAVAGR

SEQ ID NO: 24117 - protein, 90 aa, Homo sapiens; identical to SEQ ID NO: 24113
  Payload ID: 4821
  Gene Symbol: DRG2
  Gene Name: developmentally regulated GTP binding protein 2
  ENSP ID: ENSP00000463522

SEQ ID NO: 24118 - protein, 22 aa, Homo sapiens
  Payload ID: 4821
  Gene Symbol: DRG2
  Gene Name: developmentally regulated GTP binding protein 2
  ENSP ID: ENSP00000463747
MGILEKISEIEKEIARTQKNKD

SEQ ID NO: 24119 - protein, 90 aa, Homo sapiens; identical to SEQ ID NO: 24113
  Payload ID: 4821
  Gene Symbol: DRG2
  Gene Name: developmentally regulated GTP binding protein 2
  ENSP ID: ENSP00000464004

SEQ ID NO: 24120 - protein, 158 aa, Homo sapiens
  Payload ID: 4821
  Gene Symbol: DRG2
  Gene Name: developmentally regulated GTP binding protein 2
  ENSP ID: ENSP00000464076
MGILEKISEIEKEIARTQKNKATEYHLGLLKAKLAKYRAQLLEPSKSASSKGEGFDVMKSGDARVALIGFPSVGKFHSCCPSWSTMARSQLTTTSASQSTFLSLMTSTASEAASYEFTTLTCIPGVIEYKGANIQLLDLPGIIEGAAQGKGRGRQVIA

SEQ ID NO: 24121 - protein, 172 aa, Homo sapiens
  Payload ID: 4821
  Gene Symbol: DRG2
  Gene Name: developmentally regulated GTP binding protein 2
  ENSP ID: ENSP00000464244
MGILEKISEIEKEIARTQKNKATEYHLGLLKAKLAKYRAQLLEPSKSASSKGEGFDVMKSGDARVALIGFPSVGKSTFLSLMTSTASEAASYEFTTLTCIPGVIEYKGANIQLLDLPGIIEGAAQGKGRGRQVIAVARTADVIIMMLDATKGEVSAGEGAGVCGHPPQQAQA

SEQ ID NO: 24122 - protein, 678 aa, Homo sapiens
  Payload ID: 4822
  Gene Symbol: DHX58
  Gene Name: DEXH (Asp-Glu-X-His) box polypeptide 58
  Uniprot ID: Q96C10
  ENSP ID: ENSP00000251642
MELRSYQWEVIMPALEGKNIIIWLPTGAGKTRAAAYVAKRHLETVDGAKVVVLVNRVHLVTQHGEEFRRMLDGRWTVTTLSGDMGPRAGFGHLARCHDLLICTAELLQMALTSPEEEEHVELTVFSLIVVDECHHTHKDTVYNVIMSQYLELKLQRAQPLPQVLGLTASPGTGGASKLDGAINHVLQLCANLDTWCIMSPQNCCPQLQEHSQQPCKQYNLCHRRSQDPFGDLLKKLMDQIHDHLEMPELSRKFGTQMYEQQVVKLSEAAALAGLQEQRVYALHLRRYNDALLIHDTVRAVDALAALQDFYHREHVTKTQILCAERRLLALFDDRKNELAHLATHGPENPKLEMLEKILQRQFSSSNSPRGIIFTRTRQSAHSLLLWLQQQQGLQTVDIRAQLLIGAGNSSQSTHMTQRDQQEVIQKFQDGTLNLLVATSVAEEGLDIPHCNVVVRYGLLTNEISMVQARGRARADQSVYAFVATEGSRELKRELINEALETLMEQAVAAVQKMDQAEYQAKIRDLQQAALTKRAAQAAQRENQRQQFPVEHVQLLCINCMVAVGHGSDLRKVEGTHHVNVNPNFSNYYNVSRDPVVINKVFKDWKPGGVISCRNCGEVWGLQMIYKSVKLPVLKVRSMLLETPQGRIQAKKWSRVPFSVPDFDFLQHCAENLSDLSLD

SEQ ID NO: 24123 - protein, 156 aa, Homo sapiens
  Payload ID: 4822
  Gene Symbol: DHX58
  Gene Name: DEXH (Asp-Glu-X-His) box polypeptide 58
  ENSP ID: ENSP00000404639
MELRSYQWEVIMPALEGKNIIIWLPTGAGKTRAAAYVAKRHLETVDGAKVVVLVNRVHLVTQHGEEFRRMLDGRWTVTTLSGDMGPRAGFGHLARCHDLLICTAELLQMALTSPEEEEHVELTVFSLIVVDECHHTHKDTVYNVIMSQYLELKLQR

SEQ ID NO: 24124 - protein, 302 aa, Homo sapiens
  Payload ID: 4822
  Gene Symbol: DHX58
  Gene Name: DEXH (Asp-Glu-X-His) box polypeptide 58
  ENSP ID: ENSP00000416389
MELRSYQWEVIMPALEGKNIIIWLPTGAGKTRAAAYVAKRHLETVDGAKVVVLVNRVHLVTQHGEEFRRMLDGRWTVTTLSGDMGPRAGFGHLARCHDLLICTAELLQMALTSPEEEEHVELTVFSLIVVDECHHTHKDTVYNVIMSQYLELKLQRAQPLPQVLGLTASPGTGGASKLDGAINHVLQLCANLDTWCIMSPQNCCPQLQEHSQQPCKQYNLCHRRSQDPFGDLLKKLMDQIHDHLEMPELSRKFGTQMYEQQVVKLSEAAALAGLQEQRVYALHLRRYNDALLIHDTVRAVDA

SEQ ID NO: 24125 - protein, 99 aa, Homo sapiens
  Payload ID: 4822
  Gene Symbol: DHX58
  Gene Name: DEXH (Asp-Glu-X-His) box polypeptide 58
  ENSP ID: ENSP00000466721
MLDGRWTVTTLSGDMGPRAGFGHLARCHDLLICTAELLQMALTSPEEEEHVELTVFSLIVVDECHHTHKDTVYNVIMSQYLELKLQRAQPLPQVLGLTA

SEQ ID NO: 24126 - protein, 51 aa, Homo sapiens
  Payload ID: 4822
  Gene Symbol: DHX58
  Gene Name: DEXH (Asp-Glu-X-His) box polypeptide 58
  ENSP ID: ENSP00000467470
  MOD_RES (1)..(1): Any amino acid
XDQSVYAFVATEGSRELKRELINEALETLMEQAVAAVQKMDQAEYQAKELL

SEQ ID NO: 24127 - protein, 95 aa, Homo sapiens
  Payload ID: 4823
  Gene Symbol: DEXI
  Gene Name: Dexi homolog (mouse)
  Uniprot ID: O95424
  ENSP ID: ENSP00000330509
MLGARVAAHLDALGPLVPYVPPPLLPSMFYVGLFFVNVLILYYAFLMEYIVLNVGLVFLPEDMDQALVDLGVLSDPGSGLYDADSELDVFDAYLE

SEQ ID NO: 24128 - protein, 95 aa, Homo sapiens; identical to SEQ ID NO: 24127
  Payload ID: 4823
  Gene Symbol: DEXI
  Gene Name: Dexi homolog (mouse)
  Uniprot ID: O95424
  ENSP ID: ENSP00000482265

SEQ ID NO: 24129 - protein, 773 aa, Homo sapiens
  Payload ID: 4824
  Gene Symbol: DGCR8
  Gene Name: DGCR8 microprocessor complex subunit
  Uniprot ID: Q8WYQ5
  ENSP ID: ENSP00000263209
METDESPSPLPCGPAGEAVMESRARPFQALPREQSPPPPLQTSSGAEVMDVGSGGDGQSELPAEDPFNFYGASLLSKGSFSKGRLLIDPNCSGHSPRTARHAPAVRKFSPDLKLLKDVKISVSFTESCRSKDRKVLYTGAERDVRAECGLLLSPVSGDVHACPFGGSVGDGVGIGGESADKKDEENELDQEKRVEYAVLDELEDFTDNLELDEEGAGGFTAKAIVQRDRVDEEALNFPYEDDFDNDVDALLEEGLCAPKKRRTEEKYGGDSDHPSDGETSVQPMMTKIKTVLKSRGRPPTEPLPDGWIMTFHNSGVPVYLHRESRVVTWSRPYFLGTGSIRKHDPPLSSIPCLHYKKMKDNEEREQSSDLTPSGDVSPVKPLSRSAELEFPLDEPDSMGADPGPPDEKDPLGAEAAPGALGQVKAKVEVCKDESVDLEEFRSYLEKRFDFEQVTVKKFRTWAERRQFNREMKRKQAESERPILPANQKLITLSVQDAPTKKEFVINPNGKSEVCILHEYMQRVLKVRPVYNFFECENPSEPFGASVTIDGVTYGSGTASSKKLAKNKAARATLEILIPDFVKQTSEEKPKDSEELEYFNHISIEDSRVYELTSKAGLLSPYQILHECLKRNHGMGDTSIKFEVVPGKNQKSEYVMACGKHTVRGWCKNKRVGKQLASQKILQLLHPHVKNWGSLLRMYGRESSKMVKQETSDKSVIELQQYAKKNKPNLHILSKLQEEMKRLAEEREETRKKPKMSIVASAQPGGEPLCTVDV

SEQ ID NO: 24130 - protein, 740 aa, Homo sapiens
  Payload ID: 4824
  Gene Symbol: DGCR8
  Gene Name: DGCR8 microprocessor complex subunit
  Uniprot ID: Q8WYQ5
  ENSP ID: ENSP00000372488
METDESPSPLPCGPAGEAVMESRARPFQALPREQSPPPPLQTSSGAEVMDVGSGGDGQSELPAEDPFNFYGASLLSKGSFSKGRLLIDPNCSGHSPRTARHAPAVRKFSPDLKLLKDVKISVSFTESCRSKDRKVLYTGAERDVRAECGLLLSPVSGDVHACPFGGSVGDGVGIGGESADKKDEENELDQEKRVEYAVLDELEDFTDNLELDEEGAGGFTAKAIVQRDRVDEEALNFPYEDDFDNDVDALLEEGLCAPKKRRTEEKYGGDSDHPSDGETSVQPMMTKIKTVLKSRGRPPTEPLPDGWIMTFHNSGVPVYLHRESRVVTWSRPYFLGTGSIRKHDPPLSSIPCLHYKKMKDNEEREQSSDLTPSGDVSPVKPLSRSAELEFPLDEPDSMGADPGPPDEKDPLGAEAAPGALGQVKAKVEVCKDESVDLEEFRSYLEKRFDFEQVTVKKFRTWAERRQFNREMKRKQAESERPILPANQKLITLSVQDAPTKKEFVINPNGKSEVCILHEYMQRVLKVRPVYNFFECARATLEILIPDFVKQTSEEKPKDSEELEYFNHISIEDSRVYELTSKAGLLSPYQILHECLKRNHGMGDTSIKFEVVPGKNQKSEYVMACGKHTVRGWCKNKRVGKQLASQKILQLLHPHVKNWGSLLRMYGRESSKMVKQETSDKSVIELQQYAKKNKPNLHILSKLQEEMKRLAEEREETRKKPKMSIVASAQPGGEPLCTVDV

SEQ ID NO: 24131 - protein, 740 aa, Homo sapiens; identical to SEQ ID NO: 24130
  Payload ID: 4824
  Gene Symbol: DGCR8
  Gene Name: DGCR8 microprocessor complex subunit
  Uniprot ID: Q8WYQ5
  ENSP ID: ENSP00000384726

SEQ ID NO: 24132 - protein, 125 aa, Homo sapiens
  Payload ID: 4824
  Gene Symbol: DGCR8
  Gene Name: DGCR8 microprocessor complex subunit
  ENSP ID: ENSP00000409625
METDESPSPLPCGPAGEAVMESRARPFQALPREQSPPPPLQTSSGAEVMDVGSGGDGQSELPAEDPFNFYGASLLSKGSFSKGRLLIDPNCSGHSPRTARHAPAVRKFSPDLKLLKDVKISVSFT

SEQ ID NO: 24133 - protein, 186 aa, Homo sapiens
  Payload ID: 4825
  Gene Symbol: DIABLO
  Gene Name: diablo, IAP-binding mitochondrial protein
  Uniprot ID: Q9NR28
  ENSP ID: ENSP00000267169
MKSDFYFQKSEPHSLSSEALMRRAVSLVTDSTSTFLSQTTYALIEAITEYTKAVYTLTSLYRQYTSLLGKMNSEEEDEVWQVIIGARAEMTSKHQEYLKLETTWMTAVGLSEMAAEAAYQTGADQASITARNHIQLVKLQVEEVHQLSRKAETKLAEAQIEELRQKTQEEGEERAESEQEAYLRED

SEQ ID NO: 24134 - protein, 195 aa, Homo sapiens
  Payload ID: 4825
  Gene Symbol: DIABLO
  Gene Name: diablo, IAP-binding mitochondrial protein
  Uniprot ID: Q9NR28
  ENSP ID: ENSP00000320343
MAALKSWLSRSVTSFFRYRQCLCVPVVANFKKRCFSELIRPWHKTVTIGFGVTLCAVPIAQAVYTLTSLYRQYTSLLGKMNSEEEDEVWQVIIGARAEMTSKHQEYLKLETTWMTAVGLSEMAAEAAYQTGADQASITARNHIQLVKLQVEEVHQLSRKAETKLAEAQIEELRQKTQEEGEERAESEQEAYLRED

SEQ ID NO: 24135 - protein, 46 aa, Homo sapiens
  Payload ID: 4825
  Gene Symbol: DIABLO
  Gene Name: diablo, IAP-binding mitochondrial protein
  ENSP ID: ENSP00000339963
MAALKSWLSRSVTSFFRFLLGSSLSLQPLQVNPRACYRLAVVPYEI

SEQ ID NO: 24136 - protein, 191 aa, Homo sapiens
  Payload ID: 4825
  Gene Symbol: DIABLO
  Gene Name: diablo, IAP-binding mitochondrial protein
  ENSP ID: ENSP00000390103
  MOD_RES (1)..(1): Any amino acid
XALKSWLSRSVTSFFRYRQCLCVPVVANFKKRCFSELIRPWHKTVTIGFGVTLCAVPIAQKSEPHSLSSEALMRRAVSLVTDSTSTFLSQTTYALIEAITEYTKAVYTLTSLYRQYTSLLGKMNSEEEDEVWQVIIGARAEMTSKHQEYLKLETTWMTAVGLSEMAAEAAYQTECQLNPDLNIEVEVSLQR

SEQ ID NO: 24137 - protein, 120 aa, Homo sapiens
  Payload ID: 4825
  Gene Symbol: DIABLO
  Gene Name: diablo, IAP-binding mitochondrial protein
  ENSP ID: ENSP00000390818
  MOD_RES (1)..(1): Any amino acid
XAVYTLTSLYRQYTSLLGKMNSEEEDEVWQVIIGARAEMTSKHQEYLKLETTWMTAVGLSEMAAEAAYQTEVFSSKLEEEDACHSPLPVNIVLKVLVNAVRSKCSTDELIKCIYPDGEIH

SEQ ID NO: 24138 - protein, 239 aa, Homo sapiens
  Payload ID: 4825
  Gene Symbol: DIABLO
  Gene Name: diablo, IAP-binding mitochondrial protein
  Uniprot ID: Q9NR28
  ENSP ID: ENSP00000398495
MAALKSWLSRSVTSFFRYRQCLCVPVVANFKKRCFSELIRPWHKTVTIGFGVTLCAVPIAQKSEPHSLSSEALMRRAVSLVTDSTSTFLSQTTYALIEAITEYTKAVYTLTSLYRQYTSLLGKMNSEEEDEVWQVIIGARAEMTSKHQEYLKLETTWMTAVGLSEMAAEAAYQTGADQASITARNHIQLVKLQVEEVHQLSRKAETKLAEAQIEELRQKTQEEGEERAESEQEAYLRED

SEQ ID NO: 24139 - protein, 166 aa, Homo sapiens
  Payload ID: 4825
  Gene Symbol: DIABLO
  Gene Name: diablo, IAP-binding mitochondrial protein
  ENSP ID: ENSP00000411638
MRRAVSLVTDSTSTFLSQTTYALIEAITEYTKAVYTLTSLYRQYTSLLGKMNSEEEDEVWQVIIGARAEMTSKHQEYLKLETTWMTAVGLSEMAAEAAYQTGADQASITARNHIQLVKLQVEEVHQLSRKAETKLAEAQIEELRQKTQEEGEERAESEQEAYLRED

SEQ ID NO: 24140 - protein, 77 aa, Homo sapiens
  Payload ID: 4825
  Gene Symbol: DIABLO
  Gene Name: diablo, IAP-binding mitochondrial protein
  ENSP ID: ENSP00000438710
MRRAVSLVTDSTSTFLSQTTYALIEAITEYTKAVYTLTSLYRQYTSLLGKMNSEEEDEVWQVIIGARAEMTSKHQEY

SEQ ID NO: 24141 - protein, 125 aa, Homo sapiens
  Payload ID: 4825
  Gene Symbol: DIABLO
  Gene Name: diablo, IAP-binding mitochondrial protein
  ENSP ID: ENSP00000440653
MRRAVSLVTDSTSTFLSQTTYALIEAITEYTKAVYTLTSLYRQYTSLLGKMNSEEEDEVWQVIIGARAEMTSKHQEYLKLETTWMTAVGLSEMAAEAAYQTGADQASITARNHIQLVKLQVEEVH

SEQ ID NO: 24142 - protein, 133 aa, Homo sapiens
  Payload ID: 4825
  Gene Symbol: DIABLO
  Gene Name: diablo, IAP-binding mitochondrial protein
  ENSP ID: ENSP00000440971
MKSDFYFQAVYTLTSLYRQYTSLLGKMNSEEEDEVWQVIIGARAEMTSKHQEYLKLETTWMTAVGLSEMAAEAAYQTGADQASITARNHIQLVKLQVEEVHQLSRKAETKLAEAQIEELRQKTQEEGEERAES

SEQ ID NO: 24143 - protein, 128 aa, Homo sapiens
  Payload ID: 4825
  Gene Symbol: DIABLO
  Gene Name: diablo, IAP-binding mitochondrial protein
  ENSP ID: ENSP00000441139
MRRAVSLVTDSTSTFLSQTTYALIEAITEYTKAVYTLTSLYRQYTSLLGKMNSEEEDEVWQVIIGARAEMTSKHQEYLKLETTWMTAVGLSEMAAEAAYQTGADQASITARNHIQLVKLQVEEVHQLS

SEQ ID NO: 24144 - protein, 186 aa, Homo sapiens; identical to SEQ ID NO: 24133
  Payload ID: 4825
  Gene Symbol: DIABLO
  Gene Name: diablo, IAP-binding mitochondrial protein
  Uniprot ID: Q9NR28
  ENSP ID: ENSP00000442360

SEQ ID NO: 24145 - protein, 156 aa, Homo sapiens
  Payload ID: 4825
  Gene Symbol: DIABLO
  Gene Name: diablo, IAP-binding mitochondrial protein
  ENSP ID: ENSP00000442669
MRRAVSLVTDSTSTFLSQTTYALIEAITEYTKAVYTLTSLYRQYTSLLGKMNSEEEDEVWQVIIGARAEMTSKHQEYLKLETTWMTAVGLSEMAAEAAYQTGADQASITARNHIQLVKLQVEEVHQLSRKAETKLAEAQIEELRQKTQEEGEERAE

SEQ ID NO: 24146 - protein, 735 aa, Homo sapiens
  Payload ID: 4826
  Gene Symbol: DGKA
  Gene Name: diacylglycerol kinase, alpha 80kDa
  Uniprot ID: P23743
  ENSP ID: ENSP00000328405
MAKERGLISPSDFAQLQKYMEYSTKKVSDVLKLFEDGEMAKYVQGDAIGYEGFQQFLKIYLEVDNVPRHLSLALFQSFETGHCLNETNVTKDVVCLNDVSCYFSLLEGGRPEDKLEFTFKLYDTDRNGILDSSEVDKIILQMMRVAEYLDWDVSELRPILQEMMKEIDYDGSGSVSQAEWVRAGATTVPLLVLLGLEMTLKDDGQHMWRPKRFPRPVYCNLCESSIGLGKQGLSCNLCKYTVHDQCAMKALPCEVSTYAKSRKDIGVQSHVWVRGGCESGRCDRCQKKIRIYHSLTGLHCVWCHLEIHDDCLQAVGHECDCGLLRDHILPPSSIYPSVLASGPDRKNSKTSQKTMDDLNLSTSEALRIDPVPNTHPLLVFVNPKSGGKQGQRVLWKFQYILNPRQVFNLLKDGPEIGLRLFKDVPDSRILVCGGDGTVGWILETIDKANLPVLPPVAVLPLGTGNDLARCLRWGGGYEGQNLAKILKDLEMSKVVHMDRWSVEVIPQQTEEKSDPVPFQIINNYFSIGVDASIAHRFHIMREKYPEKFNSRMKNKLWYFEFATSESIFSTCKKLEESLTVEICGKPLDLSNLSLEGIAVLNIPSMHGGSNLWGDTRRPHGDIYGINQALGATAKVITDPDILKTCVPDLSDKRLEVVGLEGAIEMGQIYTKLKNAGRRLAKCSEITFHTTKTLPMQIDGEPWMQTPCTIKITHKNQMPMLMGPPPRSTNFFGFLS

SEQ ID NO: 24147 - protein, 735 aa, Homo sapiens; identical to SEQ ID NO: 24146
  Payload ID: 4826
  Gene Symbol: DGKA
  Gene Name: diacylglycerol kinase, alpha 80kDa
  Uniprot ID: P23743
  ENSP ID: ENSP00000377703

SEQ ID NO: 24148 - protein, 247 aa, Homo sapiens
  Payload ID: 4826
  Gene Symbol: DGKA
  Gene Name: diacylglycerol kinase, alpha 80kDa
  Uniprot ID: P23743
  ENSP ID: ENSP00000385792
MAKERGLISPSDFAQLQKYMEYSTKKVSDVLKLFEDGEMAKYVQGDAIGYEGFQQFLKIYLEVDNVPRHLSLALFQSFETGHCLNETNVTKDVVCLNDVSCYFSLLEGGRPEDKLEFTFKLYDTDRNGILDSSEVDKIILQMMRVAEYLDWDVSELRPILQEMMKEIDYDGSGSVSQAEWVRAGATTVPLLVLLGLEMTLKDDGQHMWRPKRFPRPVYCNLCESSIGLGKQGLSCNRPITCVGARRL

SEQ ID NO: 24149 - protein, 116 aa, Homo sapiens
  Payload ID: 4826
  Gene Symbol: DGKA
  Gene Name: diacylglycerol kinase, alpha 80kDa
  ENSP ID: ENSP00000402307
MAKERGLISPSDFAQLQKYMEYSTKKVSDVLKLFEDGEMAKYVQGDAIGYEGFQQFLKIYLEVDNVPRHLSLALFQSFETGHCLNETNVTKDVVCLNDVSCYFSLLEGGRPEDKLE

SEQ ID NO: 24150 - protein, 58 aa, Homo sapiens
  Payload ID: 4826
  Gene Symbol: DGKA
  Gene Name: diacylglycerol kinase, alpha 80kDa
  ENSP ID: ENSP00000446515
MAKERGLISPSDFAQLQKYMEYSTKKVSDVLKLFEDGEMAKYVQGDAIGYEGFQQFLK

SEQ ID NO: 24151 - protein, 118 aa, Homo sapiens
  Payload ID: 4826
  Gene Symbol: DGKA
  Gene Name: diacylglycerol kinase, alpha 80kDa
  Uniprot ID: P23743
  ENSP ID: ENSP00000446605
MAKERGLISPSDFAQLQKYMEYSTKKVSDVLKLFEDGEMAKYVQGDAIGYEGFQQFLKIYLEVDNVPRHLSLALFQSFETGHCLNETNVTKDVVCLNDVSCYFSLLEGGRPEDKLEWS

SEQ ID NO: 24152 - protein, 147 aa, Homo sapiens
  Payload ID: 4826
  Gene Symbol: DGKA
  Gene Name: diacylglycerol kinase, alpha 80kDa
  ENSP ID: ENSP00000447050
MAKERGLISPSDFAQLQKYMEYSTKKVSDVLKLFEDGEMAKYVQGDAIGYEGFQQFLKIYLEVDNVPRHLSLALFQSFETGHCLNETNVTKDVVCLNDVSCYFSLLEGGRPEDKLEFTFKLYDTDRNGILDSSEVDKIILQMMRVAE

SEQ ID NO: 24153 - protein, 133 aa, Homo sapiens
  Payload ID: 4826
  Gene Symbol: DGKA
  Gene Name: diacylglycerol kinase, alpha 80kDa
  ENSP ID: ENSP00000447460
MAKERGLISPSDFAQLQKYMEYSTKKVSDVLKLFEDGEMAKYVQGDAIGYEGFQQFLKIYLEVDNVPRHLSLALFQSFETGHCLNETNVTKDVVCLNDVSCYFSLLEGGRPEDKLEFTFKLYDTDRNGILDSS

SEQ ID NO: 24154 - protein, 118 aa, Homo sapiens; identical to SEQ ID NO: 24151
  Payload ID: 4826
  Gene Symbol: DGKA
  Gene Name: diacylglycerol kinase, alpha 80kDa
  Uniprot ID: P23743
  ENSP ID: ENSP00000448565

SEQ ID NO: 24155 - protein, 21 aa, Homo sapiens
  Payload ID: 4826
  Gene Symbol: DGKA
  Gene Name: diacylglycerol kinase, alpha 80kDa
  ENSP ID: ENSP00000449178
MAKERGLISPSDFAQLQKYME

SEQ ID NO: 24156 - protein, 116 aa, Homo sapiens; identical to SEQ ID NO: 24149
  Payload ID: 4826
  Gene Symbol: DGKA
  Gene Name: diacylglycerol kinase, alpha 80kDa
  ENSP ID: ENSP00000449923

SEQ ID NO: 24157 - protein, 735 aa, Homo sapiens; identical to SEQ ID NO: 24146
  Payload ID: 4826
  Gene Symbol: DGKA
  Gene Name: diacylglycerol kinase, alpha 80kDa
  Uniprot ID: P23743
  ENSP ID: ENSP00000450359

SEQ ID NO: 24158 - protein, 44 aa, Homo sapiens
  Payload ID: 4826
  Gene Symbol: DGKA
  Gene Name: diacylglycerol kinase, alpha 80kDa
  ENSP ID: ENSP00000450608
MAKERGLISPSDFAQLQKYMEYSTKKVSDVLKLFEDGEMAKYVQ

SEQ ID NO: 24159 - protein, 94 aa, Homo sapiens
  Payload ID: 4826
  Gene Symbol: DGKA
  Gene Name: diacylglycerol kinase, alpha 80kDa
  ENSP ID: ENSP00000450977
MAKERGLISPSDFAQLQKYMESSSVALSSVLLRCAHDWKWEEWEMGRCQKKIRIYHSLTGLHCARSRLSTHLRYTWTACSSSQRRGVKSDSTKK

SEQ ID NO: 24160 - protein, 107 aa, Homo sapiens
  Payload ID: 4826
  Gene Symbol: DGKA
  Gene Name: diacylglycerol kinase, alpha 80kDa
  ENSP ID: ENSP00000450999
MAKERGLISPSDFAQLQKYMEYSTKKVSDVLKLFEDGEMAKYVQGDAIGYEGFQQFLKIYLEVDNVPRHLSLALFQSFETGHCLNETNVTKDVVCLNDVSCYFSLLE

SEQ ID NO: 24161 - protein, 133 aa, Homo sapiens; identical to SEQ ID NO: 24153
  Payload ID: 4826
  Gene Symbol: DGKA
  Gene Name: diacylglycerol kinase, alpha 80kDa
  ENSP ID: ENSP00000451266

SEQ ID NO: 24162 - protein, 97 aa, Homo sapiens
  Payload ID: 4826
  Gene Symbol: DGKA
  Gene Name: diacylglycerol kinase, alpha 80kDa
  ENSP ID: ENSP00000451330
CNLCESSIGLGKQGLSCNLCKYTVHDQCAMKALPCEVSTYAKSRKDIGPLPPLGPAQTLPDKELPFSPRSNHMCGCEEAVSPGAATAVRKRSGSTTV

SEQ ID NO: 24163 - protein, 202 aa, Homo sapiens
  Payload ID: 4826
  Gene Symbol: DGKA
  Gene Name: diacylglycerol kinase, alpha 80kDa
  ENSP ID: ENSP00000451518
LRIDPVPNTHPLLVFVNPKSGGKQGQRLRLFKDVPDSRILVCGGDGTVGWILETIDKANLPVLPPVAVLPLGTGNDLARCLRWGGGYEGQNLAKILKDLEMSKVVHMDRWSVEVIPQQTEEKSDPVPFQIINNYFSIGVDASIAHRFHIMREKYPEKFNSRMKNKLWYFEFATSESIFSTCKKLEESLTVEICGKPLDLSNL

SEQ ID NO: 24164 - protein, 545 aa, Homo sapiens
  Payload ID: 4826
  Gene Symbol: DGKA
  Gene Name: diacylglycerol kinase, alpha 80kDa
  ENSP ID: ENSP00000451743
MAKERGLISPSDFAQLQKYMEYSTKKGGRPEDKLEFTFKLYDTDRNGILDSSEVDKIILQMMRVAEYLDWDVSELRPILQEMMKEIDYDGSGSVSQAEWVRAGATTVPLLVLLGLEMTLKDDGQHMWRPKRFPRPVYCNLCESSIGLGKQGLSCNLCKYTVHDQCAMKALPCEVSTYAKSRKDIGVQSHVWVRGGCESGRCDRCQKKIRIYHSLTGLHCVWCHLEIHDDCLQAVGHECDCGLLRDHILPPSSIYPSVLASGPDRKNSKTSQKTMDDLNLSTSEALRIDPVPNTHPLLVFVNPKSGGKQGQRVLWKFQYILNPRQVFNLLKDGPEIGLRLFKDVPDSRILVCGGDGTVGWILETIDKANLPVLPPVAVLPLGTGNDLARCLRWGGGYEGQNLAKILKDLEMSKVVHMDRWSVEVIPQQTEEKSDPVPFQIINNYFSIGVDASIAHRFHIMREKYPEKFNSRMKNKLWYFEFATSESIFSTCKKLEESLTVEICGKPLDLSNLSLEGIAVLNIPSMHGGSNLWGDTRRPHGDIYGIN

SEQ ID NO: 24165 - protein, 44 aa, Homo sapiens; identical to SEQ ID NO: 24158
  Payload ID: 4826
  Gene Symbol: DGKA
  Gene Name: diacylglycerol kinase, alpha 80kDa
  ENSP ID: ENSP00000451814

SEQ ID NO: 24166 - protein, 44 aa, Homo sapiens; identical to SEQ ID NO: 24158
  Payload ID: 4826
  Gene Symbol: DGKA
  Gene Name: diacylglycerol kinase, alpha 80kDa
  ENSP ID: ENSP00000452353

SEQ ID NO: 24167 - protein, 804 aa, Homo sapiens [sequence omitted]

SEQ ID NO: 24168 - protein, 803 aa, Homo sapiens
  Payload ID: 4827
  Gene Symbol: DGKB
  Gene Name: diacylglycerol kinase, beta 90kDa
  ENSP ID: ENSP00000384909
MTNQEKWAHLSPSEFSQLQKYAEYSTKKLKDVLEEFHGNGVLAKYNPEGKQDILNQTIDFEGFKLFMKTFLEAELPDDFTAHLFMSFSNKFPHSSPMVKSKPALLSGGLRMNKGAITPPRTTSPANTCSPEVIHLKDIVCYLSLLERGRPEDKLEFMFRLYDTDGNGFLDSSELENIISQMMHVAEYLEWDVTELNPILHEMMEEIDYDHDGTVSLEEWIQGGMTTIPLLVLLGLENNVKDDGQHVWRLKHFNKPAYCNLCLNMLIGVGKQGLCCSFCKYTVHERCVARAPPSCIKTYVKSKRNTDVMHHYWVEGNCPTKCDKCHKTVKCYQGLTGLHCVWCQITLHNKCASHLKPECDCGPLKDHILPPTTICPVVLTLPTSGVSVPEERQSTVKKEKSGSQQPNKVIDKNKMQRANSVTVDGQGLQVTPVPGTHPLLVFVNPKSGGKQGERIYRKFQYLLNPRQVYSLSGNGPMPGLNFFRDVPDFRVLACGGDGTVGWVLDCIEKANVGKHPPVAILPLGTGNDLARCLRWGGGYEGENLMKILKDIENSTEIMLDRWKFEVIPNDKDEKGDPVPYSIINNYFSIGVDASIAHRFHIMREKHPEKFNSRMKNKFWYFEFGTSETFSATCKKLHESVEIECDGVQIDLINISLEGIAILNIPSMHGGSNLWGESKKRRSHRRIEKKGSDKRTTVTDAKELKFASQDLSDQLLEVVGLEGAMEMGQIYTGLKSAGRRLAQCSCVVIRTSKSLPMQIDGEPWMQTPCTIKITHKNQAPMLMGPPPKTGLFCSLVKRTRNRSKE

SEQ ID NO: 24169 - protein, 796 aa, Homo sapiens
  Payload ID: 4827
  Gene Symbol: DGKB
  Gene Name: diacylglycerol kinase, beta 90kDa
  ENSP ID: ENSP00000385031
MTNQEKWAHLSPSEFSQLQKYAEYSTKKLKDVLEEFHGNGVLAKYNPEGTIDFEGFKLFMKTFLEAELPDDFTAHLFMSFSNKFPHSSPMVKSKPALLSGGLRMNKGAITPPRTTSPANTCSPEVIHLKDIVCYLSLLERGRPEDKLEFMFRLYDTDGNGFLDSSELENIISQMMHVAEYLEWDVTELNPILHEMMEEIDYDHDGTVSLEEWIQGGMTTIPLLVLLGLENNVKDDGQHVWRLKHFNKPAYCNLCLNMLIGVGKQGLCCSFCKYTVHERCVARAPPSCIKTYVKSKRNTDVMHHYWVEGNCPTKCDKCHKTVKCYQGLTGLHCVWCQITLHNKCASHLKPECDCGPLKDHILPPTTICPVVLTLPTSGVSVPEERQSTVKKEKSGSQQPNKVIDKNKMQRANSVTVDGQGLQVTPVPGTHPLLVFVNPKSGGKQGERIYRKFQYLLNPRQVYSLSGNGPMPGLNFFRDVPDFRVLACGGDGTVGWVLDCIEKANVGKHPPVAILPLGTGNDLARCLRWGGGYEGENLMKILKDIENSTEIMLDRWKFEVIPNDKDEKGDPVPYSIINNYFSIGVDASIAHRFHIMREKHPEKFNSRMKNKFWYFEFGTSETFSATCKKLHESVEIECDGVQIDLINISLEGIAILNIPSMHGGSNLWGESKKRRSHRRIEKKGSDKRTTVTDAKELKFASQDLSDQLLEVVGLEGAMEMGQIYTGLKSAGRRLAQCSCVVIRTSKSLPMQIDGEPWMQTPCTIKITHKNQAPMLMGPPPKTGLFCSLVKRTRNRSKE

SEQ ID NO: 24170 - protein, 804 aa, Homo sapiens [sequence omitted]

SEQ ID NO: 24171 - protein, 773 aa, Homo sapiens
  Payload ID: 4827
  Gene Symbol: DGKB
  Gene Name: diacylglycerol kinase, beta 90kDa
  Uniprot ID: Q9Y6T7
  ENSP ID: ENSP00000386066
MTNQEKWAHLSPSEFSQLQKYAEYSTKKLKDVLEEFHGNGVLAKYNPEGKQDILNQTIDFEGFKLFMKTFLEAELPDDFTAHLFMSFSNKFPHSSPMVKSKPALLSGGLRMNKGAITPPRTTSPANTCSPEVIHLKDIVCYLSLLERGRPEDKLEFMFRLYDTDGNGFLDSSELENIISQMMHVAEYLEWDVTELNPILHEMMEEIDYDHDGTVSLEEWIQGGMTTIPLLVLLGLENNVKDDGQHVWRLKHFNKPAYCNLCLNMLIGVGKQGLCCSFCKYTVHERCVARAPPSCIKTYVKSKRNTDVMHHYWVEGNCPTKCDKCHKTVKCYQGLTGLHCVWCQITLHNKCASHLKPECDCGPLKDHILPPTTICPVVLQTLPTSGVSVPEERQSTVKKEKSGSQQPNKVIDKNKMQRANSVTVDGQGLQVTPVPGTHPLLVFVNPKSGGKQGERIYRKFQYLLNPRQVYSLSGNGPMPGLNFFRDVPDFRVLACGGDGTVGWVLDCIEKANVGKHPPVAILPLGTGNDLARCLRWGGGYEGENLMKILKDIENSTEIMLDRWKFEVIPNDKDEKGDPVPYSIINNYFSIGVDASIAHRFHIMREKHPEKFNSRMKNKFWYFEFGTSETFSATCKKLHESVEIECDGVQIDLINISLEGIAILNIPSMHGGSNLWGESKKRRSHRRIEKKGSDKRTTVTDAKELKFASQDLSDQLLEVVGLEGAMEMGQIYTGLKSAGRRLAQCSCVVIRTSKSLPMQIDGEPWMQTPCTVSTE

SEQ ID NO: 24172 - protein, 75 aa, Homo sapiens
  Payload ID: 4827
  Gene Symbol: DGKB
  Gene Name: diacylglycerol kinase, beta 90kDa
  ENSP ID: ENSP00000405569
MTNQEKWAHLSPSEFSQLQKYAEYSTKKLKDVLEEFHGNGVLAKYNPEGKQDILNQTIDFEGFKLFMKTFLEAEL

SEQ ID NO: 24173 - protein, 1214 aa, Homo sapiens
  Payload ID: 4828
  Gene Symbol: DGKD
  Gene Name: diacylglycerol kinase, delta 130kDa
  Uniprot ID: Q16760
  ENSP ID: ENSP00000264057
MAAAAGAPPPGPPQPPPPPPPEESSDSEPEAEPGSPQKLIRKVSTSGQIRQKTIIKEGMLTKQNNSFQRSKRRYFKLRGRTLYYAKTAKSIIFDEVDLTDASVAESSTKNVNNSFTVITPCRKLILCADNRKEMEDWIAALKTVQNREHFEPTQYSMDHFSGMHNWYACSHARPTYCNVCREALSGVTSHGLSCEVCKFKAHKRCAVRATNNCKWTTLASIGKDIIEDADGIAMPHQWLEGNLPVSAKCTVCDKTCGSVLRLQDWRCLWCKAMVHTSCKESLLTKCPLGLCKVSVIPPTALNSIDSDGFWKASCPPSCTSPLLVFVNSKSGDNQGVKFLRRFKQLLNPAQVFDLMNGGPHLGLRLFQKFDTFRILVCGGDGSVGWVLSEIDSLNLHKQCQLGVLPLGTGNDLARVLGWGSACDDDTQLPQILEKLERASTKMLDRWSVMAYEAKLPRQASSSTVTEDFSEDSEVQQILFYEDSVAAHLSKILTSDQHSVVISSAKVLCETVKDFVARVGKAYEKTTESSEESEVMAKKCSVLKEKLDSLLKTLDDESQASSSLPNPPPTIAEEAEDGDGSGSICGSTGDRLVASACPARPQIFRPREQLMLRANSLKKAIRQIIEHTEKAVDEQNAQTQEQEGFVLGLSESEEKMDHRVCPPLSHSESFGVPKGRSQRKVSKSPCEKLISKGSLSLGSSASLPPQPGSRDGLPALNTKILYPNVRAGMSGSLPGGSVISRLLINADPFNSEPETLEYYTEKCVMNNYFGIGLDAKISLDFNNKRDEHPEKCRSRTKNMMWYGVLGTKELLHRTYKNLEQKVLLECDGRPIPLPSLQGIAVLNIPSYAGGTNFWGGTKEDDTFAAPSFDDKILEVVAVFGSMQMAVSRVIRLQHHRIAQCRTVKISILGDEGVPVQVDGEAWVQPPGYIRIVHKNRAQTLTRDRAFESTLKSWEDKQKCELPRPPSCSLHPEMLSEEEATQMDQFGQAAGVLIHSIREIAQSHRDMEQELAHAVNASSKSMDRVYGKPRTTEGLNCSFVLEMVNNFRALRSETELLLSGKMALQLDPPQKEQLGSALAEMDRQLRRLADTPWLCQSAEPGDEESVMLDLAKRSRSGKFRLVTKFKKEKNNKNKEAHSSLGAPVHLWGTEEVAAWLEHLSLCEYKDIFTRHDIRGSELLHLERRDLKDLGVTKVGHMKRILCGIKELSRSAPAVEA

SEQ ID NO: 24174 - protein, 1170 aa, Homo sapiens
  Payload ID: 4828
  Gene Symbol: DGKD
  Gene Name: diacylglycerol kinase, delta 130kDa
  Uniprot ID: Q16760
  ENSP ID: ENSP00000386455
MNMFLYFQTIIKEGMLTKQNNSFQRSKRRYFKLRGRTLYYAKTAKSIIFDEVDLTDASVAESSTKNVNNSFTVITPCRKLILCADNRKEMEDWIAALKTVQNREHFEPTQYSMDHFSGMHNWYACSHARPTYCNVCREALSGVTSHGLSCEVCKFKAHKRCAVRATNNCKWTTLASIGKDIIEDADGIAMPHQWLEGNLPVSAKCTVCDKTCGSVLRLQDWRCLWCKAMVHTSCKESLLTKCPLGLCKVSVIPPTALNSIDSDGFWKASCPPSCTSPLLVFVNSKSGDNQGVKFLRRFKQLLNPAQVFDLMNGGPHLGLRLFQKFDTFRILVCGGDGSVGWVLSEIDSLNLHKQCQLGVLPLGTGNDLARVLGWGSACDDDTQLPQILEKLERASTKMLDRWSVMAYEAKLPRQASSSTVTEDFSEDSEVQQILFYEDSVAAHLSKILTSDQHSVVISSAKVLCETVKDFVARVGKAYEKTTESSEESEVMAKKCSVLKEKLDSLLKTLDDESQASSSLPNPPPTIAEEAEDGDGSGSICGSTGDRLVASACPARPQIFRPREQLMLRANSLKKAIRQIIEHTEKAVDEQNAQTQEQEGFVLGLSESEEKMDHRVCPPLSHSESFGVPKGRSQRKVSKSPCEKLISKGSLSLGSSASLPPQPGSRDGLPALNTKILYPNVRAGMSGSLPGGSVISRLLINADPFNSEPETLEYYTEKCVMNNYFGIGLDAKISLDFNNKRDEHPEKCRSRTKNMMWYGVLGTKELLHRTYKNLEQKVLLECDGRPIPLPSLQGIAVLNIPSYAGGTNFWGGTKEDDTFAAPSFDDKILEVVAVFGSMQMAVSRVIRLQHHRIAQCRTVKISILGDEGVPVQVDGEAWVQPPGYIRIVHKNRAQTLTRDRAFESTLKSWEDKQKCELPRPPSCSLHPEMLSEEEATQMDQFGQAAGVLIHSIREIAQSHRDMEQELAHAVNASSKSMDRVYGKPRTTEGLNCSFVLEMVNNFRALRSETELLLSGKMALQLDPPQKEQLGSALAEMDRQLRRLADTPWLCQSAEPGDEESVMLDLAKRSRSGKFRLVTKFKKEKNNKNKEAHSSLGAPVHLWGTEEVAAWLEHLSLCEYKDIFTRHDIRGSELLHLERRDLKDLGVTKVGHMKRILCGIKELSRSAPAVEA

SEQ ID NO: 24175 - protein, 451 aa, Homo sapiens
  Payload ID: 4828
  Gene Symbol: DGKD
  Gene Name: diacylglycerol kinase, delta 130kDa
  ENSP ID: ENSP00000390970
  MOD_RES (1)..(1): Any amino acid
XRFKQLLNPAQVFDLMNGGPHLGLRLFQKFDTFRILVCGGDGSVGWVLSEIDSLNLHKQCQLGVLPLGTGNDLARVLGWGSACDDDTQLPQILEKLERASTKMLDRWSVMAYEAKLPRQASSSTVTEDFSEDSEVQQILFYEDSVAAHLSKILTSDQHSVVISSAKVLCETVKDFVARVGKAYEKTTESSEESEVMAKKCSVLKEKLDSLLKTLDDESQASSSLPNPPPTIAEEAEDGDGSGSICGSTGDRLVASACPARPQIFRPREQLMLRANSLKKAIRQIIEHTEKAVDEQNAQTQEQEGFVLGLSESEEKMDHRVCPPLSHSESFGVPKGRSQRKVSKSPCEKLISKGSLSLGSSASLPPQPGSRDGLPALNTKILYPNVRAGMSGSLPGGSVISRLLINADPFNSEPETLERSQTQSPRPHDPIPVNCLEEAPPWRWKVDERRQG

SEQ ID NO: 24176 - protein, 164 aa, Homo sapiens
  Payload ID: 4828
  Gene Symbol: DGKD
  Gene Name: diacylglycerol kinase, delta 130kDa
  ENSP ID: ENSP00000395530
SPRSQTLIRPQKDCACACVCVCTIIKEGMLTKQNNSFQRSKRRYFKLRGRTLYYAKTAKSIIFDEVDLTDASVAESSTKNVNNSFTVITPCRKLILCADNRKEMEDWIAALKTVQNREHFEPTQYSMDHFSGMHNWYACSHARPTYCNVCREALSGVTSHGLSC

SEQ ID NO: 24177 - protein, 157 aa, Homo sapiens
  Payload ID: 4828
  Gene Symbol: DGKD
  Gene Name: diacylglycerol kinase, delta 130kDa
  ENSP ID: ENSP00000407938
MAAAAGAPPPGPPQPPPPPPPEESSDSEPEAEPGSPQKLIRKVSTSGQIRQKVITPCRKLILCADNRKEMEDWIAALKTVQNREHFEPTQYSMDHFSGMHNWYACSHARPTYCNVCREALSGVTSHGLSCEVCKFKAHKRCAVRATNNCKWTTLASI

SEQ ID NO: 24178 - protein, 1168 aa, Homo sapiens
  Payload ID: 4828
  Gene Symbol: DGKD
  Gene Name: diacylglycerol kinase, delta 130kDa
  ENSP ID: ENSP00000479051
MNMFLYFQTIIKEGMLTKQNNSFQRSKRRYFKLRGRTLYYAKTAKSIIFDEVDLTDASVAESSTKNVNNSFTVITPCRKLILCADNRKEMEDWIAALKTVQNREHFEPTQYSMDHFSGMHNWYACSHARPTYCNVCREALSGVTSHGLSCEVCKFKAHKRCAVRATNNCKWTTLASIGKDIIEDADGIAMPHQWLEGNLPVSAKCTVCDKTCGSVLRLQDWRCLWCKAMVHTSCKESLLTKCPLGLCKVSVIPPTALNSIDSDGFWKASCPPSCTSPLLVFVNSKSGDNQGVKFLRRFKQLLNPAQVFDLMNGGPHLGLRLFQKFDTFRILVCGGDGSVGWVLSEIDSLNLHKQCQLGVLPLGTGNDLARVLGWGSACDDDTQLPQILEKLERASTKMLDRWSVMAYEAKLPRQASSSTVTEDFSEDSEVQQILFYEDSVAAHLSKILTSDQHSVVISSAKVLCETVKDFVARVGKAYEKTTESSEESEVMAKKCSVLKEKLDSLLKTLDDESQASSSLPNPPPTIAEEAEDGDGSGSICGSTGDRLVASACPARPQIFRPREQLMLRANSLKKAIRQIIEHTEKAVDEQNAQTQEQEGFVLGLSESEEKMDHRVCPPLSHSESFGVPKGRSQRKVSKSPCEKLISKGSLSLGSSASLPPQPGSRDGLPALNTKILYPNVRAGMSGSLPGGSVISRLLINADPFNSEPETLEYYTEKCVMNNYFGIGLDAKISLDFNNKRDEHPEKCRSRTKNMMWYGVLGTKELLHRTYKNLEQKVLLECDGDPSPSLQGIAVLNIPSYAGGTNFWGGTKEDDTFAAPSFDDKILEVVAVFGSMQMAVSRVIRLQHHRIAQCRTVKISILGDEGVPVQVDGEAWVQPPGYIRIVHKNRAQTLTRDRAFESTLKSWEDKQKCELPRPPSCSLHPEMLSEEEATQMDQFGQAAGVLIHSIREIAQSHRDMEQELAHAVNASSKSMDRVYGKPRTTEGLNCSFVLEMVNNFRALRSETELLLSGKMALQLDPPQKEQLGSALAEMDRQLRRLADTPWLCQSAEPGDEESVMLDLAKRSRSGKFRLVTKFKKEKNNKNKEAHSSLGAPVHLWGTEEVAAWLEHLSLCEYKDIFTRHDIRGSELLHLERRDLKDLGVTKVGHMKRILCGIKELSRSAPAVEA

SEQ ID NO: 24179 - protein, 163 aa, Homo sapiens
  Payload ID: 4828
  Gene Symbol: DGKD
  Gene Name: diacylglycerol kinase, delta 130kDa
  ENSP ID: ENSP00000485047
  MOD_RES (1)..(1): Any amino acid
XPPPEESSDSEPEAEPGSPQKLIRKVSTSGQIRQKTIIKEGMLTKQNNSFQRSKRRYFKLRGRTLYYAKTAKSIIFDEVDLTDASVAESSTKNVNNSFTAEVRWCDLGSLQPPSPRFKGSSCLSLPSSWDYSRAPLCPDNLRNFSRDGVSPYWPGWSQTPGLE

SEQ ID NO: 24180 - protein, 451 aa, Homo sapiens; identical to SEQ ID NO: 24175
  Payload ID: 4828
  Gene Symbol: DGKD
  Gene Name: diacylglycerol kinase, delta 130kDa
  ENSP ID: ENSP00000486226
  MOD_RES (1)..(1): Any amino acid

SEQ ID NO: 24181 - protein, 1168 aa, Homo sapiens; identical to SEQ ID NO: 24178
  Payload ID: 4828
  Gene Symbol: DGKD
  Gene Name: diacylglycerol kinase, delta 130kDa
  ENSP ID: ENSP00000486362

SEQ ID NO: 24182 - protein, 163 aa, Homo sapiens; identical to SEQ ID NO: 24179
  Payload ID: 4828
  Gene Symbol: DGKD
  Gene Name: diacylglycerol kinase, delta 130kDa
  ENSP ID: ENSP00000486850
  MOD_RES (1)..(1): Any amino acid

SEQ ID NO: 24183 - protein, 164 aa, Homo sapiens; identical to SEQ ID NO: 24176
  Payload ID: 4828
  Gene Symbol: DGKD
  Gene Name: diacylglycerol kinase, delta 130kDa
  ENSP ID: ENSP00000487210

SEQ ID NO: 24184 - protein, 1214 aa, Homo sapiens; identical to SEQ ID NO: 24173
  Payload ID: 4828
  Gene Symbol: DGKD
  Gene Name: diacylglycerol kinase, delta 130kDa
  Uniprot ID: Q16760
  ENSP ID: ENSP00000487220

SEQ ID NO: 24185 - protein, 1170 aa, Homo sapiens; identical to SEQ ID NO: 24174
  Payload ID: 4828
  Gene Symbol: DGKD
  Gene Name: diacylglycerol kinase, delta 130kDa
  Uniprot ID: Q16760
  ENSP ID: ENSP00000487423

SEQ ID NO: 24186 - protein, 157 aa, Homo sapiens; identical to SEQ ID NO: 24177
  Payload ID: 4828
  Gene Symbol: DGKD
  Gene Name: diacylglycerol kinase, delta 130kDa
  ENSP ID: ENSP00000487483

SEQ ID NO: 24187 - protein, 567 aa, Homo sapiens
  Payload ID: 4829
  Gene Symbol: DGKE
  Gene Name: diacylglycerol kinase, epsilon 64kDa
  Uniprot ID: P52429
  ENSP ID: ENSP00000284061
MEAERRPAPGSPSEGLFADGHLILWTLCSVLLPVFITFWCSLQRSRRQLHRRDIFRKSKHGWRDTDLFSQPTYCCVCAQHILQGAFCDCCGLRVDEGCLRKADKRFQCKEIMLKNDTKVLDAMPHHWIRGNVPLCSYCMVCKQQCGCQPKLCDYRCIWCQKTVHDECMKNSLKNEKCDFGEFKNLIIPPSYLTSINQMRKDKKTDYEVLASKLGKQWTPLIILANSRSGTNMGEGLLGEFRILLNPVQVFDVTKTPPIKALQLCTLLPYYSARVLVCGGDGTVGWVLDAVDDMKIKGQEKYIPQVAVLPLGTGNDLSNTLGWGTGYAGEIPVAQVLRNVMEADGIKLDRWKVQVTNKGYYNLRKPKEFTMNNYFSVGPDALMALNFHAHREKAPSLFSSRILNKAVYLFYGTKDCLVQECKDLNKKVELELDGERVALPSLEGIIVLNIGYWGGGCRLWEGMGDETYPLARHDDGLLEVVGVYGSFHCAQIQVKLANPFRIGQAHTVRLILKCSMMPMQVDGEPWAQGPCTVTITHKTHAMMLYFSGEQTDDDISSTSDQEDIKATE

SEQ ID NO: 24188 - protein, 456 aa, Homo sapiens
  Payload ID: 4829
  Gene Symbol: DGKE
  Gene Name: diacylglycerol kinase, epsilon 64kDa
  ENSP ID: ENSP00000458493
  MOD_RES (1)..(1): Any amino acid
XSKHGWRDTDLFSQPTYCCVCAQHILQGAFCDCCGLRVDEGCLRKADKRFQCKEIMLKNDTKVLDAMPHHWIRGNVPLCSYCMVCKQQCGCQPKLCDYRCIWCQKTVHDECMKNSLKNEKCDFGEFKNLIIPPSYLTSINQMRKDKKTDYEVLASKLGKQWTPLIILANSRSGTNMGEGLLGEFRILLNPVQVFDVTKTPPIKALQLCTLLPYYSARVLVCGGDGTVGWVLDAVDDMKIKGQEKYIPQVAVLPLGTGNDLSNTLGWGTGYAGEIPVAQVLRNVMEADGIKLDRWKVQVTNKGYYNLRKPKEFTMNNYFSVGPDALMALNFHAHREKAPSLFSSRILNKAVYLFYGTKDCLVQECKDLNKKVELELDGERVALPSLEGIIVLNIGYWGGGCRLWEGMGDETYPLARHDDGLLEVVGVYGSFHCAQIQVKLANPFRIGQAHTVRVGEI

SEQ ID NO: 24189 - protein, 177 aa, Homo sapiens
  Payload ID: 4829
  Gene Symbol: DGKE
  Gene Name: diacylglycerol kinase, epsilon 64kDa
  Uniprot ID: P52429
  ENSP ID: ENSP00000459295
MEAERRPAPGSPSEGLFADGHLILWTLCSVLLPVFITFWCSLQRSRRQLHRRDIFRKSKHGWRDTDLFSQPTYCCVCAQHILQGAFCDCCGLRVDEGCLRKADKRFQCKEIMLKNDTKVLDAMPHHWIRGNVPLCSYCMVCKQQCGCQPKLCDYRYGLRGHSLSQNAPWESGFHRVV

SEQ ID NO: 24190 - protein, 70 aa, Homo sapiens
  Payload ID: 4829
  Gene Symbol: DGKE
  Gene Name: diacylglycerol kinase, epsilon 64kDa
  ENSP ID: ENSP00000459958
HCAQIQVKLANPFRIGQAHTVRVDGEPWAQGPCTVTITHKTHAMMLYFSGEQTDDDISSTSDQEDIKATE

SEQ ID NO: 24191 - protein, 1164 aa, Homo sapiens
  Payload ID: 4830
  Gene Symbol: DGKH
  Gene Name: diacylglycerol kinase, eta
  Uniprot ID: Q86XP1
  ENSP ID: ENSP00000261491
MAGAGGQHHPPGAAGGAAAGAGAAVTSAAASAGPGEDSSDSEAEQEGPQKLIRKVSTSGQIRTKTSIKEGQLLKQTSSFQRWKKRYFKLRGRTLYYAKDSKSLIFDEVDLSDASVAEASTKNANNSFTIITPFRRLMLCAENRKEMEDWISSLKSVQTREPYEVAQFNVEHFSGMHNWYACSHARPTFCNVCRESLSGVTSHGLSCEVCKFKAHKRCAVRATNNCKWTTLASIGKDIIEDEDGVAMPHQWLEGNLPVSAKCAVCDKTCGSVLRLQDWKCLWCKTMVHTACKDLYHPICPLGQCKVSIIPPIALNSTDSDGFCRATFSFCVSPLLVFVNSKSGDNQGVKFLRRFKQLLNPAQVFDLMNGGPHLGLRLFQKFDNFRILVCGGDGSVGWVLSEIDKLNLNKQCQLGVLPLGTGNDLARVLGWGGSYDDDTQLPQILEKLERASTKMLDRWSIMTYELKLPPKASLLPGPPEASEEFYMTIYEDSVATHLTKILNSDEHAVVISSAKTLCETVKDFVAKVEKTYDKTLENAVVADAVASKCSVLNEKLEQLLQALHTDSQAAPVLPGLSPLIVEEDAVESSSEESLGESKEQLGDDVTKPSSQKAVKPREIMLRANSLKKAVRQVIEEAGKVMDDPTVHPCEPANQSSDYDSTETDESKEEAKDDGAKESITVKTAPRSPDARASYGHSQTDSVPGPAVAASKENLPVLNTRIICPGLRAGLAASIAGSSIINKMLLANIDPFGATPFIDPDLDSVDGYSEKCVMNNYFGIGLDAKISLEFNNKREEHPEKCRSRTKNLMWYGVLGTRELLQRSYKNLEQRVQLECDGQYIPLPSLQGIAVLNIPSYAGGTNFWGGTKEDDIFAAPSFDDKILEVVAIFDSMQMAVSRVIKLQHHRIAQCRTVKITIFGDEGVPVQVDGEAWVQPPGIIKIVHKNRAQMLTRDRAFESTLKSWEDKQKCDSGKPVLRTHLYIHHAIDLATEEVSQMQLCSQAAEELITRICDAATIHCLLEQELAHAVNACSHALNKANPRCPESLTRDTATEIAINVKALYNETESLLVGRVPLQLESPHEERVSNALHSVEVELQKLTEIPWLYYILHPNEDEEPPMDCTKRNNRSTVFRIVPKFKKEKVQKQKTSSQPGSGDTESGSCEANSPGN

SEQ ID NO: 24192 - protein, 1220 aa, Homo sapiens
  Payload ID: 4830
  Gene Symbol: DGKH
  Gene Name: diacylglycerol kinase, eta
  Uniprot ID: Q86XP1
  ENSP ID: ENSP00000337572
MAGAGGQHHPPGAAGGAAAGAGAAVTSAAASAGPGEDSSDSEAEQEGPQKLIRKVSTSGQIRTKTSIKEGQLLKQTSSFQRWKKRYFKLRGRTLYYAKDSKSLIFDEVDLSDASVAEASTKNANNSFTIITPFRRLMLCAENRKEMEDWISSLKSVQTREPYEVAQFNVEHFSGMHNWYACSHARPTFCNVCRESLSGVTSHGLSCEVCKFKAHKRCAVRATNNCKWTTLASIGKDIIEDEDGVAMPHQWLEGNLPVSAKCAVCDKTCGSVLRLQDWKCLWCKTMVHTACKDLYHPICPLGQCKVSIIPPIALNSTDSDGFCRATFSFCVSPLLVFVNSKSGDNQGVKFLRRFKQLLNPAQVFDLMNGGPHLGLRLFQKFDNFRILVCGGDGSVGWVLSEIDKLNLNKQCQLGVLPLGTGNDLARVLGWGGSYDDDTQLPQILEKLERASTKMLDRWSIMTYELKLPPKASLLPGPPEASEEFYMTIYEDSVATHLTKILNSDEHAVVISSAKTLCETVKDFVAKVEKTYDKTLENAVVADAVASKCSVLNEKLEQLLQALHTDSQAAPVLPGLSPLIVEEDAVESSSEESLGESKEQLGDDVTKPSSQKAVKPREIMLRANSLKKAVRQVIEEAGKVMDDPTVHPCEPANQSSDYDSTETDESKEEAKDDGAKESITVKTAPRSPDARASYGHSQTDSVPGPAVAASKENLPVLNTRIICPGLRAGLAASIAGSSIINKMLLANIDPFGATPFIDPDLDSVDGYSEKCVMNNYFGIGLDAKISLEFNNKREEHPEKCRSRTKNLMWYGVLGTRELLQRSYKNLEQRVQLECDGQYIPLPSLQGIAVLNIPSYAGGTNFWGGTKEDDIFAAPSFDDKILEVVAIFDSMQMAVSRVIKLQHHRIAQCRTVKITIFGDEGVPVQVDGEAWVQPPGIIKIVHKNRAQMLTRDRAFESTLKSWEDKQKCDSGKPVLRTHLYIHHAIDLATEEVSQMQLCSQAAEELITRICDAATIHCLLEQELAHAVNACSHALNKANPRCPESLTRDTATEIAINVKALYNETESLLVGRVPLQLESPHEERVSNALHSVEVELQKLTEIPWLYYILHPNEDEEPPMDCTKRNNRSTVFRIVPKFKKEKVQKQKTSSQPVQKWGTEEVAAWLDLLNLGEYKDIFIRHDIRGAELLHLERRDLKDLGIPKVGHVKRILQGIKELGRSTPQSEV

SEQ ID NO: 24193 - protein, 1164 aa, Homo sapiens; identical to SEQ ID NO: 24191
  Payload ID: 4830
  Gene Symbol: DGKH
  Gene Name: diacylglycerol kinase, eta
  Uniprot ID: Q86XP1
  ENSP ID: ENSP00000368576

SEQ ID NO: 24194 - protein, 1100 aa, Homo sapiens
  Payload ID: 4830
  Gene Symbol: DGKH
  Gene Name: diacylglycerol kinase, eta
  Uniprot ID: Q86XP1
  ENSP ID: ENSP00000445114
MLCAENRKEMEDWISSLKSVQTREPYEVAQFNVEHFSGMHNWYACSHARPTFCNVCRESLSGVTSHGLSCEVCKFKAHKRCAVRATNNCKWTTLASIGKDIIEDEDGVAMPHQWLEGNLPVSAKCAVCDKTCGSVLRLQDWKCLWCKTMVHTACKDLYHPICPLGQCKVSIIPPIALNSTDSDGFCRATFSFCVSPLLVFVNSKSGDNQGVKFLRRFKQLLNPAQVFDLMNGGPHLGLRLFQKFDNFRILVCGGDGSVGWVLSEIDKLNLNKQCQLGVLPLGTGNDLARVLGWGGSYDDDTQLPQILEKLERASTKMLDRWSIMTYELKLPPKASLLPGPPEASEEFYMTIYEDSVATHLTKILNSDEHAVVISSAKTLCETVKDFVAKVEKTYDKTLENAVVADAVASKCSVLNEKLEQLLQALHTDSQAAPVLPGLSPLIVEEDAVESSSEESLGESKEQLGDDVTKPSSQKAVKPREIMLRANSLKKAVRQVIEEAGKVMDDPTVHPCEPANQSSDYDSTETDESKEEAKDDGAKESITVKTAPRSPDARASYGHSQTDSVPGPAVAASKENLPVLNTRIICPGLRAGLAASIAGSSIINKMLLANIDPFGATPFIDPDLDSVDGYSEKCVMNNYFGIGLDAKISLEFNNKREEHPEKCRSRTKNLMWYGVLGTRELLQRSYKNLEQRVQLECDGQYIPLPSLQGIAVLNIPSYAGGTNFWGGTKEDDIFAAPSFDDKILEVVAIFDSMQMAVSRVIKLQHHRIAQCRTVKITIFGDEGVPVQVDGEAWVQPPGIIKIVHKNRAQMLTRDRAFESTLKSWEDKQKCDSGKPVLRTHLYIHHAIDLATEEVSQMQLCSQAAEELITRICDAATIHCLLEQELAHAVNACSHALNKANPRCPESLTRDTATEIAINVKALYNETESLLVGRVPLQLESPHEERVSNALHSVEVELQKLTEIPWLYYILHPNEDEEPPMDCTKRNNRSTVFRIVPKFKKEKVQKQKTSSQPVQKWGTEEVAAWLDLLNLGEYKDIFIRHDIRGAELLHLERRDLKNTVGEKRDTKENGKHMDLGIPKVGHVKRILQGIKELGRSTPQSEV

SEQ ID NO: 24195 - protein, 62 aa, Homo sapiens
  Payload ID: 4830
  Gene Symbol: DGKH
  Gene Name: diacylglycerol kinase, eta
  ENSP ID: ENSP00000482250
AAAGAGAAVTSAAASAGPGEDSSDSEAEQEGPQKLIRKVSTSGQIRTKGFIMLARLVTSELK

SEQ ID NO: 24196 - protein, 1084 aa, Homo sapiens
  Payload ID: 4830
  Gene Symbol: DGKH
  Gene Name: diacylglycerol kinase, eta
  Uniprot ID: Q86XP1
  ENSP ID: ENSP00000485809
MLCAENRKEMEDWISSLKSVQTREPYEVAQFNVEHFSGMHNWYACSHARPTFCNVCRESLSGVTSHGLSCEVCKFKAHKRCAVRATNNCKWTTLASIGKDIIEDEDGVAMPHQWLEGNLPVSAKCAVCDKTCGSVLRLQDWKCLWCKTMVHTACKDLYHPICPLGQCKVSIIPPIALNSTDSDGFCRATFSFCVSPLLVFVNSKSGDNQGVKFLRRFKQLLNPAQVFDLMNGGPHLGLRLFQKFDNFRILVCGGDGSVGWVLSEIDKLNLNKQCQLGVLPLGTGNDLARVLGWGGSYDDDTQLPQILEKLERASTKMLDRWSIMTYELKLPPKASLLPGPPEASEEFYMTIYEDSVATHLTKILNSDEHAVVISSAKTLCETVKDFVAKVEKTYDKTLENAVVADAVASKCSVLNEKLEQLLQALHTDSQAAPVLPGLSPLIVEEDAVESSSEESLGESKEQLGDDVTKPSSQKAVKPREIMLRANSLKKAVRQVIEEAGKVMDDPTVHPCEPANQSSDYDSTETDESKEEAKDDGAKESITVKTAPRSPDARASYGHSQTDSVPGPAVAASKENLPVLNTRIICPGLRAGLAASIAGSSIINKMLLANIDPFGATPFIDPDLDSVDGYSEKCVMNNYFGIGLDAKISLEFNNKREEHPEKCRSRTKNLMWYGVLGTRELLQRSYKNLEQRVQLECDGQYIPLPSLQGIAVLNIPSYAGGTNFWGGTKEDDIFAAPSFDDKILEVVAIFDSMQMAVSRVIKLQHHRIAQCRTVKITIFGDEGVPVQVDGEAWVQPPGIIKIVHKNRAQMLTRDRAFESTLKSWEDKQKCDSGKPVLRTHLYIHHAIDLATEEVSQMQLCSQAAEELITRICDAATIHCLLEQELAHAVNACSHALNKANPRCPESLTRDTATEIAINVKALYNETESLLVGRVPLQLESPHEERVSNALHSVEVELQKLTEIPWLYYILHPNEDEEPPMDCTKRNNRSTVFRIVPKFKKEKVQKQKTSSQPVQKWGTEEVAAWLDLLNLGEYKDIFIRHDIRGAELLHLERRDLKDLGIPKVGHVKRILQGIKELGRSTPQSEV

SEQ ID NO: 24197 - protein, 89 aa, Homo sapiens
  Payload ID: 4830
  Gene Symbol: DGKH
  Gene Name: diacylglycerol kinase, eta
  ENSP ID: ENSP00000486329
MLCAENRKEMEDWISSLKSVQTREPYEVAQFNVEHFSGMHNWYACSHARPTFCNVCRESLSGVTSHGLSCEGTHCLQRFIPSNMSTWSM

SEQ ID NO: 24198 - protein, 1028 aa, Homo sapiens
  Payload ID: 4830
  Gene Symbol: DGKH
  Gene Name: diacylglycerol kinase, eta
  ENSP ID: ENSP00000486838
MLCAENRKEMEDWISSLKSVQTREPYEVAQFNVEHFSGMHNWYACSHARPTFCNVCRESLSGVTSHGLSCEVCKFKAHKRCAVRATNNCKWTTLASIGKDIIEDEDGVAMPHQWLEGNLPVSAKCAVCDKTCGSVLRLQDWKCLWCKTMVHTACKDLYHPICPLGQCKVSIIPPIALNSTDSDGFCRATFSFCVSPLLVFVNSKSGDNQGVKFLRRFKQLLNPAQVFDLMNGGPHLGLRLFQKFDNFRILVCGGDGSVGWVLSEIDKLNLNKQCQLGVLPLGTGNDLARVLGWGGSYDDDTQLPQILEKLERASTKMLDRWSIMTYELKLPPKASLLPGPPEASEEFYMTIYEDSVATHLTKILNSDEHAVVISSAKTLCETVKDFVAKVEKTYDKTLENAVVADAVASKCSVLNEKLEQLLQALHTDSQAAPVLPGLSPLIVEEDAVESSSEESLGESKEQLGDDVTKPSSQKAVKPREIMLRANSLKKAVRQVIEEAGKVMDDPTVHPCEPANQSSDYDSTETDESKEEAKDDGAKESITVKTAPRSPDARASYGHSQTDSVPGPAVAASKENLPVLNTRIICPGLRAGLAASIAGSSIINKMLLANIDPFGATPFIDPDLDSVDGYSEKCVMNNYFGIGLDAKISLEFNNKREEHPEKCRSRTKNLMWYGVLGTRELLQRSYKNLEQRVQLECDGQYIPLPSLQGIAVLNIPSYAGGTNFWGGTKEDDIFAAPSFDDKILEVVAIFDSMQMAVSRVIKLQHHRIAQCRTVKITIFGDEGVPVQVDGEAWVQPPGIIKIVHKNRAQMLTRDRAFESTLKSWEDKQKCDSGKPVLRTHLYIHHAIDLATEEVSQMQLCSQAAEELITRICDAATIHCLLEQELAHAVNACSHALNKANPRCPESLTRDTATEIAINVKALYNETESLLVGRVPLQLESPHEERVSNALHSVEVELQKLTEIPWLYYILHPNEDEEPPMDCTKRNNRSTVFRIVPKFKKEKVQKQKTSSQPALPLHSVLHLLWPTFAL

SEQ ID NO: 24199 - protein, 791 aa, Homo sapiens
  Payload ID: 4831
  Gene Symbol: DGKG
  Gene Name: diacylglycerol kinase, gamma 90kDa
  Uniprot ID: P49619
  ENSP ID: ENSP00000265022
MGEERWVSLTPEEFDQLQKYSEYSSKKIKDALTEFNEGGSLKQYDPHEPISYDVFKLFMRAYLEVDLPQPLSTHLFLAFSQKPRHETSDHPTEGASNSEANSADTNIQNADNATKADEACAPDTESNMAEKQAPAEDQVAATPLEPPVPRSSSSESPVVYLKDVVCYLSLLETGRPQDKLEFMFRLYDSDENGLLDQAEMDCIVNQMLHIAQYLEWDPTELRPILKEMLQGMDYDRDGFVSLQEWVHGGMTTIPLLVLLGMDDSGSKGDGRHAWTMKHFKKPTYCNFCHIMLMGVRKQGLCCTYCKYTVHERCVSRNIPGCVKTYSKAKRSGEVMQHAWVEGNSSVKCDRCHKSIKCYQSVTARHCVWCRMTFHRKCELSTLCDGGELRDHILLPTSICPITRDRPGEKSDGCVSAKGELVMQYKIIPTPGTHPLLVLVNPKSGGRQGERILRKFHYLLNPKQVFNLDNGGPTPGLNFFRDTPDFRVLACGGDGTVGWILDCIDKANFAKHPPVAVLPLGTGNDLARCLRWGGGYEGGSLTKILKDIEQSPLVMLDRWHLEVIPREEVENGDQVPYSIMNNYFSIGVDASIAHRFHVMREKHPEKFNSRMKNKLWYFEFGTSETFAATCKKLHDHIELECDGVGVDLSNIFLEGIAILNIPSMYGGTNLWGENKKNRAVIRESRKGVTDPKELKFCVQDLSDQLLEVVGLEGAMEMGQIYTGLKSAGRRLAQCASVTIRTNKLLPMQVDGEPWMQPCCTIKITHKNQAPMMMGPPQKSSFFSLRRKSRSKD

SEQ ID NO: 24200 - protein, 766 aa, Homo sapiens
  Payload ID: 4831
  Gene Symbol: DGKG
  Gene Name: diacylglycerol kinase, gamma 90kDa
  Uniprot ID: P49619
  ENSP ID: ENSP00000339777
MGEERWVSLTPEEFDQLQKYSEYSSKKIKDALTEFNEGGSLKQYDPHEPISYDVFKLFMRAYLEVDLPQPLSTHLFLAFSQKPRHETSDHPTEGASNSEANSADTNIQNADNATKADEACAPDTESNMAEKQAPAEDQVAATPLEPPVPRSSSSESPVVYLKDVVCYLSLLETGRPQDKLEFMFRLYDSDENGLLDQAEMDCIVNQMLHIAQYLEWDPTELRPILKEMLQGMDYDRDGFVSLQEWVHGGMTTIPLLVLLGMDDSGSKGDGRHAWTMKHFKKPTYCNFCHIMLMGVRKQGLCCTYCKYTVHERCVSRNIPGCVKTYSKAKRSGEVMQHAWVEGNSSVKCDRCHKSIKCYQSVTARHCVWCRMTFHRKCELSTLCDGGELRDHILLPTSICPITRDRPGEKSDGCVSAKGELVMQYKIIPTPGTHPLLVLVNPKSGGRQGERLNFFRDTPDFRVLACGGDGTVGWILDCIDKANFAKHPPVAVLPLGTGNDLARCLRWGGGYEGGSLTKILKDIEQSPLVMLDRWHLEVIPREEVENGDQVPYSIMNNYFSIGVDASIAHRFHVMREKHPEKFNSRMKNKLWYFEFGTSETFAATCKKLHDHIELECDGVGVDLSNIFLEGIAILNIPSMYGGTNLWGENKKNRAVIRESRKGVTDPKELKFCVQDLSDQLLEVVGLEGAMEMGQIYTGLKSAGRRLAQCASVTIRTNKLLPMQVDGEPWMQPCCTIKITHKNQAPMMMGPPQKSSFFSLRRKSRSKD

SEQ ID NO: 24201 - protein, 752 aa, Homo sapiens
  Payload ID: 4831
  Gene Symbol: DGKG
  Gene Name: diacylglycerol kinase, gamma 90kDa
  Uniprot ID: P49619
  ENSP ID: ENSP00000371599
MGEERWVSLTPEEFDQLQKYSEYSSKKIKDALTEFNEGGSLKQYDPHEPISYDVFKLFMRAYLEVDLPQPLSTHLFLAFSQKPRHETSDHPTEGASNSEANSADTNIQNADNATKADEACAPDTESNMAEKQAPAEDQVAATPLEPPVPRSSSSESPVVYLKDVVCYLSLLETGRPQDKLEFMFRLYDSDENGLLDQAEMDCIVNQMLHIAQYLEWDPTELRPILKEMLQGMDYDRDGFVSLQEWVHGGMTTIPLLVLLGMDDSGSKGDGRHAWTMKHFKKPTYCNFCHIMLMGVRKQGLCCTYCKYTVHERCVSRNIPGCVKTYSKAKRSGEFHRKCELSTLCDGGELRDHILLPTSICPITRDRPGEKSDGCVSAKGELVMQYKIIPTPGTHPLLVLVNPKSGGRQGERILRKFHYLLNPKQVFNLDNGGPTPGLNFFRDTPDFRVLACGGDGTVGWILDCIDKANFAKHPPVAVLPLGTGNDLARCLRWGGGYEGGSLTKILKDIEQSPLVMLDRWHLEVIPREEVENGDQVPYSIMNNYFSIGVDASIAHRFHVMREKHPEKFNSRMKNKLWYFEFGTSETFAATCKKLHDHIELECDGVGVDLSNIFLEGIAILNIPSMYGGTNLWGENKKNRAVIRESRKGVTDPKELKFCVQDLSDQLLEVVGLEGAMEMGQIYTGLKSAGRRLAQCASVTIRTNKLLPMQVDGEPWMQPCCTIKITHKNQAPMMMGPPQKSSFFSLRRKSRSKD

SEQ ID NO: 24202 - protein, 154 aa, Homo sapiens
  Payload ID: 4831
  Gene Symbol: DGKG
  Gene Name: diacylglycerol kinase, gamma 90kDa
  ENSP ID: ENSP00000395526
HIAQYLEWDPTELRPGSKGDGRHAWTMKHFKKPTYCNFCHIMLMGVRKQGLCCTYCKYTVHERCVSRNIPGCVKTYSKAKRSGEVMQHAWVEGNSSVKCDRCHKSIKCYQSVTARHCVWCRMTFHRKCELSTLCDGGELRDHILLPTSICPITR

SEQ ID NO: 24203 - protein, 1065 aa, Homo sapiens
  Payload ID: 4832
  Gene Symbol: DGKI
  Gene Name: diacylglycerol kinase, iota
  Uniprot ID: O75912
  ENSP ID: ENSP00000288490
MDAAGRGCHLLPLPAARGPARAPAAAAAAAASPPGPCSGAACAPSAAAGAGAMNPSSSAGEEKGATGGSSSSGSGAGSCCLGAEGGADPRGAGSAAAAGAAALDEPAAAGQKEKDEALEEKLRNLTFRKQVSYRKAISRAGLQHLAPAHPLSLPVANGPAKEPRATLDWSENAVNGEHLWLETNVSGDLCYLGEENCQVRFAKSALRRKCAVCKIVVHTACIEQLEKINFRCKPTFREGGSRSPRENFVRHHWVHRRRQEGKCKQCGKGFQQKFSFHSKEIVAISCSWCKQAFHNKVTCFMLHHIEEPCSLGAHAAVIVPPTWIIKVKKPQNSLKASNRKKKRTSFKRKASKRGMEQENKGRPFVIKPISSPLMKPLLVFVNPKSGGNQGTKVLQMFMWYLNPRQVFDLSQEGPKDALELYRKVPNLRILACGGDGTVGWILSILDELQLSPQPPVGVLPLGTGNDLARTLNWGGGYTDEPVSKILCQVEDGTVVQLDRWNLHVERNPDLPPEELEDGVCKLPLNVFNNYFSLGFDAHVTLEFHESREANPEKFNSRFRNKMFYAGAAFSDFLQRSSRDLSKHVKVVCDGTDLTPKIQELKFQCIVFLNIPRYCAGTMPWGNPGDHHDFEPQRHDDGYIEVIGFTMASLAALQVGGHGERLHQCREVMLLTYKSIPMQVDGEPCRLAPAMIRISLRNQANMVQKSKRRTSMPLLNDPQSVPDRLRIRVNKISLQDYEGFHYDKEKLREASISDWLRTIAGELVQSFGAIPLGILVVRGDCDLETCRMYIDRLQEDLQSVSSGSQRVHYQDHETSFPRALSAQRLSPRWCFLDDRSQEHLHFVMEISQDEIFILDPDMVVSQPAGTPPGMPDLVVEQASGISDWWNPALRKRMLSDSGLGMIAPYYEDSDLKDLSHSRVLQSPVSSEDHAILQAVIAGDLMKLIESYKNGGSLLIQGPDHCSLLHYAAKTGNGEIVKYILDHGPSELLDMADSETGETALHKAACQRNRAVCQLLVDAGASLRKTDSKGKTPQERAQQAGDPDLAAYLESRQNYKVIGHEDLETAV

SEQ ID NO: 24204 - protein, 734 aa, Homo sapiens
  Payload ID: 4832
  Gene Symbol: DGKI
  Gene Name: diacylglycerol kinase, iota
  ENSP ID: ENSP00000392161
MLHHIEEPCSLGAHAAVIVPPTWIIKVKKPQNSLKASNRKKKRTSFKRKASKRGMEQENKGRPFVIKPISSPLMKPLLVFVNPKSGGNQGTKVLQMFMWYLNPRQVFDLSQEGPKDALELYRKVPNLRILACGGDGTVGWILSILDELQLSPQPPVGVLPLGTGNDLARTLNWGGGYTDEPVSKILCQVEDGTVVQLDRWNLHVERNPDLPPEELEDGVCKLPLNVFNNYFSLGFDAHVTLEFHESREANPEKFNSRFRNKMFYAGAAFSDFLQRSSRDLSKHVKVVCDGTDLTPKIQELKFQCIVFLNIPRYCAGTMPWGNPGDHHDFEPQRHDDGYIEVIGFTMASLAALQVGGHGERLHQCREVMLLTYKSIPMQVDGEPCRLAPAMIRISLRNQANMVQKSKRRTSMPLLNDPQSVPDRLRIRVNKISLQDYEGFHYDKEKLREASISDWLRTIAGELVQSFGAIPLGILVVRGDCDLETCRMYIDRLQEDLQSVSSGSQRVHYQDHETSFPRALSAQRLSPRWCFLDATSADRFYRIDRSQEHLHFVMEISQDEIFILDPDMVVSQPAGTPPGMPDLVVEQASGSPVSSEDHAILQAVIAGDLMKLIESYKNGGSLLIQGPDHCSLLHYAAKTGNGEIVKYILDHGPSELLDMADSETGETALHKAACQRNRAVCQLLVDAGASLRKTDSKGKTPQERAQQAGDPDLAAYLESRQNYKVIGHEDLETAV

SEQ ID NO: 24205 - protein, 1078 aa, Homo sapiens
  Payload ID: 4832
  Gene Symbol: DGKI
  Gene Name: diacylglycerol kinase, iota
  ENSP ID: ENSP00000396078
MDAAGRGCHLLPLPAARGPARAPAAAAAAAASPPGPCSGAACAPSAAAGAGAMNPSSSAGEEKGATGGSSSSGSGAGSCCLGAEGGADPRGAGSAAAAGAAALDEPAAAGQKEKDEALEEKLRNLTFRKQVSYRKAISRAGLQHLAPAHPLSLPVANGPAKEPRATLDWSENAVNGEHLWLETNVSGDLCYLGEENCQVRFAKSALRRKCAVCKIVVHTACIEQLEKINFRCKPTFREGGSRSPRENFVRHHWVHRRRQEGKCKQCGKGFQQKFSFHSKEIVAISCSWCKQAFHNKVTCFMLHHIEEPCSLGAHAAVIVPPTWIIKVKKPQNSLKASNRKKKRTSFKRKASKRGMEQENKGRPFVIKPISSPLMKPLLVFVNPKSGGNQGTKVLQMFMWYLNPRQVFDLSQEGPKDALELYRKVPNLRILACGGDGTVGWILSILDELQLSPQPPVGVLPLGTGNDLARTLNWGGGYTDEPVSKILCQVEDGTVVQLDRWNLHVERNPDLPPEELEDGVCKLPLNVFNNYFSLGFDAHVTLEFHESREANPEKFNSRFRNKMFYAGAAFSDFLQRSSRDLSKHVKVVCDGTDLTPKIQELKFQCIVFLNIPRYCAGTMPWGNPGDHHDFEPQRHDDGYIEVIGFTMASLAALQVGGHGERLHQCREVMLLTYKSIPMQVDGEPCRLAPAMIRISLRNQANMVQKSKRRTSMPLLNDIHQVQTADLRRVSAPPGSFTIPQSVPDRLRIRVNKISLQDYEGFHYDKEKLREASIPLGILVVRGDCDLETCRMYIDRLQEDLQSVSSGSQRVHYQDHETSFPRALSAQRLSPRWCFLDATSADRFYRIDRSQEHLHFVMEISQDEIFILDPDMVVSQPAGTPPGMPDLVVEQASGISDWWNPALRKRMLSDSGLGMIAPYYEDSDLKDLSHSRVLQSPVSSEDHAILQAVIAGDLMKLIESYKNGGSLLIQGPDHCSLLHYAAKTGNGEIVKYILDHGPSELLDMADSETGETALHKAACQRNRAVCQLLVDAGASLRKTDSKGKTPQERAQQAGDPDLAAYLESRQNYKVIGHEDLETAV

SEQ ID NO: 24206 - protein, 1047 aa, Homo sapiens
  Payload ID: 4832
  Gene Symbol: DGKI
  Gene Name: diacylglycerol kinase, iota
  ENSP ID: ENSP00000399131
MDAAGRGCHLLPLPAARGPARAPAAAAAAAASPPGPCSGAACAPSAAAGAGAMNPSSSAGEEKGATGGSSSSGSGAGSCCLGAEGGADPRGAGSAAAAGAAALDEPAAAGQKEKDEALEEKLRNLTFRKQVSYRKAISRAGLQHLAPAHPLSLPVANGPAKEPRATLDWSENAVNGEHLWLETNVSGDLCYLGEENCQVRFAKSALRRKCAVCKIVVHTACIEQLEKINFRCKPTFREGGSRSPRENFVRHHWVHRRRQEGKCKQCGKGFQQKFSFHSKEIVAISCSWCKQAFHNKVTCFMLHHIEEPCSLGAHAAVIVPPTWIIKVKKPQNSLKASNRKKKRTSFKRKASKRGMEQENKGRPFVIKPISSPLMKPLLVFVNPKSGGNQGTKVLQMFMWYLNPRQVFDLSQEGPKDALELYRKVPNLRILACGGDGTVGWILSILDELQLSPQPPVGVLPLGTGNDLARTLNWGGGYTDEPVSKILCQVEDGTVVQLDRWNLHVERNPDLPPEELEDGVCKLPLNVFNNYFSLGFDAHVTLEFHESREANPEKFNSRFRNKMFYAGAAFSDFLQRSSRDLSKHVKVVCDGTDLTPKIQELKFQCIVFLNIPRYCAGTMPWGNPGDHHDFEPQRHDDGYIEVIGFTMASLAALQVGGHGERLHQCREVMLLTYKSIPMQVDGEPCRLAPAMIRISLRNQANMVQKSKRRTSMPLLNDPQSVPDRLRIRVNKISLQDYEGFHYDKEKLREASIPLGILVVRGDCDLETCRMYIDRLQEDLQSVSSGSQRVHYQDHETSFPRALSAQRLSPRWCFLDDRSQEHLHFVMEISQDEIFILDPDMVVSQPAGTPPGMPDLVVEQASGISDWWNPALRKRMLSDSGLGMIAPYYEDSDLKDLSHSRVLQSPVSSEDHAILQAVIAGDLMKLIESYKNGGSLLIQGPDHCSLLHYAAKTGNGEIVKYILDHGPSELLDMADSETGETALHKAACQRNRAVCQLLVDAGASLRKTDSKGKTPQERAQQAGDPDLAAYLESRQNYKVIGHEDLETAV

SEQ ID NO: 24207 - protein, 932 aa, Homo sapiens
  Payload ID: 4832
  Gene Symbol: DGKI
  Gene Name: diacylglycerol kinase, iota
  ENSP ID: ENSP00000479053
RKAISRAGLQHLAPAHPLSLPVANGPAKEPRATLDWSENAVNGEHLWLETNVSGDLCYLGEENCQVRFAKSALRRKCAVCKIVVHTACIEQLEKINFRCKPTFREGGSRSPRENFVRHHWVHRRRQEGKCKQCGKGFQQKFSFHSKEIVAISCSWCKQAFHNKVTCFMLHHIEEPCSLGAHAAVIVPPTWIIKVKKPQNSLKASNRKKKRTSFKRKASKRGMEQENKGRPFVIKPISSPLMKPLLVFVNPKSGGNQGTKVLQMFMWYLNPRQVFDLSQEGPKDALELYRKVPNLRILACGGDGTVGWILSILDELQLSPQPPVGVLPLGTGNDLARTLNWGGGYTDEPVSKILCQVEDGTVVQLDRWNLHVERNPDLPPEELEDGVCKLPLNVFNNYFSLGFDAHVTLEFHESREANPEKFNSRFRNKMFYAGAAFSDFLQRSSRDLSKHVKVVCDGTDLTPKIQELKFQCIVFLNIPRYCAGTMPWGNPGDHHDFEPQRHDDGYIEVIGFTMASLAALQVGGHGERLHQCREVMLLTYKSIPMQVDGEPCRLAPAMIRISLRNQANMVQKSKRRTSMPLLNDPQSVPDRLRIRVNKISLQDYEGFHYDKEKLREASISDWLRTIAGELVQSFGAIPLGILVVRGDCDLETCRMYIDRLQEDLQSVSSGSQRVHYQDHETSFPRALSAQRLSPRWCFLDDRSQEHLHFVMEISQDEIFILDPDMVVSQPAGTPPGMPDLVVEQASGISDWWNPALRKRMLSDSGLGMIAPYYEDSDLKDLSHSRVLQSPVSSEDHAILQAVIAGDLMKLIESYKNGGSLLIQGPDHCSLLHYAAKTGNGEIVKYILDHGPSELLDMADSETGETALHKAACQRNRAVCQLLVDAGASLRKTDSKGKTPQERAQQAGDPDLAAYLESRQNYKVIGHEDLETAV

SEQ ID NO: 24208 - protein, 1271 aa, Homo sapiens
  Payload ID: 4833
  Gene Symbol: DGKK
  Gene Name: diacylglycerol kinase, kappa
  Uniprot ID: Q5KSL6
  ENSP ID: ENSP00000477515
MDRGAAAAQGTAPPQDGEQPAESPEPPPPWPPPPPPPAPPPAPPLLSEASPEPIPEPCPELAPGPCPEATSESATELYTEPTPEPATEPASEPAPEPATEPAPEPATEPAPEPAPEPATESAPEPTPEPALESVPEPAPELTPEVAPELAPEPTPEPVTELAPEFCPEAAPEFRPSPAPCLLQCPVDTRERGLKTSPSPSPSPSPRTPMSWSRIKKILKEGPMLKNCNSFKRWKLRYFLVQGQKLYFAHHPAFAHFETIDLSQATVAESSCRNLCHSFCVITPQRKITLAAPNRKDMEEWINIIKTIQQGEIYKIPAAENNPFLVGMHCWYSSYSHRTQHCNVCRESIPALSRDAIICEVCKVKSHRLCALRASKDCKWNTLSITDDLLLPADEVNMPHQWVEGNMPVSSQCAVCHESCGSYQRLQDFRCLWCNSTVHDDCRRRFSKECCFRSHRSSVIPPTALSDPKGDGQLVVSSDFWNLDWSSACSCPLLIFINSKSGDHQGIVFLRKFKQYLNPSQVFDLLKGGPEAGLSMFKNFARFRILVCGGDGSVSWVLSLIDAFGLHEKCQLAVIPLGTGNDLARVLGWGAFWNKSKSPLDILNRVEQASVRILDRWSVMIRETPRQTPLLKGQVEMDVPRFEAAAIQHLESAATELNKILKAKYPTEMIIATRFLCSAVEDFVVDIVKAWGQIKQNNTAIVSVILKSDLMYDRLSVLIDVLAEEAAATSAEKSATEYADSSKADRKPFIPQIDHIAKCKLELATKAQSLQKSLKLIIFQVEQALDEESRQTISVKNFSSTFFLEDDPEDINQTSPRRRSRRGTLSSISSLKSEDLDNLNLDHLHFTPESIRFKEKCVMNNYFGIGLDAKISLDFNTRRDEHPGQYNSRLKNKMWYGLLGTKELLQRSYRKLEERVHLECDGETISLPNLQGIVVLNITSYAGGINFWGSNTATTEYEAPAIDDGKLEVVAIFGSVQMAMSRIINLHHHRIAQCHEVMITIDGEEGIPVQVDGEAWIQRPGLIKIRYKNAAQMLTRDRDFENSMKMWEYKHTEIQAAPQPQLDFQDSQESLSDEEYAQMQHLARLAENLISKLNDLSKIHQHVSVLMGSVNASANILNDIFYGQDSGNEMGAASCIPIETLSRNDAVDVTFSLKGLYDDTTAFLDEKLLRSAEDETALQSALDAMNKEFKKLSEIDWMNPIFVPEEKSSDTDSRSLRLKIKFPKLGKKKVEEERKPKSGQSVQSFIGNLWHRRHREDEAEGDDPLTPSRSQL

SEQ ID NO: 24209 - protein, 942 aa, Homo sapiens
  Payload ID: 4834
  Gene Symbol: DGKQ
  Gene Name: diacylglycerol kinase, theta 110kDa
  Uniprot ID: P52824
  ENSP ID: ENSP00000273814
MAAAAEPGARAWLGGGSPRPGSPACSPVLGSGGRARPGPGPGPGPERAGVRAPGPAAAPGHSFRKVTLTKPTFCHLCSDFIWGLAGFLCDVCNFMSHEKCLKHVRIPCTSVAPSLVRVPVAHCFGPRGLHKRKFCAVCRKVLEAPALHCEVCELHLHPDCVPFACSDCRQCHQDGHQDHDTHHHHWREGNLPSGARCEVCRKTCGSSDVLAGVRCEWCGVQAHSLCSAALAPECGFGRLRSLVLPPACVRLLPGGFSKTQSFRIVEAAEPGEGGDGADGSAAVGPGRETQATPESGKQTLKIFDGDDAVRRSQFRLVTVSRLAGAEEVLEAALRAHHIPEDPGHLELCRLPPSSQACDAWAGGKAGSAVISEEGRSPGSGEATPEAWVIRALPRAQEVLKIYPGWLKVGVAYVSVRVTPKSTARSVVLEVLPLLGRQAESPESFQLVEVAMGCRHVQRTMLMDEQPLLDRLQDIRQMSVRQVSQTRFYVAESRDVAPHVSLFVGGLPPGLSPEEYSSLLHEAGATKATVVSVSHIYSSQGAVVLDVACFAEAERLYMLLKDMAVRGRLLTALVLPDLLHAKLPPDSCPLLVFVNPKSGGLKGRDLLCSFRKLLNPHQVFDLTNGGPLPGLHLFSQVPCFRVLVCGGDGTVGWVLGALEETRYRLACPEPSVAILPLGTGNDLGRVLRWGAGYSGEDPFSVLLSVDEADAVLMDRWTILLDAHEAGSAENDTADAEPPKIVQMSNYCGIGIDAELSLDFHQAREEEPGKFTSRLHNKGVYVRVGLQKISHSRSLHKQIRLQVERQEVELPSIEGLIFINIPSWGSGADLWGSDSDTRFEKPRMDDGLLEVVGVTGVVHMGQVQGGLRSGIRIAQGSYFRVTLLKATPVQVDGEPWVQAPGHMIISAAGPKVHMLRKAKQKPRRAGTTRDARADAAPAPESDPR

SEQ ID NO: 24210 - protein, 157 aa, Homo sapiens
  Payload ID: 4834
  Gene Symbol: DGKQ
  Gene Name: diacylglycerol kinase, theta 110kDa
  ENSP ID: ENSP00000421756
PKIVQMSNYCGIGIDAELSLDFHQAREEEPGKFTSSWGSGADLWGSDSDTRFEKPRMDDGLLEVVGVTGVVHMGQVQGGLRSGIRIAQGSYFRVTLLKATPVQVDGEPWVQAPGHMIISAAGPKVHMLRKAKQKPRRAGTTRDARADAAPAPESDPR

SEQ ID NO: 24211 - protein, 876 aa, Homo sapiens
  Payload ID: 4834
  Gene Symbol: DGKQ
  Gene Name: diacylglycerol kinase, theta 110kDa
  ENSP ID: ENSP00000425862
  MOD_RES (1)..(1): Any amino acid
XPAAAPGHSFRKVTLTKPTFCHLCSDFIWGLAGFLCDVCNFMSHEKCLKHVRIPCTSVAPSLVRVPVAHCFGPRGLHKRKFCAVCRKVLEAPALHCEVCELHLHPDCVPFACSDCRQCHQDGHQDHDTHHHHWREGNLPSGARCEVCRKTCGSSDVLAGVRCEWCGVQAHSLCSAALAPECGFGRLRSLVLPPACVRLLPGGFSKTQSFRIVEAAEPGEGGDGADGSAAVGPGRETQATPESGKQTLKIFDGDDAVRRSQFRLVTVSRLAGAEEVLEAALRAHHIPEDPGHLELCRLPPSSQACDAWAGGKAGSAVISEEGRSPGSGEATPEAWVIRALPRAQEVLKIYPGWLKVGVAYVSVRVTPKSTARSVVLEVLPLLGRQAESPESFQLVEVAMGCRHVQRTMLMDEQPLLDRLQDIRQMSVRQVSQTRFYVAESRDVAPHVSLFVGGLPPGLSPEEYSSLLHEAGATKGAVVLDVACFAEAERLYMLLKDMAVRGRLLTALVLPDLLHAKLPPDSCPLLVFVNPKSGGLKGRDLLCSFRKLLNPHQVFDLTNGGPLPGLHLFSQVPCFRVLVCGGDGTVGWVLGALEETRYRLACPEPSVAILPLGTGNDLGRVLRWGAGYSGEDPFSVLLSVDEADAVLMDRWTILLDAHEAGSAENDTADAEPPKIVQMSNYCGIGIDAELSLDFHQAREEEPGKFTSRLHNKGVYVRVGLQKISHSRSLHKQIRLQVERQEVELPSIEGLIFINIPSWGSGADLWGSDSDTRFEKPRMDDGLLEVVGVTGVVHMGQVQGGLRSGIRIAQGSYFRVTLLKATPVQVDGEPWVQAPGHMIISAAGPKVHMLRKAKQKPRRAGTTRDARADAAPAPESDPR

SEQ ID NO: 24212 - protein, 143 aa, Homo sapiens
  Payload ID: 4834
  Gene Symbol: DGKQ
  Gene Name: diacylglycerol kinase, theta 110kDa
  ENSP ID: ENSP00000427268
MTRKALRRTLRPLVLFCNFMSHEKCLKHVRIPCTSVAPSLVRVPVAHCFGPRGLHKRKFCAVCRKVLEAPALHCEVCELHLHPDCVPFACSDCRQCHQDGHQDHDTHHHHWREGNLPSGARCEVCRKTCGSSDVLAGVRCEWC

SEQ ID NO: 24213 - protein, 906 aa, Homo sapiens
  Payload ID: 4835
  Gene Symbol: DGKZ
  Gene Name: diacylglycerol kinase, zeta
  Uniprot ID: Q13574
  ENSP ID: ENSP00000320340
MEPRDGSPEARSSDSESASASSSGSERDAGPEPDKAPRRLNKRRFPGLRLFGHRKAITKSGLQHLAPPPPTPGAPCSESERQIRSTVDWSESATYGEHIWFETNVSGDFCYVGEQYCVARMLQKSVSRRKCAACKIVVHTPCIEQLEKINFRCKPSFRESGSRNVREGFQQKFTFHSKEIVAISCSWCKQAYHSKVSCFMLQQIEEPCSLGVHAAVVIPPTWILRARRPQNTLKASKKKKRASFKRKSSKKGPEEGRWRPFIIRPTPSPLMKPLLVFVNPKSGGNQGAKIIQSFLWYLNPRQVFDLSQGGPKEALEMYRKVHNLRILACGGDGTVGWILSTLDQLRLKPPPPVAILPLGTGNDLARTLNWGGGYTDEPVSKILSHVEEGNVVQLDRWDLHAEPNPEAGPEDRDEGATDRLPLDVFNNYFSLGFDAHVTLEFHESREANPEKFNSRFRNKMFYAGTAFSDFLMGSSKDLAKHIRVVCDGMDLTPKIQDLKPQCVVFLNIPRYCAGTMPWGHPGEHHDFEPQRHDDGYLEVIGFTMTSLAALQVGGHGERLTQCREVVLTTSKAIPVQVDGEPCKLAASRIRIALRNQATMVQKAKRRSAAPLHSDQQPVPEQLRIQVSRVSMHDYEALHYDKEQLKEASVPLGTVVVPGDSDLELCRAHIERLQQEPDGAGAKSPTCQKLSPKWCFLDATTASRFYRIDRAQEHLNYVTEIAQDEIYILDPELLGASARPDLPTPTSPLPTSPCSPTPRSLQGDAAPPQGEELIEAAKRNDFCKLQELHRAGGDLMHRDEQSRTLLHHAVSTGSKDVVRYLLDHAPPEILDAVEENGETCLHQAAALGQRTICHYIVEAGASLMKTDQQGDTPRQRAEKAQDTELAAYLENRQHYQMIQREDQETAV

SEQ ID NO: 24214 - protein, 945 aa, Homo sapiens
  Payload ID: 4835
  Gene Symbol: DGKZ
  Gene Name: diacylglycerol kinase, zeta
  Uniprot ID: Q13574
  ENSP ID: ENSP00000343065
MAEGQGGGGQRWDWAGGGRAAEEEVVRRRCRRGEEAQVAQPWPEGSRGTAAGPPVEERFRQLHLRKQVSYRKAITKSGLQHLAPPPPTPGAPCSESERQIRSTVDWSESATYGEHIWFETNVSGDFCYVGEQYCVARMLKSVSRRKCAACKIVVHTPCIEQLEKINFRCKPSFRESGSRNVREPTFVRHHWVHRRRQDGKCRHCGKGFQQKFTFHSKEIVAISCSWCKQAYHSKVSCFMLQQIEEPCSLGVHAAVVIPPTWILRARRPQNTLKASKKKKRASFKRKSSKKGPEEGRWRPFIIRPTPSPLMKPLLVFVNPKSGGNQGAKIIQSFLWYLNPRQVFDLSQGGPKEALEMYRKVHNLRILACGGDGTVGWILSTLDQLRLKPPPPVAILPLGTGNDLARTLNWGGGYTDEPVSKILSHVEEGNVVQLDRWDLHAEPNPEAGPEDRDEGATDRLPLDVFNNYFSLGFDAHVTLEFHESREANPEKFNSRFRNKMFYAGTAFSDFLMGSSKDLAKHIRVVCDGMDLTPKIQDLKPQCVVFLNIPRYCAGTMPWGHPGEHHDFEPQRHDDGYLEVIGFTMTSLAALQVGGHGERLTQCREVVLTTSKAIPVQVDGEPCKLAASRIRIALRNQATMVQKAKRRSAAPLHSDQQPVPEQLRIQVSRVSMHDYEALHYDKEQLKEASVPLGTVVVPGDSDLELCRAHIERLQQEPDGAGAKSPTCQKLSPKWCFLDATTASRFYRIDRAQEHLNYVTEIAQDEIYILDPELLGASARPDLPTPTSPLPTSPCSPTPRSLQGDAAPPQGEELIEAAKRNDFCKLQELHRAGGDLMHRDEQSRTLLHHAVSTGSKDVVRYLLDHAPPEILDAVEENGETCLHQAAALGQRTICHYIVEAGASLMKTDQQGDTPRQRAEKAQDTELAAYLENRQHYQMIQREDQETAV

SEQ ID NO: 24215 - protein, 929 aa, Homo sapiens
  Payload ID: 4835
  Gene Symbol: DGKZ
  Gene Name: diacylglycerol kinase, zeta
  Uniprot ID: Q13574
  ENSP ID: ENSP00000391021
MEPRDGSPEARSSDSESASASSSGSERDAGPEPDKAPRRLNKRRFPGLRLFGHRKAITKSGLQHLAPPPPTPGAPCSESERQIRSTVDWSESATYGEHIWFETNVSGDFCYVGEQYCVARMLQKSVSRRKCAACKIVVHTPCIEQLEKINFRCKPSFRESGSRNVREPTFVRHHWVHRRRQDGKCRHCGKGFQQKFTFHSKEIVAISCSWCKQAYHSKVSCFMLQQIEEPCSLGVHAAVVIPPTWILRARRPQNTLKASKKKKRASFKRKSSKKGPEEGRWRPFIIRPTPSPLMKPLLVFVNPKSGGNQGAKIIQSFLWYLNPRQVFDLSQGGPKEALEMYRKVHNLRILACGGDGTVGWILSTLDQLRLKPPPPVAILPLGTGNDLARTLNWGGGYTDEPVSKILSHVEEGNVVQLDRWDLHAEPNPEAGPEDRDEGATDRLPLDVFNNYFSLGFDAHVTLEFHESREANPEKFNSRFRNKMFYAGTAFSDFLMGSSKDLAKHIRVVCDGMDLTPKIQDLKPQCVVFLNIPRYCAGTMPWGHPGEHHDFEPQRHDDGYLEVIGFTMTSLAALQVGGHGERLTQCREVVLTTSKAIPVQVDGEPCKLAASRIRIALRNQATMVQKAKRRSAAPLHSDQQPVPEQLRIQVSRVSMHDYEALHYDKEQLKEASVPLGTVVVPGDSDLELCRAHIERLQQEPDGAGAKSPTCQKLSPKWCFLDATTASRFYRIDRAQEHLNYVTEIAQDEIYILDPELLGASARPDLPTPTSPLPTSPCSPTPRSLQGDAAPPQGEELIEAAKRNDFCKLQELHRAGGDLMHRDEQSRTLLHHAVSTGSKDVVRYLLDHAPPEILDAVEENGETCLHQAAALGQRTICHYIVEAGASLMKTDQQGDTPRQRAEKAQDTELAAYLENRQHYQMIQREDQETAV

SEQ ID NO: 24216 - protein, 928 aa, Homo sapiens
  Payload ID: 4835
  Gene Symbol: DGKZ
  Gene Name: diacylglycerol kinase, zeta
  Uniprot ID: Q13574
  ENSP ID: ENSP00000395684
MEPRDGSPEARSSDSESASASSSGSERDAGPEPDKAPRRLNKRRFPGLRLFGHRKAITKSGLQHLAPPPPTPGAPCSESERQIRSTVDWSESATYGEHIWFETNVSGDFCYVGEQYCVARMLKSVSRRKCAACKIVVHTPCIEQLEKINFRCKPSFRESGSRNVREPTFVRHHWVHRRRQDGKCRHCGKGFQQKFTFHSKEIVAISCSWCKQAYHSKVSCFMLQQIEEPCSLGVHAAVVIPPTWILRARRPQNTLKASKKKKRASFKRKSSKKGPEEGRWRPFIIRPTPSPLMKPLLVFVNPKSGGNQGAKIIQSFLWYLNPRQVFDLSQGGPKEALEMYRKVHNLRILACGGDGTVGWILSTLDQLRLKPPPPVAILPLGTGNDLARTLNWGGGYTDEPVSKILSHVEEGNVVQLDRWDLHAEPNPEAGPEDRDEGATDRLPLDVFNNYFSLGFDAHVTLEFHESREANPEKFNSRFRNKMFYAGTAFSDFLMGSSKDLAKHIRVVCDGMDLTPKIQDLKPQCVVFLNIPRYCAGTMPWGHPGEHHDFEPQRHDDGYLEVIGFTMTSLAALQVGGHGERLTQCREVVLTTSKAIPVQVDGEPCKLAASRIRIALRNQATMVQKAKRRSAAPLHSDQQPVPEQLRIQVSRVSMHDYEALHYDKEQLKEASVPLGTVVVPGDSDLELCRAHIERLQQEPDGAGAKSPTCQKLSPKWCFLDATTASRFYRIDRAQEHLNYVTEIAQDEIYILDPELLGASARPDLPTPTSPLPTSPCSPTPRSLQGDAAPPQGEELIEAAKRNDFCKLQELHRAGGDLMHRDEQSRTLLHHAVSTGSKDVVRYLLDHAPPEILDAVEENGETCLHQAAALGQRTICHYIVEAGASLMKTDQQGDTPRQRAEKAQDTELAAYLENRQHYQMIQREDQETAV

SEQ ID NO: 24217 - protein, 1117 aa, Homo sapiens
  Payload ID: 4835
  Gene Symbol: DGKZ
  Gene Name: diacylglycerol kinase, zeta
  Uniprot ID: Q13574
  ENSP ID: ENSP00000412178
METFFRRHFRGKVPGPGEGQQRPSSVGLPTGKARRRSPAGQASSSLAQRRRSSAQLQGCLLSCGVRAQGSSRRRSSTVPPSCNPRFIVDKVLTPQPTTVGAQLLGAPLLLTGLVGMNEEEGVQEDVVAEASSAIQPGTKTPGPPPPRGAQPLLPLPRYLRRASSHLLPADAVYDHALWGLHGYYRRLSQRRPSGQHPGPGGRRASGTTAGTMLPTRVRPLSRRRQVALRRKAAGPQAWSALLAKAITKSGLQHLAPPPPTPGAPCSESERQIRSTVDWSESATYGEHIWFETNVSGDFCYVGEQYCVARMLKSVSRRKCAACKIVVHTPCIEQLEKINFRCKPSFRESGSRNVREPTFVRHHWVHRRRQDGKCRHCGKGFQQKFTFHSKEIVAISCSWCKQAYHSKVSCFMLQQIEEPCSLGVHAAVVIPPTWILRARRPQNTLKASKKKKRASFKRKSSKKGPEEGRWRPFIIRPTPSPLMKPLLVFVNPKSGGNQGAKIIQSFLWYLNPRQVFDLSQGGPKEALEMYRKVHNLRILACGGDGTVGWILSTLDQLRLKPPPPVAILPLGTGNDLARTLNWGGGYTDEPVSKILSHVEEGNVVQLDRWDLHAEPNPEAGPEDRDEGATDRLPLDVFNNYFSLGFDAHVTLEFHESREANPEKFNSRFRNKMFYAGTAFSDFLMGSSKDLAKHIRVVCDGMDLTPKIQDLKPQCVVFLNIPRYCAGTMPWGHPGEHHDFEPQRHDDGYLEVIGFTMTSLAALQVGGHGERLTQCREVVLTTSKAIPVQVDGEPCKLAASRIRIALRNQATMVQKAKRRSAAPLHSDQQPVPEQLRIQVSRVSMHDYEALHYDKEQLKEASVPLGTVVVPGDSDLELCRAHIERLQQEPDGAGAKSPTCQKLSPKWCFLDATTASRFYRIDRAQEHLNYVTEIAQDEIYILDPELLGASARPDLPTPTSPLPTSPCSPTPRSLQGDAAPPQGEELIEAAKRNDFCKLQELHRAGGDLMHRDEQSRTLLHHAVSTGSKDVVRYLLDHAPPEILDAVEENGETCLHQAAALGQRTICHYIVEAGASLMKTDQQGDTPRQRAEKAQDTELAAYLENRQHYQMIQREDQETAV

SEQ ID NO: 24218 - protein, 197 aa, Homo sapiens
  Payload ID: 4835
  Gene Symbol: DGKZ
  Gene Name: diacylglycerol kinase, zeta
  ENSP ID: ENSP00000434016
  MOD_RES (1)..(1): Any amino acid
XRNKMFYAGTAFSDFLMGSSKDLAKHIRVVVSGARLPWVGGPEGREAEATWHMHLNTLPARLQCDGMDLTPKIQDLKPQCVVFLNIPRYCAGTMPWGHPGEHHDFEPQRHDDGYLEVIGFTMTSLAALQVGGHGERLTQCREVVLTTSKAIPVQVDGEPCKLAASRIRIALRNQATMVQKAKRRSAAPLHSDQQPVP

SEQ ID NO: 24219 - protein, 707 aa, Homo sapiens
  Payload ID: 4835
  Gene Symbol: DGKZ
  Gene Name: diacylglycerol kinase, zeta
  ENSP ID: ENSP00000434719
MLQQIEEPCSLGVHAAVVIPPTWILRARRPQNTLKASKKKKRASFKRKSSKKGPEEGRWRPFIIRPTPSPLMKPLLVFVNPKSGGNQGAKIIQSFLWYLNPRQVFDLSQGGPKEALEMYRKVHNLRILACGGDGTVGWILSTLDQLRLKPPPPVAILPLGTGNDLARTLNWGGGYTDEPVSKILSHVEEGNVVQLDRWDLHAEPNPEAGPEDRDEGATDRLPLDVFNNYFSLGFDAHVTLEFHESREANPEKFNSRFRNKMFYAGTAFSDFLMGSSKDLAKHIRVVCDGMDLTPKIQDLKPQCVVFLNIPRYCAGTMPWGHPGEHHDFEPQRHDDGYLEVIGFTMTSLAALQVGGHGERLTQCREVVLTTSKAIPVQVDGEPCKLAASRIRIALRNQATMVQKAKRRSAAPLHSDQQPVPEQLRIQVSRVSMHDYEALHYDKEQLKEASVPLGTVVVPGDSDLELCRAHIERLQQEPDGAGAKSPTCQKLSPKWCFLDATTASRFYRIDRAQEHLNYVTEIAQDEIYILDPELLGASARPDLPTPTSPLPTSPCSPTPRSLQGDAAPPQGEELIEAAKRNDFCKLQELHRAGGDLMHRDEQSRTLLHHAVSTGSKDVVRYLLDHAPPEILDAVEENGETCLHQAAALGQRTICHYIVEAGASLMKTDQQGDTPRQRAEKAQDTELAAYLENRQHYQMIQREDQETAV

SEQ ID NO: 24220 - protein, 16 aa, Homo sapiens
  Payload ID: 4835
  Gene Symbol: DGKZ
  Gene Name: diacylglycerol kinase, zeta
  ENSP ID: ENSP00000435332
MLQKSVSRRKCAACKI

SEQ ID NO: 24221 - protein, 54 aa, Homo sapiens
  Payload ID: 4835
  Gene Symbol: DGKZ
  Gene Name: diacylglycerol kinase, zeta
  ENSP ID: ENSP00000435435
MEPRDGSPEARSSDSESASASSSGSERDAGPEPDKAPRRLNKRRFPGLRLFGHR

SEQ ID NO: 24222 - protein, 98 aa, Homo sapiens
  Payload ID: 4835
  Gene Symbol: DGKZ
  Gene Name: diacylglycerol kinase, zeta
  ENSP ID: ENSP00000435763
ESATYGEHIWFETNVSGDFCYVGEQYCVARMLINFRCKPSFRESGSRNVREPTFVRHHWVHRRRQDGKCRHCGKGFQQKFTFHSKEIVAISCSWCKQA

SEQ ID NO: 24223 - protein, 933 aa, Homo sapiens
  Payload ID: 4835
  Gene Symbol: DGKZ
  Gene Name: diacylglycerol kinase, zeta
  Uniprot ID: Q13574
  ENSP ID: ENSP00000436273
MSAPGAGHSAGGSCNESSALGPVEALGTEEGERPGSLRQMWRYRSWDVPQIPSEAPQTQKAITKSGLQHLAPPPPTPGAPCSESERQIRSTVDWSSATYGEHIWFETNVSGDFCYVGEQYCVARMLQKSVSRRKCAACKIVVHTPCIEQLEKINFRCKPSFRESGSRNVREPTFVRHHWVHRRRQDGKCRHCGKGFQQKFTFHSKEIVAISCSWCKQAYHSKVSCFMLQQIEEPCSLGVHAAVVIPPTWILRARRPQNTLKASKKKKRASFKRKSSKKGPEEGRWRPFIIRPTPSPLMKPLLVFVNPKSGGNQGAKIIQSFLWYLNPRQVFDLSQGGPKEALEMYRKVHNLRILACGGDGTVGWILSTLDQLRLKPPPPVAILPLGTGNDLARTLNWGGGYTDEPVSKILSHVEEGNVVQLDRWDLHAEPNPEAGPEDRDEGATDRLPLDVFNNYFSLGFDAHVTLEFHESREANPEKFNSRFRNKMFYAGTAFSDFLMGSSKDLAKHIRVVCDGMDLTPKIQDLKPQCVVFLNIPRYCAGTMPWGHPGEHHDFEPQRHDDGYLEVIGFTMTSLAALQVGGHGERLTQCREVVLTTSKAIPVQVDGEPCKLAASRIRIALRNQATMVQKAKRRSAAPLHSDQQPVPEQLRIQVSRVSMHDYEALHYDKEQLKEASVPLGTVVVPGDSDLELCRAHIERLQQEPDGAGAKSPTCQKLSPKWCFLDATTASRFYRIDRAQEHLNYVTEIAQDEIYILDPELLGASARPDLPTPTSPLPTSPCSPTPRSLQGDAAPPQGEELIEAAKRNDFCKLQELHRAGGDLMHRDEQSRTLLHHAVSTGSKDVVRYLLDHAPPEILDAVEENGETCLHQAAALGQRTICHYIVEAGASLMKTDQQGDTPRQRAEKAQDTELAAYLENRQHYQMIQREDQETAV

SEQ ID NO: 24224 - protein, 934 aa, Homo sapiens
  Payload ID: 4835
  Gene Symbol: DGKZ
  Gene Name: diacylglycerol kinase, zeta
  Uniprot ID: Q13574
  ENSP ID: ENSP00000436291
MEPRDGSPEARSSDSESASASSSGSERDAGPEPDKAPRRLNKRRFPGLRLFGHRKAITKSGLQHLAPPPPTPGAPCSESERQIRSTVDWSESATYGEHIWFETNVSGDFCYVGEQYCVARMLQKSVSRRKCAACKIVVHTPCIEQLEKINFRCKPSFRESGSRNVREPTFVRHHWVHRRRQDGKCRHCGKGFQQKFTFHSKEIVAISCSWCKQAYHSKVSCFMLQQIEEPCSLGVHAAVVIPPTWILRARRPQNTLKASKKKKRASFKRKSSKKGPEEGRWRPFIIRPTPSPLMKPLLVFVNPKSGGNQGAKIIQSFLWYLNPRQVFDLSQGGPKEALEMYRKVHNLRILACGGDGTVGWILSTLDQLRLKPPPPVAILPLGTGNDLARTLNWGGGYTDEPVSKILSHVEEGNVVQLDRWDLHAEPNPEAGPEDRDEGATDRLPLDVFNNYFSLGFDAHVTLEFHESREANPEKFNSRFRNKMFYAGTAFSDFLMGSSKDLAKHIRVVCDGMDLTPKIQDLKPQCVVFLNIPRYCAGTMPWGHPGEHHDFEPQRHDDGYLEVIGFTMTSLAALQVGGHGERLTQCREVVLTTSKAIPVQVDGEPCKLAASRIRIALRNQATMVQKAKRRSAAPLHSDQQPVPEQLRIQVSRVSMHDYEALHYDKEQLKEASVPLGTVVVPGDSDLELCRAHIERLQQEPDGAGAKSPTCQKLSPKWCFLDATTASRFYRIDRAQEHLNYVTEIAQDEIYILDPELLGASARPDLPTPTSPLPTSPCSPTPRSLQGDAAPPQGEELIEAAKRNDFCKLQELHRAGGDLMHRDEQSRTLLHHAVSTGSKDVVRYLLDHAPPEILDAVEENPCSPSGETCLHQAAALGQRTICHYIVEAGASLMKTDQQGDTPRQRAEKAQDTELAAYLENRQHYQMIQREDQETAV

SEQ ID NO: 24225 - protein, 135 aa, Homo sapiens
  Payload ID: 4835
  Gene Symbol: DGKZ
  Gene Name: diacylglycerol kinase, zeta
  ENSP ID: ENSP00000437060
MWRYRSWDVPQIPSEAPQTQKAITKSGLQHLAPPPPTPGAPCSESERQIRSTVDWSESATYGEHIWFETNVSGDFCYVGEQYCVARMLKSVSRRKCAACKIVVHTPCIEQLEKDSRDDLGVSPPCEDDSGLSWRE

SEQ ID NO: 24226 - protein, 1042 aa, Homo sapiens
  Payload ID: 4836
  Gene Symbol: DAGLA
  Gene Name: diacylglycerol lipase, alpha
  Uniprot ID: Q9Y4D2
  ENSP ID: ENSP00000257215
MPGIVVFRRRWSVGSDDLVLPAIFLFLLHTTWFVILSVVLFGLVYNPHEACSLNLVDHGRGYLGILLSCMIAEMAIIWLSMRGGILYTEPRDSMQYVLYVRLAILVIEFIYAIVGIVWLTQYYTSCNDLTAKNVTLGMVVCNWVVILSVCITVLCVFDPTGRTFVKLRATKRRQRNLRTYNLRHRLEEGQATSWSRRLKVFLCCTRTKDSQSDAYSEIAYLFAEFFRDLDIVPSDIIAGLVLLRQRQRAKRNAVLDEANNDILAFLSGMPVTRNTKYLDLKNSQEMLRYKEVCYYMLFALAAYGWPMYLMRKPACGLCQLARSCSCCLCPARPRFAPGVTIEEDNCCGCNAIAIRRHFLDENMTAVDIVYTSCHDAVYETPFYVAVDHDKKKVVISIRGTLSPKDALTDLTGDAERLPVEGHHGTWLGHKGMVLSAEYIKKKLEQEMVLSQAFGRDLGRGTKHYGLIVVGHSLGAGTAAILSFLLRPQYPTLKCFAYSPPGGLLSEDAMEYSKEFVTAVVLGKDLVPRIGLSQLEGFRRQLLDVLQRSTKPKWRIIVGATKCIPKSELPEEVEVTTLASTRLWTHPSDLTIALSASTPLYPPGRIIHVVHNHPAEQCCCCEQEEPTYFAIWGDNKAFNEVIISPAMLHEHLPYVVMEGLNKVLENYNKGKTALLSAAKVMVSPTEVDLTPELIFQQQPLPTGPPMPTGLALELPTADHRNSSVRSKSQSEMSLEGFSEGRLLSPVVAAAARQDPVELLLLSTQERLAAELQARRAPLATMESLSDTESLYSFDSRRSSGFRSIRGSPSLHAVLERDEGHLFYIDPAIPEENPSLSSRTELLAADSLSKHSQDTQPLEAALGSGGVTPERPPSAAANDEEEEVGGGGGGPASRGELALHNGRLGDSPSPQVLEFAEFIDSLFNLDSKSSSFQDLYCMVVPESPTSDYAEGPKSPSQQEILLRAQFEPNLVPKPPRLFAGSADPSSGISLSPSFPLSSSGELMDLTPTGLSSQECLAADKIRTSTPTGHGASPAKQDELVISAR

SEQ ID NO: 24227 - protein, 167 aa, Homo sapiens
  Payload ID: 4836
  Gene Symbol: DAGLA
  Gene Name: diacylglycerol lipase, alpha
  ENSP ID: ENSP00000440264
MPGIVVFRRRWSVGSDDLVLPAIFLFLLHTTWFVILSVVLFGLVYNPHEACSLNLVDHGRGYLGILLSCMIAEMAIIWLSMRGGILYTEPRDSMHHPGDRVHLRHRGHRLAHSVLHLLQRPHCQECHPRNGCLQLGSHPQCVHHCPLRLRPHGPHLCQAESHQEEAA

SEQ ID NO: 24228 - protein, 672 aa, Homo sapiens
  Payload ID: 4837
  Gene Symbol: DAGLB
  Gene Name: diacylglycerol lipase, beta
  Uniprot ID: Q8NCG7
  ENSP ID: ENSP00000297056
MPGMVLFGRRWAIASDDLVFPGFFELVVRVLWWIGILTLYLMHRGKLDCAGGALLSSYLIVLMILLAVVICTVSAIMCVSMRGTICNPGPRKSMSKLLYIRLALFFPEMVWASLGAAWVADGVQCDRTVVNGIIATVVVSWIIIAATVVSIIIVFDPLGGKMAPYSSAGPSHLDSHDSSQLLNGLKTAATSVWETRIKLLCCCIGKDDHTRVAFSSTAELFSTYFSDTDLVPSDIAAGLALLHQQQDNIRNNQEPAQVVCHAPGSSQEADLDAELENCHHYMQFAAAAYGWPLYIYRNPLTGLCRIGGDCCRSRTTDYDLVGGDQLNCHFGSILHTTGLQYRDFIHVSFHDKVYELPFLVALDHRKESVVVAVRGTMSLQDVLTDLSAESEVLDVECEVQDRLAHKGISQAARYVYQRLINDGILSQAFSIAPEYRLVIVGHSLGGGAAALLATMLRAAYPQVRCYAFSPPRGLWSKALQEYSQSFIVSLVLGKDVIPRLSVTNLEDLKRRILRVVAHCNKPKYKILLHGLWYELFGGNPNNLPTELDGGDQEVLTQPLLGEQSLLTRWSPAYSFSSDSPLDSSPKYPPLYPPGRIIHLQEEGASGRFGCCSAAHYSAKWSHEAEFSKILIGPKMLTDHMPDILMRALDSVVSDRAACVSCPAQGVSSVDVA

SEQ ID NO: 24229 - protein, 543 aa, Homo sapiens
  Payload ID: 4837
  Gene Symbol: DAGLB
  Gene Name: diacylglycerol lipase, beta
  Uniprot ID: Q8NCG7
  ENSP ID: ENSP00000391171
MPGMVLFGRRWAIASDDLVFPGFFELVVRVLWWIGILTLYLMHRGKLDCAGGALLSSYLIVLMILLAVVICTVSAIMCVSMRGTICNPGPRKSMSKLLYIRLALFFPEMVWASLGAAWVADGVQCDRTVVNGIIATVVVRTQIWCPATLRRASPCFISNRTISGTTKSLPRWSAMPQGAPSCRSRTTDYDLVGGDQLNCHFGSILHTTGLQYRDFIHVSFHDKVYELPFLVALDHRKESVVVAVRGTMSLQDVLTDLSAESEVLDVECEVQDRLAHKGISQAARYVYQRLINDGILSQAFSIAPEYRLVIVGHSLGGGAAALLATMLRAAYPQVRCYAFSPPRGLWSKALQEYSQSFIVSLVLGKDVIPRLSVTNLEDLKRRILRVVAHCNKPKYKILLHGLWYELFGGNPNNLPTELDGGDQEVLTQPLLGEQSLLTRWSPAYSFSSDSPLDSSPKYPPLYPPGRIIHLQEEGASGRFGCCSAAHYSAKWSHEAEFSKILIGPKMLTDHMPDILMRALDSVVSDRAACVSCPAQGVSSVDVA

SEQ ID NO: 24230 - protein, 631 aa, Homo sapiens
  Payload ID: 4837
  Gene Symbol: DAGLB
  Gene Name: diacylglycerol lipase, beta
  ENSP ID: ENSP00000404785
MHRGKLDCAGGALLSSYLIVLMILLAVVICTVSAIMCVSMRGTICNPGPRKSMSKLLYIRLALFFPEMVWASLGAAWVADGVQCDRTVVNGIIATVVVSWIIIAATVVSIIIVFDPLGGKMAPYSSAGPSHLDSHDSSQLLNGLKTAATSVWETRIKLLCCCIGKDDHTRVAFSSTAELFSTYFSDTDLVPSDIAAGLALLHQQQDNIRNNQEPAQVVCHAPGSSQEADLDAELENCHHYMQFAAAAYGWPLYIYRNPLTGLCRIGGDCCRSRTTDYDLVGGDQLNCHFGSILHTTGLQYRDFIHVSFHDKVYELPFLVALDHRKESVVVAVRGTMSLQDVLTDLSAESEVLDVECEVQDRLAHKGISQAARYVYQRLINDGILSQAFSIAPEYRLVIVGHSLGGGAAALLATMLRAAYPQVRCYAFSPPRGLWSKALQEYSQSFIVSLVLGKDVIPRLSVTNLEDLKRRILRVVAHCNKPKYKILLHGLWYELFGGNPNNLPTELDGGDQEVLTQPLLGEQSLLTRWSPAYSFSSDSPLDSSPKYPPLYPPGRIIHLQEEGASGRFGCCSAAHYSAKWSHEAEFSKILIGPKMLTDHMPDILMRALDSVVSDRAACVSCPAQGVSSVDVA

SEQ ID NO: 24231 - protein, 149 aa, Homo sapiens
  Payload ID: 4837
  Gene Symbol: DAGLB
  Gene Name: diacylglycerol lipase, beta
  ENSP ID: ENSP00000410787
MPGMVLFGRRWAIASDDLVFPGFFELVVRVLWWIGILTLYLMHRGKLDCAGGALLSSYLIVLMILLAVVICTVSAIMCVSMRGTICNPGPRKSMSKLLYIRLALFFPEMVWASLGAAWVADGVQCDRTVVNGIIATVVVSCRSRTTDYD

SEQ ID NO: 24232 - protein, 172 aa, Homo sapiens
  Payload ID: 4837
  Gene Symbol: DAGLB
  Gene Name: diacylglycerol lipase, beta
  ENSP ID: ENSP00000411746
MPGMVLFGRRWAIASDDLVFPGFFELVVRVLWWIGILTLYLMHRGKLDCAGGALLSSYLIVLMILLAVVICTVSAIMCVSMRGHRSGAQRHCGGPRPASSATGQYQEQPRACPGGLPCPRELPAAEAEPQTMTWSEAISSTVTSAPSCTPQGCSTGTSSTSASMTRFTSCRF

SEQ ID NO: 24233 - protein, 315 aa, Homo sapiens
  Payload ID: 4838
  Gene Symbol: DGAT1
  Gene Name: diacylglycerol O-acyltransferase 1
  ENSP ID: ENSP00000332258
MGDRGSSRRRRTGSRPSSHGGGGPAAAEEEVRDAAAGPDVGAAGDAPAPAPNKDGDAGVGSGHWELRCHRLQDSLFSSDSGFSNYRGILNWCVVMLILSNARLFLENLIKYGILVDPIQVVSLFLKDPYSWPAPCLVIAANVFAVAAFQVEKRLAVGALTEQAGLLLHVANLATILCFPAAVVLLVESITPVGSLLALMAHTILFLKLFSYRDVNSWCRRARAKAAHASTGQQQVDGQDRGVPGLGLLPRVPGERPSANVPPLGVHGHDGSDPTGLVRGPLFPGQLWQRSCVAVAHHRTANSRPHVRPRLLRAQL

SEQ ID NO: 24234 - protein, 488 aa, Homo sapiens
  Payload ID: 4838
  Gene Symbol: DGAT1
  Gene Name: diacylglycerol O-acyltransferase 1
  Uniprot ID: O75907
  ENSP ID: ENSP00000482264
MGDRGSSRRRRTGSRPSSHGGGGPAAAEEEVRDAAAGPDVGAAGDAPAPAPNKDGDAGVGSGHWELRCHRLQDSLFSSDSGFSNYRGILNWCVVMLILSNARLFLENLIKYGILVDPIQVVSLFLKDPYSWPAPCLVIAANVFAVAAFQVEKRLAVGALTEQAGLLLHVANLATILCFPAAVVLLVESITPVGSLLALMAHTILFLKLFSYRDVNSWCRRARAKAASAGKKASSAAAPHTVSYPDNLTYRDLYYFLFAPTLCYELNFPRSPRIRKRFLLRRILEMLFFTQLQVGLIQQWMVPTIQNSMKPFKDMDYSRIIERLLKLAVPNHLIWLIFFYWLFHSCLNAVAELMQFGDREFYRDWWNSESVTYFWQNWNIPVHKWCIRHFYKPMLRRGSSKWMARTGVFLASAFFHEYLVSVPLRMFRLWAFTGMMAQIPLAWFVGRFFQGNYGNAAVWLSLIIGQPIAVLMYVHDYYVLNYEAPAAEA

SEQ ID NO: 24235 - protein, 388 aa, Homo sapiens
  Payload ID: 4839
  Gene Symbol: DGAT2
  Gene Name: diacylglycerol O-acyltransferase 2
  Uniprot ID: Q96PD7
  ENSP ID: ENSP00000228027
MKTLIAAYSGVLRGERQAEADRSQRSHGGPALSREGSGRWGTGSSILSALQDLFSVTWLNRSKVEKQLQVISVLQWVLSFLVLGVACSAILMYIFCTDCWLIAVLYFTWLVFDWNTPKKGGRRSQWVRNWAVWRYFRDYFPIQLVKTHNLLTTRNYIFGYHPHGIMGLGAFCNFSTEATEVSKKFPGIRPYLATLAGNFRMPVLREYLMSGGICPVSRDTIDYLLSKNGSGNAIIIVVGGAAESLSSMPGKNAVTLRNRKGFVKLALRHGADLVPIYSFGENEVYKQVIFEEGSWGRWVQKKFQKYIGFAPCIFHGRGLFSSDTWGLVPYSKPITTVVGEPITIPKLEHPTQQDIDLYHTMYMEALVKLFDKHKTKFGLPETEVLEVN

SEQ ID NO: 24236 - protein, 345 aa, Homo sapiens
  Payload ID: 4839
  Gene Symbol: DGAT2
  Gene Name: diacylglycerol O-acyltransferase 2
  Uniprot ID: Q96PD7
  ENSP ID: ENSP00000365438
MKTLIAAYSGVLRGERQAEADRSQRSHGGPALSREGSGRWGVACSAILMYIFCTDCWLIAVLYFTWLVFDWNTPKKGGRRSQWVRNWAVWRYFRDYFPIQLVKTHNLLTTRNYIFGYHPHGIMGLGAFCNFSTEATEVSKKFPGIRPYLATLAGNFRMPVLREYLMSGGICPVSRDTIDYLLSKNGSGNAIIIVVGGAAESLSSMPGKNAVTLRNRKGFVKLALRHGADLVPIYSFGENEVYKQVIFEEGSWGRWVQKKFQKYIGFAPCIFHGRGLFSSDTWGLVPYSKPITTVVGEPITIPKLEHPTQQDIDLYHTMYMEALVKLFDKHKTKFGLPETEVLEVN

SEQ ID NO: 24237 - protein, 160 aa, Homo sapiens
  Payload ID: 4839
  Gene Symbol: DGAT2
  Gene Name: diacylglycerol O-acyltransferase 2
  ENSP ID: ENSP00000474015
MYIFCTDCWLIAVLYFTWLVFDWNTPKKGGRRSQWVRNWAVWRYFRDYFPIQLVKTHNLLTTRNYIFGYHPHGIMGLGAFCNFSTEATEVSKKFPGIRPYLATLAGNFRMPVLREYLMSGGICPVSRDTIDYLLSKNGSGNAIIIVVGGAAESLSSMPGK

SEQ ID NO: 24238 - protein, 295 aa, Homo sapiens
  Payload ID: 4839
  Gene Symbol: DGAT2
  Gene Name: diacylglycerol O-acyltransferase 2
  ENSP ID: ENSP00000474668
LIAAYSGVLRGERQAEADRSQRSHGGPALSREGSGRWGVACSAILMYIFCTDCWLIAVLYFTWLVFDWNTPKKGGRRSQWVRNWAVWRYFRDYFPIQLVKTHNLLTTRNYIFGYHPHGIMGLGAFCNFSTEATEVSKKFPGIRPYLATLAGNFRMPVLREYLMSGGICPVSRDTIDYLLSKNGSGNAIIIVVGGAAESLSSMPGKNAVTLRNRKGFVKLALRHGADLVPIYSFGENEVYKQVIFEEGSWGRWVQKKFQKYIGFAPCIFHGRGLFSSDTWGLVPYSKPITTVVGEP

SEQ ID NO: 24239 - protein, 112 aa, Homo sapiens
  Payload ID: 4839
  Gene Symbol: DGAT2
  Gene Name: diacylglycerol O-acyltransferase 2
  ENSP ID: ENSP00000474887
MYIFCTDCWLIAVLYFTWLVFDWNTPKKGGRRSQWVRNWAVWRYFRDYFPIQLVKTHNLLTTRNYIFGYHPHGIMGLGAFCNFSTEATEVSKKFPGIRPYLATLAGNFRMPV

SEQ ID NO: 24240 - protein, 113 aa, Homo sapiens
  Payload ID: 4839
  Gene Symbol: DGAT2
  Gene Name: diacylglycerol O-acyltransferase 2
  ENSP ID: ENSP00000475066
MYIFCTDCWLIAVLYFTWLVFDWNTPKKGGRRSQWVRNWAVWRYFRDYFPIQLVKTHNLLTTRNYIFGYHPHGIMGLGAFCNFSTEATEVSKKFPGIRPYLATLAGNFRMPVL

SEQ ID NO: 24241 - protein, 337 aa, Homo sapiens
  Payload ID: 4840
  Gene Symbol: DGAT2L6
  Gene Name: diacylglycerol O-acyltransferase 2-like 6
  Uniprot ID: Q6ZPD8
  ENSP ID: ENSP00000328036
MAFFSRLNLQEGLQTFFVLQWIPVYIFLGAIPILLIPYFLLFSKFWPLAVLSLAWLTYDWNTHSQGGRRSAWVRNWTLWKYFRNYFPVKLVKTHDLSPKHNYIIANHPHGILSFGVFINFATEATGIARIFPSITPFVGTLERIFWIPIVREYVMSMGVCPVSSSALKYLLTQKGSGNAVVIVVGGAAEALLCRPGASTLFLKQRKGFVKMALQTGAYLVPSYSFGENEVFNQETFPEGTWLRLFQKTFQDTFKKILGLNFCTFHGRGFTRGSWGFLPFNRPITTVVGEPLPIPRIKRPNQKTVDKYHALYISALRKLFDQHKVEYGLPETQELTIT

SEQ ID NO: 24242 - protein, 1228 aa, Homo sapiens [sequence omitted]

SEQ ID NO: 24243 - protein, 1272 aa, Homo sapiens
  Payload ID: 4841
  Gene Symbol: DIAPH1
  Gene Name: diaphanous-related formin 1
  Uniprot ID: O60610
  ENSP ID: ENSP00000373706
MEPPGGSLGPGRGTRDKKKGRSPDELPSAGGDGGKSKKFTLKRLMADELERFTSMRIKKEKEKPNSAHRNSSASYGDDPTAQSLQDVSDEQVLVLFEQMLLDMNLNEEKQQPLREKDIIIKREMVSQYLYTSKAGMSQKESSKSAMMYIQELRSGLRDMPLLSCLESLRVSLNNNPVSWVQTFGAEGLASLLDILKRLHDEKEETAGSYDSRNKHEIIRCLKAFMNNKFGIKTMLETEEGILLLVRAMDPAVPNMMIDAAKLLSALCILPQPEDMNERVLEAMTERAEMDEVERFQPLLDGLKSGTTIALKVGCLQLINALITPAEELDFRVHIRSELMRLGLHQVLQDLREIENEDMRVQLNVFDEQGEEDSYDLKGRLDDIRMEMDDFNEVFQILLNTVKDSKAEPHFLSILQHLLLVRNDYEARPQYYKLIEECISQIVLHKNGADPDFKCRHLQIEIEGLIDQMIDKTKVEKSEAKAAELEKKLDSELTARHELQVEMKKMESDFEQKLQDLQGEKDALHSEKQQIATEKQDLEAEVSQLTGEVAKLTKELEDAKKEMASLSAAAITVPPSVPSRAPVPPAPPLPGDSGTIIPPPPAPGDSTTPPPPPPPPPPPPPLPGGVCISSPPSLPGGTAISPPPPLSGDATIPPPPPLPEGVGIPSPSSLPGGTAIPPPPPLPGSARIPPPPPPLPGSAGIPPPPPPLPGEAGMPPPPPPLPGGPGIPPPPPFPGGPGIPPPPPGMGMPPPPPFGFGVPAAPVLPFGLTPKKLYKPEVQLRRPNWSKLVAEDLSQDCFWTKVKEDRFENNELFAKLTLTFSAQTKTSKAKKDQEGGEEKKSVQKKKVKELKVLDSKTAQNLSIFLGSFRMPYQEIKNVILEVNEAVLTESMIQNLIKQMPEPEQLKMLSELKDEYDDLAESEQFGVVMGTVPRLRPRLNAILFKLQFSEQVENIKPEIVSVTAACEELRKSESFSNLLEITLLVGNYMNAGSRNAGAFGFNISFLCKLRDTKSTDQKMTLLHFLAELCENDYPDVLKFPDELAHVEKASRVSAENLQKNLDQMKKQISDVERDVQNFPAATDEKDKFVEKMTSFVKDAQEQYNKLRMMHSNMETLYKELGEYFLFDPKKLSVEEFFMDLHNFRNMFLQAVKENQKRRETEEKMRRAKLAKEKAEKERLEKQQKREQLIDMNAEGDETGVMDSLLEALQSGAAFRRKRGPRQANRKAGCAVTSLLASELTKDDAMAAVPAKVSKNSETFPTILEEAKELVGRAS

SEQ ID NO: 24244 - protein, 1263 aa, Homo sapiens [sequence omitted]

SEQ ID NO: 24245 - protein, 1272 aa, Homo sapiens [sequence omitted]

SEQ ID NO: 24246 - protein, 96 aa, Homo sapiens
  Payload ID: 4841
  Gene Symbol: DIAPH1
  Gene Name: diaphanous-related formin 1
  ENSP ID: ENSP00000408159
  MOD_RES (1)..(1): Any amino acid
XRETEEKMRRAKLAKEKAEKERLEKQQKREQLIDMNAEGDETGVMDSLLEALQSGAAFRRKRGPRQDNLLCPWEVEEEEETFKLPTGRPGVQSHLC

SEQ ID NO: 24247 - protein, 201 aa, Homo sapiens
  Payload ID: 4841
  Gene Symbol: DIAPH1
  Gene Name: diaphanous-related formin 1
  ENSP ID: ENSP00000428208
MEPPGGSLGPGRGTRDKKKGRSPDELPSAGGDGGKSKKFTLKRLMADELERFTSMRIKKEKEKPNSAHRNSSASYGDDPTAQSLQDVSDEQVLVLFEQMLLDMNLNEEKQQPLREKDIIIKREMVSQYLYTSKAGMSQKESSKSAMMYIQELRSGLRDMPLLSCLESLRVSLNNNPVSWVQTFGAEGLASLLDILKRLHDD

SEQ ID NO: 24248 - protein, 1263 aa, Homo sapiens
  Payload ID: 4841
  Gene Symbol: DIAPH1
  Gene Name: diaphanous-related formin 1
  Uniprot ID: O60610
  ENSP ID: ENSP00000428268
MEPPGGSLGPGRGTRDKKKGRSPDELPSAGGDGGKSKKFLERFTSMRIKKEKEKPNSAHRNSSASYGDDPTAQSLQDVSDEQVLVLFEQMLLDMNLNEEKQQPLREKDIIIKREMVSQYLYTSKAGMSQKESSKSAMMYIQELRSGLRDMPLLSCLESLRVSLNNNPVSWVQTFGAEGLASLLDILKRLHDEKEETAGSYDSRNKHEIIRCLKAFMNNKFGIKTMLETEEGILLLVRAMDPAVPNMMIDAAKLLSALCILPQPEDMNERVLEAMTERAEMDEVERFQPLLDGLKSGTTIALKVGCLQLINALITPAEELDFRVHIRSELMRLGLHQVLQDLREIENEDMRVQLNVFDEQGEEDSYDLKGRLDDIRMEMDDFNEVFQILLNTVKDSKAEPHFLSILQHLLLVRNDYEARPQYYKLIEECISQIVLHKNGADPDFKCRHLQIEIEGLIDQMIDKTKVEKSEAKAAELEKKLDSELTARHELQVEMKKMESDFEQKLQDLQGEKDALHSEKQQIATEKQDLEAEVSQLTGEVAKLTKELEDAKKEMASLSAAAITVPPSVPSRAPVPPAPPLPGDSGTIIPPPPAPGDSTTPPPPPPPPPPPPPLPGGVCISSPPSLPGGTAISPPPPLSGDATIPPPPPLPEGVGIPSPSSLPGGTAIPPPPPLPGSARIPPPPPPLPGSAGIPPPPPPLPGEAGMPPPPPPLPGGPGIPPPPPFPGGPGIPPPPPGMGMPPPPPFGFGVPAAPVLPFGLTPKKLYKPEVQLRRPNWSKLVAEDLSQDCFWTKVKEDRFENNELFAKLTLTFSAQTKTSKAKKDQEGGEEKKSVQKKKVKELKVLDSKTAQNLSIFLGSFRMPYQEIKNVILEVNEAVLTESMIQNLIKQMPEPEQLKMLSELKDEYDDLAESEQFGVVMGTVPRLRPRLNAILFKLQFSEQVENIKPEIVSVTAACEELRKSESFSNLLEITLLVGNYMNAGSRNAGAFGFNISFLCKLRDTKSTDQKMTLLHFLAELCENDYPDVLKFPDELAHVEKASRVSAENLQKNLDQMKKQISDVERDVQNFPAATDEKDKFVEKMTSFVKDAQEQYNKLRMMHSNMETLYKELGEYFLFDPKKLSVEEFFMDLHNFRNMFLQAVKENQKRRETEEKMRRAKLAKEKAEKERLEKQQKREQLIDMNAEGDETGVMDSLLEALQSGAAFRRKRGPRQANRKAGCAVTSLLASELTKDDAMAAVPAKVSKNSETFPTILEEAKELVGRAS

SEQ ID NO: 24249 - protein, 112 aa, Homo sapiens
  Payload ID: 4841
  Gene Symbol: DIAPH1
  Gene Name: diaphanous-related formin 1
  ENSP ID: ENSP00000430587
MRIKKEKEKPNSAHRNSSASYGDDPTAQSLQDVSDEQVLVLFEQMLLDMNLNEEKQQPLREKDIIIKREMVSQYLYTSKAGMSQKESSKSAMMYIQELRSGLRDMPLLSCLE

SEQ ID NO: 24250 - protein, 1101 aa, Homo sapiens
  Payload ID: 4842
  Gene Symbol: DIAPH2
  Gene Name: diaphanous-related formin 2
  Uniprot ID: O60879
  ENSP ID: ENSP00000321348
MEQPGAAASGAGGGSEEPGGGRSNKRSAGNRAANEEETKNKPKLNIQIKTLADDVRDRITSFRKSTVKKEKPLIQHPIDSQVAMSEFPAAQPLYDERSLNLSEKEVLDLFEKMMEDMNLNEEKKAPLRNKDFTTKREMVVQYISATAKSGGLKNSKHECTLSSQEYVHELRSGISDEKLLNCLESLRVSLTSNPVSWVNNFGHEGLGLLLDELEKLLDKKQQENIDKKNQYKLIQCLKAFMNNKFGLQRILGDERSLLLLARAIDPKQPNMMTEIVKILSAICIVGEENILDKLLGAITTAAERNNRERFSPIVEGLENQEALQLQVACMQFINALVTSPYELDFRIHLRNEFLRSGLKTMLPDLKEKENDELDIQLKVFDENKEDDLTELSHRLNDIRAEMDDMNEVYHLLYNMLKDTAAENYFLSILQHFLLIRNDYYIRPQYYKIIEECVSQIVLHCSGMDPDFKYRQRLDIDLTHLIDSCVNKAKVEESEQKAAEFSKKFDEEFTARQEAQAELQKRDEKIKELEAEIQQLRTQAQVLSSSSGIPGPPAAPPLPGVGPPPPPPAPPLPGGAPLPPPPPPLPGMMGIPPPPPPPLLFGGPPPPPPLGGVPPPPGISLNLPYGMKQKKMYKPEVSMKRINWSKIEPTELSENCFWLRVKEDKFENPDLFAKLALNFATQIKVQKNAEALEEKKTGPTKKKVKELRILDPKTAQNLSIFLGSYRMPYEDIRNVILEVNEDMLSEALIQNLVKHLPEQKILNELAELKNEYDDLCEPEQFGVVMSSVKMLQPRLSSILFKLTFEEHINNIKPSIIAVTLACEELKKSESFNRLLELVLLVGNYMNSGSRNAQSLGFKINFLCKIRDTKSADQKTTLLHFIADICEEKYRDILKFPEELEHVESASKVSAQILKSNLASMEQQIVHLERDIKKFPQAENQHDKFVEKMTSFTKTAREQYEKLSTMHNNMMKLYENLGEYFIFDSKTVSIEEFFGDLNNFRTLFLEAVRENNKRREMEEKTRRAKLAKEKAEQEKLERQKKKKQLIDINKEGDETGVMDNLLEALQSGAAFRDRRKRIPRNPDNRRVPLERSRSRHNGAISSK

SEQ ID NO: 24251 - protein, 1096 aa, Homo sapiens [sequence omitted]

SEQ ID NO: 24252 - protein, 1096 aa, Homo sapiens
  Payload ID: 4842
  Gene Symbol: DIAPH2
  Gene Name: diaphanous-related formin 2
  Uniprot ID: O60879
  ENSP ID: ENSP00000362140
MEQPGAAASGAGGGSEEPGGGRSNKRSAGNRAANEEETKNKPKLNIQIKTLADDVRDRITSFRKSTVKKEKPLIQHPIDSQVAMSEFPAAQPLYDERSLNLSEKEVLDLFEKMMEDMNLNEEKKAPLRNKDFTTKREMVVQYISATAKSGGLKNSKHECTLSSQEYVHELRSGISDEKLLNCLESLRVSLTSNPVSWVNNFGHEGLGLLLDELEKLLDKKQQENIDKKNQYKLIQCLKAFMNNKFGLQRILGDERSLLLLARAIDPKQPNMMTEIVKILSAICIVGEENILDKLLGAITTAAERNNRERFSPIVEGLENQEALQLQVACMQFINALVTSPYELDFRIHLRNEFLRSGLKTMLPDLKEKENDELDIQLKVFDENKEDDLTELSHRLNDIRAEMDDMNEVYHLLYNMLKDTAAENYFLSILQHFLLIRNDYYIRPQYYKIIEECVSQIVLHCSGMDPDFKYRQRLDIDLTHLIDSCVNKAKVEESEQKAAEFSKKFDEEFTARQEAQAELQKRDEKIKELEAEIQQLRTQAQVLSSSSGIPGPPAAPPLPGVGPPPPPPAPPLPGGAPLPPPPPPLPGMMGIPPPPPPPLLFGGPPPPPPLGGVPPPPGISLNLPYGMKQKKMYKPEVSMKRINWSKIEPTELSENCFWLRVKEDKFENPDLFAKLALNFATQIKVQKNAEALEEKKTGPTKKKVKELRILDPKTAQNLSIFLGSYRMPYEDIRNVILEVNEDMLSEALIQNLVKHLPEQKILNELAELKNEYDDLCEPEQFGVVMSSVKMLQPRLSSILFKLTFEEHINNIKPSIIAVTLACEELKKSESFNRLLELVLLVGNYMNSGSRNAQSLGFKINFLCKIRDTKSADQKTTLLHFIADICEEKYRDILKFPEELEHVESASKVSAQILKSNLASMEQQIVHLERDIKKFPQAENQHDKFVEKMTSFTKTAREQYEKLSTMHNNMMKLYENLGEYFIFDSKTVSIEEFFGDLNNFRTLFLEAVRENNKRREMEEKTRRAKLAKEKAEQEKLERQKKKKQLIDINKEGDETGVMDNLLEALQSGAAFRDRRKRIPRNPVVNHPCATRANPRSAT

SEQ ID NO: 24253 - protein, 1103 aa, Homo sapiens [sequence omitted]

SEQ ID NO: 24254 - protein, 1101 aa, Homo sapiens [sequence omitted]

SEQ ID NO: 24255 - protein, 1112 aa, Homo sapiens
  Payload ID: 4843
  Gene Symbol: DIAPH3
  Gene Name: diaphanous-related formin 3
  Uniprot ID: Q9NSV4
  ENSP ID: ENSP00000267215
MERHQPRLHHPAQGSAAGTPYPSSASLRGCRESKMPRRKGPQHPPPPSGPEEPGEKRPKFHLNIRTLTDDMLDKFASIRIPGSKKERPPLPNLKTAFASSDCSAAPLEMMENFPKPLSENELLELFEKMMEDMNLNEDKKAPLREKDFSIKKEMVMQYINTASKTGSLKRSRQISPQEFIHELKMGSADERLVTCLESLRVSLTSNPVSWVESFGHEGLGLLLDILEKLISGKIQEKVVKKNQHKVIQCLKALMNTQYGLERIMSEERSLSLLAKAVDPRHPNMMTDVVKLLSAVCIVGEESILEEVLEALTSAGEEKKIDRFFCIVEGLRHNSVQLQVACMQLINALVTSPDDLDFRLHIRNEFMRCGLKEILPNLKCIKNDGLDIQLKVFDEHKEEDLFELSHRLEDIRAELDEAYDVYNMVWSTVKETRAEGYFISILQHLLLIRNDYFIRQQYFKLIDECVSQIVLHRDGMDPDFTYRKRLDLDLTQFVDICIDQAKLEEFEEKASELYKKFEKEFTDHQETQAELQKKEAKINELQAELQAFKSQFGALPADCNIPLPPSKEGGTGHSALPPPPPLPSGGGVPPPPPPPPPPPLPGMRMPFSGPVPPPPPLGFLGGQNSPPLPILPFGLKPKKEFKPEISMRRLNWLKIRPHEMTENCFWIKVNENKYENVDLLCKLENTFCCQQKERREEEDIEEKKSIKKKIKELKFLDSKIAQNLSIFLSSFRVPYEEIRMMILEVDETRLAESMIQNLIKHLPDQEQLNSLSQFKSEYSNLCEPEQFVVVMSNVKRLRPRLSAILFKLQFEEQVNNIKPDIMAVSTACEEIKKSKSFSKLLELVLLMGNYMNAGSRNAQTFGFNLSSLCKLKDTKSADQKTTLLHFLVEICEEKYPDILNFVDDLEPLDKASKVSVETLEKNLRQMGRQLQQLEKELETFPPPEDLHDKFVTKMSRFVISAKEQYETLSKLHENMEKLYQSIIGYYAIDVKKVSVEDFLTDLNNFRTTFMQAIKENIKKREAEEKEKRVRIAKELAERERLERQQKKKRLLEMKTEGDETGVMDNLLEALQSGAAFRDRRKRTPMPKDVRQSLSPMSQRPVLKVCNHGNKPYL

SEQ ID NO: 24256 - protein, 1182 aa, Homo sapiens
  Payload ID: 4843
  Gene Symbol: DIAPH3
  Gene Name: diaphanous-related formin 3
  Uniprot ID: Q9NSV4
  ENSP ID: ENSP00000367141
MERHQPRLHHPAQGSAAGTPYPSSASLRGCRESKMPRRKGPQHPPPPSGPEEPGEKRPKFLDKFASIRIPGSKKERPPLPNLKTAFASSDCSAAPLEMMENFPKPLSENELLELFEKMMEDMNLNEDKKAPLREKDFSIKKEMVMQYINTASKTGSLKRSRQISPQEFIHELKMGSADERLVTCLESLRVSLTSNPVSWVESFGHEGLGLLLDILEKLISGKIQEKVVKKNQHKVIQCLKALMNTQYGLERIMSEERSLSLLAKAVDPRHPNMMTDVVKLLSAVCIVGEESILEEVLEALTSAGEEKKIDRFFCIVEGLRHNSVQLQVACMQLINALVTSPDDLDFRLHIRNEFMRCGLKEILPNLKCIKNDGLDIQLKVFDEHKEEDLFELSHRLEDIRAELDEAYDVYNMVWSTVKETRAEGYFISILQHLLLIRNDYFIRQQYFKLIDECVSQIVLHRDGMDPDFTYRKRLDLDLTQFVDICIDQAKLEEFEEKASELYKKFEKEFTDHQETQAELQKKEAKINELQAELQAFKSQFGALPADCNIPLPPSKEGGTGHSALPPPPPLPSGGGVPPPPPPPPPPPLPGMRMPFSGPVPPPPPLGFLGGQNSPPLPILPFGLKPKKEFKPEISMRRLNWLKIRPHEMTENCFWIKVNENKYENVDLLCKLENTFCCQQKERREEEDIEEKKSIKKKIKELKFLDSKIAQNLSIFLSSFRVPYEEIRMMILEVDETRLAESMIQNLIKHLPDQEQLNSLSQFKSEYSNLCEPEQFVVVMSNVKRLRPRLSAILFKLQFEEQVNNIKPDIMAVSTACEEIKKSKSFSKLLELVLLMGNYMNAGSRNAQTFGFNLSSLCKLKDTKSADQKTTLLHFLVEICEEKYPDILNFVDDLEPLDKASKVSVETLEKNLRQMGRQLQQLEKELETFPPPEDLHDKFVTKMSRFVISAKEQYETLSKLHENMEKLYQSIIGYYAIDVKKVSVEDFLTDLNNFRTTFMQAIKENIKKREAEEKEKRVRIAKELAERERLERQQKKKRLLEMKTEGDETGVMDNLLEALQSGAAFRDRRKRTPMPKDVRQSLSPMSQRPVLKVCNHENQKVQLTEGSRSHYNINCNSTRTPVAKELNYNLDTHTSTGRIKAAEKKEACNVESNRKKETELLGSFSKNESVPEVEALLARLRAL

SEQ ID NO: 24257 - protein, 1123 aa, Homo sapiens
  Payload ID: 4843
  Gene Symbol: DIAPH3
  Gene Name: diaphanous-related formin 3
  Uniprot ID: Q9NSV4
  ENSP ID: ENSP00000383173
MERHQPRLHHPAQGSAAGTPYPSSASLRGCRESKMPRRKGPQHPPPPSGPEEPGEKRPKFEDMNLNEDKKAPLREKDFSIKKEMVMQYINTASKTGSLKRSRQISPQEFIHELKMGSADERLVTCLESLRVSLTSNPVSWVESFGHEGLGLLLDILEKLISGKIQEKVVKKNQHKVIQCLKALMNTQYGLERIMSEERSLSLLAKAVDPRHPNMMTDVVKLLSAVCIVGEESILEEVLEALTSAGEEKKIDRFFCIVEGLRHNSVQLQVACMQLINALVTSPDDLDFRLHIRNEFMRCGLKEILPNLKCIKNDGLDIQLKVFDEHKEEDLFELSHRLEDIRAELDEAYDVYNMVWSTVKETRAEGYFISILQHLLLIRNDYFIRQQYFKLIDECVSQIVLHRDGMDPDFTYRKRLDLDLTQFVDICIDQAKLEEFEEKASELYKKFEKEFTDHQETQAELQKKEAKINELQAELQAFKSQFGALPADCNIPLPPSKEGGTGHSALPPPPPLPSGGGVPPPPPPPPPPPLPGMRMPFSGPVPPPPPLGFLGGQNSPPLPILPFGLKPKKEFKPEISMRRLNWLKIRPHEMTENCFWIKVNENKYENVDLLCKLENTFCCQQKERREEEDIEEKKSIKKKIKELKFLDSKIAQNLSIFLSSFRVPYEEIRMMILEVDETRLAESMIQNLIKHLPDQEQLNSLSQFKSEYSNLCEPEQFVVVMSNVKRLRPRLSAILFKLQFEEQVNNIKPDIMAVSTACEEIKKSKSFSKLLELVLLMGNYMNAGSRNAQTFGFNLSSLCKLKDTKSADQKTTLLHFLVEICEEKYPDILNFVDDLEPLDKASKVSVETLEKNLRQMGRQLQQLEKELETFPPPEDLHDKFVTKMSRFVISAKEQYETLSKLHENMEKLYQSIIGYYAIDVKKVSVEDFLTDLNNFRTTFMQAIKENIKKREAEEKEKRVRIAKELAERERLERQQKKKRLLEMKTEGDETGVMDNLLEALQSGAAFRDRRKRTPMPKDVRQSLSPMSQRPVLKVCNHENQKVQLTEGSRSHYNINCNSTRTPVAKELNYNLDTHTSTGRIKAAEKKEACNVESNRKKETELLGSFSKNESVPEVEALLARLRAL

SEQ ID NO: 24258 - protein, 1147 aa, Homo sapiens
  Payload ID: 4843
  Gene Symbol: DIAPH3
  Gene Name: diaphanous-related formin 3
  Uniprot ID: Q9NSV4
  ENSP ID: ENSP00000383174
MERHQPRLHHPAQGSAAGTPYPSSASLRGCRESKMPRRKGPQHPPPPSGPEEPGEKRPKFLDKFASIRIPGSKKERPPLPNLKTAFASSDCSAAPLEMMENFPKPLSENELLELFEKMMGSLKRSRQISPQEFIHELKMGSADERLVTCLESLRVSLTSNPVSWVESFGHEGLGLLLDILEKLISGKIQEKVVKKNQHKVIQCLKALMNTQYGLERIMSEERSLSLLAKAVDPRHPNMMTDVVKLLSAVCIVGEESILEEVLEALTSAGEEKKIDRFFCIVEGLRHNSVQLQVACMQLINALVTSPDDLDFRLHIRNEFMRCGLKEILPNLKCIKNDGLDIQLKVFDEHKEEDLFELSHRLEDIRAELDEAYDVYNMVWSTVKETRAEGYFISILQHLLLIRNDYFIRQQYFKLIDECVSQIVLHRDGMDPDFTYRKRLDLDLTQFVDICIDQAKLEEFEEKASELYKKFEKEFTDHQETQAELQKKEAKINELQAELQAFKSQFGALPADCNIPLPPSKEGGTGHSALPPPPPLPSGGGVPPPPPPPPPPPLPGMRMPFSGPVPPPPPLGFLGGQNSPPLPILPFGLKPKKEFKPEISMRRLNWLKIRPHEMTENCFWIKVNENKYENVDLLCKLENTFCCQQKERREEEDIEEKKSIKKKIKELKFLDSKIAQNLSIFLSSFRVPYEEIRMMILEVDETRLAESMIQNLIKHLPDQEQLNSLSQFKSEYSNLCEPEQFVVVMSNVKRLRPRLSAILFKLQFEEQVNNIKPDIMAVSTACEEIKKSKSFSKLLELVLLMGNYMNAGSRNAQTFGFNLSSLCKLKDTKSADQKTTLLHFLVEICEEKYPDILNFVDDLEPLDKASKVSVETLEKNLRQMGRQLQQLEKELETFPPPEDLHDKFVTKMSRFVISAKEQYETLSKLHENMEKLYQSIIGYYAIDVKKVSVEDFLTDLNNFRTTFMQAIKENIKKREAEEKEKRVRIAKELAERERLERQQKKKRLLEMKTEGDETGVMDNLLEALQSGAAFRDRRKRTPMPKDVRQSLSPMSQRPVLKVCNHENQKVQLTEGSRSHYNINCNSTRTPVAKELNYNLDTHTSTGRIKAAEKKEACNVESNRKKETELLGSFSKNESVPEVEALLARLRAL

SEQ ID NO: 24259 - protein, 1193 aa, Homo sapiens
  Payload ID: 4843
  Gene Symbol: DIAPH3
  Gene Name: diaphanous-related formin 3
  Uniprot ID: Q9NSV4
  ENSP ID: ENSP00000383178
MERHQPRLHHPAQGSAAGTPYPSSASLRGCRESKMPRRKGPQHPPPPSGPEEPGEKRPKFHLNIRTLTDDMLDKFASIRIPGSKKERPPLPNLKTAFASSDCSAAPLEMMENFPKPLSENELLELFEKMMEDMNLNEDKKAPLREKDFSIKKEMVMQYINTASKTGSLKRSRQISPQEFIHELKMGSADERLVTCLESLRVSLTSNPVSWVESFGHEGLGLLLDILEKLISGKIQEKVVKKNQHKVIQCLKALMNTQYGLERIMSEERSLSLLAKAVDPRHPNMMTDVVKLLSAVCIVGEESILEEVLEALTSAGEEKKIDRFFCIVEGLRHNSVQLQVACMQLINALVTSPDDLDFRLHIRNEFMRCGLKEILPNLKCIKNDGLDIQLKVFDEHKEEDLFELSHRLEDIRAELDEAYDVYNMVWSTVKETRAEGYFISILQHLLLIRNDYFIRQQYFKLIDECVSQIVLHRDGMDPDFTYRKRLDLDLTQFVDICIDQAKLEEFEEKASELYKKFEKEFTDHQETQAELQKKEAKINELQAELQAFKSQFGALPADCNIPLPPSKEGGTGHSALPPPPPLPSGGGVPPPPPPPPPPPLPGMRMPFSGPVPPPPPLGFLGGQNSPPLPILPFGLKPKKEFKPEISMRRLNWLKIRPHEMTENCFWIKVNENKYENVDLLCKLENTFCCQQKERREEEDIEEKKSIKKKIKELKFLDSKIAQNLSIFLSSFRVPYEEIRMMILEVDETRLAESMIQNLIKHLPDQEQLNSLSQFKSEYSNLCEPEQFVVVMSNVKRLRPRLSAILFKLQFEEQVNNIKPDIMAVSTACEEIKKSKSFSKLLELVLLMGNYMNAGSRNAQTFGFNLSSLCKLKDTKSADQKTTLLHFLVEICEEKYPDILNFVDDLEPLDKASKVSVETLEKNLRQMGRQLQQLEKELETFPPPEDLHDKFVTKMSRFVISAKEQYETLSKLHENMEKLYQSIIGYYAIDVKKVSVEDFLTDLNNFRTTFMQAIKENIKKREAEEKEKRVRIAKELAERERLERQQKKKRLLEMKTEGDETGVMDNLLEALQSGAAFRDRRKRTPMPKDVRQSLSPMSQRPVLKVCNHENQKVQLTEGSRSHYNINCNSTRTPVAKELNYNLDTHTSTGRIKAAEKKEACNVESNRKKETELLGSFSKNESVPEVEALLARLRAL

SEQ ID NO: 24260 - protein, 849 aa, Homo sapiens
  Payload ID: 4843
  Gene Symbol: DIAPH3
  Gene Name: diaphanous-related formin 3
  Uniprot ID: Q9NSV4
  ENSP ID: ENSP00000478137
MSEERSLSLLAKAVDPRHPNMMTDVVKLLSAVCIVGEESILEEVLEALTSAGEEKKIDRFFCIVEGLRHNSVQLQVACMQLINALVTSPDDLDFRLHIRNEFMRCGLKEILPNLKCIKNDGLDIQLKVFDEHKEEDLFELSHRLEDIRAELDEAYDVYNMVWSTVKETRAEGYFISILQHLLLIRNDYFIRQQYFKLIDECVSQIVLHRDGMDPDFTYRKRLDLDLTQFVDICIDQAKLEEFEEKASELYKKFEKEFTDHQETQAELQKKEAKINELQAELQAFKSQFGALPADCNIPLPPSKEGGTGHSALPPPPPLPSGGGVPPPPPPPPPPPLPGMRMPFSGPVPPPPPLGFLGGQNSPPLPILPFGLKPKKEFKPEISMRRLNWLKIRPHEMTENCFWIKVNENKYENVDLLCKLENTFCCQQKERREEEDIEEKKSIKKKIKELKFLDSKIAQNLSIFLSSFRVPYEEIRMMILEVDETRLAESMIQNLIKHLPDQEQLNSLSQFKSEYSNLCEPEQFVVVMSNVKRLRPRLSAILFKLQFEEQVNNIKPDIMAVSTACEEIKKSKSFSKLLELVLLMGNYMNAGSRNAQTFGFNLSSLCKLKDTKSADQKTTLLHFLVEICEEKYPDILNFVDDLEPLDKASKVSVETLEKNLRQMGRQLQQLEKELETFPPPEDLHDKFVTKMSRFVISAKEQYETLSKLHENMEKLYQSIIGYYAIDVKKVSVEDFLTDLNNFRTTFMQAIKENIKKREAEEKEKRVRIAKELAERERLERQQKKKRLLEMKTEGDETGVMDNLLEALQSGAAFRDRRKRTPMPKDVRQSLSPMSQRPVLKVCNHGNKPYL

SEQ ID NO: 24261 - protein, 691 aa, Homo sapiens
  Payload ID: 4843
  Gene Symbol: DIAPH3
  Gene Name: diaphanous-related formin 3
  Uniprot ID: Q9NSV4
  ENSP ID: ENSP00000479091
MSEERSLSLLAKAVDPRHPNMMTDVVKLLSAVCIVGEESILEEVLEALTSAGEEKKIDRFFCIVEGLRHNSVQLQVACMQLINALVTSPDDLDFRLHIRNEFMRCGLKEILPNLKCIKNDGLDIQLKVFDEHKEEDLFELSHRLEDIRAELDEAYDVYNMVWSTVKETRAEGYFISILQHLLLIRNDYFIRQQYFKLIDECVSQIVLHRDGMDPDFTYRKRLDLDLTQFVDICIDQAKLEEFEEKASELYKKFEKEFTDHQETQAELQKKEAKINELQAELQAFKSQFGALPADCNIPLPPSKEGGTGHSALPPPPPLPSGGGVPPPPPPPPPPPLPGMRMPFSGPVPPPPPLGFLGGQNSPPLPILPFGLKPKKEFKPEISMRRLNWLKIRPHEMTENCFWIKVNENKYENVDLLCKLENTFCCQQKERREEEDIEEKKSIKKKIKELKFLDSKIAQNLSIFLSSFRVPYEEIRMMILEVDETRLAESMIQNLIKHLPDQEQLNSLSQFKSEYSNLCEPEQFVVVMSNVKRLRPRLSAILFKLQFEEQVNNIKPDIMAVSTACEEIKKSKSFSKLLELVLLMGNYMNAGSRNAQTFGFNLSSLCKLKDTKSADQKTTLLHFLVEICEEKYPDILNFVDDLEPLDKASKGLCLFKKHFMALIFSAKRLKIIPFICMYFPLSHSVFIPNISF

SEQ ID NO: 24262 - protein, 104 aa, Homo sapiens
  Payload ID: 4844
  Gene Symbol: DBI
  Gene Name: diazepam binding inhibitor (GABA receptor modulator, acyl-CoA binding protein)
  Uniprot ID: P07108
  ENSP ID: ENSP00000311117
MWGDLWLLPPASANPGTGTEAEFEKAAEEVRHLKTKPSDEEMLFIYGHYKQATVGDINTERPGMLDFTGKAKWDAWNELKGTSKEDAMKAYINKVEELKKKYGI

SEQ ID NO: 24263 - protein, 87 aa, Homo sapiens
  Payload ID: 4844
  Gene Symbol: DBI
  Gene Name: diazepam binding inhibitor (GABA receptor modulator, acyl-CoA binding protein)
  Uniprot ID: P07108
  ENSP ID: ENSP00000348116
MSQAEFEKAAEEVRHLKTKPSDEEMLFIYGHYKQATVGDINTERPGMLDFTGKAKWDAWNELKGTSKEDAMKAYINKVEELKKKYGI

SEQ ID NO: 24264 - protein, 88 aa, Homo sapiens
  Payload ID: 4844
  Gene Symbol: DBI
  Gene Name: diazepam binding inhibitor (GABA receptor modulator, acyl-CoA binding protein)
  Uniprot ID: P07108
  ENSP ID: ENSP00000376815
MPAFAEFEKAAEEVRHLKTKPSDEEMLFIYGHYKQATVGDINTERPGMLDFTGKAKWDAWNELKGTSKEDAMKAYINKVEELKKKYGI

SEQ ID NO: 24265 - protein, 104 aa, Homo sapiens; identical to SEQ ID NO: 24262
  Payload ID: 4844
  Gene Symbol: DBI
  Gene Name: diazepam binding inhibitor (GABA receptor modulator, acyl-CoA binding protein)
  Uniprot ID: P07108
  ENSP ID: ENSP00000386486

SEQ ID NO: 24266 - protein, 104 aa, Homo sapiens; identical to SEQ ID NO: 24262
  Payload ID: 4844
  Gene Symbol: DBI
  Gene Name: diazepam binding inhibitor (GABA receptor modulator, acyl-CoA binding protein)
  Uniprot ID: P07108
  ENSP ID: ENSP00000439012

SEQ ID NO: 24267 - protein, 143 aa, Homo sapiens
  Payload ID: 4844
  Gene Symbol: DBI
  Gene Name: diazepam binding inhibitor (GABA receptor modulator, acyl-CoA binding protein)
  ENSP ID: ENSP00000440698
MGWTSLCSGRGVGVEGAWRDGGRGCTDWRSEETQSPSRSTGQDVAAEWGSEESVAESLEAEFEKAAEEVRHLKTKPSDEEMLFIYGHYKQATVGDINTERPGMLDFTGKAKWDAWNELKGTSKEDAMKAYINKVEELKKKYGI

SEQ ID NO: 24268 - protein, 97 aa, Homo sapiens
  Payload ID: 4844
  Gene Symbol: DBI
  Gene Name: diazepam binding inhibitor (GABA receptor modulator, acyl-CoA binding protein)
  ENSP ID: ENSP00000442917
MSQVQRVHSQAAKAEFEKAAEEVRHLKTKPSDEEMLFIYGHYKQATVGDINTERPGMLDFTGKAKWDAWNELKGTSKEDAMKAYINKVEELKKKYGI

SEQ ID NO: 24269 - protein, 129 aa, Homo sapiens
  Payload ID: 4844
  Gene Symbol: DBI
  Gene Name: diazepam binding inhibitor (GABA receptor modulator, acyl-CoA binding protein)
  Uniprot ID: P07108
  ENSP ID: ENSP00000486281
MSQHRAGRRGGVGKRGVRGRELGGQGKYGAGCSECGTRRIAARGEAEFEKAAEEVRHLKTKPSDEEMLFIYGHYKQATVGDINTERPGMLDFTGKAKWDAWNELKGTSKEDAMKAYINKVEELKKKYGI

SEQ ID NO: 24270 - protein, 148 aa, Homo sapiens
  Payload ID: 4844
  Gene Symbol: DBI
  Gene Name: diazepam binding inhibitor (GABA receptor modulator, acyl-CoA binding protein)
  Uniprot ID: P07108
  ENSP ID: ENSP00000486361
MERWGKGLHGLEERGDSVPIPKHRAGRRGGVGKRGVRGRELGGQGKYGAGCSECGTRRIAARGEAEFEKAAEEVRHLKTKPSDEEMLFIYGHYKQATVGDINTERPGMLDFTGKAKWDAWNELKGTSKEDAMKAYINKVEELKKKYGI

SEQ ID NO: 24271 - protein, 244 aa, Homo sapiens
  Payload ID: 4845
  Gene Symbol: DCXR
  Gene Name: dicarbonyl/L-xylulose reductase
  Uniprot ID: Q7Z4W1
  ENSP ID: ENSP00000303356
MELFLAGRRVLVTGAGKGIGRGTVQALHATGARVVAVSRTQADLDSLVRECPGIEPVCVDLGDWEATERALGSVGPVDLLVNNAAVALLQPFLEVTKEAFDRSFEVNLRAVIQVSQIVARGLIARGVPGAIVNVSSQCSQRAVTNHSVYCSTKGALDMLTKVMALELGPHKIRVNAVNPTVVMTSMGQATWSDPHKAKTMLNRIPLGKFAEVEHVVNAILFLLSDRSGMTTGSTLPVEGGFWAC

SEQ ID NO: 24272 - protein, 141 aa, Homo sapiens
  Payload ID: 4845
  Gene Symbol: DCXR
  Gene Name: dicarbonyl/L-xylulose reductase
  ENSP ID: ENSP00000462226
MELFLAGRRVLVTGAGKGGRRGKCPGIEPVCVDLGDWEATERALGSVGPVDLLVNNAAVALLQPFLEVTKEAFDRSFEVNLRAVIQVSQIVARGLIARGVPGAIVNVSSQCSQRAVTNHSVYCSTKGALDMLTKVMALELG

SEQ ID NO: 24273 - protein, 223 aa, Homo sapiens
  Payload ID: 4845
  Gene Symbol: DCXR
  Gene Name: dicarbonyl/L-xylulose reductase
  ENSP ID: ENSP00000462272
MELFLAGRRVLVTGAGKGRGTVQALHATGARVVAVSRTQADLDSLVRECPGIEPVCVDLGDWEATERALGSVGPVDLLVNNAAVALLQPFLEVTKEAFDRSFEVNLRAVIQVSQIVARGLIARGVPGAIVNVSSQCSQRAVTNHSVYCSTKGALDMLTKVMALELGPHKIRVNAVNPTVVMTSMGQATWSDPHKAKTMLNRIPLGKFAEVEHVVNAILFLLSD

SEQ ID NO: 24274 - protein, 143 aa, Homo sapiens
  Payload ID: 4845
  Gene Symbol: DCXR
  Gene Name: dicarbonyl/L-xylulose reductase
  ENSP ID: ENSP00000462725
  MOD_RES (1)..(1): Any amino acid
XSCSSRAAGCWSPGQAKCPGIEPVCVDLGDWEATERALGSVGPVDLLVNNAAVALLQPFLEVTKEAFDRSFEVNLRAVIQVSQIVARGLIARGVPGAIVNVSSQCSQRAVTNHSVYCSTKGALDMLTKVMALELGPHKIRVNA

SEQ ID NO: 24275 - protein, 176 aa, Homo sapiens
  Payload ID: 4845
  Gene Symbol: DCXR
  Gene Name: dicarbonyl/L-xylulose reductase
  ENSP ID: ENSP00000463354
VCVDLGDWEATERALGSVGPVDLLVNNAAVALLQPFLEVTKEAFDRSFEVNLRAVIQVSQIVARGLIARGVPGAIVNVSSQCSQRAVTNHSVYCSTKGALDMLTKVMALELGPHKIRVNAVNPTVVMTSMGQATWSDPHKAKTMLNRIPLGKFAGPTDVHNRGAEKTVVYAEISRK

SEQ ID NO: 24276 - protein, 86 aa, Homo sapiens
  Payload ID: 4845
  Gene Symbol: DCXR
  Gene Name: dicarbonyl/L-xylulose reductase
  ENSP ID: ENSP00000464332
  MOD_RES (1)..(1): Any amino acid
XMALELGPHKIRVNAVNPTVVMTSMGQATWSDPHKAKTMLNRIPLGKFAGESEVEHVVNAILFLLSDRSGMTTGSTLPVEGGFWAC

SEQ ID NO: 24277 - protein, 225 aa, Homo sapiens
  Payload ID: 4845
  Gene Symbol: DCXR
  Gene Name: dicarbonyl/L-xylulose reductase
  ENSP ID: ENSP00000464507
  MOD_RES (1)..(1): Any amino acid
XLFLAGRRVLVTGAGKGIGRGTVQALHATGARVVAVSRTQADLDSLVRECPGIEPVCVDLGDWEATERALGSVGPVDLLVNNAAVALLQPFLEVTKEAFDRSFEVNLRAVIQVSQIVARGLIARGVPGAIVNVSSQCSQRAVTNHSVYCSTKGALDMLTKVMALELGPHKIRVNAVNPTVVMTSMGQATWSDPHKAKTMLNRIPLGKFAGESGGSPASVVPAVPR

SEQ ID NO: 24278 - protein, 100 aa, Homo sapiens
  Payload ID: 4845
  Gene Symbol: DCXR
  Gene Name: dicarbonyl/L-xylulose reductase
  ENSP ID: ENSP00000464518
  MOD_RES (1)..(1): Any amino acid
XLVNNAAVALLQPFLEVTKEAFDRSFEVNLRAVIQVSQIVARGLIARGVPGAIVNVSSQCSQRAVTNHSVYCSTKGALDMLTKVMALELGPHKLSRCRSE

SEQ ID NO: 24279 - protein, 1922 aa, Homo sapiens
  Payload ID: 4846
  Gene Symbol: DICER1
  Gene Name: dicer 1, ribonuclease type III
  Uniprot ID: Q9UPY3
  ENSP ID: ENSP00000343745
MKSPALQPLSMAGLQLMTPASSPMGPFFGLPWQQEAIHDNIYTPRKYQVELLEAALDHNTIVCLNTGSGKTFIAVLLTKELSYQIRGDFSRNGKRTVFLVNSANQVAQQVSAVRTHSDLKVGEYSNLEVNASWTKERWNQEFTKHQVLIMTCYVALNVLKNGYLSLSDINLLVFDECHLAILDHPYREIMKLCENCPSCPRILGLTASILNGKCDPEELEEKIQKLEKILKSNAETATDLVVLDRYTSQPCEIVVDCGPFTDRSGLYERLLMELEEALNFINDCNISVHSKERDSTLISKQILSDCRAVLVVLGPWCADKVAGMMVRELQKYIKHEQEELHRKFLLFTDTFLRKIHALCEEHFSPASLDLKFVTPKVIKLLEILRKYKPYERQQFESVEWYNNRNQDNYVSWSDSEDDDEDEEIEEKEKPETNFPSPFTNILCGIIFVERRYTAVVLNRLIKEAGKQDPELAYISSNFITGHGIGKNQPRNKQMEAEFRKQEEVLRKFRAHETNLLIATSIVEEGVDIPKCNLVVRFDLPTEYRSYVQSKGRARAPISNYIMLADTDKIKSFEEDLKTYKAIEKILRNKCSKSVDTGETDIDPVMDDDDVFPPYVLRPDDGGPRVTINTAIGHINRYCARLPSDPFTHLAPKCRTRELPDGTFYSTLYLPINSPLRASIVGPPMSCVRLAERVVALICCEKLHKIGELDDHLMPVGKETVKYEEELDLHDEEETSVPGRPGSTKRRQCYPKAIPECLRDSYPRPDQPCYLYVIGMVLTTPLPDELNFRRRKLYPPEDTTRCFGILTAKPIPQIPHFPVYTRSGEVTISIELKKSGFMLSLQMLELITRLHQYIFSHILRLEKPALEFKPTDADSAYCVLPLNVVNDSSTLDIDFKFMEDIEKSEARIGIPSTKYTKETPFVFKLEDYQDAVIIPRYRNFDQPHRFYVADVYTDLTPLSKFPSPEYETFAEYYKTKYNLDLTNLNQPLLDVDHTSSRLNLLTPRHLNQKGKALPLSSAEKRKAKWESLQNKQILVPELCAIHPIPASLWRKAVCLPSILYRLHCLLTAEELRAQTASDAGVGVRSLPADFRYPNLDFGWKKSIDSKSFISISNSSSAENDNYCKHSTIVPENAAHQGANRTSSLENHDQMSVNCRTLLSESPGKLHVEVSADLTAINGLSYNQNLANGSYDLANRDFCQGNQLNYYKQEIPVQPTTSYSIQNLYSYENQPQPSDECTLLSNKYLDGNANKSTSDGSPVMAVMPGTTDTIQVLKGRMDSEQSPSIGYSSRTLGPNPGLILQALTLSNASDGFNLERLEMLGDSFLKHAITTYLFCTYPDAHEGRLSYMRSKKVSNCNLYRLGKKKGLPSRMVVSIFDPPVNWLPPGYVVNQDKSNTDKWEKDEMTKDCMLANGKLDEDYEEEDEEEESLMWRAPKEEADYEDDFLEYDQEHIRFIDNMLMGSGAFVKKISLSPFSTTDSAYEWKMPKKSSLGSMPFSSDFEDFDYSSWDAMCYLDPSKAVEEDDFVVGFWNPSEENCGVDTGKQSISYDLHTEQCIADKSIADCVEALLGCYLTSCGERAAQLFLCSLGLKVLPVIKRTDREKALCPTRENFNSQQKNLSVSCAAASVASSRSSVLKDSEYGCLKIPPRCMFDHPDADKTLNHLISGFENFEKKINYRFKNKAYLLQAFTHASYHYNTITDCYQRLEFLGDAILDYLITKHLYEDPRQHSPGVLTDLRSALVNNTIFASLAVKYDYHKYFKAVSPELFHVIDDFVQFQLEKNEMQGMDSELRRSEEDEEKEEDIEVPKAMGDIFESLAGAIYMDSGMSLETVWQVYYPMMRPLIEKFSANVPRSPVRELLEMEPETAKFSPAERTYDGKVRVTVEVVGKGKFKGVGRSYRIAKSAAARRALRSLKANQPQVPNS

SEQ ID NO: 24280 - protein, 1922 aa, Homo sapiens; identical to SEQ ID NO: 24279
  Payload ID: 4846
  Gene Symbol: DICER1
  Gene Name: dicer 1, ribonuclease type III
  Uniprot ID: Q9UPY3
  ENSP ID: ENSP00000376783

SEQ ID NO: 24281 - protein, 70 aa, Homo sapiens
  Payload ID: 4846
  Gene Symbol: DICER1
  Gene Name: dicer 1, ribonuclease type III
  ENSP ID: ENSP00000433060
MKSPALQPLSMAGLQLMTPASSPMGPFFGLPWQQEAIHDNIYTPRKYQVELLEAALDHNTIVCLNTGSGK

SEQ ID NO: 24282 - protein, 70 aa, Homo sapiens; identical to SEQ ID NO: 24281
  Payload ID: 4846
  Gene Symbol: DICER1
  Gene Name: dicer 1, ribonuclease type III
  ENSP ID: ENSP00000433926

SEQ ID NO: 24283 - protein, 1922 aa, Homo sapiens; identical to SEQ ID NO: 24279
  Payload ID: 4846
  Gene Symbol: DICER1
  Gene Name: dicer 1, ribonuclease type III
  Uniprot ID: Q9UPY3
  ENSP ID: ENSP00000435681

SEQ ID NO: 24284 - protein, 1922 aa, Homo sapiens; identical to SEQ ID NO: 24279
  Payload ID: 4846
  Gene Symbol: DICER1
  Gene Name: dicer 1, ribonuclease type III
  Uniprot ID: Q9UPY3
  ENSP ID: ENSP00000437256

SEQ ID NO: 24285 - protein, 1829 aa, Homo sapiens
  Payload ID: 4846
  Gene Symbol: DICER1
  Gene Name: dicer 1, ribonuclease type III
  Uniprot ID: Q9UPY3
  ENSP ID: ENSP00000444719
MKSPALQPLSMAGLQLMTPASSPMGPFFGLPWQQEAIHDNIYTPRKYQVELLEAALDHNTIVCLNTGSGKTFIAVLLTKELSYQIRGDFSRNGKRTVFLVNSANQVAQQVSAVRTHSDLKVGEYSNLEVNASWTKERWNQEFTKHQVLIMTCYVALNVLKNGYLSLSDINLLVFDECHLAILDHPYREIMKLCENCPSCPRILGLTASILNGKCDPEELEEKIQKLEKILKSNAETATDLVVLDRYTSQPCEIVVDCGPFTDRSGLYERLLMELEEALNFINDCNISVHSKERDSTLISKQILSDCRAVLVVLGPWCADKVAGMMVRELQKYIKHEQEELHRKFLLFTDTFLRKIHALCEEHFSPASLDLKFVTPKVIKLLEILRKYKPYERQQFESVEWYNNRNQDNYVSWSDSEDDDEDEEIEEKEKPETNFPSPFTNILCGIIFVERRYTAVVLNRLIKEAGKQDPELAYISSNFITGHGIGKNQPRNKQMEAEFRKQEEVLRKFRAHETNLLIATSIVEEGVDIPKCNLVVRFDLPTEYRSYVQSKGRARAPISNYIMLADTDKIKSFEEDLKTYKAIEKILRNKCSKSVDTGETDIDPVMDDDDVFPPYVLRPDDGGPRVTINTAIGHINRYCARLPSDPFTHLAPKCRTRELPDGTFYSTLYLPINSPLRASIVGPPMSCVRLAERVVALICCEKLHKIGELDDHLMPVGKETVKYEEELDLHDEEETSVPGRPGSTKRRQCYPKAIPECLRDSYPRPDQPCYLYVIGMVLTTPLPDELNFRRRKLYPPEDTTRCFGILTAKPIPQIPHFPVYTRSGEVTISIELKKSGFMLSLQMLELITRLHQYIFSHILRLEKPALEFKPTDADSAYCVLPLNVVNDSSTLDIDFKFMEDIEKSEARIGIPSTKYTKETPFVFKLEDYQDAVIIPRYRNFDQPHRFYVADVYTDLTPLSKFPSPEYETFAEYYKTKYNLDLTNLNQPLLDVDHTSSRLNLLTPRHLNQKGKALPLSSAEKRKAKWESLQNKQILVPELCAIHPIPASLWRKAVCLPSILYRLHCLLTAEELRAQTASDAGVGVRSLPADFRYPNLDFGWKKSIDSKSFISISNSSSAENDNYCKHSTIVPENAAHQGANRTSSLENHDQMSVNCRTLLSESPGKLHVEVSADLTAINGLSYNQNLANGSYDLANRDFCQGNQLNYYKQEIPVQPTTSYSIQNLYSYENQPQPSDECTLLSNKYLDGNANKSTSDGSPVMAVMPGTTDTIQVLKGRMDSEQSPSIGYSSRTLGPNPGLILQALTLSNASDGFNLERLEMLGDSFLKHAITTYLFCTYPDAHEGRLSYMRSKKVSNCNLYRLGKKKGLPSRMVVSIFDPPVNWLPPGYVVNQDKSNTDKWEKDEMTKDCMLANGKLDEDYEEEDEEEESLMWRAPKEEADYEDDFLEYDQEHIRFIDNMLMGSGAFVKKISLSPFSTTDSAYEWKMPKKSSLGSMPFSSDFEDFDYSSWDAMCYLDPSKAVEEDDFVVGFWNPSEENCGVDTGKQSISYDLHTEQCIADKSIADCVEALLGCYLTSCGERAAQLFLCSLGLKVLPVIKRTDREKALCPTRENFNSQQKNLSVSCAAASVASSRSSVLKDSEYGCLKIPPRCMFDHPDADKTLNHLISGFENFEKKINYRFKNKAYLLQAFTHASYHYNTITDCYQRLEFLGDAILDYLITKHLYEDPRQHSPGVLTDLRSALVNNTIFASLAVKYDYHKYFKAVSPELFHVIDDFVQFQLEKNEMQGMDSEKSFLQMYPVPLCENCLKWNQKLPNLARLRELTTGRSESLWK

SEQ ID NO: 24286 - protein, 820 aa, Homo sapiens
  Payload ID: 4846
  Gene Symbol: DICER1
  Gene Name: dicer 1, ribonuclease type III
  Uniprot ID: Q9UPY3
  ENSP ID: ENSP00000451041
MLAWESDHFLRILAENDNYCKHSTIVPENAAHQGANRTSSLENHDQMSVNCRTLLSESPGKLHVEVSADLTAINGLSYNQNLANGSYDLANRDFCQGNQLNYYKQEIPVQPTTSYSIQNLYSYENQPQPSDECTLLSNKYLDGNANKSTSDGSPVMAVMPGTTDTIQVLKGRMDSEQSPSIGYSSRTLGPNPGLILQALTLSNASDGFNLERLEMLGDSFLKHAITTYLFCTYPDAHEGRLSYMRSKKVSNCNLYRLGKKKGLPSRMVVSIFDPPVNWLPPGYVVNQDKSNTDKWEKDEMTKDCMLANGKLDEDYEEEDEEEESLMWRAPKEEADYEDDFLEYDQEHIRFIDNMLMGSGAFVKKISLSPFSTTDSAYEWKMPKKSSLGSMPFSSDFEDFDYSSWDAMCYLDPSKAVEEDDFVVGFWNPSEENCGVDTGKQSISYDLHTEQCIADKSIADCVEALLGCYLTSCGERAAQLFLCSLGLKVLPVIKRTDREKALCPTRENFNSQQKNLSVSCAAASVASSRSSVLKDSEYGCLKIPPRCMFDHPDADKTLNHLISGFENFEKKINYRFKNKAYLLQAFTHASYHYNTITDCYQRLEFLGDAILDYLITKHLYEDPRQHSPGVLTDLRSALVNNTIFASLAVKYDYHKYFKAVSPELFHVIDDFVQFQLEKNEMQGMDSELRRSEEDEEKEEDIEVPKAMGDIFESLAGAIYMDSGMSLETVWQVYYPMMRPLIEKFSANVPRSPVRELLEMEPETAKFSPAERTYDGKVRVTVEVVGKGKFKGVGRSYRIAKSAAARRALRSLKANQPQVPNS

SEQ ID NO: 24287 - protein, 394 aa, Homo sapiens
  Payload ID: 4846
  Gene Symbol: DICER1
  Gene Name: dicer 1, ribonuclease type III
  ENSP ID: ENSP00000452556
  MOD_RES (1)..(1): Any amino acid
XLKHAITTYLFCTYPDAHEGRLSYMRSKKVSNCNLYRLGKKKGLPSRMVVSIFDPPVNWLPPGYVVNQDKSNTDKWEKDEMTKDCMLANGKLDEDYEEEDEEEESLMWRAPKEEADYEDDFLEYDQEHIRFIDNMLMGSGAFVKKISLSPFSTTDSAYEWKMPKKSSLGSMPFSSDFEDFDYSSWDAMCYLDPSKAVEEDDFVVGFWNPSEENCGVDTGKQSISYDLHTEQCIADKSIADCVEALLGCYLTSCGERAAQLFLCSLGLKVLPVIKRTDREKALCPTRENFNSQQKNLSVSCAAASVASSRSSVLKDSEYGCLKIPPRCMFDHPDADKTLNHLISGFENFEKKINYRFKNKAYLLQAFTHASYHYNTITGKEPTTRLHFWENETLC

SEQ ID NO: 24288 - protein, 266 aa, Homo sapiens
  Payload ID: 4847
  Gene Symbol: DKK1
  Gene Name: dickkopf WNT signaling pathway inhibitor 1
  Uniprot ID: O94907
  ENSP ID: ENSP00000363081
MMALGAAGATRVFVAMVAAALGGHPLLGVSATLNSVLNSNAIKNLPPPLGGAAGHPGSAVSAAPGILYPGGNKYQTIDNYQPYPCAEDEECGTDEYCASPTRGGDAGVQICLACRKRRKRCMRHAMCCPGNYCKNGICVSSDQNHFRGEIEETITESFGNDHSTLDGYSRRTTLSSKMYHTKGQEGSVCLRSSDCASGLCCARHFWSKICKPVLKEGQVCTKHRRKGSHGLEIFQRCYCGEGLSCRIQKDHHQASNSSRLHTCQRH

SEQ ID NO: 24289 - protein, 259 aa, Homo sapiens
  Payload ID: 4848
  Gene Symbol: DKK2
  Gene Name: dickkopf WNT signaling pathway inhibitor 2
  Uniprot ID: Q9UBU2
  ENSP ID: ENSP00000285311
MAALMRSKDSSCCLLLLAAVLMVESSQIGSSRAKLNSIKSSLGGETPGQAANRSAGMYQGLAFGGSKKGKNLGQAYPCSSDKECEVGRYCHSPHQGSSACMVCRRKKKRCHRDGMCCPSTRCNNGICIPVTESILTPHIPALDGTRHRDRNHGHYSNHDLGWQNLGRPHTKMSHIKGHEGDPCLRSSDCIEGFCCARHFWTKICKPVLHQGEVCTKQRKKGSHGLEIFQRCDCAKGLSCKVWKDATYSSKARLHVCQKI

SEQ ID NO: 24290 - protein, 159 aa, Homo sapiens
  Payload ID: 4848
  Gene Symbol: DKK2
  Gene Name: dickkopf WNT signaling pathway inhibitor 2
  ENSP ID: ENSP00000421255
MVCRRKKKRCHRDGMCCPSTRCNNGICIPVTESILTPHIPALDGTRHRDRNHGHYSNHDLGWQNLGRPHTKMSHIKGHEGDPCLRSSDCIEGFCCARHFWTKICKPVLHQGEVCTKQRKKGSHGLEIFQRCDCAKGLSCKVWKDATYSSKARLHVCQKI

SEQ ID NO: 24291 - protein, 213 aa, Homo sapiens
  Payload ID: 4848
  Gene Symbol: DKK2
  Gene Name: dickkopf WNT signaling pathway inhibitor 2
  ENSP ID: ENSP00000423797
MTLRIDYCQGLLVGVSSSGLNIIQIQCQAYPCSSDKECEVGRYCHSPHQGSSACMVCRRKKKRCHRDGMCCPSTRCNNGICIPVTESILTPHIPALDGTRHRDRNHGHYSNHDLGWQNLGRPHTKMSHIKGHEGDPCLRSSDCIEGFCCARHFWTKICKPVLHQGEVCTKQRKKGSHGLEIFQRCDCAKGLSCKVWKDATYSSKARLHVCQKI

SEQ ID NO: 24292 - protein, 350 aa, Homo sapiens
  Payload ID: 4849
  Gene Symbol: DKK3
  Gene Name: dickkopf WNT signaling pathway inhibitor 3
  Uniprot ID: Q9UBP4
  ENSP ID: ENSP00000314910
MQRLGATLLCLLLAAAVPTAPAPAPTATSAPVKPGPALSYPQEEATLNEMFREVEELMEDTQHKLRSAVEEMEAEEAAAKASSEVNLANLPPSYHNETNTDTKVGNNTIHVHREIHKITNNQTGQMVFSETVITSVGDEEGRRSHECIIDEDCGPSMYCQFASFQYTCQPCRGQRMLCTRDSECCGDQLCVWGHCTKMATRGSNGTICDNQRDCQPGLCCAFQRGLLFPVCTPLPVEGELCHDPASRLLDLITWELEPDGALDRCPCASGLLCQPHSHSLVYVCKPTFVGSRDQDGEILLPREVPDEYEVGSFMEEVRQELEDLERSLTEEMALREPAAAAAALLGGEEI

SEQ ID NO: 24293 - protein, 350 aa, Homo sapiens; identical to SEQ ID NO: 24292
  Payload ID: 4849
  Gene Symbol: DKK3
  Gene Name: dickkopf WNT signaling pathway inhibitor 3
  Uniprot ID: Q9UBP4
  ENSP ID: ENSP00000379762

SEQ ID NO: 24294 - protein, 132 aa, Homo sapiens
  Payload ID: 4849
  Gene Symbol: DKK3
  Gene Name: dickkopf WNT signaling pathway inhibitor 3
  ENSP ID: ENSP00000431604
MQRLGATLLCLLLAAAVPTAPAPAPTATSAPVKPGPALSYPQEEATLNEMFREVEELMEDTQHKLRSAVEEMEAEEAAAKASSEVNLANLPPSYHNETNTDTKVGNNTIHVHREIHKECIIDEDCGPSMYCQ

SEQ ID NO: 24295 - protein, 364 aa, Homo sapiens
  Payload ID: 4849
  Gene Symbol: DKK3
  Gene Name: dickkopf WNT signaling pathway inhibitor 3
  ENSP ID: ENSP00000433112
MQRLGATLLCLLLAAAVPTAPAPAPTATSAPVKPGPALSYPQEEATLNEMFREVEELMEDTQHKLRSAVEEMEAEEAAAKASSEVNLANLPPSYHNETNTDTKVGNNTIHVHREIHKITNNQTGQMVFSETVITSVGDEEGRRSHECIIDEDCGPSMYCQFASFQYTCQPCRGQRMLCTRDSECCGDQLCVWGHCTKMATRGSNGTICDNQRDCQPGLCCAFQRGLLFPVCTPLPVEGELCHDPASRLLDLITWELEPDGALDRCPCASGLLCQPHRLPRLEPGFVPSLPSHSLVYVCKPTFVGSRDQDGEILLPREVPDEYEVGSFMEEVRQELEDLERSLTEEMALREPAAAAAALLGGEEI

SEQ ID NO: 24296 - protein, 234 aa, Homo sapiens
  Payload ID: 4849
  Gene Symbol: DKK3
  Gene Name: dickkopf WNT signaling pathway inhibitor 3
  ENSP ID: ENSP00000435269
MQRLGATLLCLLLAAAVPTAPAPAPTATSAPVKPGPALSYPQEEATLNEMFREVEELMEDTQHKLRSAVEEMEAEEAAAKASSEVNLANLPPSYHNETNTDTKVGNNTIHVHREIHKITNNQTGQMVFSETVITSVGDEEGRRSHECIIDEDCGPSMYCQFASFQYTCQPCRGQRMLCTRDSECCGDQLCVWGHCTKMATRGSNGTICDNQRDCQPGLCCAFQRGLLFPVCTPL

SEQ ID NO: 24297 - protein, 183 aa, Homo sapiens
  Payload ID: 4849
  Gene Symbol: DKK3
  Gene Name: dickkopf WNT signaling pathway inhibitor 3
  ENSP ID: ENSP00000436645
MQRLGATLLCLLLAAAVPTAPAPAPTATSAPVKPGPALSYPQEEATLNEMFREVEELMEDTQHKLRSAVEEMEAEEAAAKASSEVNLANLPPSYHNETNTDTKVGNNTIHVHREIHKECIIDEDCGPSMYCQFASFQYTCQPCRGQRMLCTRDSECCGDQLCVWGHCTKMATRGSNGTICDNQ

SEQ ID NO: 24298 - protein, 224 aa, Homo sapiens
  Payload ID: 4850
  Gene Symbol: DKK4
  Gene Name: dickkopf WNT signaling pathway inhibitor 4
  Uniprot ID: Q9UBT3
  ENSP ID: ENSP00000220812
MVAAVLLGLSWLCSPLGALVLDFNNIRSSADLHGARKGSQCLSDTDCNTRKFCLQPRDEKPFCATCRGLRRRCQRDAMCCPGTLCVNDVCTTMEDATPILERQLDEQDGTHAEGTTGHPVQENQPKRKPSIKKSQGRKGQEGESCLRTFDCGPGLCCARHFWTKICKPVLLEGQVCSRRGHKDTAQAPEIFQRCDCGPGLLCRSQLTSNRQHARLRVCQKIEKL

SEQ ID NO: 24299 - protein, 242 aa, Homo sapiens
  Payload ID: 4851
  Gene Symbol: DKKL1
  Gene Name: dickkopf-like 1
  Uniprot ID: Q9UK85
  ENSP ID: ENSP00000221498
MGEASPPAPARRHLLVLLLLLSTLVIPSAAAPIHDADAQESSLGLTGLQSLLQGFSRLFLKGNLLRGIDSLFSAPMDFRGLPGNYHKEENQEHQLGNNTLSSHLQIDKMTDNKTGEVLISENVVASIQPAEGSFEGDLKVPRMEEKEALVPIQKATDSFHTELHPRVAFWIIKLPRRRSHQDALEGGHWLSEKRHRLQAIRDGLRKGTHKDVLEEGTESSSHSRLSPRKTHLLYILRPSRQL

SEQ ID NO: 24300 - protein, 100 aa, Homo sapiens
  Payload ID: 4851
  Gene Symbol: DKKL1
  Gene Name: dickkopf-like 1
  ENSP ID: ENSP00000469865
MEEKEALVPIQKATDSFHTELHPRVAFWIIKLPRRRSHQDALEGGHWLSEKRHRLQAIRDGLRKGTHKDVLEEGTESSSHSRLSPRKTHLLYILRPSRQL

SEQ ID NO: 24301 - protein, 125 aa, Homo sapiens
  Payload ID: 4851
  Gene Symbol: DKKL1
  Gene Name: dickkopf-like 1
  ENSP ID: ENSP00000470676
MDFRGLPGNYHKEENQEHQLGNNTLSSHLQIDKMTDNKTGEVLISENVVASIQPAEGSFEGDLKVPRMEEKEALVPIQKATDSFHTELHPRVAFWIIKLPRRRSHQDALEGGHWLSEKRHRLQAI

SEQ ID NO: 24302 - protein, 137 aa, Homo sapiens
  Payload ID: 4851
  Gene Symbol: DKKL1
  Gene Name: dickkopf-like 1
  ENSP ID: ENSP00000471812
  MOD_RES (1)..(1): Any amino acid
XAAAPIHDADAQESSLGLTGLQSLLQGFSRLFLKVPRMEEKEALVPIQKATDSFHTELHPRVAFWIIKLPRRRSHQDALEGGHWLSEKRHRLQAIRDGLRKGTHKDVLEEGTESSSHSRLSPRKTHLLYILRPSRQL

SEQ ID NO: 24303 - protein, 199 aa, Homo sapiens
  Payload ID: 4851
  Gene Symbol: DKKL1
  Gene Name: dickkopf-like 1
  ENSP ID: ENSP00000472056
MGEASPPAPARRHLLVLLLLLSTLVIPSAAAPIHDADAQESSLGLTGLQSLLQGFSRLFLKGNLLRGIDSLFSAPMDFRGLPGNYHKEENQEHQLGNNTLSSHLQIDKVPRMEEKEALVPIQKATDSFHTELHPRVAFWIIKLPRRRSHQDALEGGHWLSEKRHRLQAIRDGLRKGTHKDVLEEGTESSSHSRLSPRKT

SEQ ID NO: 24304 - protein, 145 aa, Homo sapiens
  Payload ID: 4851
  Gene Symbol: DKKL1
  Gene Name: dickkopf-like 1
  ENSP ID: ENSP00000472866
MDFRGLPGNYHKEENQEHQLGNNTLSSHLQIDKMTDNKTGEVLISENVVASIQPAEGSFEGDLKVPRMEEKEALVPIQKATDSFHTELHPRVAFWIIKLPRRRSHQDALEGGHWLSEKRHRLQAIRDGLRKGTHKDVLEEGTESS

SEQ ID NO: 24305 - protein, 377 aa, Homo sapiens
  Payload ID: 4852
  Gene Symbol: DMBX1
  Gene Name: diencephalon/mesencephalon homeobox 1
  Uniprot ID: Q8NFW5
  ENSP ID: ENSP00000353132
MQHYGVNGYSLHAMNSLSAMYNLHQQAAQQAQHAPDYRPSVHALTLAERLADIILEARYGSQHRKQRRSRTAFTAQQLEALEKTFQKTHYPDVVMRERLAMCTNLPEARVQVWFKNRRAKFRKKQRSLQKEQLQKQKEAEGSHGEGKAEAPTPDTQLDTEQPPRLPGSDPPAELHLSLSEQSASESAPEDQPDREEDPRAGAEDPKAEKSPGADSKGLGCKRGSPKADSPGSLTITPVAPGGGLLGPSHSYSSSPLSLFRLQEQFRQHMAATNNLVHYSSFEVGGPAPAAAAAAAAVPYLGVNMAPLGSLHCQSYYQSLSAAAAAHQGVWGSPLLPAPPAGLAPASATLNSKTTSIENLRLRAKQHAASLGLDTLPN

SEQ ID NO: 24306 - protein, 382 aa, Homo sapiens
  Payload ID: 4852
  Gene Symbol: DMBX1
  Gene Name: diencephalon/mesencephalon homeobox 1
  Uniprot ID: Q8NFW5
  ENSP ID: ENSP00000361024
MQHYGVNGYSLHAMNSLSAMYNLHQQAAQQAQHAPDYRPSVHALTLAERLAGCTFQDIILEARYGSQHRKQRRSRTAFTAQQLEALEKTFQKTHYPDVVMRERLAMCTNLPEARVQVWFKNRRAKFRKKQRSLQKEQLQKQKEAEGSHGEGKAEAPTPDTQLDTEQPPRLPGSDPPAELHLSLSEQSASESAPEDQPDREEDPRAGAEDPKAEKSPGADSKGLGCKRGSPKADSPGSLTITPVAPGGGLLGPSHSYSSSPLSLFRLQEQFRQHMAATNNLVHYSSFEVGGPAPAAAAAAAAVPYLGVNMAPLGSLHCQSYYQSLSAAAAAHQGVWGSPLLPAPPAGLAPASATLNSKTTSIENLRLRAKQHAASLGLDTLPN

SEQ ID NO: 24307 - protein, 512 aa, Homo sapiens
  Payload ID: 4853
  Gene Symbol: DEF8
  Gene Name: differentially expressed in FDCP 8 homolog (mouse)
  Uniprot ID: Q6ZN54
  ENSP ID: ENSP00000268676
MAILSLRAPGPWQAMQVWADRTLLTPHTGVTSQVLGVAAAVMTPLPGGHAAGRTREARWDAMEYDEKLARFRQAHLNPFNKQSGPRQHEQGPGEEVPDVTPEEALPELPPGEPEFRCPERVMDLGLSEDHFSRPVGLFLASDVQQLRQAIEECKQVILELPEQSEKQKDAVVRLIHLRLKLQELKDPNEDEPNIRVLLEHRFYKEKSKSVKQTCDKCNTIIWGLIQTWYTCTGCYYRCHSKCLNLISKPCVSSKVSHQAEYELNICPETGLDSQDYRCAECRAPISLRGVPSEARQCDYTGQYYCSHCHWNDLAVIPARVVHNWDFEPRKVSRCSMRYLALMVSRPVLRLREINPLLFSYVEELVEIRKLRQDILLMKPYFITCREAMEARLLLQLQDRQHFVENDEMYSVQDLLDVHAGRLGCSLTEIHTLFAKHIKLDCERCQAKGFVCELCREGDVLFPFDSHTSVCADCSAVFHRDCYYDNSTTCPKCARLSLRKQSLFQEPGPDVEA

SEQ ID NO: 24308 - protein, 197 aa, Homo sapiens
  Payload ID: 4853
  Gene Symbol: DEF8
  Gene Name: differentially expressed in FDCP 8 homolog (mouse)
  Uniprot ID: Q6ZN54
  ENSP ID: ENSP00000412784
MEYDEKLARFRQAHLNPFNKQSGPRQHEQGPGEEVPDVTPEEALPELPPGEPEFRCPERVMDLGLSEDHFSRPVGLFLASDVQQLRQAIEECKQVILELPEQSEKQKDAVVRLIHLRLKLQELKDPNEDEPNIRVLLEHRFYKEKSKSVKQTCDKCNTIIWGLIQTWYTCTGGPRPRRGVRNERDQSSCLRWAHIQM

SEQ ID NO: 24309 - protein, 134 aa, Homo sapiens
  Payload ID: 4853
  Gene Symbol: DEF8
  Gene Name: differentially expressed in FDCP 8 homolog (mouse)
  ENSP ID: ENSP00000454478
MEYDEKLARFRQAHLNPFNKQSGPRQHEQGPGEEVPDVTPEEALPELPPGEPEFRCPERVMDLGLSEDHFSRPVGLFLASDVQQLRQAIEECKQVILELPEQSEKQKDAVVRLIHLRLKLQELKDPNEDEPNIR

SEQ ID NO: 24310 - protein, 177 aa, Homo sapiens
  Payload ID: 4853
  Gene Symbol: DEF8
  Gene Name: differentially expressed in FDCP 8 homolog (mouse)
  ENSP ID: ENSP00000454534
MRGGGQAHLNPFNKQSGPRQHEQGPGEEVPDVTPEEALPELPPGEPEFRCPERVMDLGLSEDHFSRPVGLFLASDVQQLRQAIEECKQVILELPEQSEKQKDAVVRLIHLRLKLQELKDPNEDEPNIRVLLEHRFYKEKSKSVKQTCDKCNTIIWGLIQTWYTCTGCYYRCHSKCLN

SEQ ID NO: 24311 - protein, 66 aa, Homo sapiens
  Payload ID: 4853
  Gene Symbol: DEF8
  Gene Name: differentially expressed in FDCP 8 homolog (mouse)
  ENSP ID: ENSP00000454930
MEYDEKLARFRQAHLNPFNKQSGPRQHEQGPGEEVPDVTPEEALPELPPGEPEFRCPERVMDLGLS

SEQ ID NO: 24312 - protein, 107 aa, Homo sapiens
  Payload ID: 4853
  Gene Symbol: DEF8
  Gene Name: differentially expressed in FDCP 8 homolog (mouse)
  ENSP ID: ENSP00000455654
MEYDEKLARFRQAHLNPFNKQSGPRQHEQGPGEEVPDVTPEEALPELPPGEPEFRCPERVMDLGLSEDHFSRPVDGPLTAPAPNLGRVCSWPLTSSSCGRRSRSASR

SEQ ID NO: 24313 - protein, 127 aa, Homo sapiens
  Payload ID: 4853
  Gene Symbol: DEF8
  Gene Name: differentially expressed in FDCP 8 homolog (mouse)
  ENSP ID: ENSP00000455783
MEYDEKLARFRQAHLNPFNKQSGPRQHEQGPGEEVPDVTPEEALPELPPGEPEFRCPERVMDLGLSEDHFSRPVQLRQAIEECKQVILELPEQSEKQKDAVVRLIHLRLKLQELKDPNEDEPNIRVL

SEQ ID NO: 24314 - protein, 125 aa, Homo sapiens
  Payload ID: 4853
  Gene Symbol: DEF8
  Gene Name: differentially expressed in FDCP 8 homolog (mouse)
  ENSP ID: ENSP00000455987
MDLGLSEDHFSRPVGLFLASDVQQLRQAIEECKQVILELPEQSEKQKDAVVRLIHLRLKLQELKDPNEDEPNIRVLLEHRFYKEKSKSVKQTCDKCNTIIWGLIQTWYTCTGCYYRCHSKCLNLI

SEQ ID NO: 24315 - protein, 391 aa, Homo sapiens
  Payload ID: 4853
  Gene Symbol: DEF8
  Gene Name: differentially expressed in FDCP 8 homolog (mouse)
  Uniprot ID: Q6ZN54
  ENSP ID: ENSP00000456095
MDLGLSEDHFSRPVGLFLASDVQQLRQAIEECKQVILELPEQSEKQKDAVVRLIHLRLKLQELKDPNEDEPNIRVLLEHRFYKEKSKSVKQTCDKCNTIIWGLIQTWYTCTGCYYRCHSKCLNLISKPCVSSKVSHQAEYELNICPETGLDSQDYRCAECRAPISLRGVPSEARQCDYTGQYYCSHCHWNDLAVIPARVVHNWDFEPRKVSRCSMRYLALMVSRPVLRLREINPLLFSYVEELVEIRKLRQDILLMKPYFITCREAMEARLLLQLQDRQHFVENDEMYSVQDLLDVHAGRLGCSLTEIHTLFAKHIKLDCERCQAKGFVCELCREGDVLFPFDSHTSVCADCSAVFHRDCYYDNSTTCPKCARLSLRKQSLFQEPGPDVEA

SEQ ID NO: 24316 - protein, 106 aa, Homo sapiens
  Payload ID: 4853
  Gene Symbol: DEF8
  Gene Name: differentially expressed in FDCP 8 homolog (mouse)
  ENSP ID: ENSP00000456157
MEYDEKLARFRQAHLNPFNKQSGPRQHEQGPGEEVPDVTPEEALPELPPGEPEFRCPERVMDLGLSEDHFSRPVGLFLASDVQQLRQAIEECKQVILELPEQSEKQ

SEQ ID NO: 24317 - protein, 451 aa, Homo sapiens
  Payload ID: 4853
  Gene Symbol: DEF8
  Gene Name: differentially expressed in FDCP 8 homolog (mouse)
  Uniprot ID: Q6ZN54
  ENSP ID: ENSP00000456501
MEYDEKLARFRQAHLNPFNKQSGPRQHEQGPGEEVPDVTPEEALPELPPGEPEFRCPERVMDLGLSEDHFSRPVGLFLASDVQQLRQAIEECKQVILELPEQSEKQKDAVVRLIHLRLKLQELKDPNEDEPNIRVLLEHRFYKEKSKSVKQTCDKCNTIIWGLIQTWYTCTGCYYRCHSKCLNLISKPCVSSKVSHQAEYELNICPETGLDSQDYRCAECRAPISLRGVPSEARQCDYTGQYYCSHCHWNDLAVIPARVVHNWDFEPRKVSRCSMRYLALMVSRPVLRLREINPLLFSYVEELVEIRKLRQDILLMKPYFITCREAMEARLLLQLQDRQHFVENDEMYSVQDLLDVHAGRLGCSLTEIHTLFAKHIKLDCERCQAKGFVCELCREGDVLFPFDSHTSVCADCSAVFHRDCYYDNSTTCPKCARLSLRKQSLFQEPGPDVEA

SEQ ID NO: 24318 - protein, 176 aa, Homo sapiens
  Payload ID: 4853
  Gene Symbol: DEF8
  Gene Name: differentially expressed in FDCP 8 homolog (mouse)
  ENSP ID: ENSP00000456706
MEYDEKLARFRQAHLNPFNKQSGPRQHEQGPGEEVPDVTPEEALPELPPGEPEFRCPERVMDLGLSEDHFSRPVGLFLASDVQQLRQAIEECKQVILELPEQSEKQKDAVVRLIHLRLKLQELKRCQAKGFVCELCREGDVLFPFDSHTSVCADCSAVFHRDCYYDNSTTCPKCAR

SEQ ID NO: 24319 - protein, 441 aa, Homo sapiens
  Payload ID: 4853
  Gene Symbol: DEF8
  Gene Name: differentially expressed in FDCP 8 homolog (mouse)
  Uniprot ID: Q6ZN54
  ENSP ID: ENSP00000456799
MEYDEKLARFRQAHLNPFNKQSGPRQHEQGPGEEVPDVTPEEALPELPPGEPEFRCPERVMDLGLSEDHFSRPVLRQAIEECKQVILELPEQSEKQKDAVVRLIHLRLKLQELKDPNEDEPNIRVLLEHRFYKEKSKSVKQTCDKCNTIIWGLIQTWYTCTGCYYRCHSKCLNLISKPCVSSKVSHQAEYELNICPETGLDSQDYRCAECRAPISLRGVPSEARQCDYTGQYYCSHCHWNDLAVIPARVVHNWDFEPRKVSRCSMRYLALMVSRPVLRLREINPLLFSYVEELVEIRKLRQDILLMKPYFITCREAMEARLLLQLQDRQHFVENDEMYSVQDLLDVHAGRLGCSLTEIHTLFAKHIKLDCERCQAKGFVCELCREGDVLFPFDSHTSVCADCSAVFHRDCYYDNSTTCPKCARLSLRKQSLFQEPGPDVEA

SEQ ID NO: 24320 - protein, 136 aa, Homo sapiens
  Payload ID: 4853
  Gene Symbol: DEF8
  Gene Name: differentially expressed in FDCP 8 homolog (mouse)
  ENSP ID: ENSP00000456954
MAILSLRAPGPWQAMQAHLNPFNKQSGPRQHEQGPGEEVPDVTPEEALPELPPGEPEFRCPERVMDLGLSEDHFSRPVGLFLASDVQQLRQAIEECKQVILELPEQSEKQKDAVVRLIHLRLKLQELKDPNEDEPN

SEQ ID NO: 24321 - protein, 150 aa, Homo sapiens
  Payload ID: 4853
  Gene Symbol: DEF8
  Gene Name: differentially expressed in FDCP 8 homolog (mouse)
  ENSP ID: ENSP00000457072
MEYDEKLARFRQAHLNPFNKQSGPRQHEQGPGEEVPDVTPEEALPELPPGEPEFRCPERVMDLGLSEDHFSRPVGLFLASDVQQLRQAIEECKQVILELPEQSEKQKDAVVRLIHLRLKLQELKDPNEDEPNIRVLLEHRFYKEKSKSVK

SEQ ID NO: 24322 - protein, 186 aa, Homo sapiens
  Payload ID: 4853
  Gene Symbol: DEF8
  Gene Name: differentially expressed in FDCP 8 homolog (mouse)
  ENSP ID: ENSP00000457309
MRGGGQVLGVAAAVMTPLPGGHAAGRTREARWDAMEYDEKLARFRQAHLNPFNKQSGPRQHEQGPGEEVPDVTPEEALPELPPGEPEFRCPERVMDLGLSEDHFSRPVGLFLASDVQQLRQAIEECKQVILELPEQSEKQKDAVVRLIHLRLKLQELKDPNEDEPNIRVLLEHRFYKEKSKSVKQT

SEQ ID NO: 24323 - protein, 434 aa, Homo sapiens
  Payload ID: 4853
  Gene Symbol: DEF8
  Gene Name: differentially expressed in FDCP 8 homolog (mouse)
  Uniprot ID: Q6ZN54
  ENSP ID: ENSP00000457627
MEYDEKLARFRQAHLNPFNKQSGPRQHEQGPGEEVPDVTPEEALPELPPGEPEFRCPERVMDLGLSEDHFSRPVGLFLASDVQQLRQAIEECKQVILELPEQSEKQKDAVVRLIHLRLKLQELKDPNEDEPNIRVLLEHRFYKEKSKSVKQTCDKCNTIIWGLIQTWYTCTGCYYRCHSKCLNLISKPCVSSKVSHQAEYELNICPETGLDSQDYRCAECRAPISLRGVPSEARQCDYTGQYYCSHCHWNDLAVIPARVVHNWDFEPRKVSRCSMRYLALMVSRPVLRLREINPLLFSYVEELVEIRKLRQDILLMKPYFITCREAMEARLLLQDLLDVHAGRLGCSLTEIHTLFAKHIKLDCERCQAKGFVCELCREGDVLFPFDSHTSVCADCSAVFHRDCYYDNSTTCPKCARLSLRKQSLFQEPGPDVEA

SEQ ID NO: 24324 - protein, 451 aa, Homo sapiens; identical to SEQ ID NO: 24317
  Payload ID: 4853
  Gene Symbol: DEF8
  Gene Name: differentially expressed in FDCP 8 homolog (mouse)
  Uniprot ID: Q6ZN54
  ENSP ID: ENSP00000458019

SEQ ID NO: 24325 - protein, 197 aa, Homo sapiens; identical to SEQ ID NO: 24308
  Payload ID: 4853
  Gene Symbol: DEF8
  Gene Name: differentially expressed in FDCP 8 homolog (mouse)
  Uniprot ID: Q6ZN54
  ENSP ID: ENSP00000480073

SEQ ID NO: 24326 - protein, 451 aa, Homo sapiens; identical to SEQ ID NO: 24317
  Payload ID: 4853
  Gene Symbol: DEF8
  Gene Name: differentially expressed in FDCP 8 homolog (mouse)
  Uniprot ID: Q6ZN54
  ENSP ID: ENSP00000482524

SEQ ID NO: 24327 - protein, 517 aa, Homo sapiens
  Payload ID: 4854
  Gene Symbol: DPCR1
  Gene Name: diffuse panbronchiolitis critical region 1
  Uniprot ID: Q3MIW9
  ENSP ID: ENSP00000305948
MAQPVHSLCSAFGLQCCLLFLLASWGAGATTFQEYQKTGELSTSDHIFPLTPGLVYSIPFDHIVLHSGQRPPELPKSTEIHEQKRHCNTTRHSKPTDKPTGNSKTIDHKSSTDNHEAPPTSEENSSNQGKDPMIRNQRSVDPADSTTTHKESAGKKHITPAPKSKINCRKSTTGKSTVTRKSDKTGRPLEKSMSTLDKTSTSSHKTTTSFHNSGNSQTKQKSTSFPEKITAASKTTYKTTGTPEESEKTEDSRTTVASDKLLTKTTKNIQETISANELTQSLAEPTEHGGRTANENNTPSPAEPTENRERTANENKKTICTKGKNTPVPEKPTENLGNTTLTTETIKAPVKSTENPEKTAAVTKTIKPSVKVTGDKSLTTTSSHLNKTEVTHQVPTGSFTLITSRTKLSSITSEATGNESHPYLNKDGSQKGIHAGQMGENDSFPAWAIVIVVLVAVILLLVFLGLIFLVSYMMRTRRTLTQNTQYNDAEDEGGPNSYPVYLMEQQNLGMGQIPSPR

SEQ ID NO: 24328 - protein, 507 aa, Homo sapiens
  Payload ID: 4854
  Gene Symbol: DPCR1
  Gene Name: diffuse panbronchiolitis critical region 1
  ENSP ID: ENSP00000392132
PLANEKTTLSPAEPTENGERTPFTNEKTTPSSAEPTEHGERTPLANEITTPSRAEPTEHGERIANEKATPSPAKPTEHGETTVNEDTTPSSAEPTENGERTPLANENTTTSPTESTEHGERTANEKTTPSPAEPTEHGERTPSANEKTIPSPAKPTEHEEMTPSANENTTPSPVKPTEHGEKTTLANEKITLSPEGPTEHGAKTTSANEKITPSLAKPTEHGERTTSPNDKITSSAAESTEHRDRATSANVITPAPAEPIKHAKRTTLAHEKMTQVTEKSTEHPEKTTSTTEKTTRTPEKPTLYSEKTICTKGKNTPVPEKPTENLGNTTLTTETIKAPVKSTENPEKTAAVTKTIKPSVKVTGDKSLTTTSSHLNKTEVTHQVPTGSFTLITSRTKLSSITSEATGNKSHPYLNKDGSQKGIHAGQMGENDSFPAWAIVIVVLVAVILLLVFLGLIFLVSYMMRTRRTLTQNTQYNDAEDEGGPNSYPVYLMEQQNLGMGQIPSPR

SEQ ID NO: 24329 - protein, 507 aa, Homo sapiens
  Payload ID: 4854
  Gene Symbol: DPCR1
  Gene Name: diffuse panbronchiolitis critical region 1
  ENSP ID: ENSP00000402773
PLANEKTTLSPAEPTENGERTPFTNEKTTPSSAEPTEHGERTPLANEITTPSRAEPTEHGERIANEKATPSPAKPTEHGETTVNEDTTPSSAEPTENGERTPLANENTTTSPTESTEHGERTANEKTTPSPAEPTEHGERTPSANEKTIPSPAKPTEHEEMTPSANENTTPSPVKPTEHGEKTTLANEKITLSPEGPTEHGAKTTSANEKITPSLAKPTEHGERTTSPNDKITSSAAESTEHRDRATSANVITPAPAEPIKHAKRTTLAHEKMTQVTEKSTEHPEKTTSTTEKTTRTPEKPTLYSEKTICTKGKNTPVPEKPTENLGNTTLTTETIKAPVKSTENPEKTAAVTKTIKPSVKVTGDKSLTTTSSHLNKTEVTHQVPTGSFTLITSRTKLSSITSEATGNESHPYLNKDGSQKGIHAGQMGENDSFPAWAIVIVVLVAVILLLVFLGLIFLVSYMMRTRRTLTQNTQYNDAEDEGGPNSYPVYLMEQQNLGMGQIPSPR

SEQ ID NO: 24330 - protein, 507 aa, Homo sapiens; identical to SEQ ID NO: 24329
  Payload ID: 4854
  Gene Symbol: DPCR1
  Gene Name: diffuse panbronchiolitis critical region 1
  ENSP ID: ENSP00000409587

SEQ ID NO: 24331 - protein, 1393 aa, Homo sapiens
  Payload ID: 4854
  Gene Symbol: DPCR1
  Gene Name: diffuse panbronchiolitis critical region 1
  ENSP ID: ENSP00000417182
MAQPVHSLCSAFGLQCCLLFLLASWGAGATTFQEYQKTGELSTSDHIFPLTPGLVYSIPFDHIVLHSGQRPPELPKSTEIHEQKRHCNTTRHSKPTDKPTGNSKTIDHKSSTDNHEAPPTSEENSSNQGKDPMIRNQRSVDPADSTTTHKESAGKKHITPAPKSKINCRKSTTGKSTVTRKSDKTGRPLEKSMSTLDKTSTSSHKTTTSFHNSGNSQTKQKSTSFPEKITAASKTTYKTTGTPEESEKTEDSRTTVASDKLLTKTTKNIQETISANELTQSLAEPTEHGGRTANENNTPSPAEPTENRERTANENTTLSPAEPIENRERTANENTAPFPAGPTENREMTANENTTLFPAEPTEHGERTANENTTPSPAEPTEHGERTANENTTPSPAEPTEHGERTPFANDKTTSSSAESTEHGERTPLANENTTPSPAEPTENRERTANENTTPSPAGPTENRETTANEKTTLSPVEPTENRETTANEKTTPSPAEPTENGQRTPFANEKTTSSSAEPTEHGERTPLANENTTPSPAEPTENRERTANEKTTPSPAEPTENGDRTPLANEKTTPSLAEPTENGQRTPFANEKTTSSSAEPTEHEERTPLANENTTPSPAEPTENRERTANENTTPSPAGPTENREMTANEKTTLFPAEPTENRERTANEKTTSSPAEPTENGQRTPFANEKTTSSSAEPTEHGERTPLANENTTLSPAEPTENRERTANEKTTPFPAEPTENRERTANENTTPSPAQPTENGDRTPLANEKTTPSLAEPTENGKRTPFANEKTTSSSAEPTEHAERTPLANENTTSSPAEPTENRERTANEKTTQFPAEPTENRESTANEKTTPFPAEPTENREWTANENTTLSPAEPTEHEEMTPLANEKTTLSPAEPTENGERTPFTNEKTTPSSAEPTEHGERTPLANEITTPSRAEPTEHGERIANEKATPSPAKPTEHGETTVNEDTTPSSAEPTENGERTPLANENTTTSPTESTEHGERTANEKTTPSPAEPTEHGERTPSANEKTIPSPAKPTEHEEMTPSANENTTPSPVKPTEHGEKTTLANEKITLSPEGPTEHGAKTTSANEKITPSLAKPTEHGERTTSPNDKITSSAAESTEHRDRATSANVITPAPAEPIKHAKRTTLAHEKMTQVTEKSTEHPEKTTSTTEKTTRTPEKPTLYSEKTICTKGKNTPVPEKPTENLGNTTLTTETIKAPVKSTENPEKTAAVTKTIKPSVKVTGDKSLTTTSSHLNKTEVTHQVPTGSFTLITSRTKLSSITSEATGNESHPYLNKDGSQKGIHAGQMGENDSFPAWAIVIVVLVAVILLLVFLGLIFLVSYMMRTRRTLTQNTQYNDAEDEGGPNSYPVYLMEQQNLGMGQIPSPR

SEQ ID NO: 24332 - protein, 517 aa, Homo sapiens; identical to SEQ ID NO: 24327
  Payload ID: 4854
  Gene Symbol: DPCR1
  Gene Name: diffuse panbronchiolitis critical region 1
  Uniprot ID: Q3MIW9
  ENSP ID: ENSP00000446847

SEQ ID NO: 24333 - protein, 889 aa, Homo sapiens
  Payload ID: 4854
  Gene Symbol: DPCR1
  Gene Name: diffuse panbronchiolitis critical region 1
  ENSP ID: ENSP00000446930
MAQPVHSLCSAFGLQCCLLFLLASWGAGATTFQEYQKTGELSTSDHIFPLTPGLVYSIPFDHIVLHSGQRPPELPKSTEIHEQKRHCNTTRHSKPTDKPTGNSKTIDHKSSTDNHEAPPTSEENSSNQGKDPMIRNQRSVDPADSTTTHKESAGKKHITPAPKSKINCRKSTTGKSTVTRKSDKTGRPLEKSMSTLDKTSTSSHKTTTSFHNSGNSQTKQKSTSFPEKITAASKTTYKTTGTPEESEKTEDSRTTVASDKLLTKTTKNIQETISANELTQSLAEPTEHGGRTANENNTPSPAEPTENRERTANENTTLSPAEPTENRERTANENTAPFPAGPTENREMTANENTTLFPAEPTEHGERTANENTTPSPAEPTEHGERTANENTTPSPAEPTEHGERTPFANDKTTSSSAESTEHGERTPLANENTTPSPAEPTENRERTANENTTPSPAGPTENRETTANEKTTLSPVEPTENRETTANEKTTPSPAEPTENGQRTPFANEKTTSSSAEPTEHGERTPLANENTTPSPAEPTENRERTANEKTTPSPAEPTENGDRTPLANEKTTPSLAEPTENGQRTPFANEKTTSSSAEPTEHEERTPLANENTTPSPAEPTENRERTANENTTPSPAGPTENREMTANEKTTLFPAEPTENRERTANEKTTSSPAEPTENGQRTPFANEKTTSSSAEPTEHGERTPLANENTTLSPAGPTENRERTANEKTTPFPAEPTENRERTANENTTPSPAQPTENGDRTPLANEKTTPSLAEPTENGKRTPFANEKTTSSSAEPTEHAERTPLANENTTSSPAEPTENRERTANEKTTQFPAEPTENRESTANEKTTPFPAEPTENREWTANENTTLSPAEPTEHEEMTPLA

SEQ ID NO: 24334 - protein, 517 aa, Homo sapiens; identical to SEQ ID NO: 24327
  Payload ID: 4854
  Gene Symbol: DPCR1
  Gene Name: diffuse panbronchiolitis critical region 1
  Uniprot ID: Q3MIW9
  ENSP ID: ENSP00000448383

SEQ ID NO: 24335 - protein, 517 aa, Homo sapiens
  Payload ID: 4854
  Gene Symbol: DPCR1
  Gene Name: diffuse panbronchiolitis critical region 1
  ENSP ID: ENSP00000480788
MAQPVHSLCSAFGLQCCLLFLLASWGAGATTFQEYQKTGELSTSDHIFPLTPGLVYSIPFDHIVLHSGQRPPELPKSTEIHEQKRHCNTTRHSKPTDKPTGNSKTIDHKSSTDNHEAPPTSEENSSNQGKDPMIRNQRSVDPADSTTTHKESAGKKHITPAPKSKINCRKSTTGKSTVTRKSDKTGRPLEKSMSTLDKTSTSSHKTTTSFHNSGNSQTKQKSTSFPEKITAASKTTYKTTGTPEESEKTEDSRTTVASDKLLTKTTKNIQETISANELTQSLAEPTEHGGRTANENNTPSPAEPTENRERTANENKKTICTKGKNTPVPEKPTENLGNTTLTTETIKAPVKSTENPEKTAAVTKTIKPSVKVTGDKSLTTTSSHLNKTEVTHQVPTGSFTLITSRTKLSSITSEATGNKSHPYLNKDGSQKGIHAGQMGENDSFPAWAIVIVVLVAVILLLVFLGLIFLVSYMMRTRRTLTQNTQYNDAEDEGGPNSYPVYLMEQQNLGMGQIPSPR

SEQ ID NO: 24336 - protein, 476 aa, Homo sapiens
  Payload ID: 4855
  Gene Symbol: DGCR14
  Gene Name: DiGeorge syndrome critical region gene 14
  Uniprot ID: Q96DF8
  ENSP ID: ENSP00000252137
METPGASASSLLLPAASRPPRKREAGEAGAATSKQRVLDEEEYIEGLQTVIQRDFFPDVEKLQAQKEYLEAEENGDLERMRQIAIKFGSALGKMSREPPPPYVTPATFETPEVHAGTGVVGNKPRPRGRGLEDGEAGEEEEKEPLPSLDVFLSRYTSEDNASFQEIMEVAKERSRARHAWLYQAEEEFEKRQKDNLELPSAEHQAIESSQASVETWKYKAKNSLMYYPEGVPDEEQLFKKPRQVVHKNTRFLRDPFSQALSRCQLQQAAALNAQHKQGKVGPDGKELIPQESPRVGGFGFVATPSPAPGVNESPMMTWGEVENTPLRVEGSETPYVDRTPGPAFKILEPGRRERLGLKMANEAAAKNRAKKQEALRRVTENLASLTPKGLSPAMSPALQRLVSRTASKYTDRALRASYTPSPARSTHLKTPASGLQTPTSTPAPGSATRTPLTQDPASITDNLLQLPARRKASDFF

SEQ ID NO: 24337 - protein, 293 aa, Homo sapiens
  Payload ID: 4855
  Gene Symbol: DGCR14
  Gene Name: DiGeorge syndrome critical region gene 14
  ENSP ID: ENSP00000388524
METPGASASSLLLPAASRPPRKREAGEAGAATSKQRVLDEEEYIEGLQTVIQRDFFPDVEKLQAQKEYLEAEENGDLERMRQIAIKFGSALGKMSREPPPPYVTPATFETPEVHAGTGVVGNKPRPRGRGLEDGEAGEEEEKEPLPSLDVFLSRYTSEDNASFQEIMEVAKERSRARHAWLYQAEEEFEKRQKDNLELPSAEHQAIESSQASVETWKYKAKNSLMYYPEGVPDEEQLFKKPRQVVHKNTRFLRDPFSQALSRCQLQQAAALNAQGPSLSFSKKAANPRAPALP

SEQ ID NO: 24338 - protein, 550 aa, Homo sapiens
  Payload ID: 4856
  Gene Symbol: DGCR2
  Gene Name: DiGeorge syndrome critical region gene 2
  Uniprot ID: P98153
  ENSP ID: ENSP00000263196
MVPKADSGAFLLLFLLVLTVTEPLRPELRCNPGQFACRSGTIQCIPLPWQCDGWATCEDESDEANCPEVTGEVRPHHGKEAVDPRQGRARGGDPSHFHAVNVAQPVRFSSFLGKCPTGWHHYEGTASCYRVYLSGENYWDAAQTCQRLNGSLATFSTDQELRFVLAQEWDQPERSFGWKDQRKLWVGYQYVITGRNRSLEGRWEVAFKGSSEVFLPPDPIFASAMSENDNVFCAQLQCFHFPTLRHHDLHSWHAESCYEKSSFLCKRSQTCVDIKDNVVDEGFYFTPKGDDPCLSCTCHGGEPEMCVAALCERPQGCQQYRKDPKECCKFMCLDPDGNSLFDSMASGMRLVVSCISSFLILSLLLFMVHRLRQRRRERIESLIGANLHHFNLGRRIPGFDYGPDGFGTGLTPLHLSDDGEGGTFHFHDPPPPYTAYKYPDIGQPDDPPPPYEASIHPDSVFYDPADDDAFEPVEVSLPAPGDGGSEGALLRRLEQPLPTAGASLADLEDSADSSSALLVPPDPAQSGSTPAAEALPGGGRHSRSSLNTVV

SEQ ID NO: 24339 - protein, 326 aa, Homo sapiens
  Payload ID: 4856
  Gene Symbol: DGCR2
  Gene Name: DiGeorge syndrome critical region gene 2
  ENSP ID: ENSP00000373914
MSENDNVFCAQLQCFHFPTLRHHDLHSWHAESCYEKSSFLCKRSQTCVDIKDNVVDEGFYFTPKGDDPCLSCTCHGGEPEMCVAALCERPQGCQQYRKDPKECCKFMCLDPDGNSLFDSMASGMRLVVSCISSFLILSLLLFMVHRLRQRRRERIESLIGANLHHFNLGRRIPGFDYGPDGFGTGLTPLHLSDDGEGGTFHFHDPPPPYTAYKYPDIGQPDDPPPPYEASIHPDSVFYDPADDDAFEPVEVSLPAPGDGGSEGALLRRLEQPLPTAGASLADLEDSADSSSALLVPPDPAQSGSTPAAEALPGGGRHSRSSLNTVV

SEQ ID NO: 24340 - protein, 509 aa, Homo sapiens
  Payload ID: 4856
  Gene Symbol: DGCR2
  Gene Name: DiGeorge syndrome critical region gene 2
  Uniprot ID: P98153
  ENSP ID: ENSP00000440062
MVPKADSGAFLLLFLLVLTVTEPLRPEVTGEVRPHHGKEAVDPRQGRARGGDPSHFHAVNVAQPVRFSSFLGKCPTGWHHYEGTASCYRVYLSGENYWDAAQTCQRLNGSLATFSTDQELRFVLAQEWDQPERSFGWKDQRKLWVGYQYVITGRNRSLEGRWEVAFKGSSEVFLPPDPIFASAMSENDNVFCAQLQCFHFPTLRHHDLHSWHAESCYEKSSFLCKRSQTCVDIKDNVVDEGFYFTPKGDDPCLSCTCHGGEPEMCVAALCERPQGCQQYRKDPKECCKFMCLDPDGNSLFDSMASGMRLVVSCISSFLILSLLLFMVHRLRQRRRERIESLIGANLHHFNLGRRIPGFDYGPDGFGTGLTPLHLSDDGEGGTFHFHDPPPPYTAYKYPDIGQPDDPPPPYEASIHPDSVFYDPADDDAFEPVEVSLPAPGDGGSEGALLRRLEQPLPTAGASLADLEDSADSSSALLVPPDPAQSGSTPAAEALPGGGRHSRSSLNTVV

SEQ ID NO: 24341 - protein, 550 aa, Homo sapiens [sequence omitted]

SEQ ID NO: 24342 - protein, 328 aa, Homo sapiens
  Payload ID: 4856
  Gene Symbol: DGCR2
  Gene Name: DiGeorge syndrome critical region gene 2
  ENSP ID: ENSP00000482494
MVPKADSGAFLLLFLLVLTVTEPLRPELRCNPGQFACRSGTIQCIPLPWQCDGWATCEDESDEANCPEVTGEVRPHHGKEAVDPRQGRARGGDPSHFHAVNVAQPVRFSSNLRKCPTGWHHYEGTASCYRVYLSGENYWDAAQTCQRLNGSLATFSTDQELRFVLAQEWDQPERSFGWKDQRKLWVGYQYVITGRNRSLEGRWEVAFKGSSEVFLPPDPIFASAMSENDNVFCAQLQCFHFPTLRHHDLHSWHAESCYEKSSFLCKRSQTCVDIKDNVVDEGFYFTPKGDDPCLSCTCHGGEPEMCVAALCERPQGCQHPLSCTARAT

SEQ ID NO: 24343 - protein, 220 aa, Homo sapiens; identical to SEQ ID NO: 991
  Payload ID: 4857
  Gene Symbol: DGCR6
  Gene Name: DiGeorge syndrome critical region gene 6
  Uniprot ID: Q14129
  ENSP ID: ENSP00000331681

SEQ ID NO: 24344 - protein, 162 aa, Homo sapiens
  Payload ID: 4857
  Gene Symbol: DGCR6
  Gene Name: DiGeorge syndrome critical region gene 6
  Uniprot ID: Q14129
  ENSP ID: ENSP00000397633
MERYAGALEEVADGARQQERHYQLLSALQSLVKELPSSFQQRLSYTTLSDLALALLDGTVFEIVQGLLEIQHLTEKSLYNQRLRLQNEHRVPRTFWNPLETCRDSGVGGWRRLASSPVQTPLWPGCSAGLCSGRRCGRSTRKPSRPAGPITCLCFRRLSSEN

SEQ ID NO: 24345 - protein, 84 aa, Homo sapiens
  Payload ID: 4857
  Gene Symbol: DGCR6
  Gene Name: DiGeorge syndrome critical region gene 6
  ENSP ID: ENSP00000402409
MDQKIVLELDRKVADQQSTLEKAGVAGFYVTTNPQELMLQMNLLELIRKLQQRGCWAGKAALGLGGPWQLPAAQCDQKGSPVPP

SEQ ID NO: 24346 - protein, 144 aa, Homo sapiens
  Payload ID: 4857
  Gene Symbol: DGCR6
  Gene Name: DiGeorge syndrome critical region gene 6
  ENSP ID: ENSP00000466276
MERYAGALEEVADGARQQERHYQLLSALQSLVKELPSSFQQRLSYTTLSDLALALLDGTVFEIVQGLLEIQHLTEKSLYNQRLRLQNEHRGARGQREEVPPPRGRRLPAALGICAARLLPWECSEEVPKINKIKGAETETAPFW

SEQ ID NO: 24347 - protein, 104 aa, Homo sapiens
  Payload ID: 4857
  Gene Symbol: DGCR6
  Gene Name: DiGeorge syndrome critical region gene 6
  ENSP ID: ENSP00000467483
MERYAGALEEVADGARQQERHYQLLSALQSLLIPAALVLHHAERPGPGASRRHRVRNRAGATGDPAPHRKEPVQPAPAPTERASSAQAGAAAEAPGSPAGLPAP

SEQ ID NO: 24348 - protein, 144 aa, Homo sapiens; identical to SEQ ID NO: 24346
  Payload ID: 4857
  Gene Symbol: DGCR6
  Gene Name: DiGeorge syndrome critical region gene 6
  ENSP ID: ENSP00000476388

SEQ ID NO: 24349 - protein, 220 aa, Homo sapiens
  Payload ID: 4858
  Gene Symbol: DGCR6L
  Gene Name: DiGeorge syndrome critical region gene 6-like
  Uniprot ID: Q9BY27
  ENSP ID: ENSP00000248879
MERYAAALEEVADGARQQERHYQLLSALQSLVKELPSSFQQRLSYTTLSDLALALLDGTVFEIVQGLLEIQHLTEKSLYNQRLRLQNEHRVLRQALRQKHQEAQQACRPHNLPVVQAAQQRELEAVEHRIREEQRAMDQKIILELDRKVADQQSTLEKAGVAGFYVTTNPQELMLQMNLLELIRKLQQRGCRAGNAALGLGGPWQSPAAQCDQKGSPVPP

SEQ ID NO: 24350 - protein, 182 aa, Homo sapiens
  Payload ID: 4858
  Gene Symbol: DGCR6L
  Gene Name: DiGeorge syndrome critical region gene 6-like
  ENSP ID: ENSP00000386052
MERYAAALEEVADGARQQERHYQLLSALQSLVKELPSACPTPRSATWPWRFSTAPCSKSCRGYWRSSTSPKRACTTSACAYRTSTEAVEHRIREEQRAMDQKIILELDRKVADQQSTLEKAGVAGFYVTTNPQELMLQMNLLELIRKLQQRGCRAGNAALGLGGPWQSPAAQCDQKGSPVPP

SEQ ID NO: 24351 - protein, 97 aa, Homo sapiens
  Payload ID: 4858
  Gene Symbol: DGCR6L
  Gene Name: DiGeorge syndrome critical region gene 6-like
  ENSP ID: ENSP00000403341
MERYAAALEEVADGARQQERHYQLLSALQSLVKELPSSFQQRLSYTTLSDLALALLDGTVFEIVQGLLEIQHLTEKSLYNQRLRLQNEHRGRGTPDP

SEQ ID NO: 24352 - protein, 248 aa, Homo sapiens
  Payload ID: 4859
  Gene Symbol: DIEXF
  Gene Name: digestive organ expansion factor homolog (zebrafish)
  ENSP ID: ENSP00000407345
  MOD_RES (1)..(1): Any amino acid
XCSTWSFLAPLPQQFHLKILFLPLTPLRLLLLSAQVLIVVPFREAALRVVQLFISLLEGDSKKKIIVSNKKRFQGEYGSDPEERPPNLKRPEDYEAVFVGNIDDHFRIGVAILQRSIRLYAPFYSSDILIASPLGLRTIIGGEGEKKRDFDFLSSIELLIIDQADIYLMQNWEHVLHLMNHMNLLPLDSHGVDFSRVRMWSLNNWSKYYRQTLLFGALQDAQINSVFNKYCVNMQGQVGSRLVSSVSS

SEQ ID NO: 24353 - protein, 756 aa, Homo sapiens
  Payload ID: 4859
  Gene Symbol: DIEXF
  Gene Name: digestive organ expansion factor homolog (zebrafish)
  Uniprot ID: Q68CQ4
  ENSP ID: ENSP00000419005
MGKRGSRSQSQLLNTLTKKQKKHLRDFGEEHPFYDRVSRKEAKPQICQLSESSDSSDSESDSESEPQQVSGYHRLLATLKNVSEEEEEDEEEEEEEDSIVDDAEMNDEDGGSDVSVEEEMAAESTESPENVALSADPEGKEDGEEPPGTSQTSPEEFTDAKHESLFSLETNFLEEESGDNSSLKASQDPFLQHVNKELKEKAIQAVATNPKTTHELKWPILGQLFFSSKFQKLETFKPPKDIDLKSLHLQKPLESTWTKTNSQFLSGPQKSSSPFTPLQKELFLIMNSYRDLFYPERTALKNGEEIRHVYCLHVINHILKANAQVLGNNSRRRSQKFGVGDDDDFRDQGLTRPKVLIVVPFREAALRVVQLFISLLEGDSKKKIIVSNKKRFQGEYGSDPEERPPNLKRPEDYEAVFVGNIDDHFRIGVAILQRSIRLYAPFYSSDILIASPLGLRTIIGGEGEKKRDFDFLSSIELLIIDQADIYLMQNWEHVLHLMNHMNLLPLDSHGVDFSRVRMWSLNNWSKYYRQTLLFGALQDAQINSVFNKYCVNMQGQVAVRNVPMTGSISHVLVQLPHVFQRMEAENLASVIDARFNFFVNKILPQYRDAVMSHTLIYIPSYFDFVRLRNYFKKEELNFTHICEYTQKSGVSRARHFFLQGEKQFLLFTERFHFYKRYTIKGIRNLIFYELPTYPHFYSEICNMLRATNRGEEATWTCTVLYSKYDAQRLAAVVGVERAAQMLQSNKNVHLFITGEK

SEQ ID NO: 24354 - protein, 334 aa, Homo sapiens
  Payload ID: 4860
  Gene Symbol: DHDH
  Gene Name: dihydrodiol dehydrogenase (dimeric)
  Uniprot ID: Q9UQ10
  ENSP ID: ENSP00000221403
MALRWGIVSVGLISSDFTAVLQTLPRSEHQVVAVAARDLSRAKEFAQKHDIPKAYGSYEELAKDPSVEVAYIGTQHPQHKAAVMLCLAAGKAVLCEKPTGVNAAEVREMVAEARSRALFLMEAIWTRFFPASEALRSVLAQGTLGDLRVARAEFGKNLIHVPRAVDRAQAGGALLDIGIYCVQFTSMVFGGQKPEKISVVGRRHETGVDDTVTVLLQYPGEVHGSFTCSITVQLSNTASVSGTKGMVQLLNPCWCPTELVVKGEHKEFPLPPVPKDCNFDNGAGMSYEAKHVWECLRKGMKESPVIPLSESELLADILEEVRKAIGVTFPQDKR

SEQ ID NO: 24355 - protein, 242 aa, Homo sapiens
  Payload ID: 4860
  Gene Symbol: DHDH
  Gene Name: dihydrodiol dehydrogenase (dimeric)
  ENSP ID: ENSP00000428672
MALRWGIVSVGLISSDFTAVLQTLPRSEHQVVAVAARDLSRAKEFAQKHDIPKAYGSYEELAKDPSVEVAYIGTQHPQHKAAVMLCLAAGKAVLCEKPTGVNAAEVREMVAEARSRALFLMEAIWTRFFPASEALRSVLAQGTLGDLRVARAEFGKNLIHVPRAVDRAQAGGALLDIGIYCVQFTSMVFGGQKPEKISVVGRRHETGMKESPVIPLSESELLADILEEVRKAIGVTFPQDKR

SEQ ID NO: 24356 - protein, 195 aa, Homo sapiens
  Payload ID: 4860
  Gene Symbol: DHDH
  Gene Name: dihydrodiol dehydrogenase (dimeric)
  ENSP ID: ENSP00000428935
MALRWGIVSVGLISSDFTAVLQTLPRSEHQVVAVAARDLSRAKEFAQKHDIPKAYGSYEELAKDPSVGVDDTVTVLLQYPGEVHGSFTCSITVQLSNTASVSGTKGMVQLLNPCWCPTELVVKGEHKEFPLPPVPKDCNFDNGAGMSYEAKHVWECLRKGMKESPVIPLSESELLADILEEVRKAIGVTFPQDKR

SEQ ID NO: 24357 - protein, 137 aa, Homo sapiens
  Payload ID: 4860
  Gene Symbol: DHDH
  Gene Name: dihydrodiol dehydrogenase (dimeric)
  ENSP ID: ENSP00000430360
ISSDFTAVLQTLPRSEHQVVAVAARDLSRAKEFAQKHDIPKAYGSYEELAKDPSVGHLDPLLSCLRGSEVCFGPGNSRRPPGGSGRIWEESHPRSPGRRPGPGWGGPAGHRHLLCPVHLHGLWRAEAREDFCRGKAS

SEQ ID NO: 24358 - protein, 187 aa, Homo sapiens
  Payload ID: 4861
  Gene Symbol: DHFR
  Gene Name: dihydrofolate reductase
  Uniprot ID: P00374
  ENSP ID: ENSP00000396308
MVGSLNCIVAVSQNMGIGKNGDLPWPPLRNEFRYFQRMTTTSSVEGKQNLVIMGKKTWFSIPEKNRPLKGRINLVLSRELKEPPQGAHFLSRSLDDALKLTEQPELANKVDMVWIVGGSSVYKEAMNHPGHLKLFVTRIMQDFESDTFFPEIDLEKYKLLPEYPGVLSDVQEEKGIKYKFEVYEKND

SEQ ID NO: 24359 - protein, 135 aa, Homo sapiens
  Payload ID: 4861
  Gene Symbol: DHFR
  Gene Name: dihydrofolate reductase
  Uniprot ID: P00374
  ENSP ID: ENSP00000421334
MGKKTWFSIPEKNRPLKGRINLVLSRELKEPPQGAHFLSRSLDDALKLTEQPELANKVDMVWIVGGSSVYKEAMNHPGHLKLFVTRIMQDFESDTFFPEIDLEKYKLLPEYPGVLSDVQEEKGIKYKFEVYEKND

SEQ ID NO: 24360 - protein, 129 aa, Homo sapiens
  Payload ID: 4861
  Gene Symbol: DHFR
  Gene Name: dihydrofolate reductase
  ENSP ID: ENSP00000422732
MVGSLNCIVAVSQNMGIGKNGDLPWPPLRNEFRYFQRMTTTSSVEGKQNLVIMGKKTWFSIPEKNRPLKGRINLVLSRELKEPPQGAHFLSRSLDDALKLTEQPELANKVDMVWIVGGSSVYKIPRCSL

SEQ ID NO: 24361 - protein, 187 aa, Homo sapiens; identical to SEQ ID NO: 24358
  Payload ID: 4861
  Gene Symbol: DHFR
  Gene Name: dihydrofolate reductase
  Uniprot ID: P00374
  ENSP ID: ENSP00000426474

SEQ ID NO: 24362 - protein, 187 aa, Homo sapiens
  Payload ID: 4862
  Gene Symbol: DHFRL1
  Gene Name: dihydrofolate reductase-like 1
  Uniprot ID: Q86XF0
  ENSP ID: ENSP00000319170
MFLLLNCIVAVSQNMGIGKNGDLPRPPLRNEFRYFQRMTTTSSVEGKQNLVIMGRKTWFSIPEKNRPLKDRINLVLSRELKEPPQGAHFLARSLDDALKLTERPELANKVDMIWIVGGSSVYKEAMNHLGHLKLFVTRIMQDFESDTFFSEIDLEKYKLLPEYPGVLSDVQEGKHIKYKFEVCEKDD

SEQ ID NO: 24363 - protein, 187 aa, Homo sapiens; identical to SEQ ID NO: 24362
  Payload ID: 4862
  Gene Symbol: DHFRL1
  Gene Name: dihydrofolate reductase-like 1
  Uniprot ID: Q86XF0
  ENSP ID: ENSP00000377768

SEQ ID NO: 24364 - protein, 187 aa, Homo sapiens; identical to SEQ ID NO: 24362
  Payload ID: 4862
  Gene Symbol: DHFRL1
  Gene Name: dihydrofolate reductase-like 1
  Uniprot ID: Q86XF0
  ENSP ID: ENSP00000418415

SEQ ID NO: 24365 - protein, 114 aa, Homo sapiens
  Payload ID: 4862
  Gene Symbol: DHFRL1
  Gene Name: dihydrofolate reductase-like 1
  ENSP ID: ENSP00000420810
MFLLLNCIVAVSQNMGIGKNGDLPRPPLRNEFRYFQRMTTTSSVEGKQNLVIMGRKTWFSIPEKNRPLKDRINLVLSRELKEPPQGAHFLARSLDDALKLTERPELANKVDMIW

SEQ ID NO: 24366 - protein, 187 aa, Homo sapiens; identical to SEQ ID NO: 24362
  Payload ID: 4862
  Gene Symbol: DHFRL1
  Gene Name: dihydrofolate reductase-like 1
  Uniprot ID: Q86XF0
  ENSP ID: ENSP00000480823

SEQ ID NO: 24367 - protein, 320 aa, Homo sapiens
  Payload ID: 4863
  Gene Symbol: DBT
  Gene Name: dihydrolipoamide branched chain transacylase E2
  ENSP ID: ENSP00000359150
MAAVRMLRTWSRNAGKLICVRYFQTCGNVHVLKPNYVCFFGYPSFKYSHPHHFLKTTAALRGQVVQFKLSDIGEGIREVTVKEWYVKEGDTVSQFDSICEVQSDKASVTITSRYDGVIKKLYYNLDDIAYVGKPLVDIETEALKDSEEDVVETPAVSHDEHTHQEIKGRKTLATPAVRRLAMENNIKLSEVVGSGKDGRILKEDILNYLEKQTGAILPPSPKVEIMPPPPKPKDMTVPILVSKPPVFTGKDKTEPIKGFQKAMVKTMSAALKIPHFGYCDEIDLTELVKLREELKPIAFARGIKLSFMPFFLKYYFSWKS

SEQ ID NO: 24368 - protein, 482 aa, Homo sapiens
  Payload ID: 4863
  Gene Symbol: DBT
  Gene Name: dihydrolipoamide branched chain transacylase E2
  Uniprot ID: P11182
  ENSP ID: ENSP00000359151
MAAVRMLRTWSRNAGKLICVRYFQTCGNVHVLKPNYVCFFGYPSFKYSHPHHFLKTTAALRGQVVQFKLSDIGEGIREVTVKEWYVKEGDTVSQFDSICEVQSDKASVTITSRYDGVIKKLYYNLDDIAYVGKPLVDIETEALKDSEEDVVETPAVSHDEHTHQEIKGRKTLATPAVRRLAMENNIKLSEVVGSGKDGRILKEDILNYLEKQTGAILPPSPKVEIMPPPPKPKDMTVPILVSKPPVFTGKDKTEPIKGFQKAMVKTMSAALKIPHFGYCDEIDLTELVKLREELKPIAFARGIKLSFMPFFLKAASLGLLQFPILNASVDENCQNITYKASHNIGIAMDTEQGLIVPNVKNVQICSIFDIATELNRLQKLGSVSQLSTTDLTGGTFTLSNIGSIGGTFAKPVIMPPEVAIGALGSIKAIPRFNQKGEVYKAQIMNVSWSADHRVIDGATMSRFSNLWKSYLENPAFMLLDLK

SEQ ID NO: 24369 - protein, 509 aa, Homo sapiens
  Payload ID: 4864
  Gene Symbol: DLD
  Gene Name: dihydrolipoamide dehydrogenase
  Uniprot ID: P09622
  ENSP ID: ENSP00000205402
MQSWSRVYCSLAKRGHFNRISHGLQGLSAVPLRTYADQPIDADVTVIGSGPGGYVAAIKAAQLGFKTVCIEKNETLGGTCLNVGCIPSKALLNNSHYYHMAHGKDFASRGIEMSEVRLNLDKMMEQKSTAVKALTGGIAHLFKQNKVVHVNGYGKITGKNQVTATKADGGTQVIDTKNILIATGSEVTPFPGITIDEDTIVSSTGALSLKKVPEKMVVIGAGVIGVELGSVWQRLGADVTAVEFLGHVGGVGIDMEISKNFQRILQKQGFKFKLNTKVTGATKKSDGKIDVSIEAASGGKAEVITCDVLLVCIGRRPFTKNLGLEELGIELDPRGRIPVNTRFQTKIPNIYAIGDVVAGPMLAHKAEDEGIICVEGMAGGAVHIDYNCVPSVIYTHPEVAWVGKSEEQLKEEGIEYKVGKFPFAANSRAKTNADTDGMVKILGQKSTDRVLGAHILGPGAGEMVNEAALALEYGASCEDIARVCHAHPTLSEAFREANLAASFGKSINF

SEQ ID NO: 24370 - protein, 461 aa, Homo sapiens
  Payload ID: 4864
  Gene Symbol: DLD
  Gene Name: dihydrolipoamide dehydrogenase
  Uniprot ID: P09622
  ENSP ID: ENSP00000387542
MQSWSRVYCSLAKRGHFNRISHGLQGLSAVPLRTYADQPIDADVTVIGSGPGGYVAAIKAAQLGFKTVCIEKNETLGGTCLNVGCIPSKALLNNSHYYHMAHGKDFASRGIEMSEVRLNLDKMMEQKSTAVKALTGGIAHLFKQNKIDEDTIVSSTGALSLKKVPEKMVVIGAGVIGVELGSVWQRLGADVTAVEFLGHVGGVGIDMEISKNFQRILQKQGFKFKLNTKVTGATKKSDGKIDVSIEAASGGKAEVITCDVLLVCIGRRPFTKNLGLEELGIELDPRGRIPVNTRFQTKIPNIYAIGDVVAGPMLAHKAEDEGIICVEGMAGGAVHIDYNCVPSVIYTHPEVAWVGKSEEQLKEEGIEYKVGKFPFAANSRAKTNADTDGMVKILGQKSTDRVLGAHILGPGAGEMVNEAALALEYGASCEDIARVCHAHPTLSEAFREANLAASFGKSINF

SEQ ID NO: 24371 - protein, 115 aa, Homo sapiens
  Payload ID: 4864
  Gene Symbol: DLD
  Gene Name: dihydrolipoamide dehydrogenase
  ENSP ID: ENSP00000388077
MQSWSRVYCSLAKRGHFNRISHGLQGLSAVPLRTYADQPIDADVTVIGSGPGGYVAAIKAAQLGFKTVCIEKNETLGGTCLNVGCIPSKALLNNSHYYHMAHGKDFASRGIETLG

SEQ ID NO: 24372 - protein, 509 aa, Homo sapiens; identical to SEQ ID NO: 24369
  Payload ID: 4864
  Gene Symbol: DLD
  Gene Name: dihydrolipoamide dehydrogenase
  Uniprot ID: P09622
  ENSP ID: ENSP00000390667

SEQ ID NO: 24373 - protein, 58 aa, Homo sapiens
  Payload ID: 4864
  Gene Symbol: DLD
  Gene Name: dihydrolipoamide dehydrogenase
  ENSP ID: ENSP00000402593
MQSWSRVYCSLAKRGHFNRISHGLQGLSAVPLRTYADQPSFIEQLSLLPYGPWKRFCI

SEQ ID NO: 24374 - protein, 114 aa, Homo sapiens
  Payload ID: 4864
  Gene Symbol: DLD
  Gene Name: dihydrolipoamide dehydrogenase
  ENSP ID: ENSP00000409590
MQSWSRVYCSLAKRGHFNRISHGLQGLSAVPLRTYADQPIDADVTVIGSGPGGYVAAIKAAQLGFKTVCIEKNETLGGTCLNVGCIPSKALLNNSHYYHMAHGKDFASRGIENL

SEQ ID NO: 24375 - protein, 486 aa, Homo sapiens
  Payload ID: 4864
  Gene Symbol: DLD
  Gene Name: dihydrolipoamide dehydrogenase
  ENSP ID: ENSP00000417016
MQSWSRVYCSLAKRGHFNRISHGLQGLSAVPLRTYADQPIDADVTVIGSGPGGYVAAIKAAQLGFKALLNNSHYYHMAHGKDFASRGIEMSEVRLNLDKMMEQKSTAVKALTGGIAHLFKQNKVVHVNGYGKITGKNQVTATKADGGTQVIDTKNILIATGSEVTPFPGITIDEDTIVSSTGALSLKKVPEKMVVIGAGVIGVELGSVWQRLGADVTAVEFLGHVGGVGIDMEISKNFQRILQKQGFKFKLNTKVTGATKKSDGKIDVSIEAASGGKAEVITCDVLLVCIGRRPFTKNLGLEELGIELDPRGRIPVNTRFQTKIPNIYAIGDVVAGPMLAHKAEDEGIICVEGMAGGAVHIDYNCVPSVIYTHPEVAWVGKSEEQLKEEGIEYKVGKFPFAANSRAKTNADTDGMVKILGQKSTDRVLGAHILGPGAGEMVNEAALALEYGASCEDIARVCHAHPTLSEAFREANLAASFGKSINF

SEQ ID NO: 24376 - protein, 647 aa, Homo sapiens
  Payload ID: 4865
  Gene Symbol: DLAT
  Gene Name: dihydrolipoamide S-acetyltransferase
  Uniprot ID: P10515
  ENSP ID: ENSP00000280346
MWRVCARRAQNVAPWAGLEARWTALQEVPGTPRVTSRSGPAPARRNSVTTGYGGVRALCGWTPSSGATPRNRLLLQLLGSPGRRYYSLPPHQKVPLPSLSPTMQAGTIARWEKKEGDKINEGDLIAEVETDKATVGFESLEECYMAKILVAEGTRDVPIGAIICITVGKPEDIEAFKNYTLDSSAAPTPQAAPAPTPAATASPPTPSAQAPGSSYPPHMQVLLPALSPTMTMGTVQRWEKKVGEKLSEGDLLAEIETDKATIGFEVQEEGYLAKILVPEGTRDVPLGTPLCIIVEKEADISAFADYRPTEVTDLKPQVPPPTPPPVAAVPPTPQPLAPTPSAPCPATPAGPKGRVFVSPLAKKLAVEKGIDLTQVKGTGPDGRITKKDIDSFVPSKVAPAPAAVVPPTGPGMAPVPTGVFTDIPISNIRRVIAQRLMQSKQTIPHYYLSIDVNMGEVLLVRKELNKILEGRSKISVNDFIIKASALACLKVPEANSSWMDTVIRQNHVVDVSVAVSTPAGLITPIVFNAHIKGVETIANDVVSLATKAREGKLQPHEFQGGTFTISNLGMFGIKNFSAIINPPQACILAIGASEDKLVPADNEKGFDVASMMSVTLSCDHRVVDGAVGAQWLAEFRKYLEKPITMLL

SEQ ID NO: 24377 - protein, 542 aa, Homo sapiens
  Payload ID: 4865
  Gene Symbol: DLAT
  Gene Name: dihydrolipoamide S-acetyltransferase
  ENSP ID: ENSP00000376771
MWRVCARRAQNVAPWAGLEARWTALQEVPGTPRVTSRSGPAPARRNSVTTGYGGVRALCGWTPSSGATPRNRLLLQLLGSPGRRYYSLPPHQKVPLPSLSPTMQAGTIARWEKKEGDKINEGDLIAEVETDKATVGFESLEECYMAKILVAEGTRDVPIGAIICITVGKPEDIEAFKNYTLDSSAAPTPQAAPAPTPAATASPPTPSAQAPGSSYPPHMQVAAVPPTPQPLAPTPSAPCPATPAGPKGRVFVSPLAKKLAVEKGIDLTQVKGTGPDGRITKKDIDSFVPSKVAPAPAAVVPPTGPGMAPVPTGVFTDIPISNIRRVIAQRLMQSKQTIPHYYLSIDVNMGEVLLVRKELNKILEGRSKISVNDFIIKASALACLKVPEANSSWMDTVIRQNHVVDVSVAVSTPAGLITPIVFNAHIKGVETIANDVVSLATKAREGKLQPHEFQGGTFTISNLGMFGIKNFSAIINPPQACILAIGASEDKLVPADNEKGFDVASMMSVTLSCDHRVVDGAVGAQWLAEFRKYLEKPITMLL

SEQ ID NO: 24378 - protein, 479 aa, Homo sapiens
  Payload ID: 4865
  Gene Symbol: DLAT
  Gene Name: dihydrolipoamide S-acetyltransferase
  ENSP ID: ENSP00000433432
PARRNSVTTGYGGVRALCGWTPSSGATPRNRLLLQLLGSPGRRYYSLPPHQKVPLPSLSPTMQAGTIARWEKKEGDKINEGDLLAEIETDKATIGFEVQEEGYLAKILVPEGTRDVPLGTPLCIIVEKEADISAFADYRPTEVTDLKPQVPPPTPPPVAAVPPTPQPLAPTPSAPCPATPAGPKGRVFVSPLAKKLAVEKGIDLTQVKGTGPDGRITKKDIDSFVPSKVAPAPAAVVPPTGPGMAPVPTGVFTDIPISNIRRVIAQRLMQSKQTIPHYYLSIDVNMGEVLLVRKELNKILEGRSKISVNDFIIKASALACLKVPEANSSWMDTVIRQNHVVDVSVAVSTPAGLITPIVFNAHIKGVETIANDVVSLATKAREGKLQPHEFQGGTFTISNLGMFGIKNFSAIINPPQACILAIGASEDKLVPADNEKGFDVASMMSVTLSCDHRVVDGAVGAQWLAEFRKYLEKPITMLL

SEQ ID NO: 24379 - protein, 65 aa, Homo sapiens
  Payload ID: 4865
  Gene Symbol: DLAT
  Gene Name: dihydrolipoamide S-acetyltransferase
  ENSP ID: ENSP00000435374
MWRVCARRAQNVAPWAGLEARWTALQEVPGTPRVTSRSGPAPARRNSVTTGFHCLLFPPQCRQAP

SEQ ID NO: 24380 - protein, 67 aa, Homo sapiens
  Payload ID: 4866
  Gene Symbol: DLST
  Gene Name: dihydrolipoamide S-succinyltransferase (E2 component of 2-oxo-glutarate complex)
  ENSP ID: ENSP00000238671
MLSRSRCVSRAFSRSLSAFQKGNCPLGRRSLPGVSLCQGPGYPNSRKVVINNSVFSVRFFRTTAVCR

SEQ ID NO: 24381 - protein, 453 aa, Homo sapiens
  Payload ID: 4866
  Gene Symbol: DLST
  Gene Name: dihydrolipoamide S-succinyltransferase (E2 component of 2-oxo-glutarate complex)
  Uniprot ID: P36957
  ENSP ID: ENSP00000335304
MLSRSRCVSRAFSRSLSAFQKGNCPLGRRSLPGVSLCQGPGYPNSRKVVINNSVFSVRFFRTTAVCKDDLVTVKTPAFAESVTEGDVRWEKAVGDTVAEDEVVCEIETDKTSVQVPSPANGVIEALLVPDGGKVEGGTPLFTLRKTGAAPAKAKPAEAPAAAAPKAEPTAAAVPPPAAPIPTQMPPVPSPSQPPSGKPVSAVKPTVAPPLAEPGAGKGLRSEHREKMNRMRQRIAQRLKEAQNTCAMLTTFNEIDMSNIQEMRARHKEAFLKKHNLKLGFMSAFVKASAFALQEQPVVNAVIDDTTKEVVYRDYIDISVAVATPRGLVVPVIRNVEAMNFADIERTITELGEKARKNELAIEDMDGGTFTISNGGVFGSLFGTPIINPPQSAILGMHGIFDRPVAIGGKVEVRPMMYVALTYDHRLIDGREAVTFLRKIKAAVEDPRVLLLDL

SEQ ID NO: 24382 - protein, 104 aa, Homo sapiens
  Payload ID: 4866
  Gene Symbol: DLST
  Gene Name: dihydrolipoamide S-succinyltransferase (E2 component of 2-oxo-glutarate complex)
  ENSP ID: ENSP00000451210
MLSRSRCVSRAFSRSLSAFQKGNCPLGRRSLPGVSLCQGPGYPNSRKVVINNSVFSVRFFRTTAVCKDDLVTVKTPAFAESVTEGDVRWEKDICAGSITSKWRD

SEQ ID NO: 24383 - protein, 74 aa, Homo sapiens
  Payload ID: 4866
  Gene Symbol: DLST
  Gene Name: dihydrolipoamide S-succinyltransferase (E2 component of 2-oxo-glutarate complex)
  ENSP ID: ENSP00000451425
  MOD_RES (1)..(1): Any amino acid
XVSLCQGPGYPNSRKVVINNSVFSVRFFRTTAVCKDDLVTVKTPAFAESVTEGDVRWEKAFDCLFSCWRHSCRR

SEQ ID NO: 24384 - protein, 37 aa, Homo sapiens
  Payload ID: 4866
  Gene Symbol: DLST
  Gene Name: dihydrolipoamide S-succinyltransferase (E2 component of 2-oxo-glutarate complex)
  ENSP ID: ENSP00000451670
MLSRSRCVSRAFSRSLSAFQKGSPYARDQVTLTAGRL

SEQ ID NO: 24385 - protein, 279 aa, Homo sapiens
  Payload ID: 4866
  Gene Symbol: DLST
  Gene Name: dihydrolipoamide S-succinyltransferase (E2 component of 2-oxo-glutarate complex)
  ENSP ID: ENSP00000451957
AVPIPLCVSGVQPLALRLPEGELPSRETFPACINNSVFSVRFFRTTAVCKDDLVTVKTPAFAESVTEGDVRWEKAVGDTVAEDEVVCEIETDKTSVQVPSPANGVIEALLVPDGGKVEGGTPLFTLRKTGAAPAKAKPAEAPAAAAPKAEPTAAAVPPPAAPIPTQMPPVPSPSQPPSGKPVSAVKPTVAPPLAEPGAGKGLRSEHREKMNRMRQRIAQRLKEAQNTCAMLTTFNEIDMSNIQEMRARHKEAFLKKHNLKLGFMSAFVKASAFALQEQP

SEQ ID NO: 24386 - protein, 110 aa, Homo sapiens
  Payload ID: 4866
  Gene Symbol: DLST
  Gene Name: dihydrolipoamide S-succinyltransferase (E2 component of 2-oxo-glutarate complex)
  ENSP ID: ENSP00000452417
MLSRSRCVSRAFSRSLSAFQKGSPYARDQVTLTAGRLSLTTVSSVFAFSELQLYARMTWLQSKPQRLQNLSQREMSGGRKLLETQLQKMKWFVRLKLTRHLCRFHHQQMA

SEQ ID NO: 24387 - protein, 83 aa, Homo sapiens
  Payload ID: 4866
  Gene Symbol: DLST
  Gene Name: dihydrolipoamide S-succinyltransferase (E2 component of 2-oxo-glutarate complex)
  ENSP ID: ENSP00000452422
MLSRSRCVSRAFSRSLSAFQKGNCPLGRRSLPALTTVSSVFAFSELQLYADDLVTVKTPAFAESVTEGDVRWEKGSITSKWRD

SEQ ID NO: 24388 - protein, 83 aa, Homo sapiens; identical to SEQ ID NO: 24387
  Payload ID: 4866
  Gene Symbol: DLST
  Gene Name: dihydrolipoamide S-succinyltransferase (E2 component of 2-oxo-glutarate complex)
  ENSP ID: ENSP00000487251

SEQ ID NO: 24389 - protein, 395 aa, Homo sapiens
  Payload ID: 4867
  Gene Symbol: DHODH
  Gene Name: dihydroorotate dehydrogenase (quinone)
  Uniprot ID: Q02127
  ENSP ID: ENSP00000219240
MAWRHLKKRAQDAVIILGGGGLLFASYLMATGDERFYAEHLMPTLQGLLDPESAHRLAVRFTSLGLLPRARFQDSDMLEVRVLGHKFRNPVGIAAGFDKHGEAVDGLYKMGFGFVEIGSVTPKPQEGNPRPRVFRLPEDQAVINRYGFNSHGLSVVEHRLRARQQKQAKLTEDGLPLGVNLGKNKTSVDAAEDYAEGVRVLGPLADYLVVNVSSPNTAGLRSLQGKAELRRLLTKVLQERDGLRRVHRPAVLVKIAPDLTSQDKEDIASVVKELGIDGLIVTNTTVSRPAGLQGALRSETGGLSGKPLRDLSTQTIREMYALTQGRVPIIGVGGVSSGQDALEKIRAGASLVQLYTALTFWGPPVVGKVKRELEALLKEQGFGGVTDAIGADHRR

SEQ ID NO: 24390 - protein, 193 aa, Homo sapiens
  Payload ID: 4867
  Gene Symbol: DHODH
  Gene Name: dihydroorotate dehydrogenase (quinone)
  ENSP ID: ENSP00000460966
  MOD_RES (1)..(1): Any amino acid
XWRHLKKRAQDAVIILGGGGLLFASYLMATGDERFYAEHLMPTLQGLLDPESAHRLAVRFTSLGLLPRARFQDSDMLEVRVLGHKFRNPVGIAAGFDKHGEAVDGLYKMGFGFVEIGSVTPKPQEGNPRPRVFRLPEDQAVINRYGFNSHGLSVVEHRLRARQQKQAKLTEESRALAESQMPLEQIIGGEDSV

SEQ ID NO: 24391 - protein, 393 aa, Homo sapiens
  Payload ID: 4867
  Gene Symbol: DHODH
  Gene Name: dihydroorotate dehydrogenase (quinone)
  ENSP ID: ENSP00000461848
MAWRHLKKRAQDAVIILGGGGLLFASYLMATGDERFYAEHLMPTLQGLLDPESAHRLAVRFTSLGLLPRARFQDSDMLEVRVLGHKFRNPVGIAAGFDKHGEAVDGLYKMGFGFVEIGSVTPKPQEGNPRPRVFRLPEDQAVINRYGFNSHGLSVVEHRLRARQQKQAKLTEDGLPLGVNLGKNKTSVDAAEDYAEGVRVLGPLADYLVVNVSSPNTAGLRSLQGKAELRRLLTKVLQERDGLRRVHRPAVLVKIAPDLTSQDKEDIASVVKELGIDGLIVTNTTVSRPAGLQGALRSETGGLSGKPLRDLSTQTIREMYALTQVPIIGVGGVSSGQDALEKIRAGASLVQLYTALTFWGPPVVGKVKRELEALLKEQGFGGVTDAIGADHRR

SEQ ID NO: 24392 - protein, 76 aa, Homo sapiens
  Payload ID: 4867
  Gene Symbol: DHODH
  Gene Name: dihydroorotate dehydrogenase (quinone)
  ENSP ID: ENSP00000464249
  MOD_RES (1)..(1): Any amino acid
XLKKRAQDAVIILGGGGLLFASYLMATGDERFYAEHLMPTLQGLLDPESAHRLAVRFTSLGLLPRARFQDSDMLAC

SEQ ID NO: 24393 - protein, 144 aa, Homo sapiens
  Payload ID: 4867
  Gene Symbol: DHODH
  Gene Name: dihydroorotate dehydrogenase (quinone)
  ENSP ID: ENSP00000464333
MATGDERFYAEHLMPTLQGLLDPESAHRLAVRFTSLGLLPRARFQDSDMLEVRVLGHKFRNPVGIAAGFDKHGEAVDGLYKMGFGFVEIGSVTPKPQEGNPRPRVFRLPEDQAVINRYGFNSHGLSVVEHRLRARQQKQAKLTE

SEQ ID NO: 24394 - protein, 519 aa, Homo sapiens
  Payload ID: 4868
  Gene Symbol: DPYS
  Gene Name: dihydropyrimidinase
  Uniprot ID: Q14117
  ENSP ID: ENSP00000276651
MAAPSRLLIRGGRVVNDDFSEVADVLVEDGVVRALGHDLLPPGGAPAGLRVLDAAGKLVLPGGIDTHTHMQFPFMGSRSIDDFHQGTKAALSGGTTMIIDFAIPQKGGSLIEAFETWRSWADPKVCCDYSLHVAVTWWSDQVKEEMKILVQDKGVNSFKMFMAYKDLYMVTDLELYEAFSRCKEIGAIAQVHAENGDLIAEGAKKMLALGITGPEGHELCRPEAVEAEATLRAITIASAVNCPLYIVHVMSKSAAKVIADARRDGKVVYGEPIAASLGTDGTHYWNKEWHHAAHHVMGPPLRPDPSTPDFLMNLLANDDLTTTGTDNCTFNTCQKALGKDDFTKIPNGVNGVEDRMSVIWEKGVHSGKMDENRFVAVTSTNAAKIFNLYPRKGRIAVGSDADIVIWDPKGTRTISAKTHHQAVNFNIFEGMVCHGVPLVTISRGKVVYEAGVFSVTAGDGKFIPRKPFAEYIYKRIKQRDRTCTPTPVERAPYKGEVATLKSRVTKEDATAGTRKQAHP

SEQ ID NO: 24395 - protein, 150 aa, Homo sapiens
  Payload ID: 4868
  Gene Symbol: DPYS
  Gene Name: dihydropyrimidinase
  ENSP ID: ENSP00000430246
MAAPSRLLIRGGRVVNDDFSEVADVLVEDGVVRALGHDLLPPGGAPAGLRVLDAAGKLVLPGGIDTHTHMQFPFMGSRSIDDFHQGTKVKEEMKILVQDKGVNSFKMFMAYKDLYMVTDLELYEAFSRCKEIGAIAQVHAENGDLIAEGA

SEQ ID NO: 24396 - protein, 54 aa, Homo sapiens
  Payload ID: 4868
  Gene Symbol: DPYS
  Gene Name: dihydropyrimidinase
  ENSP ID: ENSP00000436654
  MOD_RES (1)..(1): Any amino acid
XGDGKFIPRKPFAEYIYKRIKQRDRVKKSEERRLPFPSQPNIVNPWRSRPYSTP

SEQ ID NO: 24397 - protein, 572 aa, Homo sapiens
  Payload ID: 4869
  Gene Symbol: DPYSL2
  Gene Name: dihydropyrimidinase-like 2
  Uniprot ID: Q16555
  ENSP ID: ENSP00000309539
MSYQGKKNIPRITSDRLLIKGGKIVNDDQSFYADIYMEDGLIKQIGENLIVPGGVKTIEAHSRMVIPGGIDVHTRFQMPDQGMTSADDFFQGTKAALAGGTTMIIDHVVPEPGTSLLAAFDQWREWADSKSCCDYSLHVDISEWHKGIQEEMEALVKDHGVNSFLVYMAFKDRFQLTDCQIYEVLSVIRDIGAIAQVHAENGDIIAEEQQRILDLGITGPEGHVLSRPEEVEAEAVNRAITIANQTNCPLYITKVMSKSSAEVIAQARKKGTVVYGEPITASLGTDGSHYWSKNWAKAAAFVTSPPLSPDPTTPDFLNSLLSCGDLQVTGSAHCTFNTAQKAVGKDNFTLIPEGTNGTEERMSVIWDKAVVTGKMDENQFVAVTSTNAAKVFNLYPRKGRIAVGSDADLVIWDPDSVKTISAKTHNSSLEYNIFEGMECRGSPLVVISQGKIVLEDGTLHVTEGSGRYIPRKPFPDFVYKRIKARSRLAELRGVPRGLYDGPVCEVSVTPKTVTPASSAKTSPAKQQAPPVRNLHQSGFSLSGAQIDDNIPRRTTQRIVAPPGGRANITSLG

SEQ ID NO: 24398 - protein, 170 aa, Homo sapiens
  Payload ID: 4869
  Gene Symbol: DPYSL2
  Gene Name: dihydropyrimidinase-like 2
  ENSP ID: ENSP00000427954
MPPSRLGVGRVSSGLSFPAARRLHAGQIPSLQPPPGPRPFPAPRSRARTLPGSSRPLRGRAWPGPPRRVPARRRSSPQPRQGGGQSDRLLIKGGKIVNDDQSFYADIYMEDGLIKQIGENLIVPGGVKTIEAHSRMVIPGGIDVHTRFQMPDQGMTSADDFFQGTKAALA

SEQ ID NO: 24399 - protein, 536 aa, Homo sapiens
  Payload ID: 4869
  Gene Symbol: DPYSL2
  Gene Name: dihydropyrimidinase-like 2
  Uniprot ID: Q16555
  ENSP ID: ENSP00000427985
MEDGLIKQIGENLIVPGGVKTIEAHSRMVIPGGIDVHTRFQMPDQGMTSADDFFQGTKAALAGGTTMIIDHVVPEPGTSLLAAFDQWREWADSKSCCDYSLHVDISEWHKGIQEEMEALVKDHGVNSFLVYMAFKDRFQLTDCQIYEVLSVIRDIGAIAQVHAENGDIIAEEQQRILDLGITGPEGHVLSRPEEVEAEAVNRAITIANQTNCPLYITKVMSKSSAEVIAQARKKGTVVYGEPITASLGTDGSHYWSKNWAKAAAFVTSPPLSPDPTTPDFLNSLLSCGDLQVTGSAHCTFNTAQKAVGKDNFTLIPEGTNGTEERMSVIWDKAVVTGKMDENQFVAVTSTNAAKVFNLYPRKGRIAVGSDADLVIWDPDSVKTISAKTHNSSLEYNIFEGMECRGSPLVVISQGKIVLEDGTLHVTEGSGRYIPRKPFPDFVYKRIKARSRLAELRGVPRGLYDGPVCEVSVTPKTVTPASSAKTSPAKQQAPPVRNLHQSGFSLSGAQIDDNIPRRTTQRIVAPPGGRANITSLG

SEQ ID NO: 24400 - protein, 536 aa, Homo sapiens; identical to SEQ ID NO: 24399
  Payload ID: 4869
  Gene Symbol: DPYSL2
  Gene Name: dihydropyrimidinase-like 2
  Uniprot ID: Q16555
  ENSP ID: ENSP00000431117

SEQ ID NO: 24401 - protein, 684 aa, Homo sapiens
  Payload ID: 4870
  Gene Symbol: DPYSL3
  Gene Name: dihydropyrimidinase-like 3
  Uniprot ID: Q14195
  ENSP ID: ENSP00000343690
MASGRRGWDSSHEDDLPVYLARPGTTDQVPRQKYGGMFCNVEGAFESKTLDFDALSVGQRGAKTPRSGQGSDRGSGSRPGIEGDTPRRGQGREESREPAPASPAPAGVEIRSATGKEVLQNLGPKDKSDRLLIKGGRIVNDDQSFYADIYMEDGLIKQIGDNLIVPGGVKTIEANGKMVIPGGIDVHTHFQMPYKGMTTVDDFFQGTKAALAGGTTMIIDHVVPEPESSLTEAYEKWREWADGKSCCDYALHVDITHWNDSVKQEVQNLIKDKGVNSFMVYMAYKDLYQVSNTELYEIFTCLGELGAIAQVHAENGDIIAQEQTRMLEMGITGPEGHVLSRPEELEAEAVFRAITIASQTNCPLYVTKVMSKSAADLISQARKKGNVVFGEPITASLGIDGTHYWSKNWAKAAAFVTSPPLSPDPTTPDYINSLLASGDLQLSGSAHCTFSTAQKAIGKDNFTAIPEGTNGVEERMSVIWDKAVATGKMDENQFVAVTSTNAAKIFNLYPRKGRISVGSDSDLVIWDPDAVKIVSAKNHQSAAEYNIFEGMELRGAPLVVICQGKIMLEDGNLHVTQGAGRFIPCSPFSDYVYKRIKARRKMADLHAVPRGMYDGPVFDLTTTPKGGTPAGSARGSPTRPNPPVRNLHQSGFSLSGTQVDEGVRSASKRIVAPPGGRSNITSLS

SEQ ID NO: 24402 - protein, 570 aa, Homo sapiens
  Payload ID: 4870
  Gene Symbol: DPYSL3
  Gene Name: dihydropyrimidinase-like 3
  Uniprot ID: Q14195
  ENSP ID: ENSP00000381526
MSYQGKKNIPRITSDRLLIKGGRIVNDDQSFYADIYMEDGLIKQIGDNLIVPGGVKTIEANGKMVIPGGIDVHTHFQMPYKGMTTVDDFFQGTKAALAGGTTMIIDHVVPEPESSLTEAYEKWREWADGKSCCDYALHVDITHWNDSVKQEVQNLIKDKGVNSFMVYMAYKDLYQVSNTELYEIFTCLGELGAIAQVHAENGDIIAQEQTRMLEMGITGPEGHVLSRPEELEAEAVFRAITIASQTNCPLYVTKVMSKSAADLISQARKKGNVVFGEPITASLGIDGTHYWSKNWAKAAAFVTSPPLSPDPTTPDYINSLLASGDLQLSGSAHCTFSTAQKAIGKDNFTAIPEGTNGVEERMSVIWDKAVATGKMDENQFVAVTSTNAAKIFNLYPRKGRISVGSDSDLVIWDPDAVKIVSAKNHQSAAEYNIFEGMELRGAPLVVICQGKIMLEDGNLHVTQGAGRFIPCSPFSDYVYKRIKARRKMADLHAVPRGMYDGPVFDLTTTPKGGTPAGSARGSPTRPNPPVRNLHQSGFSLSGTQVDEGVRSASKRIVAPPGGRSNITSLS

SEQ ID NO: 24403 - protein, 92 aa, Homo sapiens
  Payload ID: 4870
  Gene Symbol: DPYSL3
  Gene Name: dihydropyrimidinase-like 3
  ENSP ID: ENSP00000426720
MSYQGKKNIPRITSDRLLIKGGRIVNDDQSFYADIYMEDGLIKQIGDNLIVPGGVKTIEANGKMVIPGGIDVHTHFQMPYKGMTTVDDFFQG

SEQ ID NO: 24404 - protein, 75 aa, Homo sapiens
  Payload ID: 4870
  Gene Symbol: DPYSL3
  Gene Name: dihydropyrimidinase-like 3
  ENSP ID: ENSP00000428958
ADLISQARKKGNVVFGEPITASLGIDGTHYWSKNWAKAAAFVTSPPLSPDPTTPDYINSLLARPQGKWTKTSSWL

SEQ ID NO: 24405 - protein, 209 aa, Homo sapiens
  Payload ID: 4870
  Gene Symbol: DPYSL3
  Gene Name: dihydropyrimidinase-like 3
  ENSP ID: ENSP00000430267
  MOD_RES (1)..(1): Any amino acid
XTSPPLSPDPTTPDYINSLLASGDLQLSGSAHCTFSTAQKAIGKDNFTAIPEGTNGVEERMSVIWDKAVATGKMDENQFVAVTSTNAAKIFNLYPRKGRISVGSDSDLVIWDPDAVKIVSAKNHQSMADLHAVPRGMYDGPVFDLTTTPKGGTPAGSARGSPTRPNPPVRNLHQSGFSLSGTQVDEGVRSASKRIVAPPGGRSNITSLS

SEQ ID NO: 24406 - protein, 572 aa, Homo sapiens
  Payload ID: 4871
  Gene Symbol: DPYSL4
  Gene Name: dihydropyrimidinase-like 4
  Uniprot ID: O14531
  ENSP ID: ENSP00000339850
MSFQGKKSIPRITSDRLLIRGGRIVNDDQSFYADVHVEDGLIKQIGENLIVPGGIKTIDAHGLMVLPGGVDVHTRLQMPVLGMTPADDFCQGTKAALAGGTTMILDHVFPDTGVSLLAAYEQWRERADSAACCDYSLHVDITRWHESIKEELEALVKEKGVNSFLVFMAYKDRCQCSDSQMYEIFSIIRDLGALAQVHAENGDIVEEEQKRLLELGITGPEGHVLSHPEEVEAEAVYRAVTIAKQANCPLYVTKVMSKGAADAIAQAKRRGVVVFGEPITASLGTDGSHYWSKNWAKAAAFVTSPPVNPDPTTADHLTCLLSSGDLQVTGSAHCTFTTAQKAVGKDNFALIPEGTNGIEERMSMVWEKCVASGKMDENEFVAVTSTNAAKIFNFYPRKGRVAVGSDADLVIWNPKATKIISAKTHNLNVEYNIFEGVECRGAPAVVISQGRVALEDGKMFVTPGAGRFVPRKTFPDFVYKRIKARNRLAEIHGVPRGLYDGPVHEVMVPAKPGSGAPARASCPGKISVPPVRNLHQSGFSLSGSQADDHIARRTAQKIMAPPGGRSNITSLS

SEQ ID NO: 24407 - protein, 412 aa, Homo sapiens
  Payload ID: 4871
  Gene Symbol: DPYSL4
  Gene Name: dihydropyrimidinase-like 4
  ENSP ID: ENSP00000357616
MPVLGMTPADDFCQGTKAALAGGTTMILDHVFPDTGVSLLAAYEQWRERADSAACCDYSLHVDITRWHESIKEELEALVKEKGVNSFLVFMAYKDRCQCSDSQMYEIFSIIRDLGALAQVHAENGDIVEEVEAEAVYRAVTIAKQANCPLYVTKVMSKGAADAIAQAKRRGVVVFGEPITASLGTDGSHYWSKNWAKAAAFVTSPPVNPDPTTADHLTCLLSSGDLQVTGSAHCTFTTAQKAVGKDNFALIPEGTNGIEERMSMVWEKCVASGKMDENEFVAVTSTNAAKIFNFYPRKGRVAVGSDADLVIWNPKATKIISAKTHNLLAEIHGVPRGLYDGPVHEVMVPAKPGSGAPARASCPGKISVPPVRNLHQSGFSLSGSQADDHIARRTAQKIMAPPGGRSNITSLS

SEQ ID NO: 24408 - protein, 564 aa, Homo sapiens
  Payload ID: 4872
  Gene Symbol: DPYSL5
  Gene Name: dihydropyrimidinase-like 5
  Uniprot ID: Q9BPU6
  ENSP ID: ENSP00000288699
MLANSASVRILIKGGKVVNDDCTHEADVYIENGIIQQVGRELMIPGGAKVIDATGKLVIPGGIDTSTHFHQTFMNATCVDDFYHGTKAALVGGTTMIIGHVLPDKETSLVDAYEKCRGLADPKVCCDYALHVGITWWAPKVKAEMETLVREKGVNSFQMFMTYKDLYMLRDSELYQVLHACKDIGAIARVHAENGELVAEGAKEALDLGITGPEGIEISRPEELEAEATHRVITIANRTHCPIYLVNVSSISAGDVIAAAKMQGKVVLAETTTAHATLTGLHYYHQDWSHAAAYVTVPPLRLDTNTSTYLMSLLANDTLNIVASDHRPFTTKQKAMGKEDFTKIPHGVSGVQDRMSVIWERGVVGGKMDENRFVAVTSSNAAKLLNLYPRKGRIIPGADADVVVWDPEATKTISASTQVQGGDFNLYENMRCHGVPLVTISRGRVVYENGVFMCAEGTGKFCPLRSFPDTVYKKLVQREKTLKVRGVDRTPYLGDVAVVVHPGKKEMGTPLADTPTRPVTRHGGMRDLHESSFSLSGSQIDDHVPKRASARILAPPGGRSSGIW

SEQ ID NO: 24409 - protein, 564 aa, Homo sapiens; identical to SEQ ID NO: 24408
  Payload ID: 4872
  Gene Symbol: DPYSL5
  Gene Name: dihydropyrimidinase-like 5
  Uniprot ID: Q9BPU6
  ENSP ID: ENSP00000385549

SEQ ID NO: 24410 - protein, 189 aa, Homo sapiens
  Payload ID: 4872
  Gene Symbol: DPYSL5
  Gene Name: dihydropyrimidinase-like 5
  ENSP ID: ENSP00000399581
MLANSASVRILIKGGKVVNDDCTHEADVYIENGIIQQVGRELMIPGGAKVIDATGKLVIPGGIDTSTHFHQTFMNATCVDDFYHGTKAALVGGTTMIIGHVLPDKETSLVDAYEKCRGLADPKVCCDYALHVGITWWAPKVKAEMETLVREKGVNSFQMFMTYKDLYMLRDSELYQVLHACKDIGAIAR

SEQ ID NO: 24411 - protein, 165 aa, Homo sapiens
  Payload ID: 4872
  Gene Symbol: DPYSL5
  Gene Name: dihydropyrimidinase-like 5
  ENSP ID: ENSP00000407174
MLANSASVRILIKGGKVVNDDCTHEADVYIENGIIQQVGRELMIPGGAKVIDATGKLVIPGGIDTSTHFHQTFMNATCVDDFYHGTKAALVGGTTMIIGHVLPDKETSLVDAYEKCRGLADPKVCCDYALHVGITWWAPKVKAEMETLVREKGVNSFQMFMTYKD

SEQ ID NO: 24412 - protein, 174 aa, Homo sapiens
  Payload ID: 4872
  Gene Symbol: DPYSL5
  Gene Name: dihydropyrimidinase-like 5
  ENSP ID: ENSP00000413075
MLANSASVRILIKGGKVVNDDCTHEADVYIENGIIQQVGRELMIPGGAKVIDATGKLVIPGGIDTSTHFHQTFMNATCVDDFYHGTKAALVGGTTMIIGHVLPDKETSLVDAYEKCRGLADPKVCCDYALHVGITWWAPKVKAEMETLVREKGVNSFQMFMTYKDLYMLRDSEL

SEQ ID NO: 24413 - protein, 564 aa, Homo sapiens; identical to SEQ ID NO: 24408
  Payload ID: 4872
  Gene Symbol: DPYSL5
  Gene Name: dihydropyrimidinase-like 5
  Uniprot ID: Q9BPU6
  ENSP ID: ENSP00000481305

SEQ ID NO: 24414 - protein, 173 aa, Homo sapiens
  Payload ID: 4873
  Gene Symbol: DPYD
  Gene Name: dihydropyrimidine dehydrogenase
  Uniprot ID: Q12882
  ENSP ID: ENSP00000307107
MAPVLSKDSADIESILALNPRTQTHATLCSTSAKKLDKKHWKRNPDKNCFNCEKLENNFDDIKHTTLGERGALREAMRCLKCADAPCQKSCPTNLDIKSFITSIANKNYYGAAKMIFSDNPLGLTCGMVCPTSDLCVGGCNLYATEEGPINIGGLQQFATETLILAFSLMNHL

SEQ ID NO: 24415 - protein, 1025 aa, Homo sapiens
  Payload ID: 4873
  Gene Symbol: DPYD
  Gene Name: dihydropyrimidine dehydrogenase
  Uniprot ID: Q12882
  ENSP ID: ENSP00000359211
MAPVLSKDSADIESILALNPRTQTHATLCSTSAKKLDKKHWKRNPDKNCFNCEKLENNFDDIKHTTLGERGALREAMRCLKCADAPCQKSCPTNLDIKSFITSIANKNYYGAAKMIFSDNPLGLTCGMVCPTSDLCVGGCNLYATEEGPINIGGLQQFATEVFKAMSIPQIRNPSLPPPEKMSEAYSAKIALFGAGPASISCASFLARLGYSDITIFEKQEYVGGLSTSEIPQFRLPYDVVNFEIELMKDLGVKIICGKSLSVNEMTLSTLKEKGYKAAFIGIGLPEPNKDAIFQGLTQDQGFYTSKDFLPLVAKGSKAGMCACHSPLPSIRGVVIVLGAGDTAFDCATSALRCGARRVFIVFRKGFVNIRAVPEEMELAKEEKCEFLPFLSPRKVIVKGGRIVAMQFVRTEQDETGKWNEDEDQMVHLKADVVISAFGSVLSDPKVKEALSPIKFNRWGLPEVDPETMQTSEAWVFAGGDVVGLANTTVESVNDGKQASWYIHKYVQSQYGASVSAKPELPLFYTPIDLVDISVEMAGLKFINPFGLASATPATSTSMIRRAFEAGWGFALTKTFSLDKDIVTNVSPRIIRGTTSGPMYGPGQSSFLNIELISEKTAAYWCQSVTELKADFPDNIVIASIMCSYNKNDWTELAKKSEDSGADALELNLSCPHGMGERGMGLACGQDPELVRNICRWVRQAVQIPFFAKLTPNVTDIVSIARAAKEGGANGVTATNTVSGLMGLKSDGTPWPAVGIAKRTTYGGVSGTAIRPIALRAVTSIARALPGFPILATGGIDSAESGLQFLHSGASVLQVCSAIQNQDFTVIEDYCTGLKALLYLKSIEELQDWDGQSPATVSHQKGKPVPRIAELMDKKLPSFGPYLEQRKKIIAENKIRLKEQNVAFSPLKRNCFIPKRPIPTIKDVIGKALQYLGTFGELSNVEQVVAMIDEEMCINCGKCYMTCNDSGYQAIQFDPETHLPTITDTCTGCTLCLSVCPIVDCIKMVSRTTPYEPKRGVPLSVNPVC

SEQ ID NO: 24416 - protein, 473 aa, Homo sapiens
  Payload ID: 4874
  Gene Symbol: DUS1L
  Gene Name: dihydrouridine synthase 1-like
  Uniprot ID: Q6P1R4
  ENSP ID: ENSP00000303515
MPKLQGFEFWSRTLRGARHVVAPMVDQSELAWRLLSRRHGAQLCYTPMLHAQVFVRDANYRKENLYCEVCPEDRPLIVQFCANDPEVFVQAALLAQDYCDAIDLNLGCPQMIAKRGHYGAFLQDEWDLLQRMILLAHEKLSVPVTCKIRVFPEIDKTVRYAQMLEKAGCQLLTVHGRTKEQKGPLSGAASWEHIKAVRKAVAIPVFANGNIQCLQDVERCLRDTGVQGVMSAEGNLHNPALFEGRSPAVWELAEEYLDIVREHPCPLSYVRAHLFKLWHHTLQVHQELREELAKVKTLEGIAAVSQELKLRCQEEISRQEGAKPTGDLPFHWICQPYIRPGPREGSKEKAGARSKRALEEEEGGTEVLSKNKQKKQLRNPHKTFDPSLKPKYAKCDQCGNPKGNRCVFSLCRGCCKKRASKETADCPGHGLLFKTKLEKSLAWKEAQPELQEPQPAAPGTPGGFSEVMGSALA

SEQ ID NO: 24417 - protein, 473 aa, Homo sapiens; identical to SEQ ID NO: 24416
  Payload ID: 4874
  Gene Symbol: DUS1L
  Gene Name: dihydrouridine synthase 1-like
  Uniprot ID: Q6P1R4
  ENSP ID: ENSP00000346280

SEQ ID NO: 24418 - protein, 239 aa, Homo sapiens
  Payload ID: 4874
  Gene Symbol: DUS1L
  Gene Name: dihydrouridine synthase 1-like
  ENSP ID: ENSP00000438718
  MOD_RES (1)..(1): Any amino acid
XSRQEGAKPTGDLPFHWICQPYIRPGPREGSKEKAGARSKRALEEEEGGTEVLSKNKQKKQLRNPHKTFDPSLKPKYAKCDQCGNPKVSGFRLQATKASALGVGRVVSALLGVAGLVPAQLGLQRGSRWHGCLRTAPCFQPSPCPGLEGKRVWVGGGEGEASGLGAVPRAASRPWASGRGFPSGAAPLLASLAPGVVLATGSRDFLCPGQQMCVQPVPRLLQEASLQRDCRLPRSRIAF

SEQ ID NO: 24419 - protein, 298 aa, Homo sapiens
  Payload ID: 4874
  Gene Symbol: DUS1L
  Gene Name: dihydrouridine synthase 1-like
  ENSP ID: ENSP00000445110
  MOD_RES (1)..(1): Any amino acid
XLLAHEKLSVPVTCKIRVFPEIDKTVRYAQMLEKAGCQLLTVHGRTKEQKGPLSGAASWEHIKAVRKAVAIPVFANGNIQCLQDVERCLRDTGVQGVMSAEGNLHNPALFEGRSPAVWELAEEYLDIVREHPCPLSYVRAHLFKLWHHTLQVHQELREELAKVKTLEGIAAVSQELKLRCQEEISRQEGAKPTGDLPFHWICQPYIRPGPREGSKEKAGARSKRALEEEEGGTEVLSKNKQKKQLRNPHKTFDPSLKPKYAKCDQCGNPKMCVQPVPRLLQEASLQRDCRLPRSRIAF

SEQ ID NO: 24420 - protein, 191 aa, Homo sapiens
  Payload ID: 4874
  Gene Symbol: DUS1L
  Gene Name: dihydrouridine synthase 1-like
  ENSP ID: ENSP00000462526
  MOD_RES (1)..(1): Any amino acid
XNGNIQCLQDVERCLRDTGVQGVMSAGGQGPGQQPGPHAHGLIPPPRGQPAQPRPVRGPEPCRVGAGRGVSGHRAGAPLPPVLRPGPPLQAVAPHAAGAPGAARGAGQGEDPGGHRCCEPGAEAAVSGRRYPGRRERSPPATCPSTGSASPTSGRGPGRGARRRQVRAASGPWRKRRVARRSCPRTSKRSS

SEQ ID NO: 24421 - protein, 152 aa, Homo sapiens
  Payload ID: 4874
  Gene Symbol: DUS1L
  Gene Name: dihydrouridine synthase 1-like
  ENSP ID: ENSP00000462812
  MOD_RES (1)..(1): Any amino acid
XPREGSKEKAGARSKRALEEEEGGTEVLSKNKQKKQLRNPHKTFDPSLKPKYAKCDQCGNPKGNRCVFSLCRGCCKKRASKETADCPGLLLEPGHVLLKKMPFTQGISCYLMWKDTPMSPFGPLWGPGNAAVGSRPQAGPALSSARVCKSEQ

SEQ ID NO: 24422 - protein, 247 aa, Homo sapiens
  Payload ID: 4874
  Gene Symbol: DUS1L
  Gene Name: dihydrouridine synthase 1-like
  ENSP ID: ENSP00000463180
MPKLQGFEFWSRTLRGARHVVAPMVDQSELAWRLLSRRHGAQLCYTPMLHAQVFVRDANYRKENLYCEVCPEDRPLIVQFCANDPEVFVQAALLAQDYCDAIDLNLGCPQMIAKRVLLAHEKLSVPVTCKIRVFPEIDKTVRYAQMLEKAGCQLLTVHGRTKEQKGPLSGAASWEHIKAVRKAVAIPVFANGNIQCLQDVERCLRDTGVQGVMSAEGNLHNPALFEGRSPAVWELAEEYLDIVREHP

SEQ ID NO: 24423 - protein, 309 aa, Homo sapiens
  Payload ID: 4874
  Gene Symbol: DUS1L
  Gene Name: dihydrouridine synthase 1-like
  ENSP ID: ENSP00000463509
MPKLQGFEFWSRTLRGARHVVAPMVDQSELAWRLLSRRHGAQLCYTPMLHAQVFVRDANYRKENLYCEVCPEDRPLIVQFCANDPEVFVQAALLAQDYCDAIDLNLGCPQMIAKRGHYGAFLQDEWDLLQRMILLAHEKLSVPVTCKIRVFPEIDKTVRYAQMLEKAGCQLLTVHGRTKEQKGPLSGAASWEHIKAVRKAVAIPVFANGNIQCLQDVERCLRDTGVQGVMSAEGNLHNPALFEGRSPAVWELAEEYLDIVREHPCPLSYVRAHLFKLWHHTLQVHQELREELAKVKTLEGIAAVSQELK

SEQ ID NO: 24424 - protein, 152 aa, Homo sapiens
  Payload ID: 4874
  Gene Symbol: DUS1L
  Gene Name: dihydrouridine synthase 1-like
  ENSP ID: ENSP00000463797
MPKLQGFEFWSRTLRGARHVVAPMVDQSELAWRLLSRRHGAQLCYTPMLHAQVFVRDANYRKENLYCEVCPEDRPLIVQAALLAQDYCDAIDLNLGCPQMIAKRGHYGAFLQDEWDLLQRMILLAHEKLSVPVTCKIRVFPEIDKTVRYAQM

SEQ ID NO: 24425 - protein, 301 aa, Homo sapiens
  Payload ID: 4874
  Gene Symbol: DUS1L
  Gene Name: dihydrouridine synthase 1-like
  ENSP ID: ENSP00000463962
MPKLQGFEFWSRTLRGARHVVAPMVDQSELAWRLLSRRHGAQLCYTPMLHAQVFVRDANYRKENLYCEVCPEDRPLIVQFCANDPEVFVQAALLAQDYCDAIDLNLGCPQMIAKRGHYGAFLQDEWDLLQRMILLAHEKLSVPVTCKIRVFPEIDKTVRYAQMLEKAGCQLLTVHGRTKEQKGPLSGAASWEHIKAVRKAVAIPVFANGNIQCLQDVERCLRDTGVQGVMSAGGQGPGQQPGPHAHGLIPPPRGQPAQPRPVRGPEPCRVGAGRGVSGHRAGAPLPPVLRPGPPLQAVAPH

SEQ ID NO: 24426 - protein, 493 aa, Homo sapiens
  Payload ID: 4875
  Gene Symbol: DUS2
  Gene Name: dihydrouridine synthase 2
  Uniprot ID: Q9NX74
  ENSP ID: ENSP00000351769
MILNSLSLCYHNKLILAPMVRVGTLPMRLLALDYGADIVYCEELIDLKMIQCKRVVNEVLSTVDFVAPDDRVVFRTCEREQNRVVFQMGTSDAERALAVARLVENDVAGIDVNMGCPKQYSTKGGMGAALLSDPDKIEKILSTLVKGTRRPVTCKIRILPSLEDTLSLVKRIERTGIAAIAVHGRKREERPQHPVSCEVIKAIADTLSIPVIANGGSHDHIQQYSDIEDFRQATAASSVMVARAAMWNPSIFLKEGLRPLEEVMQKYIRYAVQYDNHYTNTKYCLCQMLREQLESPQGRLLHAAQSSREICEAFGLGAFYEETTQELDAQQARLSAKTSEQTGEPAEDTSGVIKMAVKFDRRAYPAQITPKMCLLEWCRREKLAQPVYETVQRPLDRLFSSIVTVAEQKYQSTLWDKSKKLAEQAAAIVCLRSQGLPEGRLGEESPSLHKRKREAPDQDPGGPRAQELAQPGDLCKKPFVALGSGEESPLEGW

SEQ ID NO: 24427 - protein, 458 aa, Homo sapiens
  Payload ID: 4875
  Gene Symbol: DUS2
  Gene Name: dihydrouridine synthase 2
  ENSP ID: ENSP00000409498
MILNSLSLCYHNKLILAPMVRVGTLPMRLLALDYGADIVYCEELIDLKMIQCKRVVNEVLSTVDFVAPDDRVVFRTCEREQNRVVFQMGGMGAALLSDPDKIEKILSTLVKGTRRPVTCKIRILPSLEDTLSLVKRIERTGIAAIAVHGRKREERPQHPVSCEVIKAIADTLSIPVIANGGSHDHIQQYSDIEDFRQATAASSVMVARAAMWNPSIFLKEGLRPLEEVMQKYIRYAVQYDNHYTNTKYCLCQMLREQLESPQGRLLHAAQSSREICEAFGLGAFYEETTQELDAQQARLSAKTSEQTGEPAEDTSGVIKMAVKFDRRAYPAQITPKMCLLEWCRREKLAQPVYETVQRPLDRLFSSIVTVAEQKYQSTLWDKSKKLAEQAAAIVCLRSQGLPEGRLGEESPSLHKRKREAPDQDPGGPRAQELAQPGDLCKKPFVALGSGEESPLEGW

SEQ ID NO: 24428 - protein, 115 aa, Homo sapiens
  Payload ID: 4875
  Gene Symbol: DUS2
  Gene Name: dihydrouridine synthase 2
  ENSP ID: ENSP00000454252
MILNSLSLCYHNKLILAPMVRVGTLPMRLLALDYGADIVYCEELIDLKMIQCKRVVNEVLSTVDFVAPDDRVVFRTCEREQNRVVFQMGTSDAERALAVARLVENDVAGIDVNMG

SEQ ID NO: 24429 - protein, 81 aa, Homo sapiens
  Payload ID: 4875
  Gene Symbol: DUS2
  Gene Name: dihydrouridine synthase 2
  ENSP ID: ENSP00000454424
MILNSLSLCYHNKLILAPMVRVGTLPMRLLALDYGADIVYCEELIDLKMIQCKRVVNEVLSTVDFVAPDDRVVFRTCEREQ

SEQ ID NO: 24430 - protein, 493 aa, Homo sapiens; identical to SEQ ID NO: 24426
  Payload ID: 4875
  Gene Symbol: DUS2
  Gene Name: dihydrouridine synthase 2
  Uniprot ID: Q9NX74
  ENSP ID: ENSP00000455229

SEQ ID NO: 24431 - protein, 107 aa, Homo sapiens
  Payload ID: 4875
  Gene Symbol: DUS2
  Gene Name: dihydrouridine synthase 2
  ENSP ID: ENSP00000455977
MILNSLSLCYHNKLILAPMVRVGTLPMRLLALDYGADIVYCEELIDLKMIQCKRVVNEVLSTVDFVAPDDRVVFRTCEREQNRVVFQMGTSDAERALAVARLVENDV

SEQ ID NO: 24432 - protein, 41 aa, Homo sapiens
  Payload ID: 4875
  Gene Symbol: DUS2
  Gene Name: dihydrouridine synthase 2
  ENSP ID: ENSP00000456261
MILNSLSLCYHNKLILAPMVRVGTLPMRLLALDYGADIVYC

SEQ ID NO: 24433 - protein, 51 aa, Homo sapiens
  Payload ID: 4875
  Gene Symbol: DUS2
  Gene Name: dihydrouridine synthase 2
  ENSP ID: ENSP00000456677
MILNSLSLCYHNKLILAPMVRVGTLPMRLLALDYGADIVYCEELIDLKMIQ

SEQ ID NO: 24434 - protein, 87 aa, Homo sapiens
  Payload ID: 4875
  Gene Symbol: DUS2
  Gene Name: dihydrouridine synthase 2
  ENSP ID: ENSP00000457292
MILNSLSLCYHNKLILAPMVRVGTLPMRLLALDYGADIVYCERCSAQWTLSPLMIELSSAPVKESRTGWSSRWGLQTQSEPLLWPGL

SEQ ID NO: 24435 - protein, 73 aa, Homo sapiens
  Payload ID: 4875
  Gene Symbol: DUS2
  Gene Name: dihydrouridine synthase 2
  ENSP ID: ENSP00000458152
MILNSLSLCYHNKLILAPMVRVGTLPMRLLALDYGADIVYCEELIDLKMIQCKRVVNEVLSTVDFVAPDDRVV

SEQ ID NO: 24436 - protein, 88 aa, Homo sapiens
  Payload ID: 4875
  Gene Symbol: DUS2
  Gene Name: dihydrouridine synthase 2
  ENSP ID: ENSP00000458906
MILNSLSLCYHNKLILAPMVRVGTLPMRLLALDYGADIVYCEELIDLKMIQCKRVVNEVLSTVDFVAPDDRVVFRTCEREQNRVVFQM

SEQ ID NO: 24437 - protein, 123 aa, Homo sapiens
  Payload ID: 4875
  Gene Symbol: DUS2
  Gene Name: dihydrouridine synthase 2
  ENSP ID: ENSP00000461244
MILNSLSLCYHNKLILAPMVRVGTLPMRLLALDYGADIVYCEELIDLKMIQCKRVVNEVLSTVDFVAPDDRVVFRTCEREQNRVVFQMGTSDAERALAVARLVENDVAGIDVNMGCPKQYSTK

SEQ ID NO: 24438 - protein, 158 aa, Homo sapiens
  Payload ID: 4875
  Gene Symbol: DUS2
  Gene Name: dihydrouridine synthase 2
  ENSP ID: ENSP00000461659
MILNSLSLCYHNKLILAPMVRVGTLPMRLLALDYGADIVYCEELIDLKMIQCKRVVNEVLSTVDFVAPDDRVVFRTCEREQNRVVFQMGTSDAERALAVARLVENDVAGIDVNMGCPKQYSTKGGMGAALLSDPDKIEKILSTLVKGTRRPVTCKIRI

SEQ ID NO: 24439 - protein, 208 aa, Homo sapiens
  Payload ID: 4875
  Gene Symbol: DUS2
  Gene Name: dihydrouridine synthase 2
  ENSP ID: ENSP00000463498
MILNSLSLCYHNKLILAPMVRVGTLPMRLLALDYGADIVYCEELIDLKMIQCKRVVNEVLSTVDFVAPDDRVVFRTCEREQNRVVFQMGTSDAERALAVARLVENDVAGIDVNMGCPKQYSTKGGMGAALLSDPDKIEKILSTLVKGTRRPVTCKIRILPSLEDTLSLVKRIERTGIAAIAVHGRKREERPQHPVSCEVIKAIADTLS

SEQ ID NO: 24440 - protein, 650 aa, Homo sapiens
  Payload ID: 4876
  Gene Symbol: DUS3L
  Gene Name: dihydrouridine synthase 3-like
  Uniprot ID: Q96G46
  ENSP ID: ENSP00000311977
MAEGTAEAPLENGGGGDSGAGALERGVAPIKRQYLTTKEQFHQFLEAKGQEKTCRETEVGDPAGNELAEPEAKRIRLEDGQTADGQTEEAAEPGEQLQTQKRARGQNKGRPHVKPTNYDKNRLCPSLIQESAAKCFFGDRCRFLHDVGRYLETKPADLGPRCVLFETFGRCPYGVTCRFAGAHLRPEGQNLVQEELAARGTQPPSIRNGLDKALQQQLRKREVRFERAEQALRRFSQGPTPAAAVPEGTAAEGAPRQENCGAQQVPAGPGTSTPPSSPVRTCGPLTDEDVVRLRPCEKKRLDIRGKLYLAPLTTCGNLPFRRICKRFGADVTCGEMAVCTNLLQGQMSEWALLKRHQCEDIFGVQLEGAFPDTMTKCAELLSRTVEVDFVDINVGCPIDLVYKKGGGCALMNRSTKFQQIVRGMNQVLDVPLTVKIRTGVQERVNLAHRLLPELRDWGVALVTLHGRSREQRYTKLADWQYIEECVQAASPMPLFGNGDILSFEDANRAMQTGVTGIMIARGALLKPWLFTEIKEQRHWDISSSERLDILRDFTNYGLEHWGSDTQGVEKTRRFLLEWLSFLCRYVPVGLLERLPQRINERPPYYLGRDYLETLMASQKAADWIRISEMLLGPVPPSFAFLPKHKANAYK

SEQ ID NO: 24441 - protein, 408 aa, Homo sapiens
  Payload ID: 4876
  Gene Symbol: DUS3L
  Gene Name: dihydrouridine synthase 3-like
  Uniprot ID: Q96G46
  ENSP ID: ENSP00000315558
MAEGTAEAPLENGGGGDSGAGALERGVAPIKRQYLTTKEQFHQFLEAKGQEKTCRETELDIRGKLYLAPLTTCGNLPFRRICKRFGADVTCGEMAVCTNLLQGQMSEWALLKRHQCEDIFGVQLEGAFPDTMTKCAELLSRTVEVDFVDINVGCPIDLVYKKGGGCALMNRSTKFQQIVRGMNQVLDVPLTVKIRTGVQERVNLAHRLLPELRDWGVALVTLHGRSREQRYTKLADWQYIEECVQAASPMPLFGNGDILSFEDANRAMQTGVTGIMIARGALLKPWLFTEIKEQRHWDISSSERLDILRDFTNYGLEHWGSDTQGVEKTRRFLLEWLSFLCRYVPVGLLERLPQRINERPPYYLGRDYLETLMASQKAADWIRISEMLLGPVPPSFAFLPKHKANAYK

SEQ ID NO: 24442 - protein, 217 aa, Homo sapiens
  Payload ID: 4876
  Gene Symbol: DUS3L
  Gene Name: dihydrouridine synthase 3-like
  ENSP ID: ENSP00000465369
MAEGTAEAPLENGGGGDSGAGALERGVAPIKRQYLTTKEQFHQFLEAKGQEKTCRETEVGDPAGNELAEPEAKRIRLEDGQTADGQTEEAAEPGEQLQTQKRARGQNKGRPHVKPTNYDKNRTWCRRSWRPAGPSPRPSATAWTKPCSSSCGSARSASSELSRPCAGSARAPHPLPLSPRARQPRALPGRKTVVPSRSPQGRALAPLPAAPCGPAGP

SEQ ID NO: 24443 - protein, 169 aa, Homo sapiens
  Payload ID: 4876
  Gene Symbol: DUS3L
  Gene Name: dihydrouridine synthase 3-like
  ENSP ID: ENSP00000466351
  MOD_RES (1)..(1): Any amino acid
XKEQRHWDISSSERLDILRDFTNYGLEHWGSDTQGVEKTRRFLLEWLSFLCRYVPVGLLERLPQRINERPPYYLGRDYLETLMASQKAADWIRIRCLGGLELGSCSRGPGVTEGTLQVLGLTSLSTCSPTARCSLGQCPPASPSCRSTRPTRTSSLRLSQGHPGARRVQ

SEQ ID NO: 24444 - protein, 77 aa, Homo sapiens
  Payload ID: 4876
  Gene Symbol: DUS3L
  Gene Name: dihydrouridine synthase 3-like
  ENSP ID: ENSP00000467302
TEVGDPAGNELAEPEAKRIRLEDGQTADGQTEEAAEPGEQLQTQKRARGQNKGRPHVKPTNYDKNRLCPSLIQAIGC

SEQ ID NO: 24445 - protein, 171 aa, Homo sapiens
  Payload ID: 4876
  Gene Symbol: DUS3L
  Gene Name: dihydrouridine synthase 3-like
  ENSP ID: ENSP00000467987
CGNLPFRRICKRFGADVTCGEMAVCTNLLQGQMSEWALLKRHQCEDIFGVQLEGAFPDTMTKCAELLSRTVEVDFVDINVGCPIDLVYKKGGGCALMNRSTKFQQIVRGMNQVLDVPLTVKIRTGVQERVNLAHRLLPELRDWGVALVTEMGTSCHLRMPTAPCRLVSPGS

SEQ ID NO: 24446 - protein, 139 aa, Homo sapiens
  Payload ID: 4876
  Gene Symbol: DUS3L
  Gene Name: dihydrouridine synthase 3-like
  ENSP ID: ENSP00000468075
  MOD_RES (1)..(1): Any amino acid
XGVQLEGAFPDTMTKCAELLSRTVEVDFVDINVGCPIDLVYKKGGGCALMNRSTKFQQIVRGMNQVLDVPLTVKIRTGVQERVNLAHRLLPELRDWGVALVTPGSLGLFLSASHSLPPTLRGGFSPSSTAALGSSATPS

SEQ ID NO: 24447 - protein, 37 aa, Homo sapiens
  Payload ID: 4876
  Gene Symbol: DUS3L
  Gene Name: dihydrouridine synthase 3-like
  ENSP ID: ENSP00000468233
MREGHHVHARADTSPPRSSFTNSWKPKGRRRLAGKPR

SEQ ID NO: 24448 - protein, 317 aa, Homo sapiens
  Payload ID: 4877
  Gene Symbol: DUS4L
  Gene Name: dihydrouridine synthase 4-like
  Uniprot ID: O95620
  ENSP ID: ENSP00000265720
MKSDCMQTTICQERKKDPIEMFHSGQLVKVCAPMVRYSKLAFRTLVRKYSCDLCYTPMIVAADFVKSIKARDSEFTTNQGDCPLIVQFAANDARLLSDAARIVCPYANGIDINCGCPQRWAMAEGYGACLINKPELVQDMVKQVRNQVETPGFSVSIKIRIHDDLKRTVDLCQKAEATGVSWITVHGRTAEERHQPVHYDSIKIIKENMSIPVIANGDIRSLKEAENVWRITGTDGVMVARGLLANPAMFAGYEETPLKCIWDWVDIALELGTPYMCFHQHLMYMMEKITSRQEKRVFNALSSTSAIIDYLTDHYGI

SEQ ID NO: 24449 - protein, 119 aa, Homo sapiens
  Payload ID: 4877
  Gene Symbol: DUS4L
  Gene Name: dihydrouridine synthase 4-like
  ENSP ID: ENSP00000388061
MKSDCMQTTICQERKKDPIEMFHSGQLVKVCAPMVRYSKLAFRTLVRKYSCDLCYTPMIVAADFVKSIKARDSEFTTNQGDCPLIVQFAANDARLLSDAARIVCPYANGIDINCGCPQR

SEQ ID NO: 24450 - protein, 90 aa, Homo sapiens
  Payload ID: 4877
  Gene Symbol: DUS4L
  Gene Name: dihydrouridine synthase 4-like
  ENSP ID: ENSP00000388904
MKSDCMQTTICQERKKDPIEMFHSGQLVKVCAPMVRYSKLAFRTLVRKYSCDLCYTPMIVAADFVKSIKARDSEFTTNQGGQWQKVMGLA

SEQ ID NO: 24451 - protein, 48 aa, Homo sapiens
  Payload ID: 4877
  Gene Symbol: DUS4L
  Gene Name: dihydrouridine synthase 4-like
  ENSP ID: ENSP00000399375
MKSDCMQTTICQERKKDPIEMFHSGQLVKVCAPMVRYSKRWKFYHIKL

SEQ ID NO: 24452 - protein, 90 aa, Homo sapiens; identical to SEQ ID NO: 24450
  Payload ID: 4877
  Gene Symbol: DUS4L
  Gene Name: dihydrouridine synthase 4-like
  ENSP ID: ENSP00000402887

SEQ ID NO: 24453 - protein, 90 aa, Homo sapiens; identical to SEQ ID NO: 24450
  Payload ID: 4877
  Gene Symbol: DUS4L
  Gene Name: dihydrouridine synthase 4-like
  ENSP ID: ENSP00000412739

SEQ ID NO: 24454 - protein, 313 aa, Homo sapiens
  Payload ID: 4878
  Gene Symbol: DIMT1
  Gene Name: DIM1 dimethyladenosine transferase 1 homolog
  Uniprot ID: Q9UNQ2
  ENSP ID: ENSP00000199320
MPKVKSGAIGRRRGRQEQRRELKSAGGLMFNTGIGQHILKNPLIINSIIDKAALRPTDVVLEVGPGTGNMTVKLLEKAKKVVACELDPRLVAELHKRVQGTPVASKLQVLVGDVLKTDLPFFDTCVANLPYQISSPFVFKLLLHRPFFRCAILMFQREFALRLVAKPGDKLYCRLSINTQLLARVDHLMKVGKNNFRPPPKVESSVVRIEPKNPPPPINFQEWDGLVRITFVRKNKTLSAAFKSSAVQQLLEKNYRIHCSVHNIIIPEDFSIADKIQQILTSTGFSDKRARSMDIDDFIRLLHGFNAEGIHFS

SEQ ID NO: 24455 - protein, 275 aa, Homo sapiens
  Payload ID: 4878
  Gene Symbol: DIMT1
  Gene Name: DIM1 dimethyladenosine transferase 1 homolog
  ENSP ID: ENSP00000421754
MPKVKSGAIGRRRGRQEQRRELKSAGGLMFNTGIGQHILKNPLIINSIIDKAALRPTDVVLEVGPGTGNMTVKLLEKAKKVVACELDPRLVAELHKRVQGTPVASKLQVLVGDVLKTDLPFFDTCVANLPYQISSPFVFKLLLHRPFFRCAILMFQREFALRLVAKPGDKLYCRLSINTQLLARVDHLMKVGKNNFRPPPKVESSVVRIEPKNPPPPINFQEWDGLVRITFVRKNKTLSAAFKSSAVQQLLEKNYRIHCSVHNIVSAAVYPVKQI

SEQ ID NO: 24456 - protein, 154 aa, Homo sapiens
  Payload ID: 4878
  Gene Symbol: DIMT1
  Gene Name: DIM1 dimethyladenosine transferase 1 homolog
  ENSP ID: ENSP00000427193
MPKVKSGAIGRRRGRQEQRRELKSAGGLMFNTGIGQHILKNPLIINSIIDKAALRPTDVVLEVGPGTGNMTVKLLEKAKKVVACELDPRLVAELHKRVQGTPVASKLQVLVGDVLKTDLPFFDTCVANLPYQISSPFVFKLLLHRPFFRFVTKD

SEQ ID NO: 24457 - protein, 285 aa, Homo sapiens
  Payload ID: 4879
  Gene Symbol: DDAH1
  Gene Name: dimethylarginine dimethylaminohydrolase 1
  Uniprot ID: O94760
  ENSP ID: ENSP00000284031
MAGLGHPAAFGRATHAVVRALPESLGQHALRSAKGEEVDVARAERQHQLYVGVLGSKLGLQVVELPADESLPDCVFVEDVAVVCEETALITRPGAPSRRKEVDMMKEALEKLQLNIVEMKDENATLDGGDVLFTGREFFVGLSKRTNQRGAEILADTFKDYAVSTVPVADGLHLKSFCSMAGPNLIAIGSSESAQKALKIMQQMSDHRYDKLTVPDDIAANCIYLNIPNKGHVLLHRTPEEYPESAKVYEKLKDHMLIPVSMSELEKVDGLLTCCSVLINKKVDS

SEQ ID NO: 24458 - protein, 182 aa, Homo sapiens
  Payload ID: 4879
  Gene Symbol: DDAH1
  Gene Name: dimethylarginine dimethylaminohydrolase 1
  Uniprot ID: O94760
  ENSP ID: ENSP00000411189
MMKEALEKLQLNIVEMKDENATLDGGDVLFTGREFFVGLSKRTNQRGAEILADTFKDYAVSTVPVADGLHLKSFCSMAGPNLIAIGSSESAQKALKIMQQMSDHRYDKLTVPDDIAANCIYLNIPNKGHVLLHRTPEEYPESAKVYEKLKDHMLIPVSMSELEKVDGLLTCCSVLINKKVDS

SEQ ID NO: 24459 - protein, 285 aa, Homo sapiens; identical to SEQ ID NO: 24457
  Payload ID: 4879
  Gene Symbol: DDAH1
  Gene Name: dimethylarginine dimethylaminohydrolase 1
  Uniprot ID: O94760
  ENSP ID: ENSP00000438604

SEQ ID NO: 24460 - protein, 182 aa, Homo sapiens; identical to SEQ ID NO: 24458
  Payload ID: 4879
  Gene Symbol: DDAH1
  Gene Name: dimethylarginine dimethylaminohydrolase 1
  Uniprot ID: O94760
  ENSP ID: ENSP00000439045

SEQ ID NO: 24461 - protein, 185 aa, Homo sapiens
  Payload ID: 4879
  Gene Symbol: DDAH1
  Gene Name: dimethylarginine dimethylaminohydrolase 1
  ENSP ID: ENSP00000488725
MVDMMKEALEKLQLNIVEMKDENATLDGGDVLFTGREFFVGLSKRTNQRGAEILADTFKDYAVSTVPVADGLHLKSFCSMAGPNLIAIGSSESAQKALKIMQQMSDHRYDKLTVPDDIAANCIYLNIPNKGHVLLHRTPEEYPESAKVYEKLKDHMLIPVSMSELEKVDGLLTCCSVLINKKVDS

SEQ ID NO: 24462 - protein, 285 aa, Homo sapiens
  Payload ID: 4880
  Gene Symbol: DDAH2
  Gene Name: dimethylarginine dimethylaminohydrolase 2
  Uniprot ID: O95865
  ENSP ID: ENSP00000364943
MGTPGEGLGRCSHALIRGVPESLASGEGAGAGLPALDLAKAQREHGVLGGKLRQRLGLQLLELPPEESLPLGPLLGDTAVIQGDTALITRPWSPARRPEVDGVRKALQDLGLRIVEIGDENATLDGTDVLFTGREFFVGLSKWTNHRGAEIVADTFRDFAVSTVPVSGPSHLRGLCGMGGPRTVVAGSSDAAQKAVRAMAVLTDHPYASLTLPDDAAADCLFLRPGLPGVPPFLLHRGGGDLPNSQEALQKLSDVTLVPVSCSELEKAGAGLSSLCLVLSTRPHS

SEQ ID NO: 24463 - protein, 285 aa, Homo sapiens; identical to SEQ ID NO: 24462
  Payload ID: 4880
  Gene Symbol: DDAH2
  Gene Name: dimethylarginine dimethylaminohydrolase 2
  Uniprot ID: O95865
  ENSP ID: ENSP00000364945

SEQ ID NO: 24464 - protein, 285 aa, Homo sapiens; identical to SEQ ID NO: 24462
  Payload ID: 4880
  Gene Symbol: DDAH2
  Gene Name: dimethylarginine dimethylaminohydrolase 2
  Uniprot ID: O95865
  ENSP ID: ENSP00000364949

SEQ ID NO: 24465 - protein, 285 aa, Homo sapiens; identical to SEQ ID NO: 24462
  Payload ID: 4880
  Gene Symbol: DDAH2
  Gene Name: dimethylarginine dimethylaminohydrolase 2
  Uniprot ID: O95865
  ENSP ID: ENSP00000372901

SEQ ID NO: 24466 - protein, 285 aa, Homo sapiens; identical to SEQ ID NO: 24462
  Payload ID: 4880
  Gene Symbol: DDAH2
  Gene Name: dimethylarginine dimethylaminohydrolase 2
  Uniprot ID: O95865
  ENSP ID: ENSP00000382935

SEQ ID NO: 24467 - protein, 285 aa, Homo sapiens; identical to SEQ ID NO: 24462
  Payload ID: 4880
  Gene Symbol: DDAH2
  Gene Name: dimethylarginine dimethylaminohydrolase 2
  Uniprot ID: O95865
  ENSP ID: ENSP00000382936

SEQ ID NO: 24468 - protein, 226 aa, Homo sapiens
  Payload ID: 4880
  Gene Symbol: DDAH2
  Gene Name: dimethylarginine dimethylaminohydrolase 2
  ENSP ID: ENSP00000387943
MGTPGEGLGRCSHALIRGVPESLASGEGAGAGLPALDLAKAQREHGVLGGKLRQRLGLQLLELPPEESLPLGPLLGDTAVIQGDTALITRPWSPARRPEVDGVRKALQDLGLRIVEIGDENATLDGTDVLFTGREFFVGLSKWTNHRGAEIVADTFRDFAVSTVPVSGPSHLRGLCGMGGPRTVVAGSSDAAQKAVRAMAVLTDHPYASLTLPDDAAADCLFLRPG

SEQ ID NO: 24469 - protein, 236 aa, Homo sapiens
  Payload ID: 4880
  Gene Symbol: DDAH2
  Gene Name: dimethylarginine dimethylaminohydrolase 2
  ENSP ID: ENSP00000388456
MGTPGEGLGRCSHALIRGVPESLASGEGAGAGLPALDLAKAQREHGVLGGKLRQRLGLQLLELPPEESLPLGPLLGDTAVIQGDTALITRPWSPARRPEVDGVRKALQDLGLRIVEIGDENATLDGTDVLFTGREFFVGLSKWTNHRGAEIVADTFRDFAVSTVPVSGPSHLRGLCGMGGPRTVVAGSSDAAQKAVRAMAVLTDHPYASLTLPDDAAADCLFLRPGLPGVPPFLLH

SEQ ID NO: 24470 - protein, 285 aa, Homo sapiens; identical to SEQ ID NO: 24462
  Payload ID: 4880
  Gene Symbol: DDAH2
  Gene Name: dimethylarginine dimethylaminohydrolase 2
  Uniprot ID: O95865
  ENSP ID: ENSP00000389552

SEQ ID NO: 24471 - protein, 188 aa, Homo sapiens
  Payload ID: 4880
  Gene Symbol: DDAH2
  Gene Name: dimethylarginine dimethylaminohydrolase 2
  ENSP ID: ENSP00000390549
  MOD_RES (1)..(1): Any amino acid
XRRPEVDGVRKALQDLGLRIVEIGDENATLDGTDVLFTGREFFVGLSKWTNHRGAEIVADTFRDFAVSTVPVSGPSHLRGLCGMGGPRTVVAGSSDAAQKAVRMTQLLTVSFFVLGCLVCPLSSCTVEVGICPTARRHCRSSLMSPWYLCPAQNWRRLAPGSAPSAWCSAHAPTAEGLALGYCWPGVG

SEQ ID NO: 24472 - protein, 285 aa, Homo sapiens; identical to SEQ ID NO: 24462
  Payload ID: 4880
  Gene Symbol: DDAH2
  Gene Name: dimethylarginine dimethylaminohydrolase 2
  Uniprot ID: O95865
  ENSP ID: ENSP00000391632

SEQ ID NO: 24473 - protein, 285 aa, Homo sapiens; identical to SEQ ID NO: 24462
  Payload ID: 4880
  Gene Symbol: DDAH2
  Gene Name: dimethylarginine dimethylaminohydrolase 2
  Uniprot ID: O95865
  ENSP ID: ENSP00000391833

SEQ ID NO: 24474 - protein, 225 aa, Homo sapiens
  Payload ID: 4880
  Gene Symbol: DDAH2
  Gene Name: dimethylarginine dimethylaminohydrolase 2
  ENSP ID: ENSP00000393967
MGTPGEGLGRCSHALIRGVPESLASGEGAGAGLPALDLAKAQREHGVLGGKLRQRLGLQLLELPPEESLPLGPLLGDTAVIQGDTALITRPWSPARRPEVDGVRKALQDLGLRIVEIGDENATLDGTDVLFTGREFFVGLSKWTNHRGAEIVADTFRDFAVSTVPVSGPSHLRGLCGMGGPRTVVAGSSDAAQKAVRAMAVLTDHPYASLTLPDDAAADCLFLRP

SEQ ID NO: 24475 - protein, 236 aa, Homo sapiens; identical to SEQ ID NO: 24469
  Payload ID: 4880
  Gene Symbol: DDAH2
  Gene Name: dimethylarginine dimethylaminohydrolase 2
  ENSP ID: ENSP00000394578

SEQ ID NO: 24476 - protein, 285 aa, Homo sapiens; identical to SEQ ID NO: 24462
  Payload ID: 4880
  Gene Symbol: DDAH2
  Gene Name: dimethylarginine dimethylaminohydrolase 2
  Uniprot ID: O95865
  ENSP ID: ENSP00000395372

SEQ ID NO: 24477 - protein, 226 aa, Homo sapiens; identical to SEQ ID NO: 24468
  Payload ID: 4880
  Gene Symbol: DDAH2
  Gene Name: dimethylarginine dimethylaminohydrolase 2
  ENSP ID: ENSP00000395759

SEQ ID NO: 24478 - protein, 236 aa, Homo sapiens; identical to SEQ ID NO: 24469
  Payload ID: 4880
  Gene Symbol: DDAH2
  Gene Name: dimethylarginine dimethylaminohydrolase 2
  ENSP ID: ENSP00000397466

SEQ ID NO: 24479 - protein, 285 aa, Homo sapiens; identical to SEQ ID NO: 24462
  Payload ID: 4880
  Gene Symbol: DDAH2
  Gene Name: dimethylarginine dimethylaminohydrolase 2
  Uniprot ID: O95865
  ENSP ID: ENSP00000399023

SEQ ID NO: 24480 - protein, 285 aa, Homo sapiens; identical to SEQ ID NO: 24462
  Payload ID: 4880
  Gene Symbol: DDAH2
  Gene Name: dimethylarginine dimethylaminohydrolase 2
  Uniprot ID: O95865
  ENSP ID: ENSP00000399357

SEQ ID NO: 24481 - protein, 285 aa, Homo sapiens; identical to SEQ ID NO: 24462
  Payload ID: 4880
  Gene Symbol: DDAH2
  Gene Name: dimethylarginine dimethylaminohydrolase 2
  Uniprot ID: O95865
  ENSP ID: ENSP00000402594

SEQ ID NO: 24482 - protein, 188 aa, Homo sapiens; identical to SEQ ID NO: 24471
  Payload ID: 4880
  Gene Symbol: DDAH2
  Gene Name: dimethylarginine dimethylaminohydrolase 2
  ENSP ID: ENSP00000402854
  MOD_RES (1)..(1): Any amino acid

SEQ ID NO: 24483 - protein, 285 aa, Homo sapiens; identical to SEQ ID NO: 24462
  Payload ID: 4880
  Gene Symbol: DDAH2
  Gene Name: dimethylarginine dimethylaminohydrolase 2
  Uniprot ID: O95865
  ENSP ID: ENSP00000403154

SEQ ID NO: 24484 - protein, 285 aa, Homo sapiens; identical to SEQ ID NO: 24462
  Payload ID: 4880
  Gene Symbol: DDAH2
  Gene Name: dimethylarginine dimethylaminohydrolase 2
  Uniprot ID: O95865
  ENSP ID: ENSP00000404342

SEQ ID NO: 24485 - protein, 285 aa, Homo sapiens; identical to SEQ ID NO: 24462
  Payload ID: 4880
  Gene Symbol: DDAH2
  Gene Name: dimethylarginine dimethylaminohydrolase 2
  Uniprot ID: O95865
  ENSP ID: ENSP00000404851

SEQ ID NO: 24486 - protein, 236 aa, Homo sapiens; identical to SEQ ID NO: 24469
  Payload ID: 4880
  Gene Symbol: DDAH2
  Gene Name: dimethylarginine dimethylaminohydrolase 2
  ENSP ID: ENSP00000405005

SEQ ID NO: 24487 - protein, 285 aa, Homo sapiens; identical to SEQ ID NO: 24462
  Payload ID: 4880
  Gene Symbol: DDAH2
  Gene Name: dimethylarginine dimethylaminohydrolase 2
  Uniprot ID: O95865
  ENSP ID: ENSP00000405515

SEQ ID NO: 24488 - protein, 188 aa, Homo sapiens; identical to SEQ ID NO: 24471
  Payload ID: 4880
  Gene Symbol: DDAH2
  Gene Name: dimethylarginine dimethylaminohydrolase 2
  ENSP ID: ENSP00000406990
  MOD_RES (1)..(1): Any amino acid

SEQ ID NO: 24489 - protein, 285 aa, Homo sapiens; identical to SEQ ID NO: 24462
  Payload ID: 4880
  Gene Symbol: DDAH2
  Gene Name: dimethylarginine dimethylaminohydrolase 2
  Uniprot ID: O95865
  ENSP ID: ENSP00000408148

SEQ ID NO: 24490 - protein, 236 aa, Homo sapiens; identical to SEQ ID NO: 24469
  Payload ID: 4880
  Gene Symbol: DDAH2
  Gene Name: dimethylarginine dimethylaminohydrolase 2
  ENSP ID: ENSP00000408572

SEQ ID NO: 24491 - protein, 188 aa, Homo sapiens; identical to SEQ ID NO: 24471
  Payload ID: 4880
  Gene Symbol: DDAH2
  Gene Name: dimethylarginine dimethylaminohydrolase 2
  ENSP ID: ENSP00000408699
  MOD_RES (1)..(1): Any amino acid

SEQ ID NO: 24492 - protein, 285 aa, Homo sapiens; identical to SEQ ID NO: 24462
  Payload ID: 4880
  Gene Symbol: DDAH2
  Gene Name: dimethylarginine dimethylaminohydrolase 2
  Uniprot ID: O95865
  ENSP ID: ENSP00000409396

SEQ ID NO: 24493 - protein, 226 aa, Homo sapiens; identical to SEQ ID NO: 24468
  Payload ID: 4880
  Gene Symbol: DDAH2
  Gene Name: dimethylarginine dimethylaminohydrolase 2
  ENSP ID: ENSP00000409450

SEQ ID NO: 24494 - protein, 226 aa, Homo sapiens; identical to SEQ ID NO: 24468
  Payload ID: 4880
  Gene Symbol: DDAH2
  Gene Name: dimethylarginine dimethylaminohydrolase 2
  ENSP ID: ENSP00000410144

SEQ ID NO: 24495 - protein, 236 aa, Homo sapiens; identical to SEQ ID NO: 24469
  Payload ID: 4880
  Gene Symbol: DDAH2
  Gene Name: dimethylarginine dimethylaminohydrolase 2
  ENSP ID: ENSP00000411554

SEQ ID NO: 24496 - protein, 285 aa, Homo sapiens; identical to SEQ ID NO: 24462
  Payload ID: 4880
  Gene Symbol: DDAH2
  Gene Name: dimethylarginine dimethylaminohydrolase 2
  Uniprot ID: O95865
  ENSP ID: ENSP00000412327

SEQ ID NO: 24497 - protein, 285 aa, Homo sapiens; identical to SEQ ID NO: 24462
  Payload ID: 4880
  Gene Symbol: DDAH2
  Gene Name: dimethylarginine dimethylaminohydrolase 2
  Uniprot ID: O95865
  ENSP ID: ENSP00000412800

SEQ ID NO: 24498 - protein, 188 aa, Homo sapiens; identical to SEQ ID NO: 24471
  Payload ID: 4880
  Gene Symbol: DDAH2
  Gene Name: dimethylarginine dimethylaminohydrolase 2
  ENSP ID: ENSP00000413164
  MOD_RES (1)..(1): Any amino acid

SEQ ID NO: 24499 - protein, 188 aa, Homo sapiens; identical to SEQ ID NO: 24471
  Payload ID: 4880
  Gene Symbol: DDAH2
  Gene Name: dimethylarginine dimethylaminohydrolase 2
  ENSP ID: ENSP00000414074
  MOD_RES (1)..(1): Any amino acid

SEQ ID NO: 24500 - protein, 226 aa, Homo sapiens; identical to SEQ ID NO: 24468
  Payload ID: 4880
  Gene Symbol: DDAH2
  Gene Name: dimethylarginine dimethylaminohydrolase 2
  ENSP ID: ENSP00000414967

SEQ ID NO: 24501 - protein, 236 aa, Homo sapiens; identical to SEQ ID NO: 24469
  Payload ID: 4880
  Gene Symbol: DDAH2
  Gene Name: dimethylarginine dimethylaminohydrolase 2
  ENSP ID: ENSP00000415005

SEQ ID NO: 24502 - protein, 226 aa, Homo sapiens; identical to SEQ ID NO: 24468
  Payload ID: 4880
  Gene Symbol: DDAH2
  Gene Name: dimethylarginine dimethylaminohydrolase 2
  ENSP ID: ENSP00000416012

SEQ ID NO: 24503 - protein, 188 aa, Homo sapiens; identical to SEQ ID NO: 24471
  Payload ID: 4880
  Gene Symbol: DDAH2
  Gene Name: dimethylarginine dimethylaminohydrolase 2
  ENSP ID: ENSP00000416785
  MOD_RES (1)..(1): Any amino acid

SEQ ID NO: 24504 - protein, 866 aa, Homo sapiens
  Payload ID: 4881
  Gene Symbol: DMGDH
  Gene Name: dimethylglycine dehydrogenase
  Uniprot ID: Q9UI17
  ENSP ID: ENSP00000255189
MLRPGAQLLRGLLLRSCPLQGSPGRPRSVCGREGEEKPPLSAETQWKDRAETVIIGGGCVGVSLAYHLAKAGMKDVVLLEKSELTAGSTWHAAGLTTYFHPGINLKKIHYDSIKLYEKLEEETGQVVGFHQPGSIRLATTPVRVDEFKYQMTRTGWHATEQYLIEPEKIQEMFPLLNMNKVLAGLYNPGDGHIDPYSLTMALAAGARKCGALLKYPAPVTSLKARSDGTWDVETPQGSMRANRIVNAAGFWAREVGKMIGLEHPLIPVQHQYVVTSTISEVKALKRELPVLRDLEGSYYLRQERDGLLFGPYESQEKMKVQDSWVTNGVPPGFGKELFESDLDRIMEHIKAAMEMVPVLKKADIINVVNGPITYSPDILPMVGPHQGVRNYWVAIGFGYGIIHAGGVGKYLSDWILHGEPPFDLIELDPNRYGKWTTTQYTEAKARESYGFNNIVGYPKEERFAGRPTQRVSGLYQRLESKCSMGFHAGWEQPHWFYKPGQDTQYRPSFRRTNWFEPVGSEYKQVMQRVAVTDLSPFGKFNIKGQDSIRLLDHLFANVIPKVGFTNISHMLTPKGRVYAELTVSHQSPGEFLLITGSGSELHDLRWIEEEAVKGGYDVEIKNITDELGVLGVAGPQARKVLQKLTSEDLSDDVFKFLQTKSLKVSNIPVTAIRISYTGELGWELYHRREDSVALYDAIMNAGQEEGIDNFGTYAMNALRLEKAFRAWGLEMNCDTNPLEAGLEYFVKLNKPADFIGKQALKQIKAKGLKRRLVCLTLATDDVDPEGNESIWYNGKVVGNTTSGSYSYSIQKSLAFAYVPVQLSEVGQQVEVELLGKNYPAVIIQEPLVLTEPTRNRLQKKGGKDKT

SEQ ID NO: 24505 - protein, 98 aa, Homo sapiens
  Payload ID: 4881
  Gene Symbol: DMGDH
  Gene Name: dimethylglycine dehydrogenase
  ENSP ID: ENSP00000427834
MLRPGAQLLRGLLLRSCPLQGSPGRPRSVCGREGEEKPPLSAETQWKDRAETVIIGGGCVGVSLAYHLAKAGMKDVVLLEKSELTAGSTWHADFGLVK

SEQ ID NO: 24506 - protein, 50 aa, Homo sapiens
  Payload ID: 4881
  Gene Symbol: DMGDH
  Gene Name: dimethylglycine dehydrogenase
  ENSP ID: ENSP00000428092
MLRPGAQLLRGLLLRSCPLQGSPGRPRSVCGREGFNNLLSSWNKLEENTL

SEQ ID NO: 24507 - protein, 106 aa, Homo sapiens
  Payload ID: 4881
  Gene Symbol: DMGDH
  Gene Name: dimethylglycine dehydrogenase
  ENSP ID: ENSP00000428995
MLRPGAQLLRGLLLRSCPLQGSPGRPRSVCGREGEEKPPLSAETQWKDRAETVIIGGGCVGVSLAYHLAKAGMKDVVLLEKSELTAGSTWHAIWHNPRWWGREISQ

SEQ ID NO: 24508 - protein, 50 aa, Homo sapiens; identical to SEQ ID NO: 24506
  Payload ID: 4881
  Gene Symbol: DMGDH
  Gene Name: dimethylglycine dehydrogenase
  ENSP ID: ENSP00000430133

SEQ ID NO: 24509 - protein, 613 aa, Homo sapiens
  Payload ID: 4881
  Gene Symbol: DMGDH
  Gene Name: dimethylglycine dehydrogenase
  ENSP ID: ENSP00000430972
YLIEPEKIQEMFPLLNMNKVLAGLYNPGDGHIDPYSLTMALAAGARKCGALLKYPAPVTSLKARSDGTWDVETPQGSMRANRIVNAAGFWAREVGKMIGLEHPLIPVQHQYVVTSTISEVKALKRELPVLRDLEGSYYLRQERDGLLFGPYESQEKMKVQDSWVTNGVPPGFGKELFESDLDRIMEHIKAAMEMVPVLKKADIINVVNGPITYSPDILPMVGPHQGVRNYWVAIGFGYGIIHAGGVGKYLSDWILHGEPPFDLIELDPNRYGKWTTTQYTEAKARESYGFNNIVGYPKEERFAGRPTQRVSGLYQRLESKCSMGFHAGWEQPHWFYKPGQDTQYRPSFRRTNWFEPVGSEYKQVMQRVAVTDLSPFGKFNIKGQDSIRLLDHLFANVIPKVGFTNISHMLTPKGRVYAELTVSHQSPGEFLLITGSGSELHDLRWIEEEAVKGGYDVEIKNITDELGVLGVAGPQARKVLQKLTSEDLSDDVFKFLQTKSLKVSNIPVTAIRISYTGELGWELYHRREDSVALYDAIMNAGQEEGIDNFGTYAMNALRLEKAFRAWGLEMNCDTNPLEAGLEYFVKLNKDQNSCFAHFKEENGWVSRWAIRPY

SEQ ID NO: 24510 - protein, 411 aa, Homo sapiens
  Payload ID: 4882
  Gene Symbol: DPEP1
  Gene Name: dipeptidase 1 (renal)
  Uniprot ID: P16444
  ENSP ID: ENSP00000261615
MWSGWWLWPLVAVCTADFFRDEAERIMRDSPVIDGHNDLPWQLLDMFNNRLQDERANLTTLAGTHTNIPKLRAGFVGGQFWSVYTPCDTQNKDAVRRTLEQMDVVHRMCRMYPETFLYVTSSAGIRQAFREGKVASLIGVEGGHSIDSSLGVLRALYQLGMRYLTLTHSCNTPWADNWLVDTGDSEPQSQGLSPFGQRVVKELNRLGVLIDLAHVSVATMKATLQLSRAPVIFSHSSAYSVCASRRNVPDDVLRLVKQTDSLVMVNFYNNYISCTNKANLSQVADHLDHIKEVAGARAVGFGGDFDGVPRVPEGLEDVSKYPDLIAELLRRNWTEAEVKGALADNLLRVFEAVEQASNLTQAPEEEPIPLDQLGGSCRTHYGYSSGASSLHRHWGLLLASLAPLVLCLSLL

SEQ ID NO: 24511 - protein, 411 aa, Homo sapiens; identical to SEQ ID NO: 24510
  Payload ID: 4882
  Gene Symbol: DPEP1
  Gene Name: dipeptidase 1 (renal)
  Uniprot ID: P16444
  ENSP ID: ENSP00000376807

SEQ ID NO: 24512 - protein, 411 aa, Homo sapiens; identical to SEQ ID NO: 24510
  Payload ID: 4882
  Gene Symbol: DPEP1
  Gene Name: dipeptidase 1 (renal)
  Uniprot ID: P16444
  ENSP ID: ENSP00000397313

SEQ ID NO: 24513 - protein, 111 aa, Homo sapiens
  Payload ID: 4882
  Gene Symbol: DPEP1
  Gene Name: dipeptidase 1 (renal)
  ENSP ID: ENSP00000455142
MWSGWWLWPLVAVCTADFFRDEAERIMRDSPVIDGHNDLPWQLLDMFNNRLQDERANLTTLAGTHTNIPKLRAGFVGGQFWSVYTPCDTQNKDAVRRTLEQMDVVHRMCRM

SEQ ID NO: 24514 - protein, 107 aa, Homo sapiens
  Payload ID: 4882
  Gene Symbol: DPEP1
  Gene Name: dipeptidase 1 (renal)
  ENSP ID: ENSP00000455916
MWSGWWLWPLVAVCTADFFRDEAERIMRDSPVIDGHNDLPWQLLDMFNNRLQDERANLTTLAGTHTNIPKLRAGFVGGQFWSVYTPCDTQNKDAVRRTLEQMDVVHR

SEQ ID NO: 24515 - protein, 486 aa, Homo sapiens
  Payload ID: 4883
  Gene Symbol: DPEP2
  Gene Name: dipeptidase 2
  Uniprot ID: Q9H4A9
  ENSP ID: ENSP00000377430
MQPSGLEGPGTFGRWPLLSLLLLLLLLQPVTCAYTTPGPPRALTTLGAPRAHTMPGTYAPSTTLSSPSTQGLQEQARALMRDFPLVDGHNDLPLVLRQVYQKGLQDVNLRNFSYGQTSLDRLRDGLVGAQFWSAYVPCQTQDRDALRLTLEQIDLIRRMCASYSELELVTSAKALNDTQKLACLIGVEGGHSLDNSLSILRTFYMLGVRYLTLTHTCNTPWAESSAKGVHSFYNNISGLTDFGEKVVAEMNRLGMMVDLSHVSDAVARRALEVSQAPVIFSHSAARGVCNSARNVPDDILQLLKKNGGVVMVSLSMGVIQCNPSANVSTVADHFDHIKAVIGSKFIGIGGDYDGAGKFPQGLEDVSTYPVLIEELLSRGWSEEELQGVLRGNLLRVFRQVEKVQEENKWQSPLEDKFPDEQLSSSCHSDLSRLRQRQSLTSGQELTEIPIHWTAKLPAKWSVSESSPHMAPVLAVVATFPVLILWL

SEQ ID NO: 24516 - protein, 486 aa, Homo sapiens; identical to SEQ ID NO: 24515
  Payload ID: 4883
  Gene Symbol: DPEP2
  Gene Name: dipeptidase 2
  Uniprot ID: Q9H4A9
  ENSP ID: ENSP00000458977

SEQ ID NO: 24517 - protein, 258 aa, Homo sapiens
  Payload ID: 4883
  Gene Symbol: DPEP2
  Gene Name: dipeptidase 2
  ENSP ID: ENSP00000459375
MQPSGLEGPGTFGRWPLLSLLLLLLLLQPVTCAYTTPGPPRALTTLGAPRAHTMPGTYAPSTTLSSPSTQGLQEQARALMRDFPLVDGHNDLPLVLRQVYQKGLQDVNLRNFSYGQTSLDRLRDGLVGAQFWSAYVPCQTQDRDALRLTLEQIDLIRRMCASYSELELVTSAKALNDTQKLACLIGVEGGHSLDNSLSILRTFYMLGVRYLTLTHTCNTPWAESSAKGVHSFYNNISGLTDFGEMLWHGGPWKCHRHL

SEQ ID NO: 24518 - protein, 137 aa, Homo sapiens
  Payload ID: 4883
  Gene Symbol: DPEP2
  Gene Name: dipeptidase 2
  ENSP ID: ENSP00000460169
MQPSGLEGPGTFGRWPLLSLLLLLLLLQPVTCAYTTPGPPRALTTLGAPRAHTMPGTYAPSTTLSSPSTQGLQEQARALMRDFPLVDGHNDLPLVLRQVYQKGLQDVNLRNFSYGQTSLDRLRDGLVGAQFWSAYVP

SEQ ID NO: 24519 - protein, 114 aa, Homo sapiens
  Payload ID: 4883
  Gene Symbol: DPEP2
  Gene Name: dipeptidase 2
  ENSP ID: ENSP00000461250
MQPSGLEGPGTFGRWPLLSLLLLLLLLQPVTCAYTTPGPPRALTTLGAPRAHTMPGTYAPSTTLSSPSTQGLQEQARALMRDFPLVDGHNDLPLVLRQVYQKGLQDVNLRNFSY

SEQ ID NO: 24520 - protein, 122 aa, Homo sapiens
  Payload ID: 4883
  Gene Symbol: DPEP2
  Gene Name: dipeptidase 2
  ENSP ID: ENSP00000462652
MQMIIIWALLDTEAESSAKGVHSFYNNISGLTDFGEKVVAEMNRLGMMVDLSHVSDAVARRALEVSQAPVIFSHSAARGVCNSARNVPDDILQLLKKNGGVVMVSLSMGVIQCNPSANVSTV

SEQ ID NO: 24521 - protein, 161 aa, Homo sapiens
  Payload ID: 4883
  Gene Symbol: DPEP2
  Gene Name: dipeptidase 2
  ENSP ID: ENSP00000463604
MKLQTLAVSVTALKFWSAYVPCQTQDRDALRLTLEQIDLIRRMCASYSELELVTSAKALNDTQKLACLIGVEGGHSLDNSLSILRTFYMLGVRYLTLTHTCNTPWAESSAKGVHSFYNNISGLTDFGEKVVAEMNRLGMMVDLSHVSDAVARRALEVSQAP

SEQ ID NO: 24522 - protein, 513 aa, Homo sapiens
  Payload ID: 4884
  Gene Symbol: DPEP3
  Gene Name: dipeptidase 3
  Uniprot ID: Q9H4B8
  ENSP ID: ENSP00000268793
MIRTPLSASAHRLLLPGSRGRPPRNMQPTGREGSRALSRRYLRRLLLLLLLLLLRQPVTRAETTPGAPRALSTLGSPSLFTTPGVPSALTTPGLTTPGTPKTLDLRGRAQALMRSFPLVDGHNDLPQVLRQRYKNVLQDVNLRNFSHGQTSLDRLRDGLVGAQFWSASVSCQSQDQTAVRLALEQIDLIHRMCASYSELELVTSAEGLNSSQKLACLIGVEGGHSLDSSLSVLRSFYVLGVRYLTLTFTCSTPWAESSTKFRHHMYTNVSGLTSFGEKVVEELNRLGMMIDLSYASDTLIRRVLEVSQAPVIFSHSAARAVCDNLLNVPDDILQLLKKNGGIVMVTLSMGVLQCNLLANVSTVADHFDHIRAVIGSEFIGIGGNYDGTGRFPQGLEDVSTYPVLIEELLSRSWSEEELQGVLRGNLLRVFRQVEKVREESRAQSPVEAEFPYGQLSTSCHSHLVPQNGHQATHLEVTKQPTNRVPWRSSNASPYLVPGLVAAATIPTFTQWLC

SEQ ID NO: 24523 - protein, 789 aa, Homo sapiens
  Payload ID: 4885
  Gene Symbol: DPP10
  Gene Name: dipeptidyl-peptidase 10 (non-functional)
  Uniprot ID: Q8N608
  ENSP ID: ENSP00000309066
MRKVESRGEGGREELGSNSPPQRNWKGIAIALLVILVVCSLITMSVILLTPDELTNSSETRLSLEDLFRKDFVLHDPEARWINDTDVVYKSENGHVIKLNIETNATTLLLENTTFVTFKASRHSVSPDLKYVLLAYDVKQIFHYSYTASYVIYNIHTREVWELNPPEVEDSVLQYAAWGVQGQQLIYIFENNIYYQPDIKSSSLRLTSSGKEEIIFNGIADWLYEEELLHSHIAHWWSPDGERLAFLMINDSLVPTMVIPRFTGALYPKGKQYPYPKAGQVNPTIKLYVVNLYGPTHTLELMPPDSFKSREYYITMVKWVSNTKTVVRWLNRAQNISILTVCETTTGACSKKYEMTSDTWLSQQNEEPVFSRDGSKFFMTVPVKQGGRGEFHHVAMFLIQSKSEQITVRHLTSGNWEVIKILAYDETTQKIYFLSTESSPRGRQLYSASTEGLLNRQCISCNFMKEQCTYFDASFSPMNQHFLLFCEGPRVPVVSLHSTDNPAKYFILESNSMLKEAILKKKIGKPEIKILHIDDYELPLQLSLPKDFMDRNQYALLLIMDEEPGGQLVTDKFHIDWDSVLIDMDNVIVARFDGRGSGFQGLKILQEIHRRLGSVEVKDQITAVKFLLKLPYIDSKRLSIFGKGYGGYIASMILKSDEKLFKCGSVVAPITDLKLYASAFSERYLGMPSKEESTYQAASVLHNVHGLKEENILIIHGTADTKVHFQHSAELIKHLIKAGVNYTMQVYPDEGHNVSEKSKYHLYSTILKFFSDCLKEEISVLPQEPEEDE

SEQ ID NO: 24524 - protein, 258 aa, Homo sapiens
  Payload ID: 4885
  Gene Symbol: DPP10
  Gene Name: dipeptidyl-peptidase 10 (non-functional)
  ENSP ID: ENSP00000376854
MVITEVAEGPVDGSEKELGSNSPPQRNWKGIAIALLVILVVCSLITMSVILLTPDELTNSSETRLSLEDLFRKDFVLHDPEARWINDTDVVYKSENGHVIKLNIETNATTLLLENTTFVTFKASRHSVSPDLKYVLLAYDVKQIFHYSYTASYVIYNIHTREVWELNPPEVEDSVLQYAAWGVQGQQLIYIFENNIYYQPDIKSSSLRLTSSGKEEIIFNGIADWLYEEELLHSHIAHWWSPDGERLAFLMINDSLVP

SEQ ID NO: 24525 - protein, 800 aa, Homo sapiens
  Payload ID: 4885
  Gene Symbol: DPP10
  Gene Name: dipeptidyl-peptidase 10 (non-functional)
  Uniprot ID: Q8N608
  ENSP ID: ENSP00000376855
MTAAKQEPQPTPGARASQAQPADQELGSNSPPQRNWKGIAIALLVILVVCSLITMSVILLTPDELTNSSETRLSLEDLFRKDFVLHDPEARWINDTDVVYKSENGHVIKLNIETNATTLLLENTTFVTFKASRHSVSPDLKYVLLAYDVKQIFHYSYTASYVIYNIHTREVWELNPPEVEDSVLQYAAWGVQGQQLIYIFENNIYYQPDIKSSSLRLTSSGKEEIIFNGIADWLYEEELLHSHIAHWWSPDGERLAFLMINDSLVPTMVIPRFTGALYPKGKQYPYPKAGQVNPTIKLYVVNLYGPTHTLELMPPDSFKSREYYITMVKWVSNTKTVVRWLNRAQNISILTVCETTTGACSKKYEMTSDTWLSQQNEEPVFSRDGSKFFMTVPVKQGGRGEFHHVAMFLIQSKSEQITVRHLTSGNWEVIKILAYDETTQKIYFLSTESSPRGRQLYSASTEGLLNRQCISCNFMKEQCTYFDASFSPMNQHFLLFCEGPRVPVVSLHSTDNPAKYFILESNSMLKEAILKKKIGKPEIKILHIDDYELPLQLSLPKDFMDRNQYALLLIMDEEPGGQLVTDKFHIDWDSVLIDMDNVIVARFDGRGSGFQGLKILQEIHRRLGSVEVKDQITAVKFLLKLPYIDSKRLSIFGKGYGGYIASMILKSDEKLFKCGSVVAPITDLKLYASAFSERYLGMPSKEESTYQAASVLHNVHGLKEENILIIHGTADTKVHFQHSAELIKHLIKAGVNYTMQVYPDEGHNVSEKSKYHLYSTILKFFSDCLKEEISVLPQEPEEDE

SEQ ID NO: 24526 - protein, 796 aa, Homo sapiens
  Payload ID: 4885
  Gene Symbol: DPP10
  Gene Name: dipeptidyl-peptidase 10 (non-functional)
  Uniprot ID: Q8N608
  ENSP ID: ENSP00000386565
MNQTASVSHHIKCQPSKTIKELGSNSPPQRNWKGIAIALLVILVVCSLITMSVILLTPDELTNSSETRLSLEDLFRKDFVLHDPEARWINDTDVVYKSENGHVIKLNIETNATTLLLENTTFVTFKASRHSVSPDLKYVLLAYDVKQIFHYSYTASYVIYNIHTREVWELNPPEVEDSVLQYAAWGVQGQQLIYIFENNIYYQPDIKSSSLRLTSSGKEEIIFNGIADWLYEEELLHSHIAHWWSPDGERLAFLMINDSLVPTMVIPRFTGALYPKGKQYPYPKAGQVNPTIKLYVVNLYGPTHTLELMPPDSFKSREYYITMVKWVSNTKTVVRWLNRAQNISILTVCETTTGACSKKYEMTSDTWLSQQNEEPVFSRDGSKFFMTVPVKQGGRGEFHHVAMFLIQSKSEQITVRHLTSGNWEVIKILAYDETTQKIYFLSTESSPRGRQLYSASTEGLLNRQCISCNFMKEQCTYFDASFSPMNQHFLLFCEGPRVPVVSLHSTDNPAKYFILESNSMLKEAILKKKIGKPEIKILHIDDYELPLQLSLPKDFMDRNQYALLLIMDEEPGGQLVTDKFHIDWDSVLIDMDNVIVARFDGRGSGFQGLKILQEIHRRLGSVEVKDQITAVKFLLKLPYIDSKRLSIFGKGYGGYIASMILKSDEKLFKCGSVVAPITDLKLYASAFSERYLGMPSKEESTYQAASVLHNVHGLKEENILIIHGTADTKVHFQHSAELIKHLIKAGVNYTMQVYPDEGHNVSEKSKYHLYSTILKFFSDCLKEEISVLPQEPEEDE

SEQ ID NO: 24527 - protein, 746 aa, Homo sapiens
  Payload ID: 4885
  Gene Symbol: DPP10
  Gene Name: dipeptidyl-peptidase 10 (non-functional)
  Uniprot ID: Q8N608
  ENSP ID: ENSP00000387038
MSVILLTPDELTNSSETRLSLEDLFRKDFVLHDPEARWINDTDVVYKSENGHVIKLNIETNATTLLLENTTFVTFKASRHSVSPDLKYVLLAYDVKQIFHYSYTASYVIYNIHTREVWELNPPEVEDSVLQYAAWGVQGQQLIYIFENNIYYQPDIKSSSLRLTSSGKEEIIFNGIADWLYEEELLHSHIAHWWSPDGERLAFLMINDSLVPTMVIPRFTGALYPKGKQYPYPKAGQVNPTIKLYVVNLYGPTHTLELMPPDSFKSREYYITMVKWVSNTKTVVRWLNRAQNISILTVCETTTGACSKKYEMTSDTWLSQQNEEPVFSRDGSKFFMTVPVKQGGRGEFHHVAMFLIQSKSEQITVRHLTSGNWEVIKILAYDETTQKIYFLSTESSPRGRQLYSASTEGLLNRQCISCNFMKEQCTYFDASFSPMNQHFLLFCEGPRVPVVSLHSTDNPAKYFILESNSMLKEAILKKKIGKPEIKILHIDDYELPLQLSLPKDFMDRNQYALLLIMDEEPGGQLVTDKFHIDWDSVLIDMDNVIVARFDGRGSGFQGLKILQEIHRRLGSVEVKDQITAVKFLLKLPYIDSKRLSIFGKGYGGYIASMILKSDEKLFKCGSVVAPITDLKLYASAFSERYLGMPSKEESTYQAASVLHNVHGLKEENILIIHGTADTKVHFQHSAELIKHLIKAGVNYTMQVYPDEGHNVSEKSKYHLYSTILKFFSDCLKEEISVLPQEPEEDE

SEQ ID NO: 24528 - protein, 60 aa, Homo sapiens
  Payload ID: 4885
  Gene Symbol: DPP10
  Gene Name: dipeptidyl-peptidase 10 (non-functional)
  ENSP ID: ENSP00000391092
MSVILLTPDELTNSSETRLSLEDLFRKDFVLHDPEARWINDTDVVYKSENGHVIKLNIET

SEQ ID NO: 24529 - protein, 97 aa, Homo sapiens
  Payload ID: 4885
  Gene Symbol: DPP10
  Gene Name: dipeptidyl-peptidase 10 (non-functional)
  ENSP ID: ENSP00000402499
MSVILLTPDELTNSSETRLSLEDLFRKDFVLHDPEARWINDTDVVYKSENGHVIKLNIETNATTLLLENTTFVTFKASRHSVSPDLKYVLLAYDVKQ

SEQ ID NO: 24530 - protein, 60 aa, Homo sapiens
  Payload ID: 4885
  Gene Symbol: DPP10
  Gene Name: dipeptidyl-peptidase 10 (non-functional)
  ENSP ID: ENSP00000408535
MRKVESRGEGGREMNSQIRQKPDCLWKTSLGKTLCFTIQRLGGSMIQMWCIKARMDMSLN

SEQ ID NO: 24531 - protein, 170 aa, Homo sapiens
  Payload ID: 4886
  Gene Symbol: DPP3
  Gene Name: dipeptidyl-peptidase 3
  ENSP ID: ENSP00000431606
MADTQYILPNDIGVSSLDCREAFRLLSPTERLYAYHLSRAAWYGGLAVLLQTSPEAPYIYALLSRLFRAQDPDQLRQHALAEGLTEEEYQEKLERVILGSEAAQQHPEEVRGLWQTCGELMFSLEPRLRHLGLGKEGITTYFSGNCTMEDAKLAQDFLDSQNLSAYNTRL

SEQ ID NO: 24532 - protein, 201 aa, Homo sapiens
  Payload ID: 4886
  Gene Symbol: DPP3
  Gene Name: dipeptidyl-peptidase 3
  ENSP ID: ENSP00000432618
MADTQYILPNDIGVSSLDCREAFRLLSPTERLYAYHLSRAAWYGGLAVLLQTSPEAPYIYALLSRLFRAQDPDQLRQHALAEGLTEEEYQAFLVYAAGVYSNMGNYKSFGDTKFVPNLPKEKLERVILGSEAAQQHPEEVRGLWQTCGELMFSLEPRLRHLGLGKEGITTYFSGNCTMEDAKLAQDFLDSQNLSAYNTRLF

SEQ ID NO: 24533 - protein, 757 aa, Homo sapiens
  Payload ID: 4886
  Gene Symbol: DPP3
  Gene Name: dipeptidyl-peptidase 3
  ENSP ID: ENSP00000432782
MGEPEAGSEFANGAAAAAGPMADTQYILPNDIGVSSLDCREAFRLLSPTERLYAYHLSRAAWYGGLAVLLQTSPEAPYIYALLSRLFRAQDPDQLRQHALAEGLTEEEYQAFLVYAAGVYSNMGNYKSFGDTKFVPNLPKEKLERVILGSEAAQQHPEEVRGLWQTCGELMFSLEPRLRHLGLGKEGITTYFSGNCTMEDAKLAQDFLDSQNLSAYNTRLFKEVDGEGKPYYEVRLASVLGSEPSLDSEVTSKLKSYEFRGSPFQVTRGDYAPILQKVVEQLEKAKAYAANSHQGQMLAQYIESFTQGSIEAHKRGSRFWIQDKGPIVESYIGFIESYRDPFGSRGEFEGFVAVVNKAMSAKFERLVASAEQLLKELPWPPTFEKDKFLTPDFTSLDVLTFAGSGIPAGINIPNYDDLRQTEGFKNVSLGNVLAVAYATQREKLTFLEEDDKDLYILWKGPSFDVQVGLHELLGHGSGKLFVQDEKGAFNFDQETVINPETGEQIQSWYRSGETWDSKFSTIASSYEECRAESVGLYLCLHPQVLEIFGFEGADAEDVIYVNWLNMVRAGLLALEFYTPEAFNWRQAHMQARFVILRVLLEAGEGLVTITPTTGSDGRPDARVRLDRSKIRSVGKPALERFLRRLQVLKSTGDVAGGRALYEGYATVTDAPPECFLTLRDTVLLRKESRKLIVQPNTRLEGSDVQLLEYEASAAGLIRSFSERFPEDGPELEEILTQLATADARFWKGPSEAPSGQA

SEQ ID NO: 24534 - protein, 177 aa, Homo sapiens
  Payload ID: 4886
  Gene Symbol: DPP3
  Gene Name: dipeptidyl-peptidase 3
  ENSP ID: ENSP00000434518
MGNYKSFGDTKFVPNLPKEKLERVILGSEAAQQHPEEVRGLWQTCGELMFSLEPRLRHLGLGKEGITTYFSGNCTMEDAKLAQDFLDSQNLSAYNTRLFKEVDGEGKPYYEVRLASVLGSEPSLDSEVTSKLKSYEFRGSPFQVTRGDYAPILQKVVEQLEKAKAYAANSHQGQMLA

SEQ ID NO: 24535 - protein, 756 aa, Homo sapiens
  Payload ID: 4886
  Gene Symbol: DPP3
  Gene Name: dipeptidyl-peptidase 3
  ENSP ID: ENSP00000435284
MGEPEAGSEFANGAAAAGPMADTQYILPNDIGVSSLDCREAFRLLSPTERLYAYHLSRAAWYGGLAVLLQTSPEAPYIYALLSRLFRAQDPDQLRQHALAEGLTEEEYQAFLVYAAGVYSNMGNYKSFGDTKFVPNLPKEKLERVILGSEAAQQHPEEVRGLWQTCGELMFSLEPRLRHLGLGKEGITTYFSGNCTMEDAKLAQDFLDSQNLSAYNTRLFKEVDGEGKPYYEVRLASVLGSEPSLDSEVTSKLKSYEFRGSPFQVTRGDYAPILQKVVEQLEKAKAYAANSHQGQMLAQYIESFTQGSIEAHKRGSRFWIQDKGPIVESYIGFIESYRDPFGSRGEFEGFVAVVNKAMSAKFERLVASAEQLLKELPWPPTFEKDKFLTPDFTSLDVLTFAGSGIPAGINIPNYDDLRQTEGFKNVSLGNVLAVAYATQREKLTFLEEDDKDLYILWKGPSFDVQVGLHELLGHGSGKLFVQDEKGAFNFDQETVINPETGEQIQSWYRSGETWDSKFSTIASSYEECRAESVGLYLCLHPQVLEIFGFEGADAEDVIYVNWLNMVRAGLLALEFYTPEAFNWRQAHMQARFVILRVLLEAGEGLVTITPTTGSDGRPDARVRLDRSKIRSVGKPALERFLRRLQVLKSTGDVAGGRALYEGYATVTDAPPECFLTLRDTVLLRKESRKLIVQPNTRLEGSDVQLLEYEASAAGLIRSFSERFPEDGPELEEILTQLATADARFWKGPSEAPSGQA

SEQ ID NO: 24536 - protein, 90 aa, Homo sapiens
  Payload ID: 4886
  Gene Symbol: DPP3
  Gene Name: dipeptidyl-peptidase 3
  ENSP ID: ENSP00000436820
MADTQYILPNDIGVSSLDCREAFRLLSPTERLYAYHLSRAAWYGGLAVLLQTSPEAPYIYALLSRLFRAQDPDQLRQHALAEGLTEEEYQ

SEQ ID NO: 24537 - protein, 707 aa, Homo sapiens
  Payload ID: 4886
  Gene Symbol: DPP3
  Gene Name: dipeptidyl-peptidase 3
  Uniprot ID: Q9NY33
  ENSP ID: ENSP00000436941
MADTQYILPNDIGVSSLDCREAFRLLSPTERLYAYHLSRAAWYGGLAVLLQTSPEAPYIYALLSRLFRAQDPDQLRQHALAEGLTEEEYQEKLERVILGSEAAQQHPEEVRGLWQTCGELMFSLEPRLRHLGLGKEGITTYFSGNCTMEDAKLAQDFLDSQNLSAYNTRLFKEVDGEGKPYYEVRLASVLGSEPSLDSEVTSKLKSYEFRGSPFQVTRGDYAPILQKVVEQLEKAKAYAANSHQGQMLAQYIESFTQGSIEAHKRGSRFWIQDKGPIVESYIGFIESYRDPFGSRGEFEGFVAVVNKAMSAKFERLVASAEQLLKELPWPPTFEKDKFLTPDFTSLDVLTFAGSGIPAGINIPNYDDLRQTEGFKNVSLGNVLAVAYATQREKLTFLEEDDKDLYILWKGPSFDVQVGLHELLGHGSGKLFVQDEKGAFNFDQETVINPETGEQIQSWYRSGETWDSKFSTIASSYEECRAESVGLYLCLHPQVLEIFGFEGADAEDVIYVNWLNMVRAGLLALEFYTPEAFNWRQAHMQARFVILRVLLEAGEGLVTITPTTGSDGRPDARVRLDRSKIRSVGKPALERFLRRLQVLKSTGDVAGGRALYEGYATVTDAPPECFLTLRDTVLLRKESRKLIVQPNTRLEGSDVQLLEYEASAAGLIRSFSERFPEDGPELEEILTQLATADARFWKGPSEAPSGQA

SEQ ID NO: 24538 - protein, 104 aa, Homo sapiens
  Payload ID: 4886
  Gene Symbol: DPP3
  Gene Name: dipeptidyl-peptidase 3
  ENSP ID: ENSP00000437101
MGNYKSFGDTKFVPNLPKEKLERVILGSEAAQQHPEEVRGLWQTCGELMFSLEPRLRHLGLGKEGITTYFSGNCTMEDAKLAQDFLDSQNLSAYNTRLFKEVDG

SEQ ID NO: 24539 - protein, 737 aa, Homo sapiens
  Payload ID: 4886
  Gene Symbol: DPP3
  Gene Name: dipeptidyl-peptidase 3
  Uniprot ID: Q9NY33
  ENSP ID: ENSP00000440502
MADTQYILPNDIGVSSLDCREAFRLLSPTERLYAYHLSRAAWYGGLAVLLQTSPEAPYIYALLSRLFRAQDPDQLRQHALAEGLTEEEYQAFLVYAAGVYSNMGNYKSFGDTKFVPNLPKEKLERVILGSEAAQQHPEEVRGLWQTCGELMFSLEPRLRHLGLGKEGITTYFSGNCTMEDAKLAQDFLDSQNLSAYNTRLFKEVDGEGKPYYEVRLASVLGSEPSLDSEVTSKLKSYEFRGSPFQVTRGDYAPILQKVVEQLEKAKAYAANSHQGQMLAQYIESFTQGSIEAHKRGSRFWIQDKGPIVESYIGFIESYRDPFGSRGEFEGFVAVVNKAMSAKFERLVASAEQLLKELPWPPTFEKDKFLTPDFTSLDVLTFAGSGIPAGINIPNYDDLRQTEGFKNVSLGNVLAVAYATQREKLTFLEEDDKDLYILWKGPSFDVQVGLHELLGHGSGKLFVQDEKGAFNFDQETVINPETGEQIQSWYRSGETWDSKFSTIASSYEECRAESVGLYLCLHPQVLEIFGFEGADAEDVIYVNWLNMVRAGLLALEFYTPEAFNWRQAHMQARFVILRVLLEAGEGLVTITPTTGSDGRPDARVRLDRSKIRSVGKPALERFLRRLQVLKSTGDVAGGRALYEGYATVTDAPPECFLTLRDTVLLRKESRKLIVQPNTRLEGSDVQLLEYEASAAGLIRSFSERFPEDGPELEEILTQLATADARFWKGPSEAPSGQA

SEQ ID NO: 24540 - protein, 766 aa, Homo sapiens
  Payload ID: 4887
  Gene Symbol: DPP4
  Gene Name: dipeptidyl-peptidase 4
  Uniprot ID: P27487
  ENSP ID: ENSP00000353731
MKTPWKVLLGLLGAAALVTIITVPVVLLNKGTDDATADSRKTYTLTDYLKNTYRLKLYSLRWISDHEYLYKQENNILVFNAEYGNSSVFLENSTFDEFGHSINDYSISPDGQFILLEYNYVKQWRHSYTASYDIYDLNKRQLITEERIPNNTQWVTWSPVGHKLAYVWNNDIYVKIEPNLPSYRITWTGKEDIIYNGITDWVYEEEVFSAYSALWWSPNGTFLAYAQFNDTEVPLIEYSFYSDESLQYPKTVRVPYPKAGAVNPTVKFFVVNTDSLSSVTNATSIQITAPASMLIGDHYLCDVTWATQERISLQWLRRIQNYSVMDICDYDESSGRWNCLVARQHIEMSTTGWVGRFRPSEPHFTLDGNSFYKIISNEEGYRHICYFQIDKKDCTFITKGTWEVIGIEALTSDYLYYISNEYKGMPGGRNLYKIQLSDYTKVTCLSCELNPERCQYYSVSFSKEAKYYQLRCSGPGLPLYTLHSSVNDKGLRVLEDNSALDKMLQNVQMPSKKLDFIILNETKFWYQMILPPHFDKSKKYPLLLDVYAGPCSQKADTVFRLNWATYLASTENIIVASFDGRGSGYQGDKIMHAINRRLGTFEVEDQIEAARQFSKMGFVDNKRIAIWGWSYGGYVTSMVLGSGSGVFKCGIAVAPVSRWEYYDSVYTERYMGLPTPEDNLDHYRNSTVMSRAENFKQVEYLLIHGTADDNVHFQQSAQISKALVDVGVDFQAMWYTDEDHGIASSTAHQHIYTHMSHFIKQCFSLP

SEQ ID NO: 24541 - protein, 86 aa, Homo sapiens
  Payload ID: 4887
  Gene Symbol: DPP4
  Gene Name: dipeptidyl-peptidase 4
  ENSP ID: ENSP00000401359
  MOD_RES (1)..(1): Any amino acid
XDATADSRKTYTLTDYLKNTYRLKLYSLRWISDHEYLYKQENNILVFNAEYGNSSVFLENSTFHMAKWIFLSFLKCSLPWLLFSLL

SEQ ID NO: 24542 - protein, 170 aa, Homo sapiens
  Payload ID: 4887
  Gene Symbol: DPP4
  Gene Name: dipeptidyl-peptidase 4
  ENSP ID: ENSP00000402259
MKTPWKVLLGLLGAAALVTIITVPVVLLNKGNDATADSRKTYTLTDYLKNTYRLKLYSLRWISDHEYLYKQENNILVFNAEYGNSSVFLENSTFDEFGHSINDYSISPDGQFILLEYNYVKQWRHSYTASYDIYDLNKRQLITEERIPNNTQWVTWSPVGHKLVSICLEQ

SEQ ID NO: 24543 - protein, 118 aa, Homo sapiens
  Payload ID: 4887
  Gene Symbol: DPP4
  Gene Name: dipeptidyl-peptidase 4
  ENSP ID: ENSP00000410264
MKTPWKVLLGLLGAAALVTIITVPVVLLNKGTDDATADSRKTYTLTDYLKNTYRLKLYSLRWISDHEYLYKQENNILVFNAEYGNSSVFLENSTFHMAKWIFLSFLKCSLPWLLFSLL

SEQ ID NO: 24544 - protein, 118 aa, Homo sapiens; identical to SEQ ID NO: 24543
  Payload ID: 4887
  Gene Symbol: DPP4
  Gene Name: dipeptidyl-peptidase 4
  ENSP ID: ENSP00000486421

SEQ ID NO: 24545 - protein, 803 aa, Homo sapiens
  Payload ID: 4888
  Gene Symbol: DPP6
  Gene Name: dipeptidyl-peptidase 6
  Uniprot ID: P42658
  ENSP ID: ENSP00000328226
MTTAKEPSASGKSVQQQEQELVGSNPPQRNWKGIAIALLVILVICSLIVTSVILLTPAEDNSLSQKKKVTVEDLFSEDFKIHDPEAKWISDTEFIYREQKGTVRLWNVETNTSTVLIEGKKIESLRAIRYEISPDREYALFSYNVEPIYQHSYTGYYVLSKIPHGDPQSLDPPEVSNAKLQYAGWGPKGQQLIFIFENNIYYCAHVGKQAIRVVSTGKEGVIYNGLSDWLYEEEILKTHIAHWWSPDGTRLAYAAINDSRVPIMELPTYTGSIYPTVKPYHYPKAGSENPSISLHVIGLNGPTHDLEMMPPDDPRMREYYITMVKWATSTKVAVTWLNRAQNVSILTLCDATTGVCTKKHEDESEAWLHRQNEEPVFSKDGRKFFFIRAIPQGGRGKFYHITVSSSQPNSSNDNIQSITSGDWDVTKILAYDEKGNKIYFLSTEDLPRRRQLYSANTVGNFNRQCLSCDLVENCTYFSASFSHSMDFFLLKCEGPGVPMVTVHNTTDKKKMFDLETNEHVKKAINDRQMPKVEYRDIEIDDYNLPMQILKPATFTDTTHYPLLLVVDGTPGSQSVAEKFEVSWETVMVSSHGAVVVKCDGRGSGFQGTKLLHEVRRRLGLLEEKDQMEAVRTMLKEQYIDRTRVAVFGKDYGGYLSTYILPAKGENQGQTFTCGSALSPITDFKLYASAFSERYLGLHGLDNRAYEMTKVAHRVSALEEQQFLIIHPTADEKIHFQHTAELITQLIRGKANYSLQIYPDESHYFTSSSLKQHLYRSIINFFVECFRIQDKLLTVTAKEDEEED

SEQ ID NO: 24546 - protein, 865 aa, Homo sapiens
  Payload ID: 4888
  Gene Symbol: DPP6
  Gene Name: dipeptidyl-peptidase 6
  Uniprot ID: P42658
  ENSP ID: ENSP00000367001
MASLYQRFTGKINTSRSFPAPPEASHLLGGQGPEEDGGAGAKPLGPRAQAAAPRERGGGGGGAGGRPRFQYQARSDGDEEDELVGSNPPQRNWKGIAIALLVILVICSLIVTSVILLTPAEDNSLSQKKKVTVEDLFSEDFKIHDPEAKWISDTEFIYREQKGTVRLWNVETNTSTVLIEGKKIESLRAIRYEISPDREYALFSYNVEPIYQHSYTGYYVLSKIPHGDPQSLDPPEVSNAKLQYAGWGPKGQQLIFIFENNIYYCAHVGKQAIRVVSTGKEGVIYNGLSDWLYEEEILKTHIAHWWSPDGTRLAYAAINDSRVPIMELPTYTGSIYPTVKPYHYPKAGSENPSISLHVIGLNGPTHDLEMMPPDDPRMREYYITMVKWATSTKVAVTWLNRAQNVSILTLCDATTGVCTKKHEDESEAWLHRQNEEPVFSKDGRKFFFIRAIPQGGRGKFYHITVSSSQPNSSNDNIQSITSGDWDVTKILAYDEKGNKIYFLSTEDLPRRRQLYSANTVGNFNRQCLSCDLVENCTYFSASFSHSMDFFLLKCEGPGVPMVTVHNTTDKKKMFDLETNEHVKKAINDRQMPKVEYRDIEIDDYNLPMQILKPATFTDTTHYPLLLVVDGTPGSQSVAEKFEVSWETVMVSSHGAVVVKCDGRGSGFQGTKLLHEVRRRLGLLEEKDQMEAVRTMLKEQYIDRTRVAVFGKDYGGYLSTYILPAKGENQGQTFTCGSALSPITDFKLYASAFSERYLGLHGLDNRAYEMTKVAHRVSALEEQQFLIIHPTADEKIHFQHTAELITQLIRGKANYSLQIYPDESHYFTSSSLKQHLYRSIINFFVECFRIQDKLLTVTAKEDEEED

SEQ ID NO: 24547 - protein, 353 aa, Homo sapiens
  Payload ID: 4888
  Gene Symbol: DPP6
  Gene Name: dipeptidyl-peptidase 6
  ENSP ID: ENSP00000384393
MASLYQRFTGKINTSRSFPAPPEASHLLGGQGPEEDGGAGAKPLGPRAQAAAPRERGGGGGGAGGRPRFQYQARSDGDEEDELVGSNPPQRNWKGIAIALLVILVICSLIVTSVILLTPAEDNSLSQKKKVTVEDLFSEDFKIHDPEAKWISDTEFIYREQKGTVRLWNVETNTSTVLIEGKKIESLRAIRYEISPDREYALFSYNVEPMKKVKSRKLTLPHSKSCDSLAVSQACSPACHQGCFLHYITMSLPLHCLRDYVSAVNGYSTALPACHVQGGPVSDIPWRPWLEDCRRVPGGRTANGTRLRSHAPAALRQHCPLSYECGRCEASHLLTPGIMHSSYRQISGQRATE

SEQ ID NO: 24548 - protein, 801 aa, Homo sapiens
  Payload ID: 4888
  Gene Symbol: DPP6
  Gene Name: dipeptidyl-peptidase 6
  ENSP ID: ENSP00000385578
MKEKAMIKTAKMQGNVMELVGSNPPQRNWKGIAIALLVILVICSLIVTSVILLTPAEDNSLSQKKKVTVEDLFSEDFKIHDPEAKWISDTEFIYREQKGTVRLWNVETNTSTVLIEGKKIESLRAIRYEISPDREYALFSYNVEPIYQHSYTGYYVLSKIPHGDPQSLDPPEVSNAKLQYAGWGPKGQQLIFIFENNIYYCAHVGKQAIRVVSTGKEGVIYNGLSDWLYEEEILKTHIAHWWSPDGTRLAYAAINDSRVPIMELPTYTGSIYPTVKPYHYPKAGSENPSISLHVIGLNGPTHDLEMMPPDDPRMREYYITMVKWATSTKVAVTWLNRAQNVSILTLCDATTGVCTKKHEDESEAWLHRQNEEPVFSKDGRKFFFIRAIPQGGRGKFYHITVSSSQPNSSNDNIQSITSGDWDVTKILAYDEKGNKIYFLSTEDLPRRRQLYSANTVGNFNRQCLSCDLVENCTYFSASFSHSMDFFLLKCEGPGVPMVTVHNTTDKKKMFDLETNEHVKKAINDRQMPKVEYRDIEIDDYNLPMQILKPATFTDTTHYPLLLVVDGTPGSQSVAEKFEVSWETVMVSSHGAVVVKCDGRGSGFQGTKLLHEVRRRLGLLEEKDQMEAVRTMLKEQYIDRTRVAVFGKDYGGYLSTYILPAKGENQGQTFTCGSALSPITDFKLYASAFSERYLGLHGLDNRAYEMTKVAHRVSALEEQQFLIIHPTADEKIHFQHTAELITQLIRGKANYSLQIYPDESHYFTSSSLKQHLYRSIINFFVECFRIQDKLLTVTAKEDEEED

SEQ ID NO: 24549 - protein, 758 aa, Homo sapiens
  Payload ID: 4888
  Gene Symbol: DPP6
  Gene Name: dipeptidyl-peptidase 6
  ENSP ID: ENSP00000397303
MTTAKEPSASGKSVQQQEQELVGSNPPQRNWKGIAIALLVILVICSLIVTSVILLTPAEDNSLSQKKKVTVEDLFSEDFKIHDPEAKWISDTEFIYREQKGTVRLWNVETNTSTVLIEGKKIESLRAIRYEISPDREYALFSYNVEPIFIFENNIYYCAHVGKQAIRVVSTGKEGVIYNGLSDWLYEEEILKTHIAHWWSPDGTRLAYAAINDSRVPIMELPTYTGSIYPTVKPYHYPKAGSENPSISLHVIGLNGPTHDLEMMPPDDPRMREYYITMVKWATSTKVAVTWLNRAQNVSILTLCDATTGVCTKKHEDESEAWLHRQNEEPVFSKDGRKFFFIRAIPQGGRGKFYHITVSSSQPNSSNDNIQSITSGDWDVTKILAYDEKGNKIYFLSTEDLPRRRQLYSANTVGNFNRQCLSCDLVENCTYFSASFSHSMDFFLLKCEGPGVPMVTVHNTTDKKKMFDLETNEHVKKAINDRQMPKVEYRDIEIDDYNLPMQILKPATFTDTTHYPLLLVVDGTPGSQSVAEKFEVSWETVMVSSHGAVVVKCDGRGSGFQGTKLLHEVRRRLGLLEEKDQMEAVRTMLKEQYIDRTRVAVFGKDYGGYLSTYILPAKGENQGQTFTCGSALSPITDFKLYASAFSERYLGLHGLDNRAYEMTKVAHRVSALEEQQFLIIHPTADEKIHFQHTAELITQLIRGKANYSLQIYPDESHYFTSSSLKQHLYRSIINFFVECFRIQDKLLTVTAKEDEEED

SEQ ID NO: 24550 - protein, 291 aa, Homo sapiens
  Payload ID: 4888
  Gene Symbol: DPP6
  Gene Name: dipeptidyl-peptidase 6
  ENSP ID: ENSP00000477855
MTTAKEPSASGKSVQQQEQELVGSNPPQRNWKGIAIALLVILVICSLIVTSVILLTPAEDNSLSQKKKVTVEDLFSEDFKIHDPEAKWISDTEFIYREQKGTVRLWNVETNTSTVLIEGKKIESLRAIRYEISPDREYALFSYNVEPMKKVKSRKLTLPHSKSCDSLAVSQACSPACHQGCFLHYITMSLPLHCLRDYVSAVNGYSTALPACHVQGGPVSDIPWRPWLEDCRRVPGGRTANGTRLRSHAPAALRQHCPLSYECGRCEASHLLTPGIMHSSYRQISGQRATE

SEQ ID NO: 24551 - protein, 492 aa, Homo sapiens [sequence omitted]

SEQ ID NO: 24552 - protein, 244 aa, Homo sapiens
  Payload ID: 4889
  Gene Symbol: DPP7
  Gene Name: dipeptidyl-peptidase 7
  ENSP ID: ENSP00000473309
  MOD_RES (1)..(1): Any amino acid
XTVRWEFGTCQPLSDEKDLTQLFMFARNAFTVLAMMDYPYPTDFLGPLPANPVKVGCDRLLSEAQRITGLRALAGALPPAPDGCADPTGCGTGPDARAWDYQACTEINLTFASNNVTDMFPDLPFTDELRQRYCLDTWGVWPRPDWLLTSFWGGDLRAASNIIFSNGNLDPWAGGGIRRNLSASVIAVTIQGGAHHLDLRASHPEDPASVVEARKLEATIIGEWVKAARREQQPALRGGPRLSL

SEQ ID NO: 24553 - protein, 61 aa, Homo sapiens
  Payload ID: 4889
  Gene Symbol: DPP7
  Gene Name: dipeptidyl-peptidase 7
  ENSP ID: ENSP00000473354
  MOD_RES (1)..(1): Any amino acid
XSGSEHCYDIYRLYHSCADPTGCGTGPDARAWDYQISEPPATSSSPTGTWTPGQGAGFGGT

SEQ ID NO: 24554 - protein, 120 aa, Homo sapiens
  Payload ID: 4889
  Gene Symbol: DPP7
  Gene Name: dipeptidyl-peptidase 7
  ENSP ID: ENSP00000473364
  MOD_RES (1)..(1): Any amino acid
XVLLLALGLRGLQAGARRAPDPGFQERFFQQRLDHFNFERFGNKTFPQRFLVSGSGSGARGPSSSTLGTRATCGPSPTTRPSSRSWRPSGGLYWSSRSTATTGSRCRSVRSPRSAGTRSC

SEQ ID NO: 24555 - protein, 155 aa, Homo sapiens
  Payload ID: 4889
  Gene Symbol: DPP7
  Gene Name: dipeptidyl-peptidase 7
  ENSP ID: ENSP00000473430
  MOD_RES (1)..(1): Any amino acid
XTFPQRFLVSDRFWVRGEGPIFFYTGNEGDVWAFANNSAFVAELAAERGALLVFAEHRYYGKSLPFGAQSTQRGHTELLTVEQALADFAELLRALRRDLGAQDAPAIAFGGSLRHGPLGVRHLPAAVRREGPDPALHVRPECLHRAGHDGLPLPH

SEQ ID NO: 24556 - protein, 272 aa, Homo sapiens
  Payload ID: 4889
  Gene Symbol: DPP7
  Gene Name: dipeptidyl-peptidase 7
  ENSP ID: ENSP00000473618
APWAPVLLLALGLRGLQAGARRAPDPGFQERFFQQRLDHFNFERFGNKTFPQRFLVSDRFWVRGEGPIFFYTGNEGDVWAFANNSAFVAELAAERGALLVFAEHRYYGKSLPFGAQSTQRGHTELLTVEQALADFAELLRALRRDLGAQDAPAIAFGGRKPSHLSSQPPAQLGCAATLAAFPSESCTRTWPRVGICGSQKCRPPCGTCGPLRRKRGNGVLGAAALTLCPSPSYGGMLSAYLRMKYPHLVAGALAASAPVLAVAGLGDSNQFF

SEQ ID NO: 24557 - protein, 882 aa, Homo sapiens
  Payload ID: 4890
  Gene Symbol: DPP8
  Gene Name: dipeptidyl-peptidase 8
  Uniprot ID: Q6V1X1
  ENSP ID: ENSP00000300141
MAAAMETEQLGVEIFETADCEENIESQDRPKLEPFYVERYSWSQLKKLLADTRKYHGYMMAKAPHDFMFVKRNDPDGPHSDRIYYLAMSGENRENTLFYSEIPKTINRAAVLMLSWKPLLDLFQATLDYGMYSREEELLRERKRIGTVGIASYDYHQGSGTFLFQAGSGIYHVKDGGPQGFTQQPLRPNLVETSCPNIRMDPKLCPADPDWIAFIHSNDIWISNIVTREERRLTYVHNELANMEEDARSAGVATFVLQEEFDRYSGYWWCPKAETTPSGGKILRILYEENDESEVEIIHVTSPMLETRRADSFRYPKTGTANPKVTFKMSEIMIDAEGRIIDVIDKELIQPFEILFEGVEYIARAGWTPEGKYAWSILLDRSQTRLQIVLISPELFIPVEDDVMERQRLIESVPDSVTPLIIYEETTDIWINIHDIFHVFPQSHEEEIEFIFASECKTGFRHLYKITSILKESKYKRSSGGLPAPSDFKCPIKEEIAITSGEWEVLGRHGSNIQVDEVRRLVYFEGTKDSPLEHHLYVVSYVNPGEVTRLTDRGYSHSCCISQHCDFFISKYSNQKNPHCVSLYKLSSPEDDPTCKTKEFWATILDSAGPLPDYTPPEIFSFESTTGFTLYGMLYKPHDLQPGKKYPTVLFIYGGPQVQLVNNRFKGVKYFRLNTLASLGYVVVVIDNRGSCHRGLKFEGAFKYKMGQIEIDDQVEGLQYLASRYDFIDLDRVGIHGWSYGGYLSLMALMQRSDIFRVAIAGAPVTLWIFYDTGYTERYMGHPDQNEQGYYLGSVAMQAEKFPSEPNRLLLLHGFLDENVHFAHTSILLSFLVRAGKPYDLQIYPQERHSIRVPESGEHYELHLLHYLQENLGSRIAALKVI

SEQ ID NO: 24558 - protein, 847 aa, Homo sapiens
  Payload ID: 4890
  Gene Symbol: DPP8
  Gene Name: dipeptidyl-peptidase 8
  Uniprot ID: Q6V1X1
  ENSP ID: ENSP00000318111
MWKRSEQMKIKSGKCNMAAAMETEQLGVEIFETADCEENIESQDRPKLEPFYVERYSWSQLKKLLADTRKYHGYMMAKAPHDFMFVKRNDPDGPHSDRIYYLAMSGENRENTLFYSEIPKTINRAAVLMLSWKPLLDLFQATLDYGMYSREEELLRERKRIGTVGIASYDYHQGSGTFLFQAGSGIYHVKDGGPQGFTQQPLRPNLVETSCPNIRMDPKLCPADPDWIAFIHSNDIWISNIVTREERRLTYVHNELANMEEDARSAGVATFVLQEEFDRYSGYWWCPKAETTPSGGKILRILYEENDESEVEIIHVTSPMLETRRADSFRYPKTGTANPKVTFKMSEIMIDAEGRIIDVIDKELIQPFEILFEGVEYIARAGWTPEGKYAWSILLDRSQTRLQIVLISPELFIPVEDDVMERQRLIESVPDSVTPLIIYEETTDIWINIHDIFHVFPQSHEEEIEFIFASECKTGFRHLYKITSILKESKYKRSSGGLPAPSDFKCPIKEEIAITSGEWEVLGRHGSNIQVDEVRRLVYFEGTKDSPLEHHLYVVSYVNPGEVTRLTDRGYSHSCCISQHCDFFISKYSNQKNPHCVSLYKLSSPEDDPTCKTKEFWATILDSAGPLPDYTPPEIFSFESTTGFTLYGMLYKPHDLQPGKKYPTVLFIYGGPQVQLVNNRFKGVKYFRLNTLASLGYVVVVIDNRGSCHRGLKFEGAFKYKMVAIAGAPVTLWIFYDTGYTERYMGHPDQNEQGYYLGSVAMQAEKFPSEPNRLLLLHGFLDENVHFAHTSILLSFLVRAGKPYDLQIYPQERHSIRVPESGEHYELHLLHYLQENLGSRIAALKVI

SEQ ID NO: 24559 - protein, 898 aa, Homo sapiens
  Payload ID: 4890
  Gene Symbol: DPP8
  Gene Name: dipeptidyl-peptidase 8
  Uniprot ID: Q6V1X1
  ENSP ID: ENSP00000339208
MWKRSEQMKIKSGKCNMAAAMETEQLGVEIFETADCEENIESQDRPKLEPFYVERYSWSQLKKLLADTRKYHGYMMAKAPHDFMFVKRNDPDGPHSDRIYYLAMSGENRENTLFYSEIPKTINRAAVLMLSWKPLLDLFQATLDYGMYSREEELLRERKRIGTVGIASYDYHQGSGTFLFQAGSGIYHVKDGGPQGFTQQPLRPNLVETSCPNIRMDPKLCPADPDWIAFIHSNDIWISNIVTREERRLTYVHNELANMEEDARSAGVATFVLQEEFDRYSGYWWCPKAETTPSGGKILRILYEENDESEVEIIHVTSPMLETRRADSFRYPKTGTANPKVTFKMSEIMIDAEGRIIDVIDKELIQPFEILFEGVEYIARAGWTPEGKYAWSILLDRSQTRLQIVLISPELFIPVEDDVMERQRLIESVPDSVTPLIIYEETTDIWINIHDIFHVFPQSHEEEIEFIFASECKTGFRHLYKITSILKESKYKRSSGGLPAPSDFKCPIKEEIAITSGEWEVLGRHGSNIQVDEVRRLVYFEGTKDSPLEHHLYVVSYVNPGEVTRLTDRGYSHSCCISQHCDFFISKYSNQKNPHCVSLYKLSSPEDDPTCKTKEFWATILDSAGPLPDYTPPEIFSFESTTGFTLYGMLYKPHDLQPGKKYPTVLFIYGGPQVQLVNNRFKGVKYFRLNTLASLGYVVVVIDNRGSCHRGLKFEGAFKYKMGQIEIDDQVEGLQYLASRYDFIDLDRVGIHGWSYGGYLSLMALMQRSDIFRVAIAGAPVTLWIFYDTGYTERYMGHPDQNEQGYYLGSVAMQAEKFPSEPNRLLLLHGFLDENVHFAHTSILLSFLVRAGKPYDLQIYPQERHSIRVPESGEHYELHLLHYLQENLGSRIAALKVI

SEQ ID NO: 24560 - protein, 782 aa, Homo sapiens
  Payload ID: 4890
  Gene Symbol: DPP8
  Gene Name: dipeptidyl-peptidase 8
  Uniprot ID: Q6V1X1
  ENSP ID: ENSP00000351817
MAAAMETEQLGVEIFETADCEENIESQDRPKLEPFYVERYSWSQLKKLLADTRKYHGYMMAKAPHDFMFVKRNDPDGPHSDRIYYLAMSGENRENTLFYSEIPKTINRAAVLMLSWKPLLDLFQATLDYGMYSREEELLRERKRIGTVGIASYDYHQGSGTFLFQAGSGIYHVKDGGPQGFTQQPLRPNLVETSCPNIRMDPKLCPADPDWIAFIHSNDIWISNIVTREERRLTYVHNELANMEEDARSAGVATFVLQEEFDRYSGYWWCPKAETTPSGGKILRILYEENDESEVEIIHVTSPMLETRRADSFRYPKTGTANPKVTFKMSEIMIDAEGRIIDVIDKELIQPFEILFEGVEYIARAGWTPEGKYAWSILLDRSQTRLQIVLISPELFIPVEDDVMERQRLIESVPDSVTPLIIYEETTDIWINIHDIFHVFPQSHEEEIEFIFASECKTGFRHLYKITSILKESKYKRSSGGLPAPSDFKCPIKEEIAITSGEWEVLGRHGSNIQVDEVRRLVYFEGTKDSPLEHHLYVVSYVNPGEVTRLTDRGYSHSCCISQHCDFFISKYSNQKNPHCVSLYKLSSPEDDPTCKTKEFWATILDSAGPLPDYTPPEIFSFESTTGFTLYGMLYKPHDLQPGKKYPTVLFIYGGPQVAIAGAPVTLWIFYDTGYTERYMGHPDQNEQGYYLGSVAMQAEKFPSEPNRLLLLHGFLDENVHFAHTSILLSFLVRAGKPYDLQIYPQERHSIRVPESGEHYELHLLHYLQENLGSRIAALKVI

SEQ ID NO: 24561 - protein, 729 aa, Homo sapiens
  Payload ID: 4890
  Gene Symbol: DPP8
  Gene Name: dipeptidyl-peptidase 8
  ENSP ID: ENSP00000379013
MWKRSEQMKIKSGKCNMAAAMETEQLGVEIFETADCEENIESQDRPKLEPFYVERYSWSQLKKLLADTRKYHGYMMAKAPHDFMFVKRNDPDGPHSDRIYYLAMSGENRENTLFYSEIPKTINRAAVLMLSWKPLLDLFQATLDYGMYSREEELLRERKRIGTVGIASYDYHQGSGTFLFQAGSGIYHVKDGGPQGFTQQPLRPNLVETSCPNIRMDPKLCPADPDWIAFIHSNDIWISNIVTREERRLTYVHNELANMEEDARSAGVATFVLQEEFDRYSGYWWCPKAETTPSGGKILRILYEENDESEVEIIHVTSPMLETRRADSFRYPKTGTANPKVTFKMSEIMIDAEGRIIDVIDKELIQPFEILFEGVEYIARAGWTPEGKYAWSILLDRSQTRLQIVLISPELFIPVEDDVMERQRLIESVPDSVTPLIIYEETTDIWINIHDIFHVFPQSHEEEIEFIFASECKTGFRHLYKITSILKESKYKRSSGGLPAPSDFKCPIKEEIAITSGEWEVLGRHGSNIQVDEVRRLVYFEGTKDSPLEHHLYVVSYVNPGEVTRLTDRGYSHSCCISQHCDFFISKYSNQKNPHCVSLYKLSSPEDDPTCKTKEFWATILDSAGPLPDYTPPEIFSFESTTGFTLYGMLYKPHDLQPGKKYPTVLFIYGGPQVQLVNNRFKGVKYFRLNTLASLGYVVVVIDNRGSCHRGLKFEGAFKYKMEALNATF

SEQ ID NO: 24562 - protein, 361 aa, Homo sapiens
  Payload ID: 4890
  Gene Symbol: DPP8
  Gene Name: dipeptidyl-peptidase 8
  ENSP ID: ENSP00000452643
  MOD_RES (1)..(1): Any amino acid
XEEDARSAGVATFVLQEEFDRYSGYWWCPKAETTPSGGKILRILYEENDESEVEIIHVTSPMLETRRADSFRYPKTGTANPKVTFKMSEIMIDAEGRIQVDEVRRLVYFEGTKDSPLEHHLYVVSYVNPGEVTRLTDRGYSHSCCISQHCDFFISKYSNQKNPHCVSLYKLSSPEDDPTCKTKEFWATILDSAGPLPDYTPPEIFSFESTTGFTLYGMLYKPHDLQPGKKYPTVLFIYGGPQVQLVNNRFKGVKYFRLNTLASLGYVVVVIDNRGSCHRGLKFEGAFKYKMGQIEIDDQVEGLQYLASRYDFIDLDRVGIHGWSYGGYLSLMALMQRSDIFRVAIAGAPVTLWIFYDTGYT

SEQ ID NO: 24563 - protein, 219 aa, Homo sapiens
  Payload ID: 4890
  Gene Symbol: DPP8
  Gene Name: dipeptidyl-peptidase 8
  ENSP ID: ENSP00000452719
MCLVFLGKCNMAAAMETEQLGVEIFETADCEENIESQDRPKLEPFYVERYSWSQLKKLLADTRKYHGYMMAKAPHDFMFVKRNDPDGPHSDRIYYLAMSGENRENTLFYSEIPKTINRAAVLMLSWKPLLDLFQATLDYGMYSREEELLRERKRIGTVGIASYDYHQGSGTFLFQAGSGIYHVKDGGPQGFTQQPLRPNLVETSCPNIRMDPKLCPADP

SEQ ID NO: 24564 - protein, 84 aa, Homo sapiens
  Payload ID: 4890
  Gene Symbol: DPP8
  Gene Name: dipeptidyl-peptidase 8
  ENSP ID: ENSP00000453756
MAAAMETEQLGVEIFETADCEENIESQDRPKLEPFYVERYSWSQLKKLLADTRKYHGYMMAKAPHDFMFVKRNDPDGPHSDRIY

SEQ ID NO: 24565 - protein, 120 aa, Homo sapiens
  Payload ID: 4890
  Gene Symbol: DPP8
  Gene Name: dipeptidyl-peptidase 8
  ENSP ID: ENSP00000453870
MWKRSEQMKIKSGKCNMAAAMETEQLGVEIFETADCEENIESQDRPKLEPFYVERYSWSQLKKLLADTRKYHGYMMAKAPHDFMFVKRNDPDGPHSDRIYYLAMSGENRENTLFYSEIPK

SEQ ID NO: 24566 - protein, 898 aa, Homo sapiens; identical to SEQ ID NO: 24559
  Payload ID: 4890
  Gene Symbol: DPP8
  Gene Name: dipeptidyl-peptidase 8
  Uniprot ID: Q6V1X1
  ENSP ID: ENSP00000453954

SEQ ID NO: 24567 - protein, 311 aa, Homo sapiens
  Payload ID: 4890
  Gene Symbol: DPP8
  Gene Name: dipeptidyl-peptidase 8
  ENSP ID: ENSP00000454922
  MOD_RES (1)..(1): Any amino acid
XFEGTKDSPLEHHLYVVSYVNPGEVTRLTDRGYSHSCCISQHCDFFISKYSNQKNPHCVSLYKLSSPEDDPTCKTKEFWATILDSAGPLPDYTPPEIFSFESTTGFTLYGMLYKPHDLQPGKKYPTVLFIYGGPQGQIEIDDQVEGLQYLASRYDFIDLDRVGIHGWSYGGYLSLMALMQRSDIFRVAIAGAPVTLWIFYDTGYTERYMGHPDQNEQGYYLGSVAMQAEKFPSEPNRLLLLHGFLDENVHFAHTSILLSFLVRAGKPYDLQIYPQERHSIRVPESGEHYELHLLHYLQENLGSRIAALKVI

SEQ ID NO: 24568 - protein, 162 aa, Homo sapiens
  Payload ID: 4890
  Gene Symbol: DPP8
  Gene Name: dipeptidyl-peptidase 8
  ENSP ID: ENSP00000455592
MAAAMETEQLGVEIFETADCEENIESQDRPKLEPFYVERYSWSQLKKLLADTRKYHGYMMAKAPHDFMFVKRNDPDGPHSDRIYYLAMSGENRENTLFYSEIPKTINRAAVLMLSWKPLLDLFQQQPLRPNLVETSCPNIRMDPKLCPADPDWIAFIHSNDI

SEQ ID NO: 24569 - protein, 892 aa, Homo sapiens
  Payload ID: 4891
  Gene Symbol: DPP9
  Gene Name: dipeptidyl-peptidase 9
  Uniprot ID: Q86TI2
  ENSP ID: ENSP00000262960
MRKVKKLRLDKENTGSWRSFSLNSEGAERMATTGTPTADRGDAAATDDPAARFQVQKHSWDGLRSIIHGSRKYSGLIVNKAPHDFQFVQKTDESGPHSHRLYYLGMPYGSRENSLLYSEIPKKVRKEALLLLSWKQMLDHFQATPHHGVYSREEELLRERKRLGVFGITSYDFHSESGLFLFQASNSLFHCRDGGKNGFMVSPMKPLEIKTQCSGPRMDPKICPADPAFFSFINNSDLWVANIETGEERRLTFCHQGLSNVLDDPKSAGVATFVIQEEFDRFTGYWWCPTASWEGSEGLKTLRILYEEVDESEVEVIHVPSPALEERKTDSYRYPRTGSKNPKIALKLAEFQTDSQGKIVSTQEKELVQPFSSLFPKVEYIARAGWTRDGKYAWAMFLDRPQQWLQLVLLPPALFIPSTENEEQRLASARAVPRNVQPYVVYEEVTNVWINVHDIFYPFPQSEGEDELCFLRANECKTGFCHLYKVTAVLKSQGYDWSEPFSPGEDEFKCPIKEEIALTSGEWEVLARHGSKIWVNEETKLVYFQGTKDTPLEHHLYVVSYEAAGEIVRLTTPGFSHSCSMSQNFDMFVSHYSSVSTPPCVHVYKLSGPDDDPLHKQPRFWASMMEAASCPPDYVPPEIFHFHTRSDVRLYGMIYKPHALQPGKKHPTVLFVYGGPQVQLVNNSFKGIKYLRLNTLASLGYAVVVIDGRGSCQRGLRFEGALKNQMGQVEIEDQVEGLQFVAEKYGFIDLSRVAIHGWSYGGFLSLMGLIHKPQVFKVAIAGAPVTVWMAYDTGYTERYMDVPENNQHGYEAGSVALHVEKLPNEPNRLLILHGFLDENVHFFHTNFLVSQLIRAGKPYQLQIYPNERHSIRCPESGEHYEVTLLHFLQEYL

SEQ ID NO: 24570 - protein, 67 aa, Homo sapiens
  Payload ID: 4891
  Gene Symbol: DPP9
  Gene Name: dipeptidyl-peptidase 9
  ENSP ID: ENSP00000469020
MFHFISHLRDRIFASWAISGDQSFSLNSEGAERMATTGTPTADRGDAAATDDPAARFQVQKHSWDGL

SEQ ID NO: 24571 - protein, 96 aa, Homo sapiens
  Payload ID: 4891
  Gene Symbol: DPP9
  Gene Name: dipeptidyl-peptidase 9
  ENSP ID: ENSP00000469152
MRKVKKLRLDKENTGSWRSFSLNSEGAERMATTGTPTADRGDAAATDDPAARFQVQKHSWDGLRSIIHGSRKYSGLIVNKAPHDFQFVQKTDESGP

SEQ ID NO: 24572 - protein, 220 aa, Homo sapiens
  Payload ID: 4891
  Gene Symbol: DPP9
  Gene Name: dipeptidyl-peptidase 9
  ENSP ID: ENSP00000469187
  MOD_RES (1)..(1): Any amino acid
XLHKQPRFWASMMEAASCPPDYVPPEIFHFHTRSDVRLYGMIYKPHALQPGKKHPTVLFVYGGPQVQLVNNSFKGIKYLRLNTLASLGYAVVVIDGRGSCQRGLRFEGALKNQMGQVEIEDQVEGLQFVAEKYGFIDLSRVAIHGWSYGGFLSLMGLIHKPQVFKAQPLAYPPRLPGRKRALFPHKLPRLPTDPSRETLPAPDLPQRETQYSLPRVGRAL

SEQ ID NO: 24573 - protein, 20 aa, Homo sapiens
  Payload ID: 4891
  Gene Symbol: DPP9
  Gene Name: dipeptidyl-peptidase 9
  ENSP ID: ENSP00000469282
MATTGTPTADRGDAAATDDP

SEQ ID NO: 24574 - protein, 863 aa, Homo sapiens
  Payload ID: 4891
  Gene Symbol: DPP9
  Gene Name: dipeptidyl-peptidase 9
  Uniprot ID: Q86TI2
  ENSP ID: ENSP00000469603
MATTGTPTADRGDAAATDDPAARFQVQKHSWDGLRSIIHGSRKYSGLIVNKAPHDFQFVQKTDESGPHSHRLYYLGMPYGSRENSLLYSEIPKKVRKEALLLLSWKQMLDHFQATPHHGVYSREEELLRERKRLGVFGITSYDFHSESGLFLFQASNSLFHCRDGGKNGFMVSPMKPLEIKTQCSGPRMDPKICPADPAFFSFINNSDLWVANIETGEERRLTFCHQGLSNVLDDPKSAGVATFVIQEEFDRFTGYWWCPTASWEGSEGLKTLRILYEEVDESEVEVIHVPSPALEERKTDSYRYPRTGSKNPKIALKLAEFQTDSQGKIVSTQEKELVQPFSSLFPKVEYIARAGWTRDGKYAWAMFLDRPQQWLQLVLLPPALFIPSTENEEQRLASARAVPRNVQPYVVYEEVTNVWINVHDIFYPFPQSEGEDELCFLRANECKTGFCHLYKVTAVLKSQGYDWSEPFSPGEDEFKCPIKEEIALTSGEWEVLARHGSKIWVNEETKLVYFQGTKDTPLEHHLYVVSYEAAGEIVRLTTPGFSHSCSMSQNFDMFVSHYSSVSTPPCVHVYKLSGPDDDPLHKQPRFWASMMEAASCPPDYVPPEIFHFHTRSDVRLYGMIYKPHALQPGKKHPTVLFVYGGPQVQLVNNSFKGIKYLRLNTLASLGYAVVVIDGRGSCQRGLRFEGALKNQMGQVEIEDQVEGLQFVAEKYGFIDLSRVAIHGWSYGGFLSLMGLIHKPQVFKVAIAGAPVTVWMAYDTGYTERYMDVPENNQHGYEAGSVALHVEKLPNEPNRLLILHGFLDENVHFFHTNFLVSQLIRAGKPYQLQIYPNERHSIRCPESGEHYEVTLLHFLQEYL

SEQ ID NO: 24575 - protein, 62 aa, Homo sapiens
  Payload ID: 4891
  Gene Symbol: DPP9
  Gene Name: dipeptidyl-peptidase 9
  ENSP ID: ENSP00000470393
MRKVKKLRLDKENTGSWRRRSLALLPRLECSGTILAPCNLHLPGSSDSSASASQVAGSTASR

SEQ ID NO: 24576 - protein, 119 aa, Homo sapiens
  Payload ID: 4891
  Gene Symbol: DPP9
  Gene Name: dipeptidyl-peptidase 9
  ENSP ID: ENSP00000471250
MRKVKKLRLDKENTGSWRSFSLNSEGAERMATTGTPTADRGDAAATDDPAARFQVQKHSWDGLRSIIHGSRKYSGLIVNKAPHDFQFVQKTDESGPHSHRLYYLGMPYGSRENSLLYSE

SEQ ID NO: 24577 - protein, 77 aa, Homo sapiens
  Payload ID: 4891
  Gene Symbol: DPP9
  Gene Name: dipeptidyl-peptidase 9
  ENSP ID: ENSP00000471629
MRKVKKLRLDKENTGSWRSFSLNSEGAERMATTGTPTADRGDAAATDDPAARFQVQKHSWDGLRSIIHGSRKYSGLI

SEQ ID NO: 24578 - protein, 151 aa, Homo sapiens
  Payload ID: 4891
  Gene Symbol: DPP9
  Gene Name: dipeptidyl-peptidase 9
  ENSP ID: ENSP00000471659
GGKNGFMVSPMKPLEIKTQCSGPRMDPKICPADPAFFSFINNSDLWVANIETGEERRLTFCHQGLSNVLDDPKSAGVATFVIQEEFDRFTGYWWCPTASWEGSEGLKTLRILYEEVDESEVEVIHVPSPALEERKTDSYRYPRTARIPRLP

SEQ ID NO: 24579 - protein, 141 aa, Homo sapiens
  Payload ID: 4891
  Gene Symbol: DPP9
  Gene Name: dipeptidyl-peptidase 9
  ENSP ID: ENSP00000471954
  MOD_RES (1)..(1): Any amino acid
XEVLARHGSKGTKDTPLEHHLYVVSYEAAGEIVRLTTPGFSHSCSMSQNFDMFVSHYSSVSTPPCVHVYKLSGPDDDPLHKQPRFWASMMEAASCPPDYVPPEIFHFHTRSDVRLYGMIYKPHALQPGKKHPTVLFVYGGP

SEQ ID NO: 24580 - protein, 836 aa, Homo sapiens
  Payload ID: 4891
  Gene Symbol: DPP9
  Gene Name: dipeptidyl-peptidase 9
  Uniprot ID: Q86TI2
  ENSP ID: ENSP00000472224
MATTGTPTADRGDAAATDDPAARFQVQKHSWDGLRSIIHGSRKYSGLIVNKAPHDFQFVQKTDESGPHSHRLYYLGMPYGSRENSLLYSEIPKKVRKEALLLLSWKQMLDHFQATPHHGVYSREEELLRERKRLGVFGITSYDFHSESGLFLFQASNSLFHCRDGGKNGFMVSPMKPLEIKTQCSGPRMDPKICPADPAFFSFINNSDLWVANIETGEERRLTFCHQGLSNVLDDPKSAGVATFVIQEEFDRFTGYWWCPTASWEGSEGLKTLRILYEEVDESEVEVIHVPSPALEERKTDSYRYPRTGSKNPKIALKLAEFQTDSQGKIVSTQEKELVQPFSSLFPKVEYIARAGWTRDGKYAWAMFLDRPQQWLQLVLLPPALFIPSTENEEQRLASARAVPRNVQPYVVYEEVTNVWINVHDIFYPFPQSEGEDELCFLRANECKTGFCHLYKVTAVLKSQGYDWSEPFSPGEDEFKCPIKEEIALTSGEWEVLARHGSKIWVNEETKLVYFQGTKDTPLEHHLYVVSYEAAGEIVRLTTPGFSHSCSMSQNFDMFVSHYSSVSTPPCVHVYKLSGPDDDPLHKQPRFWASMMEAASCPPDYVPPEIFHFHTRSDVRLYGMIYKPHALQPGKKHPTVLFVYGGPQVQLVNNSFKGIKYLRLNTLASLGYAVVVIDGRGSCQRGLRFEGALKNQMGQVEIEDQVEGLQFVAEKYGFIDLSRVAIHGWSYGGFLSLMGLIHKPQVFKVAIAGAPVTVWMAYDTGYTERYMDVPENNQHGYEAGSVALHVEKLPNEPNRLLILHGFLDENVHFFHTNFLVSQLIRAGKPYQLQEYL

SEQ ID NO: 24581 - protein, 518 aa, Homo sapiens
  Payload ID: 4891
  Gene Symbol: DPP9
  Gene Name: dipeptidyl-peptidase 9
  ENSP ID: ENSP00000472430
MRKVKKLRLDKENTGSWRSFSLNSEGAERMATTGTPTADRGDAAATDDPAARFQVQKHSWDGLRSIIHGSRKYSGLIVNKAPHDFQFVQKTDESGPHSHRLYYLGMPYGSRENSLLYSEIPKKVRKEALLLLSWKQMLDHFQATPHHGVYSREEELLRERKRLGVFGITSYDFHSESGLFLFQASNSLFHCRDGGKNGFMVSPMKPLEIKTQCSGPRMDPKICPADPAFFSFINNSDLWVANIETGEERRLTFCHQGLSNVLDDPKSAGVATFVIQEEFDRFTGYWWCPTASWEGSEGLKTLRILYEEVDESEVEVIHVPSPALEERKTDSYRYPRTGSKNPKIALKLAEFQTDSQGKIVSTQEKELVQPFSSLFPKVEYIARAGWTRDGKYAWAMFLDRPQQWLQLVLLPPALFIPSTENEEQRLASARAVPRNVQPYVVYEEVTNVWINVHDIFYPFPQSEGEDELCFLRANECKTGFCHLYKVTAVLKSQGYDWSEPFSPGEGEQSLTNAVDSSR

SEQ ID NO: 24582 - protein, 140 aa, Homo sapiens
  Payload ID: 4891
  Gene Symbol: DPP9
  Gene Name: dipeptidyl-peptidase 9
  ENSP ID: ENSP00000472549
MRKVKKLRLDKENTGSWRSFSLNSEGAERMATTGTPTADRGDAAATDDPAARFQVQKHSWDGLRSIIHGSRKYSGLIVNKAPHDFQFVQKTDESGPHSHRLYYLGMPYGSRENSLLYSEIPKKVRKEALLLLSWKQMLDH

SEQ ID NO: 24583 - protein, 62 aa, Homo sapiens
  Payload ID: 4891
  Gene Symbol: DPP9
  Gene Name: dipeptidyl-peptidase 9
  ENSP ID: ENSP00000472968
  MOD_RES (1)..(1): Any amino acid
XEIFHFHTRSDVRLYGMIYKPHALQPGKKHPTVLFVYGGPQARPARHLVLDCWPSPPHRCSW

SEQ ID NO: 24584 - protein, 123 aa, Homo sapiens
  Payload ID: 4891
  Gene Symbol: DPP9
  Gene Name: dipeptidyl-peptidase 9
  ENSP ID: ENSP00000473130
MRKVKKLRLDKENTGSWRSFSLNSEGAERMATTGTPTADRGDAAATDDPAARFQVQKHSWDGLRSIIHGSRKYSGLIVNKAPHDFQFVQKTDESGPHSHRLYYLGMPYGSRENSLLYSEIPKK

SEQ ID NO: 24585 - protein, 68 aa, Homo sapiens
  Payload ID: 4891
  Gene Symbol: DPP9
  Gene Name: dipeptidyl-peptidase 9
  ENSP ID: ENSP00000473175
MVSPMKPLEIKTQCSGPRMDPKICPADPAFFSFINNSDLWVANIETGEERRLTFCHQGLSNVLDDPKS

SEQ ID NO: 24586 - protein, 1406 aa, Homo sapiens
  Payload ID: 4892
  Gene Symbol: PPIP5K1
  Gene Name: diphosphoinositol pentakisphosphate kinase 1
  Uniprot ID: Q6PFW1
  ENSP ID: ENSP00000308773
MWSLTASEGESTTAHFFLGAGDEGLGTRGIGMRPEESDSELLEDEEDEVPPEPQIIVGICAMTKKSKSKPMTQILERLCRFDYLTVVILGEDVILNEPVENWPSCHCLISFHSKGFPLDKAVAYSKLRNPFLINDLAMQYYIQDRREVYRILQEEGIDLPRYAVLNRDPARPEECNLIEGEDQVEVNGAVFPKPFVEKPVSAEDHNVYIYYPSSAGGGSQRLFRKIGSRSSVYSPESSVRKTGSYIYEEFMPTDGTDVKVYTVGPDYAHAEARKSPALDGKVERDSEGKEIRYPVMLTAMEKLVARKVCVAFKQTVCGFDLLRANGHSFVCDVNGFSFVKNSMKYYDDCAKILGNTIMRELAPQFQIPWSIPTEAEDIPIVPTTSGTMMELRCVIAIIRHGDRTPKQKMKMEVKHPRFFALFEKHGGYKTGKLKLKRPEQLQEVLDITRLLLAELEKEPGGEIEEKTGKLEQLKSVLEMYGHFSGINRKVQLTYYPHGVKASNEGQDPQRETLAPSLLLVLKWGGELTPAGRVQAEELGRAFRCMYPGGQGDYAGFPGCGLLRLHSTFRHDLKIYASDEGRVQMTAAAFAKGLLALEGELTPILVQMVKSANMNGLLDSDGDSLSSCQHRVKARLHHILQQDAPFGPEDYDQLAPTRSTSLLNSMTIIQNPVKVCDQVFALIENLTHQIRERMQDPRSVDLQLYHSETLELMLQRWSKLERDFRQKSGRYDISKIPDIYDCVKYDVQHNGSLGLQGTAELLRLSKALADVVIPQEYGISREEKLEIAVGFCLPLLRKILLDLQRTHEDESVNKLHPLYSRGVLSPGRHVRTRLYFTSESHVHSLLSVFRYGGLLDETQDAQWQRALDYLSAISELNYMTQIVIMLYEDNTQDPLSEERFHVELHFSPGVKGVEEEGSAPAGCGFRPASSENEEMKTNQGSMENLCPGKASDEPDRALQTSPQPPEGPGLPRRSPLIRNRKAGSMEVLSETSSSRPGGYRLFSSSRPPTEMKQSGLGFEGCSMVPTIYPLETLHNALSLRQVSEFLSRVCQRHTDAQAQASAALFDSMHSSQASDNPFSPPRTLHSPPLQLQQRSEKPPWLETRFCHVGQAGLELLTSSDLPASASQSAGITGVSHRTQPDSSGPSSTVSSAGPSSPTTVDGNSQFGFSDQPSLNSHVAEEHQGLGLLQETPGSGAQELSIEGEQELFEPNQSPQVPPMETSQPYEEVSQPCQEVPDISQPCQDISEALSQPCQKVPDISQQCQENHDNGNHTCQEVPHISQPCQKSSQLCQKVSEEVCQLCLENSEEVSQPCQGVSVEVGKLVHKFHVGVGSLVQETLVEVGSPAEEIPEEVIQPYQEFSVEVGRLAQETSAINLLSQGIPEIDKPSQEFPEEIDLQAQEVPEEIN

SEQ ID NO: 24587 - protein, 1408 aa, Homo sapiens
  Payload ID: 4892
  Gene Symbol: PPIP5K1
  Gene Name: diphosphoinositol pentakisphosphate kinase 1
  Uniprot ID: Q6PFW1
  ENSP ID: ENSP00000334779
MWSLTASEGESTTAHFFLGAGDEGLGTRGIGMRPEESDSELLEDEEDEVPPEPQIIVGICAMTKKSKSKPMTQILERLCRFDYLTVVILGEDVILNEPVENWPSCHCLISFHSKGFPLDKAVAYSKLRNPFLINDLAMQYYIQDRREVYRILQEEGIDLPRYAVLNRDPARPEECNLIEGEDQVEVNGAVFPKPFVEKPVSAEDHNVYIYYPSSAGGGSQRLFRKIGSRSSVYSPESSVRKTGSYIYEEFMPTDGTDVKVYTVGPDYAHAEARKSPALDGKVERDSEGKEIRYPVMLTAMEKLVARKVCVAFKQTVCGFDLLRANGHSFVCDVNGFSFVKNSMKYYDDCAKILGNTIMRELAPQFQIPWSIPTEAEDIPIVPTTSGTMMELRCVIAIIRHGDRTPKQKMKMEVKHPRFFALFEKHGGYKTGKLKLKRPEQLQEVLDITRLLLAELEKEPGGEIEEKTGKLEQLKSVLEMYGHFSGINRKVQLTYYPHGVKASNEGQDPQRETLAPSLLLVLKWGGELTPAGRVQAEELGRAFRCMYPGGQGDYAGFPGCGLLRLHSTFRHDLKIYASDEGRVQMTAAAFAKGLLALEGELTPILVQMVKSANMNGLLDSDGDSLSSCQHRVKARLHHILQQDAPFGPEDYDQLAPTRSTSLLNSMTIIQNPVKVCDQVFALIENLTHQIRERMQDPRSVDLQLYHSETLELMLQRWSKLERDFRQKSGRYDISKIPDIYDCVKYDVQHNGSLGLQGTAELLRLSKALADVVIPQEYGISREEKLEIAVGFCLPLLRKILLDLQRTHEDESVNKLHPLYSRGVLSPGRHVRTRLYFTSESHVHSLLSVFRYGGLLDETQDAQWQRALDYLSAISELNYMTQIVIMLYEDNTQDPLSEERFHVELHFSPGVKGVEEEGSAPAGCGFRPASSENEEMKTNQGSMENLCPGKASDEPDRALQTSPQPPEGPGLPRRSPLIRNRKAGSMEVLSETSSSRPGGYRLFSSSRPPTEMKQSGLGSQCTGLFSTTVLGGSSSAPNLQDYARSHGKKLPPASLKHRDGFEGCSMVPTIYPLETLHNALSLRQVSEFLSRVCQRHTDAQAQASAALFDSMHSSQASDNPFSPPRTLHSPPLQLQQRSEKPPWYSSGPSSTVSSAGPSSPTTVDGNSQFGFSDQPSLNSHVAEEHQGLGLLQETPGSGAQELSIEGEQELFEPNQSPQVPPMETSQPYEEVSQPCQEVPDISQPCQDISEALSQPCQKVPDISQQCQENHDNGNHTCQEVPHISQPCQKSSQLCQKVSEEVCQLCLENSEEVSQPCQGVSVEVGKLVHKFHVGVGSLVQETLVEVGSPAEEIPEEVIQPYQEFSVEVGRLAQETSAINLLSQGIPEIDKPSQEFPEEIDLQAQEVPEEIN

SEQ ID NO: 24588 - protein, 1406 aa, Homo sapiens; identical to SEQ ID NO: 24586
  Payload ID: 4892
  Gene Symbol: PPIP5K1
  Gene Name: diphosphoinositol pentakisphosphate kinase 1
  Uniprot ID: Q6PFW1
  ENSP ID: ENSP00000353253

SEQ ID NO: 24589 - protein, 1408 aa, Homo sapiens; identical to SEQ ID NO: 24587
  Payload ID: 4892
  Gene Symbol: PPIP5K1
  Gene Name: diphosphoinositol pentakisphosphate kinase 1
  Uniprot ID: Q6PFW1
  ENSP ID: ENSP00000353446

SEQ ID NO: 24590 - protein, 1409 aa, Homo sapiens
  Payload ID: 4892
  Gene Symbol: PPIP5K1
  Gene Name: diphosphoinositol pentakisphosphate kinase 1
  ENSP ID: ENSP00000371303
MWSLTASEGESTTAHFFLGAGDEGLGTRGIGMRPEESDSELLEDEEDEVPPEPQIIVGICAMTKKSKSKPMTQILERLCRFDYLTVVILGEDVILNEPVENWPSCHCLISFHSKGFPLDKAVAYSKLRNPFLINDLAMQYYIQDRREVYRILQEEGIDLPRYAVLNRDPARPEECNLIEGEDQVEVNGAVFPKPFVEKPVSAEDHNVYIYYPSSAGGGSQRLFRKIGSRSSVYSPESSVRKTGSYIYEEFMPTDGTDVKVYTVGPDYAHAEARKSPALDGKVERDSEGKEIRYPVMLTAMEKLVARKVCVAFKQTVCGFDLLRANGHSFVCDVNGFSFVKNSMKYYDDCAKILGNTIMRELAPQFQIPWSIPTEAEDIPIVPTTSGTMMELRCVIAIIRHGDRTPKQKMKMEVKHPRFFALFEKHGGYKTGKLKLKRPEQLQEVLDITRLLLAELEKEPGGEIEEKTGKLEQLKSVLEMYGHFSGINRKVQLTYYPHGVKASNEGQDPQRETLAPSLLLVLKWGGELTPAGRVQAEELGRAFRCMYPGGQGDYAGFPGCGLLRLHSTFRHDLKIYASDEGRVQMTAAAFAKGLLALEGELTPILVQMVKSANMNGLLDSDGDSLSSCQHRVKARLHHILQQDAPFGPEDYDQLAPTRSTSLLNSMTIIQNPVKVCDQVFALIENLTHQIRERMQDPRSVDLQLYHSETLELMLQRWSKLERDFRQKSGRYDISKIPDIYDCVKYDVQHNGSLGLQGTAELLRLSKALADVVIPQEYGISREEKLEIAVGFCLPLLRKILLDLQRTHEDESVNKLHPLESHVHSLLSVFRYGGLLDETQDAQWQRALDYLSAISELNYMTQIVIMLYEDNTQDPLSEERFHVELHFSPGVKGVEEEGSAPAGCGFRPASSENEEMKTNQGSMENLCPGKASDEPDRALQTSPQPPEGPGLPRRSPLIRNRKAGSMEVLSETSSSRPGGYRLFSSSRPPTEMKQSGLGSQCTGLFSTTVLGGSSSAPNLQDYARSHGKKLPPASLKHRDELLFVPAVKRFSVSFAKHPTNGFEGCSMVPTIYPLETLHNALSLRQVSEFLSRVCQRHTDAQAQASAALFDSMHSSQASDNPFSPPRTLHSPPLQLQQRSEKPPWYSSGPSSTVSSAGPSSPTTVDGNSQFGFSDQPSLNSHVAEEHQGLGLLQETPGSGAQELSIEGEQELFEPNQSPQVPPMETSQPYEEVSQPCQEVPDISQPCQDISEALSQPCQKVPDISQQCQENHDNGNHTCQEVPHISQPCQKSSQLCQKVSEEVCQLCLENSEEVSQPCQGVSVEVGKLVHKFHVGVGSLVQETLVEVGSPAEEIPEEVIQPYQEFSVEVGRLAQETSAINLLSQGIPEIDKPSQEFPEEIDLQAQEVPEEIN

SEQ ID NO: 24591 - protein, 1429 aa, Homo sapiens
  Payload ID: 4892
  Gene Symbol: PPIP5K1
  Gene Name: diphosphoinositol pentakisphosphate kinase 1
  ENSP ID: ENSP00000371309
MWSLTASEGESTTAHFFLGAGDEGLGTRGIGMRPEESDSELLEDEEDEVPPEPQIIVGICAMTKKSKSKPMTQILERLCRFDYLTVVILGEDVILNEPVENWPSCHCLISFHSKGFPLDKAVAYSKLRNPFLINDLAMQYYIQDRREVYRILQEEGIDLPRYAVLNRDPARPEECNLIEGEDQVEVNGAVFPKPFVEKPVSAEDHNVYIYYPSSAGGGSQRLFRKIGSRSSVYSPESSVRKTGSYIYEEFMPTDGTDVKVYTVGPDYAHAEARKSPALDGKVERDSEGKEIRYPVMLTAMEKLVARKVCVAFKQTVCGFDLLRANGHSFVCDVNGFSFVKNSMKYYDDCAKILGNTIMRELAPQFQIPWSIPTEAEDIPIVPTTSGTMMELRCVIAIIRHGDRTPKQKMKMEVKHPRFFALFEKHGGYKTGKLKLKRPEQLQEVLDITRLLLAELEKEPGGEIEEKTGKLEQLKSVLEMYGHFSGINRKVQLTYYPHGVKASNEGQDPQRETLAPSLLLVLKWGGELTPAGRVQAEELGRAFRCMYPGGQGDYAGFPGCGLLRLHSTFRHDLKIYASDEGRVQMTAAAFAKGLLALEGELTPILVQMVKSANMNGLLDSDGDSLSSCQHRVKARLHHILQQDAPFGPEDYDQLAPTRSTSLLNSMTIIQNPVKVCDQVFALIENLTHQIRERMQDPRSVDLQLYHSETLELMLQRWSKLERDFRQKSGRYDISKIPDIYDCVKYDVQHNGSLGLQGTAELLRLSKALADVVIPQEYGISREEKLEIAVGFCLPLLRKILLDLQRTHEDESVNKLHPLYSRGVLSPGRHVRTRLYFTSESHVHSLLSVFRYGGLLDETQDAQWQRALDYLSAISELNYMTQIVIMLYEDNTQDPLSEERFHVELHFSPGVKGVEEEGSAPAGCGFRPASSENEEMKTNQGSMENLCPGKASDEPDRALQTSPQPPEGPGLPRRSPLIRNRKAGSMEVLSETSSSRPGGYRLFSSSRPPTEMKQSGLGSQCTGLFSTTVLGGSSSAPNLQDYARSHGKKLPPASLKHRDELLFVPAVKRFSVSFAKHPTNGFEGCSMVPTIYPLETLHNALSLRQVSEFLSRVCQRHTDAQAQASAALFDSMHSSQASDNPFSPPRTLHSPPLQLQQRSEKPPWYSSGPSSTVSSAGPSSPTTVDGNSQFGFSDQPSLNSHVAEEHQGLGLLQETPGSGAQELSIEGEQELFEPNQSPQVPPMETSQPYEEVSQPCQEVPDISQPCQDISEALSQPCQKVPDISQQCQENHDNGNHTCQEVPHISQPCQKSSQLCQKVSEEVCQLCLENSEEVSQPCQGVSVEVGKLVHKFHVGVGSLVQETLVEVGSPAEEIPEEVIQPYQEFSVEVGRLAQETSAINLLSQGIPEIDKPSQEFPEEIDLQAQEVPEEIN

SEQ ID NO: 24592 - protein, 1433 aa, Homo sapiens
  Payload ID: 4892
  Gene Symbol: PPIP5K1
  Gene Name: diphosphoinositol pentakisphosphate kinase 1
  Uniprot ID: Q6PFW1
  ENSP ID: ENSP00000380129
MWSLTASEGESTTAHFFLGAGDEGLGTRGIGMRPEESDSELLEDEEDEVPPEPQIIVGICAMTKKSKSKPMTQILERLCRFDYLTVVILGEDVILNEPVENWPSCHCLISFHSKGFPLDKAVAYSKLRNPFLINDLAMQYYIQDRREVYRILQEEGIDLPRYAVLNRDPARPEECNLIEGEDQVEVNGAVFPKPFVEKPVSAEDHNVYIYYPSSAGGGSQRLFRKIGSRSSVYSPESSVRKTGSYIYEEFMPTDGTDVKVYTVGPDYAHAEARKSPALDGKVERDSEGKEIRYPVMLTAMEKLVARKVCVAFKQTVCGFDLLRANGHSFVCDVNGFSFVKNSMKYYDDCAKILGNTIMRELAPQFQIPWSIPTEAEDIPIVPTTSGTMMELRCVIAIIRHGDRTPKQKMKMEVKHPRFFALFEKHGGYKTGKLKLKRPEQLQEVLDITRLLLAELEKEPGGEIEEKTGKLEQLKSVLEMYGHFSGINRKVQLTYYPHGVKASNEGQDPQRETLAPSLLLVLKWGGELTPAGRVQAEELGRAFRCMYPGGQGDYAGFPGCGLLRLHSTFRHDLKIYASDEGRVQMTAAAFAKGLLALEGELTPILVQMVKSANMNGLLDSDGDSLSSCQHRVKARLHHILQQDAPFGPEDYDQLAPTRSTSLLNSMTIIQNPVKVCDQVFALIENLTHQIRERMQDPRSVDLQLYHSETLELMLQRWSKLERDFRQKSGRYDISKIPDIYDCVKYDVQHNGSLGLQGTAELLRLSKALADVVIPQEYGISREEKLEIAVGFCLPLLRKILLDLQRTHEDESVNKLHPLCYLRYSRGVLSPGRHVRTRLYFTSESHVHSLLSVFRYGGLLDETQDAQWQRALDYLSAISELNYMTQIVIMLYEDNTQDPLSEERFHVELHFSPGVKGVEEEGSAPAGCGFRPASSENEEMKTNQGSMENLCPGKASDEPDRALQTSPQPPEGPGLPRRSPLIRNRKAGSMEVLSETSSSRPGGYRLFSSSRPPTEMKQSGLGSQCTGLFSTTVLGGSSSAPNLQDYARSHGKKLPPASLKHRDELLFVPAVKRFSVSFAKHPTNGFEGCSMVPTIYPLETLHNALSLRQVSEFLSRVCQRHTDAQAQASAALFDSMHSSQASDNPFSPPRTLHSPPLQLQQRSEKPPWYSSGPSSTVSSAGPSSPTTVDGNSQFGFSDQPSLNSHVAEEHQGLGLLQETPGSGAQELSIEGEQELFEPNQSPQVPPMETSQPYEEVSQPCQEVPDISQPCQDISEALSQPCQKVPDISQQCQENHDNGNHTCQEVPHISQPCQKSSQLCQKVSEEVCQLCLENSEEVSQPCQGVSVEVGKLVHKFHVGVGSLVQETLVEVGSPAEEIPEEVIQPYQEFSVEVGRLAQETSAINLLSQGIPEIDKPSQEFPEEIDLQAQEVPEEIN

SEQ ID NO: 24593 - protein, 196 aa, Homo sapiens
  Payload ID: 4892
  Gene Symbol: PPIP5K1
  Gene Name: diphosphoinositol pentakisphosphate kinase 1
  ENSP ID: ENSP00000387999
  MOD_RES (1)..(1): Any amino acid
XQTSPQPPEGPGLPRRSPLIRNRKAGSMEVLSETSSSRPGGYRLFSSSRPPTEMKQSGLGSQCTGLFSTTVLGGSSSAPNLQDYARSHGKKLPPASLKHRDELLDDQHPVVRLLRSFSSDCTGGRPVSLDATLAHHLHQCSYHLRLFRNWLRSGQDDPECLYGFEGCSMVPTIYPLETLHNALSLRQVSEFLSRVC

SEQ ID NO: 24594 - protein, 114 aa, Homo sapiens
  Payload ID: 4892
  Gene Symbol: PPIP5K1
  Gene Name: diphosphoinositol pentakisphosphate kinase 1
  ENSP ID: ENSP00000390657
MWSLTASEGESTTAHFFLGAGDEGLGTRGIGMRPEESDSELLEDEEDEVPPEPQIIVGICAMTKKSKSKPMTQILERLCRFDYLTVVILGEDVILNEPVENWPSCHCLISFHSK

SEQ ID NO: 24595 - protein, 1433 aa, Homo sapiens; identical to SEQ ID NO: 24592
  Payload ID: 4892
  Gene Symbol: PPIP5K1
  Gene Name: diphosphoinositol pentakisphosphate kinase 1
  Uniprot ID: Q6PFW1
  ENSP ID: ENSP00000400887

SEQ ID NO: 24596 - protein, 114 aa, Homo sapiens; identical to SEQ ID NO: 24594
  Payload ID: 4892
  Gene Symbol: PPIP5K1
  Gene Name: diphosphoinositol pentakisphosphate kinase 1
  ENSP ID: ENSP00000405106

SEQ ID NO: 24597 - protein, 71 aa, Homo sapiens
  Payload ID: 4892
  Gene Symbol: PPIP5K1
  Gene Name: diphosphoinositol pentakisphosphate kinase 1
  ENSP ID: ENSP00000405200
MWSLTASEGESTTAHFFLGAGDEGLGTRGIGMRPEESDSELLEDEEDEVPPEPQIIVGICAMTKKSKSKPM

SEQ ID NO: 24598 - protein, 133 aa, Homo sapiens
  Payload ID: 4892
  Gene Symbol: PPIP5K1
  Gene Name: diphosphoinositol pentakisphosphate kinase 1
  ENSP ID: ENSP00000407704
MWSLTASEGESTTAHFFLGAGDEGLGTRGIGMRPEESDSELLEDEEDEVPPEPQIIVGICAMTKKSKSKPMTQILERLCRFDYLTVVILGEDVILNEPVENWPSCHCLISFHSKGFPLDKAVAYSKLRNPFLI

SEQ ID NO: 24599 - protein, 259 aa, Homo sapiens
  Payload ID: 4892
  Gene Symbol: PPIP5K1
  Gene Name: diphosphoinositol pentakisphosphate kinase 1
  ENSP ID: ENSP00000410563
  MOD_RES (1)..(1): Any amino acid
XLPLLRKILLDLQRTHEDEYSRGVLSPGRHVRTRLYFTSESHVHSLLSVFRYGGLLDETQDAQWQRALDYLSAISELNYMTQIVIMLYEDNTQDPLSEERFHVELHFSPGVKGVEEEGSAPAGCGFRPASSENEEMKTNQGSMENLCPGKASDEPDRALQTSPQPPEGPGLPRRSPLIRNRKAGSMEVLSETSSSRPGGYRLFSSSRPPTEMKQSGLGSQCTGLFSTTVLGGSSSAPNLQDYARSHGKKLPPASLKHRD

SEQ ID NO: 24600 - protein, 118 aa, Homo sapiens
  Payload ID: 4892
  Gene Symbol: PPIP5K1
  Gene Name: diphosphoinositol pentakisphosphate kinase 1
  ENSP ID: ENSP00000415349
  MOD_RES (1)..(1): Any amino acid
XPFVEKPVSAEDHNVYIYYPSSAGGGSQRLFRKIGSRSSVYSPESSVRKTGSYIYEEFMPTDGTDVKGELWAYSVMLCTCRCIQWGQIMPMLKLENLQLWMGRLNETVRGKRFDIQSC

SEQ ID NO: 24601 - protein, 1222 aa, Homo sapiens
  Payload ID: 4893
  Gene Symbol: PPIP5K2
  Gene Name: diphosphoinositol pentakisphosphate kinase 2
  Uniprot ID: O43314
  ENSP ID: ENSP00000313070
MSEAPRFFVGPEDTEINPGNYRHFFHHADEDDEEEDDSPPERQIVVGICSMAKKSKSKPMKEILERISLFKYITVVVFEEEVILNEPVENWPLCDCLISFHSKGFPLDKAVAYAKLRNPFVINDLNMQYLIQDRREVYSILQAEGILLPRYAILNRDPNNPKECNLIEGEDHVEVNGEVFQKPFVEKPVSAEDHNVYIYYPTSAGGGSQRLFRKIGSRSSVYSPESNVRKTGSYIYEEFMPTDGTDVKVYTVGPDYAHAEARKSPALDGKVERDSEGKEVRYPVILNAREKLIAWKVCLAFKQTVCGFDLLRANGQSYVCDVNGFSFVKNSMKYYDDCAKILGNIVMRELAPQFHIPWSIPLEAEDIPIVPTTSGTMMELRCVIAVIRHGDRTPKQKMKMEVRHQKFFDLFEKCDGYKSGKLKLKKPKQLQEVLDIARQLLMELGQNNDSEIEENKPKLEQLKTVLEMYGHFSGINRKVQLTYLPHGCPKTSSEEEDSRREEPSLLLVLKWGGELTPAGRVQAEELGRAFRCMYPGGQGDYAGFPGCGLLRLHSTYRHDLKIYASDEGRVQMTAAAFAKGLLALEGELTPILVQMVKSANMNGLLDSDSDSLSSCQQRVKARLHEILQKDRDFTAEDYEKLTPSGSISLIKSMHLIKNPVKTCDKVYSLIQSLTSQIRHRMEDPKSSDIQLYHSETLELMLRRWSKLEKDFKTKNGRYDISKIPDIYDCIKYDVQHNGSLKLENTMELYRLSKALADIVIPQEYGITKAEKLEIAKGYCTPLVRKIRSDLQRTQDDDTVNKLHPVYSRGVLSPERHVRTRLYFTSESHVHSLLSILRYGALCNESKDEQWKRAMDYLNVVNELNYMTQIVIMLYEDPNKDLSSEERFHVELHFSPGAKGCEEDKNLPSGYGYRPASRENEGRRPFKIDNDDEPHTSKRDEVDRAVILFKPMVSEPIHIHRKSPLPRSRKTATNDEESPLSVSSPEGTGTWLHYTSGVGTGRRRRRSGEQITSSPVSPKSLAFTSSIFGSWQQVVSENANYLRTPRTLVEQKQNPTVGSHCAGLFSTSVLGGSSSAPNLQDYARTHRKKLTSSGCIDGFELYSMVPSICPLETLHNALSLKQVDEFLASIASPSSDVPRKTAEISSTALRSSPIMRKKVSLNTYTPAKILPTPPATLKSTKASSKPATSGPSSAVVPNTSSRKKNITSKTETHEHKKNTGKKK

SEQ ID NO: 24602 - protein, 1243 aa, Homo sapiens
  Payload ID: 4893
  Gene Symbol: PPIP5K2
  Gene Name: diphosphoinositol pentakisphosphate kinase 2
  Uniprot ID: O43314
  ENSP ID: ENSP00000351126
MSEAPRFFVGPEDTEINPGNYRHFFHHADEDDEEEDDSPPERQIVVGICSMAKKSKSKPMKEILERISLFKYITVVVFEEEVILNEPVENWPLCDCLISFHSKGFPLDKAVAYAKLRNPFVINDLNMQYLIQDRREVYSILQAEGILLPRYAILNRDPNNPKECNLIEGEDHVEVNGEVFQKPFVEKPVSAEDHNVYIYYPTSAGGGSQRLFRKIGSRSSVYSPESNVRKTGSYIYEEFMPTDGTDVKVYTVGPDYAHAEARKSPALDGKVERDSEGKEVRYPVILNAREKLIAWKVCLAFKQTVCGFDLLRANGQSYVCDVNGFSFVKNSMKYYDDCAKILGNIVMRELAPQFHIPWSIPLEAEDIPIVPTTSGTMMELRCVIAVIRHGDRTPKQKMKMEVRHQKFFDLFEKCDGYKSGKLKLKKPKQLQEVLDIARQLLMELGQNNDSEIEENKPKLEQLKTVLEMYGHFSGINRKVQLTYLPHGCPKTSSEEEDSRREEPSLLLVLKWGGELTPAGRVQAEELGRAFRCMYPGGQGDYAGFPGCGLLRLHSTYRHDLKIYASDEGRVQMTAAAFAKGLLALEGELTPILVQMVKSANMNGLLDSDSDSLSSCQQRVKARLHEILQKDRDFTAEDYEKLTPSGSISLIKSMHLIKNPVKTCDKVYSLIQSLTSQIRHRMEDPKSSDIQLYHSETLELMLRRWSKLEKDFKTKNGRYDISKIPDIYDCIKYDVQHNGSLKLENTMELYRLSKALADIVIPQEYGITKAEKLEIAKGYCTPLVRKIRSDLQRTQDDDTVNKLHPVYSRGVLSPERHVRTRLYFTSESHVHSLLSILRYGALCNESKDEQWKRAMDYLNVVNELNYMTQIVIMLYEDPNKDLSSEERFHVELHFSPGAKGCEEDKNLPSGYGYRPASRENEGRRPFKIDNDDEPHTSKRDEVDRAVILFKPMVSEPIHIHRKSPLPRSRKTATNDEESPLSVSSPEGTGTWLHYTSGVGTGRRRRRSGEQITSSPVSPKSLAFTSSIFGSWQQVVSENANYLRTPRTLVEQKQNPTVGSHCAGLFSTSVLGGSSSAPNLQDYARTHRKKLTSSGCIDDATRGSAVKRFSISFARHPTNGFELYSMVPSICPLETLHNALSLKQVDEFLASIASPSSDVPRKTAEISSTALRSSPIMRKKVSLNTYTPAKILPTPPATLKSTKASSKPATSGPSSAVVPNTSSRKKNITSKTETHEHKKNTGKKK

SEQ ID NO: 24603 - protein, 1222 aa, Homo sapiens; identical to SEQ ID NO: 24601
  Payload ID: 4893
  Gene Symbol: PPIP5K2
  Gene Name: diphosphoinositol pentakisphosphate kinase 2
  Uniprot ID: O43314
  ENSP ID: ENSP00000416016

SEQ ID NO: 24604 - protein, 58 aa, Homo sapiens
  Payload ID: 4893
  Gene Symbol: PPIP5K2
  Gene Name: diphosphoinositol pentakisphosphate kinase 2
  ENSP ID: ENSP00000421513
MSEAPRFFVGPEDTEINPGNYRHFFHHADEDDEEEDDSPPERQIVVGICSMAKKSKSK

SEQ ID NO: 24605 - protein, 452 aa, Homo sapiens
  Payload ID: 4893
  Gene Symbol: PPIP5K2
  Gene Name: diphosphoinositol pentakisphosphate kinase 2
  ENSP ID: ENSP00000422525
MKGGNLDLNGLDHLTTARVTTAFVAGFPLDKAVAYAKLRNPFVINDLNMQYLIQDRREVYSILQAEGILLPRYAILNRDPNNPKECNLIEGEDHVEVNGEVFQKPFVEKPVSAEDHNVYIYYPTSAGGGSQRLFRKIGSRSSVYSPESNVRKTGSYIYEEFMPTDGTDVKVYTVGPDYAHAEARKSPALDGKVERDSEGKEVRYPVILNAREKLIAWKVCLAFKQTVCGFDLLRANGQSYVCDVNGFSFVKNSMKYYDDCAKILGNIVMRELAPQFHIPWSIPLEAEDIPIVPTTSGTMMELRCVIAVIRHGDRTPKQKMKMEVRHQKFFDLFEKCDGYKSGKLKLKKPKQLQEVLDIARQLLMELGQNNDSEIEENKPKLEQLKTVLEMYGHFSGINRKVQLTYLPHGCPKTSSEEEDSRREEPSLLLVLKWGGELTPAGRVQAEELGRAF

SEQ ID NO: 24606 - protein, 209 aa, Homo sapiens
  Payload ID: 4893
  Gene Symbol: PPIP5K2
  Gene Name: diphosphoinositol pentakisphosphate kinase 2
  ENSP ID: ENSP00000424535
KYITVVVFEEEVILNEPVENWPLCDCLISFHSKGFPLDKAVAYAKLRNPFVINDLNMQYLIQDRREVYSILQAEGILLPRYAILNRDPNNPKECNLIEGEDHVEVNGEVFQKPFVEKPVSAEDHNVYIYYPTSAGGGSQRLFRKIGSRSSVYSPESNVRKTGSYIYEEFMPTDGTDVKGFLMFCNNNIFSSLKPMDSFLRVVFLNALNM

SEQ ID NO: 24607 - protein, 398 aa, Homo sapiens
  Payload ID: 4893
  Gene Symbol: PPIP5K2
  Gene Name: diphosphoinositol pentakisphosphate kinase 2
  ENSP ID: ENSP00000424948
YDCIKYDVQHNGSLKLENTMELYRLSKALADIVIPQEYGITKAEKLEIAKGYCTPLVRKIRSDLQRTQDDDTVNKLHPVYSRGVLSPERHVRTRLYFTSESHVHSLLSILRYGALCNESKDEQWKRAMDYLNVVNELNYMTQIVIMLYEDPNKDLSSEERFHVELHFSPGAKGCEEDKNLPSGYGYRPASRENEGRRPFKIDNDDEPHTSKRDEVDRAVILFKPMVSEPIHIHRKSPLPRSRKTATNDVVSENANYLRTPRTLVEQKQNPTVGFELYSMVPSICPLETLHNALSLKQVDEFLASIASPSSDVPRKTAEISSTALRSSPIMRKKVSLNTYTPAKILPTPPATLKSTKASSKPATSGPSSAVVPNTSSRKKNITSKTETHEHKKNTGKKK

SEQ ID NO: 24608 - protein, 51 aa, Homo sapiens
  Payload ID: 4893
  Gene Symbol: PPIP5K2
  Gene Name: diphosphoinositol pentakisphosphate kinase 2
  ENSP ID: ENSP00000465165
MKGGNLDLNGLDHLTTARVTTAFVADGVLLCCPGWSTMARSPLTATSTSWI

SEQ ID NO: 24609 - protein, 255 aa, Homo sapiens
  Payload ID: 4893
  Gene Symbol: PPIP5K2
  Gene Name: diphosphoinositol pentakisphosphate kinase 2
  ENSP ID: ENSP00000467099
  MOD_RES (1)..(1): Any amino acid
XGCEEDKNLPSGYGYRPASRENEGRRPFKIDNDDEPHTSKRDEVDRAVILFKPMVSEPIHIHRKSPLPRSRKTATNDVVSENANYLRTPRTLVEQKQNPTVGSHCAGLFSTSVLGGSSSAPNLQDYARTHRKKLTSSGCIDDATRGSAVKRFSISFARHPTNGFELYSMVPSICPLETLHNALSLKQVDEFLASIASPSSDVPRKTAEISSTALRSSPIMRKKVSLNTYTPAKILPTPPATLKSTKASSKPATSG

SEQ ID NO: 24610 - protein, 58 aa, Homo sapiens
  Payload ID: 4893
  Gene Symbol: PPIP5K2
  Gene Name: diphosphoinositol pentakisphosphate kinase 2
  ENSP ID: ENSP00000467529
MQYLIQDRREVYSILQAEGILLPRYAILNRDPNNPKECNLIEGEDHVEVNGEVFQKPF

SEQ ID NO: 24611 - protein, 357 aa, Homo sapiens
  Payload ID: 4893
  Gene Symbol: PPIP5K2
  Gene Name: diphosphoinositol pentakisphosphate kinase 2
  ENSP ID: ENSP00000480381
  MOD_RES (1)..(1): Any amino acid
XLRYGALCNTNDSQNEDGGMVKEMESKDEQWKRAMDYLNVVNELNYMTQIVIMLYEDPNKDLSSEERFHVELHFSPGAKGCEEDKNLPSGYGYRPASRENEGRRPFKIDNDDEPHTSKRDEVDRAVILFKPMVSEPIHIHRKSPLPRSRKTATNDEESPLSVSSPEGTGTWLHYTSGVGTGRRRRRSGEQITSSPVSPKSLAFTSSIFGSWQQVVSENANYLRTPRTLVEQKQNPTVGFELYSMVPSICPLETLHNALSLKQVDEFLASIASPSSDVPRKTAEISSTALRSSPIMRKKVSLNTYTPAKILPTPPATLKSTKASSKPATSGPSSAVVPNTSSRKKNITSKTETHEHKK

SEQ ID NO: 24612 - protein, 1278 aa, Homo sapiens
  Payload ID: 4893
  Gene Symbol: PPIP5K2
  Gene Name: diphosphoinositol pentakisphosphate kinase 2
  ENSP ID: ENSP00000482907
MSEAPRFFVGPEDTEINPGNYRHFFHHADEDDEEEDDSPPERQIVVGICSMAKKSKSKPMKEILERISLFKYITVVVFEEEVILNEPVENWPLCDCLISFHSKGFPLDKAVAYAKLRNPFVINDLNMQYLIQDRREVYSILQAEGILLPRYAILNRDPNNPKECNLIEGEDHVEVNGEVFQKPFVEKPVSAEDHNVYIYYPTSAGGGSQRLFRKIGSRSSVYSPESNVRKTGSYIYEEFMPTDGTDVKVYTVGPDYAHAEARKSPALDGKVERDSEGKEVRYPVILNAREKLIAWKVCLAFKQTVCGFDLLRANGQSYVCDVNGFSFVKNSMKYYDDCAKILGNIVMRELAPQFHIPWSIPLEAEDIPIVPTTSGTMMELRCVIAVIRHGDRTPKQKMKMEVRHQKFFDLFEKCDGYKSGKLKLKKPKQLQEVLDIARQLLMELGQNNDSEIEENKPKLEQLKTVLEMYGHFSGINRKVQLTYLPHGCPKTSSEEEDSRREEPSLLLVLKWGGELTPAGRVQAEELGRAFRCMYPGGQGDYAGFPGCGLLRLHSTYRHDLKIYASDEGRVQMTAAAFAKGLLALEGELTPILVQMVKSANMNGLLDSDSDSLSSCQQRVKARLHEILQKDRDFTAEDYEKLTPSGSISLIKSMHLIKNPVKTCDKVYSLIQSLTSQIRHRMEDPKSSDIQLYHSETLELMLRRWSKLEKDFKTKNGRYDISKIPDIYDCIKYDVQHNGSLKLENTMELYRLSKALADIVIPQEYGITKAEKLEIAKGYCTPLVRKIRSDLQRTQDDDTVNKLHPVYSRGVLSPERHVRTRLYFTSESHVHSLLSILRYGALCNTNDSQNEDGGMVKEMESKDEQWKRAMDYLNVVNELNYMTQIVIMLYEDPNKDLSSEERFHVELHFSPGAKGCEEDKNLPSGYGYRPASRENEGRRPFKIDNDDEPHTSKRDEVDRAVILFKPMVSEPIHIHRKSPLPRSRKTATNDEESPLSVSSPEGTGTWLHYTSGVGTGRRRRRSGEQITSSPVSPKSLAFTSSIFGSWQQVVSENANYLRTPRTLVEQKQNPTVGSHCAGLFSTSVLGGSSSAPNLQDYARTHRKKLTSSGCIDDATRGSAVKRFSISFARHPTNEHLHLYRCWSVSSVEFLGSSGFELYSMVPSICPLETLHNALSLKQVDEFLASIASPSSDVPRKTAEISSTALRSSPIMRKKVSLNTYTPAKILPTPPATLKSTKASSKPATSGPSSAVVPNTSSRKKNITSKTETHEHKKNTGKKK

SEQ ID NO: 24613 - protein, 1278 aa, Homo sapiens; identical to SEQ ID NO: 24612
  Payload ID: 4893
  Gene Symbol: PPIP5K2
  Gene Name: diphosphoinositol pentakisphosphate kinase 2
  ENSP ID: ENSP00000486357

SEQ ID NO: 24614 - protein, 443 aa, Homo sapiens
  Payload ID: 4894
  Gene Symbol: DPH1
  Gene Name: diphthamide biosynthesis 1
  Uniprot ID: Q9BZG8
  ENSP ID: ENSP00000263083
MRRQVMAALVVSGAAEQGGRDGPGRGRAPRGRVANQIPPEILKNPQLQAAIRVLPSNYNFEIPKTIWRIQQAQAKKVALQMPEGLLLFACTIVDILERFTEAEVMVMGDVTYGACCVDDFTARALGADFLVHYGHSCLIPMDTSAQDFRVLYVFVDIRIDTTHLLDSLRLTFPPATALALVSTIQFVSTLQAAAQELKAEYRVSVPQCKPLSPGEILGCTSPRLSKEVEAVVYLGDGRFHLESVMIANPNVPAYRYDPYSKVLSREHYDHQRMQAARQEAIATARSAKSWGLILGTLGRQGSPKILEHLESRLRALGLSFVRLLLSEIFPSKLSLLPEVDVWVQVACPRLSIDWGTAFPKPLLTPYEAAVALRDISWQQPYPMDFYAGSSLGPWTVNHGQDRRPHAPGRPARGKVQEGSARPPSAVACEDCSCRDEKVAPLAP

SEQ ID NO: 24615 - protein, 363 aa, Homo sapiens
  Payload ID: 4894
  Gene Symbol: DPH1
  Gene Name: diphthamide biosynthesis 1
  Uniprot ID: Q9BZG8
  ENSP ID: ENSP00000458726
MPEGLLLFACTIVDILERFTEAEVMVMGDVTYGACCVDDFTARALGADFLVHYGHSCLIPMDTSAQDFRVLYVFVDIRIDTTHLLDSLRLTFPPATALALVSTIQFVSTLQAAAQELKAEYRVSVPQCKPLSPGEILGCTSPRLSKEVEAVVYLGDGRFHLESVMIANPNVPAYRYDPYSKVLSREHYDHQRMQAARQEAIATARSAKSWGLILGTLGRQGSPKILEHLESRLRALGLSFVRLLLSEIFPSKLSLLPEVDVWVQVACPRLSIDWGTAFPKPLLTPYEAAVALRDISWQQPYPMDFYAGSSLGPWTVNHGQDRRPHAPGRPARGKVQEGSARPPSAVACEDCSCRDEKVAPLAP

SEQ ID NO: 24616 - protein, 431 aa, Homo sapiens
  Payload ID: 4894
  Gene Symbol: DPH1
  Gene Name: diphthamide biosynthesis 1
  ENSP ID: ENSP00000458838
  MOD_RES (1)..(1): Any amino acid
XRQVMAALVVSGAAEQGGRDGPGRGRAPRGRVANQIPPEILKNPQLQAAIRVLPSNYNFEIPKTIWRIQQAQAKKVALQMPEGLLLFACTIVDILERFTEAEVMVMGDVTYGACCVDDFTARALGADFLVHYGHSCLIPMDTSAQDFRVLYVFVDIRIDTTHLLDSLRLTFPPATALALAAAQELKAEYRVSVPQCKPLSPGEILGCTSPRLSKEVEAVVYLGDGRFHLESVMIANPNVPAYRYDPYSKVLSREHYDHQRMQAARQEAIATARSAKSWGLILGTLGRQGSPKILEHLESRLRALGLSFVRLLLSEIFPSKLSLLPEVDVWVQVACPRLSIDWGTAFPKPLLTPYEAAVALRDISWQQPYPMDFYAGSSLGPWTVNHGQDRRPHAPGRPARGKVQEGSARPPSAVACEDCSCRDEKVAPLAP

SEQ ID NO: 24617 - protein, 214 aa, Homo sapiens
  Payload ID: 4894
  Gene Symbol: DPH1
  Gene Name: diphthamide biosynthesis 1
  ENSP ID: ENSP00000460431
  MOD_RES (1)..(1): Any amino acid
XRQVMAALVVSGAAEQGGRDGPGRGRAPRGRVANQIPPEILKNPQLQAAIRVLPSNYNFEIPKTIWRIQQAQAKKVALQMPEGLLLFACTIVDILESSHGHLGPRLPGAVRLCGHPDRHYTPPGLSPPHLSPSHCPCPGQHHSVCVDLAGSRPGAESRVSCECPTVQAPVPWRDPGLHIPPTVQRGGGRCVSWRWPLPSGVCHDCQPQCPRLPV

SEQ ID NO: 24618 - protein, 148 aa, Homo sapiens
  Payload ID: 4894
  Gene Symbol: DPH1
  Gene Name: diphthamide biosynthesis 1
  ENSP ID: ENSP00000460813
  MOD_RES (1)..(1): Any amino acid
XLGRQGSPKILEHLESRLRALGLSFVRLLLSEIFPSKLSLLPEVDVWVQVACPRLSIDWGTAFPKPLLTPYEAAVALRDISWQQPYPMDFYAGSSLGPWTVNHGQDRRPHAPGRPARGKVQEGSARPPSAVACEDCSCRDEKVAPLAP

SEQ ID NO: 24619 - protein, 49 aa, Homo sapiens
  Payload ID: 4894
  Gene Symbol: DPH1
  Gene Name: diphthamide biosynthesis 1
  ENSP ID: ENSP00000467936
TIVDILERFTEAEVMVMGDVTYGACCVDDFTARALGADFLVHYGHSCLS

SEQ ID NO: 24620 - protein, 103 aa, Homo sapiens
  Payload ID: 4894
  Gene Symbol: DPH1
  Gene Name: diphthamide biosynthesis 1
  ENSP ID: ENSP00000476070
  MOD_RES (1)..(1): Any amino acid
XWVQVACPRLSIDWGTAFPKPLLTPYEAAVALRDISWQQPYPMDFYAGSSLGPWTVNHGQDRRPHAPGRPARGKVQEGSARPPSAVACEDCSCRDEKVAPLAP

SEQ ID NO: 24621 - protein, 107 aa, Homo sapiens
  Payload ID: 4894
  Gene Symbol: DPH1
  Gene Name: diphthamide biosynthesis 1
  ENSP ID: ENSP00000476598
LRWQLLGALDGEPRPGPPSPRPGPARAGEGRRGLPGGRRDRAWALAAALRPRRETHRSGAEGNAGSQERDPNQSLRPQVQEGSARPPSAVACEDCSCRDEKVAPLAP

SEQ ID NO: 24622 - protein, 52 aa, Homo sapiens
  Payload ID: 4894
  Gene Symbol: DPH1
  Gene Name: diphthamide biosynthesis 1
  ENSP ID: ENSP00000477033
GPWTVNHGQDRRPHAPGRPARGKVQEGSARPPSAVACEDCSCRDEKVAPLAP

SEQ ID NO: 24623 - protein, 57 aa, Homo sapiens
  Payload ID: 4895
  Gene Symbol: DPH3
  Gene Name: diphthamide biosynthesis 3
  Uniprot ID: Q96FX2
  ENSP ID: ENSP00000373285
MAVFHDEVEIEDFQYDEDSETYFYPCPCGDNFSITKDQFVCGETVPAPSANKELVKC

SEQ ID NO: 24624 - protein, 82 aa, Homo sapiens
  Payload ID: 4895
  Gene Symbol: DPH3
  Gene Name: diphthamide biosynthesis 3
  Uniprot ID: Q96FX2
  ENSP ID: ENSP00000419599
MAVFHDEVEIEDFQYDEDSETYFYPCPCGDNFSITKEDLENGEDVATCPSCSLIIKVIYDKDQFVCGETVPAPSANKELVKC

SEQ ID NO: 24625 - protein, 284 aa, Homo sapiens
  Payload ID: 4896
  Gene Symbol: DPH5
  Gene Name: diphthamide biosynthesis 5
  Uniprot ID: Q9H2P9
  ENSP ID: ENSP00000339630
MLYLIGLGLGDAKDITVKGLEVVRRCSRVYLEAYTSVLTVGKEALEEFYGRKLVVADREEVEQEADNILKDADISDVAFLVVGDPFGATTHSDLVLRATKLGIPYRVIHNASIMNAVGCCGLQLYKFGETVSIVFWTDTWRPESFFDKVKKNRQNGMHTLCLLDIKVKEQSLENLIKGRKIYEPPRYMSVNQAAQQLLEIVQNQRIRGEEPVTEETLCVGLARVGADDQKIAAGTLRQMCTVDLGEPLHSLIITGGSIHPMEMEMLSLFSIPENSSESQSINGL

SEQ ID NO: 24626 - protein, 285 aa, Homo sapiens
  Payload ID: 4896
  Gene Symbol: DPH5
  Gene Name: diphthamide biosynthesis 5
  Uniprot ID: Q9H2P9
  ENSP ID: ENSP00000359127
MLYLIGLGLGDAKDITVKGLEVVRRCSRVYLEAYTSVLTVGKEALEEFYGRKLVVADREEVEQEADNILKDADISDVAFLVVGDPFGATTHSDLVLRATKLGIPYRVIHNASIMNAVGCCGLQLYKFGETVSIVFWTDTWRPESFFDKVKKNRQNGMHTLCLLDIKVKEQSLENLIKGRKIYEPPRYMSVNQAAQQLLEIVQNQRIRGEEPAVTEETLCVGLARVGADDQKIAAGTLRQMCTVDLGEPLHSLIITGGSIHPMEMEMLSLFSIPENSSESQSINGL

SEQ ID NO: 24627 - protein, 46 aa, Homo sapiens
  Payload ID: 4896
  Gene Symbol: DPH5
  Gene Name: diphthamide biosynthesis 5
  ENSP ID: ENSP00000394364
MCTVDLGEPLHSLIITGGSIHPMEMEMLSLFSIPENSSESQSINGL

SEQ ID NO: 24628 - protein, 285 aa, Homo sapiens; identical to SEQ ID NO: 24626
  Payload ID: 4896
  Gene Symbol: DPH5
  Gene Name: diphthamide biosynthesis 5
  Uniprot ID: Q9H2P9
  ENSP ID: ENSP00000418282

SEQ ID NO: 24629 - protein, 243 aa, Homo sapiens
  Payload ID: 4896
  Gene Symbol: DPH5
  Gene Name: diphthamide biosynthesis 5
  ENSP ID: ENSP00000481189
MLYLIGLGLGDAKDITVKGLEVVRRCSRVYLEAYTSVLTVGKEALEEFYGRKLVVADREEVEQEADNILKDADISDVAFLVVGDHLDTWRPESFFDKVKKNRQNGMHTLCLLDIKVKEQSLENLIKGRKIYEPPRYMSVNQAAQQLLEIVQNQRIRGEEPAVTEETLCVGLARVGADDQKIAAGTLRQMCTVDLGEPLHSLIITGGSIHPMEMEMLSLFSIPENSSESQSINGFEHRYYHCLM

SEQ ID NO: 24630 - protein, 452 aa, Homo sapiens
  Payload ID: 4897
  Gene Symbol: DPH7
  Gene Name: diphthamide biosynthesis 7
  Uniprot ID: Q9BTV6
  ENSP ID: ENSP00000277540
MMGCFALQTVDTELTADSVEWCPLQGCRHLLACGTYQLRRPEDRPAGPQNKGGMEVKEPQVRLGRLFLYSFNDNNSIHPLVEVQRKDTSAILDMKWCHIPVAGHALLGLADASGSIQLLRLVESEKSHVLEPLSSLALEEQCLALSLDWSTGKTGRAGDQPLKIISSDSTGQLHLLMVNETRPRLQKVASWQAHQFEAWIAAFNYWHPEIVYSGGDDGLLRGWDTRVPGKFLFTSKRHTMGVCSIQSSPHREHILATGSYDEHILLWDTRNMKQPLADTPVQGGVWRIKWHPFHHHLLLAACMHSGFKILNCQKAMEERQEATVLTSHTLPDSLVYGADWSWLLFRSLQRAPSWSFPSNLGTKTADLKGASELPTPCHECREDNDGEGHARPQSGMKPLTEGMRKNGTWLQATAATTRDCGVNPEEADSAFSLLATCSFYDHALHLWEWEGN

SEQ ID NO: 24631 - protein, 227 aa, Homo sapiens
  Payload ID: 4897
  Gene Symbol: DPH7
  Gene Name: diphthamide biosynthesis 7
  ENSP ID: ENSP00000485026
MGQVSGRRSVPPRGLVEQVSLAFLICLLWLVGFSYDEHILLWDTRNMKQPLADTPVQGGVWRIKWHPFHHHLLLAACMHSGFKILNCQKAMEERQEATVLTSHTLPDSLVYGADWSWLLFRSLQRAPSWSFPSNLGTKTADLKGASELPTPCHECREDNDGEGHARPQSGMKPLTEGMRKNGTWLQATAATTRDCGVNPEEADSAFSLLATCSFYDHALHLWEWEGN

SEQ ID NO: 24632 - protein, 267 aa, Homo sapiens
  Payload ID: 4898
  Gene Symbol: DPH6
  Gene Name: diphthamine biosynthesis 6
  Uniprot ID: Q7L8W6
  ENSP ID: ENSP00000256538
MRVAALISGGKDSCYNMMQCIAAGHQIVALANLRPAENQVGSDELDSYMYQTVGHHAIDLYAEAMALPLYRRTIRGRSLDTRQVYTKCEGDEVEDLYELLKLVKEKEEVEGISVGAILSDYQRIRVENVCKRLNLQPLAYLWQRNQEDLLREMISSNIQAMIIKVAALGLDPDKHLGKTLDQMEPYLIELSKKYGVHVCGEGGEYETFTLDCPLFKKKIIVDSSEVVIHSADAFAPVAYLRFLELHLEDKVSSVPDNYRTSNYIYNF

SEQ ID NO: 24633 - protein, 165 aa, Homo sapiens
  Payload ID: 4898
  Gene Symbol: DPH6
  Gene Name: diphthamine biosynthesis 6
  Uniprot ID: Q7L8W6
  ENSP ID: ENSP00000406976
MRVAALISGGKDSCYNMMQCIAAGHQIVALANLRPAENQVGSDELDSYMYQTVGHHAIDLYAEAMALPLYRRTIRGRSLDTRQVYTKCEGDEVEDLYELLKLVKGITRMTLLAEYDALNLQDFHMHLKVGSQAIVYRTPNELCTHSKFDKHTFPPFISEIAKCEV

SEQ ID NO: 24634 - protein, 169 aa, Homo sapiens
  Payload ID: 4898
  Gene Symbol: DPH6
  Gene Name: diphthamine biosynthesis 6
  ENSP ID: ENSP00000453967
MYQTVGHHAIDLYAEAMALPLYRRTIRGRSLDTRQVYTKCEGDEVEDLYELLKLVKEKEEVEGISVGAILSDYQRIRVENVCKRLNLQPLAYLWQRNQEDLLREMISSNIQAMIIKVAALGLDPDKHLGKTLDQMEPYLIELSKKYGVHVCGEGGEYETFTLDCPLFKK

SEQ ID NO: 24635 - protein, 155 aa, Homo sapiens
  Payload ID: 4898
  Gene Symbol: DPH6
  Gene Name: diphthamine biosynthesis 6
  ENSP ID: ENSP00000454015
RVENVCKRLNLQPLAYLWQRNQEDLLREMISSNIQAMIIKVAALGLDPDKHLGKTLDQMEPYLIELSKKYGVHVCGEGGEYETFTLDCPLFKKKIIVDSSEVVIHSADAFAPVAYLRFLELHLEDKCLTTTEHLIIYIIFEKCFGTLFIKPPFLY

SEQ ID NO: 24636 - protein, 198 aa, Homo sapiens
  Payload ID: 4899
  Gene Symbol: DIRAS1
  Gene Name: DIRAS family, GTP-binding RAS-like 1
  Uniprot ID: O95057
  ENSP ID: ENSP00000325836
MPEQSNDYRVVVFGAGGVGKSSLVLRFVKGTFRDTYIPTIEDTYRQVISCDKSVCTLQITDTTGSHQFPAMQRLSISKGHAFILVFSVTSKQSLEELGPIYKLIVQIKGSVEDIPVMLVGNKCDETQREVDTREAQAVAQEWKCAFMETSAKMNYNVKELFQELLTLETRRNMSLNIDGKRSGKQKRTDRVKGKCTLM

SEQ ID NO: 24637 - protein, 136 aa, Homo sapiens
  Payload ID: 4899
  Gene Symbol: DIRAS1
  Gene Name: DIRAS family, GTP-binding RAS-like 1
  ENSP ID: ENSP00000466733
MPEQSNDYRVVVFGAGGVGKSSLVLRFVKGTFRDTYIPTIEDTYRQVISCDKSVCTLQITDTTGSHQFPAMQRLSISKGHAFILVFSVTSKQSLEELGPIYKLIVQIKGSVEDIPVMLVGNKCDETQREVDTREAQ

SEQ ID NO: 24638 - protein, 198 aa, Homo sapiens; identical to SEQ ID NO: 24636
  Payload ID: 4899
  Gene Symbol: DIRAS1
  Gene Name: DIRAS family, GTP-binding RAS-like 1
  Uniprot ID: O95057
  ENSP ID: ENSP00000468417

SEQ ID NO: 24639 - protein, 199 aa, Homo sapiens
  Payload ID: 4900
  Gene Symbol: DIRAS2
  Gene Name: DIRAS family, GTP-binding RAS-like 2
  Uniprot ID: Q96HU8
  ENSP ID: ENSP00000364919
MPEQSNDYRVAVFGAGGVGKSSLVLRFVKGTFRESYIPTVEDTYRQVISCDKSICTLQITDTTGSHQFPAMQRLSISKGHAFILVYSITSRQSLEELKPIYEQICEIKGDVESIPIMLVGNKCDESPSREVQSSEAEALARTWKCAFMETSAKLNHNVKELFQELLNLEKRRTVSLQIDGKKSKQQKRKEKLKGKCVIM

SEQ ID NO: 24640 - protein, 229 aa, Homo sapiens
  Payload ID: 4901
  Gene Symbol: DIRAS3
  Gene Name: DIRAS family, GTP-binding RAS-like 3
  Uniprot ID: O95661
  ENSP ID: ENSP00000360020
MGNASFGSKEQKLLKRLRLLPALLILRAFKPHRKIRDYRVVVVGTAGVGKSTLLHKWASGNFRHEYLPTIENTYCQLLGCSHGVLSLHITDSKSGDGNRALQRHVIARGHAFVLVYSVTKKETLEELKAFYELICKIKGNNLHKFPIVLVGNKSDDTHREVALNDGATCAMEWNCAFMEISAKTDVNVQELFHMLLNYKKKPTTGLQEPEKKSQMPNTTEKLLDKCIIM

SEQ ID NO: 24641 - protein, 229 aa, Homo sapiens; identical to SEQ ID NO: 24640
  Payload ID: 4901
  Gene Symbol: DIRAS3
  Gene Name: DIRAS family, GTP-binding RAS-like 3
  Uniprot ID: O95661
  ENSP ID: ENSP00000378627

SEQ ID NO: 24642 - protein, 958 aa, Homo sapiens
  Payload ID: 4902
  Gene Symbol: DIS3
  Gene Name: DIS3 homolog, exosome endoribonuclease and 3'-5' exoribonuclease
  Uniprot ID: Q9Y2L1
  ENSP ID: ENSP00000366997
MLKSKTFLKKTRAGGVMKIVREHYLRDDIGCGAPGCAACGGAHEGPALEPQPQDPASSVCPQPHYLLPDTNVLLHQIDVLEDPAIRNVIVLQTVLQEVRNRSAPVYKRIRDVTNNQEKHFYTFTNEHHRETYVEQEQGENANDRNDRAIRVAAKWYNEHLKKMSADNQLQVIFITNDRRNKEKAIEEGIPAFTCEEYVKSLTANPELIDRLACLSEEGNEIESGKIIFSEHLPLSKLQQGIKSGTYLQGTFRASRENYLEATVWIHGDNEENKEIILQGLKHLNRAVHEDIVAVELLPKSQWVAPSSVVLHDEGQNEEDVEKEEETERMLKTAVSEKMLKPTGRVVGIIKRNWRPYCGMLSKSDIKESRRHLFTPADKRIPRIRIETRQASTLEGRRIIVAIDGWPRNSRYPNGHFVRNLGDVGEKETETEVLLLEHDVPHQPFSQAVLSFLPKMPWSITEKDMKNREDLRHLCICSVDPPGCTDIDDALHCRELENGNLEVGVHIADVSHFIRPGNALDQESARRGTTVYLCEKRIDMVPELLSSNLCSLKCDVDRLAFSCIWEMNHNAEILKTKFTKSVINSKASLTYAEAQLRIDSANMNDDITTSLRGLNKLAKILKKRRIEKGALTLSSPEVRFHMDSETHDPIDLQTKELRETNSMVEEFMLLANISVAKKIHEEFSEHALLRKHPAPPPSNYEILVKAARSRNLEIKTDTAKSLAESLDQAESPTFPYLNTLLRILATRCMMQAVYFCSGMDNDFHHYGLASPIYTHFTSPIRRYADVIVHRLLAVAIGADCTYPELTDKHKLADICKNLNFRHKMAQYAQRASVAFHTQLFFKSKGIVSEEAYILFVRKNAIVVLIPKYGLEGTVFFEEKDKPNPQLIYDDEIPSLKIEDTVFHVFDKVKVKIMLDSSNLQHQKIRMSLVEPQIPGISIPTDTSNMDLNGPKKKKMKLGK

SEQ ID NO: 24643 - protein, 928 aa, Homo sapiens
  Payload ID: 4902
  Gene Symbol: DIS3
  Gene Name: DIS3 homolog, exosome endoribonuclease and 3'-5' exoribonuclease
  Uniprot ID: Q9Y2L1
  ENSP ID: ENSP00000367011
MLKSKTFLKKTRAGGVMKIVREHYLRDDIGCGAPGCAACGGAHEGPALEPQPQDPASSVCPQPHYLLPDTNVLLHQIVSAWRPGTWASVASSLRLPGSLETYVEQEQGENANDRNDRAIRVAAKWYNEHLKKMSADNQLQVIFITNDRRNKEKAIEEGIPAFTCEEYVKSLTANPELIDRLACLSEEGNEIESGKIIFSEHLPLSKLQQGIKSGTYLQGTFRASRENYLEATVWIHGDNEENKEIILQGLKHLNRAVHEDIVAVELLPKSQWVAPSSVVLHDEGQNEEDVEKEEETERMLKTAVSEKMLKPTGRVVGIIKRNWRPYCGMLSKSDIKESRRHLFTPADKRIPRIRIETRQASTLEGRRIIVAIDGWPRNSRYPNGHFVRNLGDVGEKETETEVLLLEHDVPHQPFSQAVLSFLPKMPWSITEKDMKNREDLRHLCICSVDPPGCTDIDDALHCRELENGNLEVGVHIADVSHFIRPGNALDQESARRGTTVYLCEKRIDMVPELLSSNLCSLKCDVDRLAFSCIWEMNHNAEILKTKFTKSVINSKASLTYAEAQLRIDSANMNDDITTSLRGLNKLAKILKKRRIEKGALTLSSPEVRFHMDSETHDPIDLQTKELRETNSMVEEFMLLANISVAKKIHEEFSEHALLRKHPAPPPSNYEILVKAARSRNLEIKTDTAKSLAESLDQAESPTFPYLNTLLRILATRCMMQAVYFCSGMDNDFHHYGLASPIYTHFTSPIRRYADVIVHRLLAVAIGADCTYPELTDKHKLADICKNLNFRHKMAQYAQRASVAFHTQLFFKSKGIVSEEAYILFVRKNAIVVLIPKYGLEGTVFFEEKDKPNPQLIYDDEIPSLKIEDTVFHVFDKVKVKIMLDSSNLQHQKIRMSLVEPQIPGISIPTDTSNMDLNGPKKKKMKLGK

SEQ ID NO: 24644 - protein, 559 aa, Homo sapiens
  Payload ID: 4902
  Gene Symbol: DIS3
  Gene Name: DIS3 homolog, exosome endoribonuclease and 3'-5' exoribonuclease
  ENSP ID: ENSP00000436350
MLKSKTFLKKTRAGGVMKIVREHYLRDDIGCGAPGCAACGGAHEGPALEPQPQDPASSVCPQPHYLLPDTNVLLHQIDVLEDPAIRNVIVLQTVLQEVRNRSAPVYKRIRDVTNNQEKHFYTFTNEHHRETYVEQEQGENANDRNDRAIRVAAKWYNEHLKKMSADNQLQVIFITNDRRNKEKAIEEGIPAFTCEEYVKSLTANPELIDRLACLSEEGNEIESGKIIFSEHLPLSKLQQGIKSGTYLQGTFRASRENYLEATVWIHGDNEENKEIILQGLKHLNRAVHEDIVAVELLPKSQWVAPSSVVLHDEGQNEEDVEKEEETERMLKTAVSEKMLKPTGRVVGIIKRNWRPYCGMLSKSDIKESRRHLFTPADKRIPRIRIETRQASTLEGRRIIVAIDGWPRNSRYPNGHFVRNLGDVGEKETETEVLLLEHDVPHQPFSQAVLSFLPKMPWSITEKDMKNREDLRHLCICSVDPPGCTDIDDALHCRELENGNLEVGVHIADVSHFIRPGNALDQESARRGTTVYLCEKRIDMVPELLSSNLCSLKCDVDRHL

SEQ ID NO: 24645 - protein, 796 aa, Homo sapiens
  Payload ID: 4902
  Gene Symbol: DIS3
  Gene Name: DIS3 homolog, exosome endoribonuclease and 3'-5' exoribonuclease
  ENSP ID: ENSP00000440058
MSADNQLQVIFITNDRRNKEKAIEEGIPAFTCEEYVKSLTANPELIDRLACLSEEGNEIESGKIIFSEHLPLSKLQQGIKSGTYLQGTFRASRENYLEATVWIHGDNEENKEIILQGLKHLNRAVHEDIVAVELLPKSQWVAPSSVVLHDEGQNEEDVEKEEETERMLKTAVSEKMLKPTGRVVGIIKRNWRPYCGMLSKSDIKESRRHLFTPADKRIPRIRIETRQASTLEGRRIIVAIDGWPRNSRYPNGHFVRNLGDVGEKETETEVLLLEHDVPHQPFSQAVLSFLPKMPWSITEKDMKNREDLRHLCICSVDPPGCTDIDDALHCRELENGNLEVGVHIADVSHFIRPGNALDQESARRGTTVYLCEKRIDMVPELLSSNLCSLKCDVDRLAFSCIWEMNHNAEILKTKFTKSVINSKASLTYAEAQLRIDSANMNDDITTSLRGLNKLAKILKKRRIEKGALTLSSPEVRFHMDSETHDPIDLQTKELRETNSMVEEFMLLANISVAKKIHEEFSEHALLRKHPAPPPSNYEILVKAARSRNLEIKTDTAKSLAESLDQAESPTFPYLNTLLRILATRCMMQAVYFCSGMDNDFHHYGLASPIYTHFTSPIRRYADVIVHRLLAVAIGADCTYPELTDKHKLADICKNLNFRHKMAQYAQRASVAFHTQLFFKSKGIVSEEAYILFVRKNAIVVLIPKYGLEGTVFFEEKDKPNPQLIYDDEIPSLKIEDTVFHVFDKVKVKIMLDSSNLQHQKIRMSLVEPQIPGISIPTDTSNMDLNGPKKKKMKLGK

SEQ ID NO: 24646 - protein, 603 aa, Homo sapiens
  Payload ID: 4903
  Gene Symbol: DIS3L2
  Gene Name: DIS3 like 3'-5' exoribonuclease 2
  Uniprot ID: Q8IYB7
  ENSP ID: ENSP00000273009
MSHPDYRMNLRPLGTPRGVSAVAGPHDIGASPGDKKSKNRSTRGKKKSIFETYMSKEDVSEGLKRGTLIQGVLRINPKKFHEAFIPSPDGDRDIFIDGVVARNRALNGDLVVVKLLPEEHWKVVKPESNDKETEAAYESDIPEELCGHHLPQQSLKSYNDSPDVIVEAQFDGSDSEDGHGITQNVLVDGVKKLSVCVSEKGREDGDAPVTKDETTCISQDTRALSEKSLQRSAKVVYILEKKHSRAATGFLKLLADKNSELFRKYALFSPSDHRVPRIYVPLKDCPQDFVARPKDYANTLFICRIVDWKEDCNFALGQLAKSLGQAGEIEPETEGILTEYGVDFSDFSSEVLECLPQGLPWTIPPEEFSKRRDLRKDCIFTIDPSTARDLDDALSCKPLADGNFKVGVHIADVSYFVPEGSDLDKVAAERATSVYLVQKVVPMLPRLLCEELCSLNPMSDKLTFSVIWTLTPEGKILDEWFGRTIIRSCTKLSYEHAQSMIESPTEKIPAKELPPISPEHSSEEVHQQNADKDGAAHLQASHSPSAEDAEAQPSTEERLPETRGICDRDPDTRLFFLQQQSRVLEAKPQNTIRVEEQTTQLQI

SEQ ID NO: 24647 - protein, 885 aa, Homo sapiens
  Payload ID: 4903
  Gene Symbol: DIS3L2
  Gene Name: DIS3 like 3'-5' exoribonuclease 2
  Uniprot ID: Q8IYB7
  ENSP ID: ENSP00000315569
MSHPDYRMNLRPLGTPRGVSAVAGPHDIGASPGDKKSKNRSTRGKKKSIFETYMSKEDVSEGLKRGTLIQGVLRINPKKFHEAFIPSPDGDRDIFIDGVVARNRALNGDLVVVKLLPEEHWKVVKPESNDKETEAAYESDIPEELCGHHLPQQSLKSYNDSPDVIVEAQFDGSDSEDGHGITQNVLVDGVKKLSVCVSEKGREDGDAPVTKDETTCISQDTRALSEKSLQRSAKVVYILEKKHSRAATGFLKLLADKNSELFRKYALFSPSDHRVPRIYVPLKDCPQDFVARPKDYANTLFICRIVDWKEDCNFALGQLAKSLGQAGEIEPETEGILTEYGVDFSDFSSEVLECLPQGLPWTIPPEEFSKRRDLRKDCIFTIDPSTARDLDDALSCKPLADGNFKVGVHIADVSYFVPEGSDLDKVAAERATSVYLVQKVVPMLPRLLCEELCSLNPMSDKLTFSVIWTLTPEGKILDEWFGRTIIRSCTKLSYEHAQSMIESPTEKIPAKELPPISPEHSSEEVHQAVLNLHGIAKQLRQQRFVDGALRLDQLKLAFTLDHETGLPQGCHIYEYRESNKLVEEFMLLANMAVAHKIHRAFPEQALLRRHPPPQTRMLSDLVEFCDQMGLPVDFSSAGALNKSLTQTFGDDKYSLARKEVLTNMCSRPMQMALYFCSGLLQDPAQFRHYALNVPLYTHFTSPIRRFADVLVHRLLAAALGYRERLDMAPDTLQKQADHCNDRRMASKRVQELSTSLFFAVLVKESGPLESEAMVMGILKQAFDVLVLRYGVQKRIYCNALALRSHHFQKVGKKPELTLVWEPEDMEQEPAQQVITIFSLVEVVLQAESTALKYSAILKRPGTQGHLGPEKEEEESDGEPEDSSTS

SEQ ID NO: 24648 - protein, 619 aa, Homo sapiens
  Payload ID: 4903
  Gene Symbol: DIS3L2
  Gene Name: DIS3 like 3'-5' exoribonuclease 2
  Uniprot ID: Q8IYB7
  ENSP ID: ENSP00000374655
MSHPDYRMNLRPLGTPRGVSAVAGPHDIGASPGDKKSKNRSTRGKKKSIFETYMSKEDVSEGLKRGTLIQGVLRINPKKFHEAFIPSPDGDRDIFIDGVVARNRALNGDLVVVKLLPEEHWKVVKPESNDKETEAAYESDIPEELCGHHLPQQSLKSYNDSPDVIVEAQFDGSDSEDGHGITQNVLVDGVKKLSVCVSEKGREDGDAPVTKDETTCISQDTRALSEKSLQRSAKVVYILEKKHSRAATGFLKLLADKNSELFRKYALFSPSDHRVPRIYVPLKDCPQDFVARPKDYANTLFICRIVDWKEDCNFALGQLAKSLGQAGEIEPETEGILTEYGVDFSDFSSEVLECLPQGLPWTIPPEEFSKRRDLRKDCIFTIDPSTARDLDDALSCKPLADGNFKVGVHIADVSYFVPEGSDLDKVAAERATSVYLVQKVVPMLPRLLCEELCSLNPMSDKLTFSVIWTLTPEGKILDEWFGRTIIRSCTKLSYEHAQSMIESPTEKIPAKELPPISPEHSSEEVHQAVLNLHGIAKQLRQQRFVDGALRLDQLKLAFTLDHETGLPQGCHIYEYRESNKPCCAGTPRPKQGCSVTWWNSATRWGCPWTSAPQEPSIKA

SEQ ID NO: 24649 - protein, 249 aa, Homo sapiens
  Payload ID: 4903
  Gene Symbol: DIS3L2
  Gene Name: DIS3 like 3'-5' exoribonuclease 2
  Uniprot ID: Q8IYB7
  ENSP ID: ENSP00000386594
MSHPDYRMNLRPLGTPRGVSAVAGPHDIGASPGDKKSKNRSTRGKKKSIFETYMSKEDVSEGLKRGTLIQGVLRINPKKFHEAFIPSPDGDRDIFIDGVVARNRALNGDLVVVKLLPEEHWKVVKPESNDKETEAAYESDIPEELCGHHLPQQSLKSYNDSPDVIVEAQFDGSDSEDGHGITQNVLVDGVKKLSVCVSEKGREDGDAPVTKDETTCISQDTRALSEKSLQRSAKVIAYRFSPRVQMAFT

SEQ ID NO: 24650 - protein, 885 aa, Homo sapiens; identical to SEQ ID NO: 24647
  Payload ID: 4903
  Gene Symbol: DIS3L2
  Gene Name: DIS3 like 3'-5' exoribonuclease 2
  Uniprot ID: Q8IYB7
  ENSP ID: ENSP00000386799

SEQ ID NO: 24651 - protein, 249 aa, Homo sapiens; identical to SEQ ID NO: 24649
  Payload ID: 4903
  Gene Symbol: DIS3L2
  Gene Name: DIS3 like 3'-5' exoribonuclease 2
  Uniprot ID: Q8IYB7
  ENSP ID: ENSP00000388999

SEQ ID NO: 24652 - protein, 144 aa, Homo sapiens
  Payload ID: 4903
  Gene Symbol: DIS3L2
  Gene Name: DIS3 like 3'-5' exoribonuclease 2
  ENSP ID: ENSP00000390467
MSHPDYRMNLRPLGTPRGVSAVAGPHDIGASPGDKKSKNRSTRGKKKSIFETYMSKEDVSEGLKRGTLIQGVLRINPKKFHEAFIPSPDGDRDIFIDGVVARNRALNGDLVVVKLLPEEHWKVVKPESNDKETEAAYESDIPEE

SEQ ID NO: 24653 - protein, 356 aa, Homo sapiens
  Payload ID: 4903
  Gene Symbol: DIS3L2
  Gene Name: DIS3 like 3'-5' exoribonuclease 2
  Uniprot ID: Q8IYB7
  ENSP ID: ENSP00000391175
MSHPDYRMNLRPLGTPRGVSAVAGPHDIGASPGDKKSKNRSTRGKKKSIFETYMSKEDVSEGLKRGTLIQGVLRINPKKFHEAFIPSPDGDRDIFIDGVVARNRALNGDLVVVKLLPEEHWKVVKPESNDKETEAAYESDIPEELCGHHLPQQSLKSYNDSPDVIVEAQFDGSDSEDGHGITQNVLVDGVKKLSVCVSEKDNEIEAQRSSWAYPVSHRKSEERMVMHRLQKMRPPAFHKTQELYRRNPCKDQQRWFTSWRKNILEQQPASSNSWLIRTANCLGNTPCFLPQTTECLEFMCLSRTVPRTLWHGLKIMPTHCSSAALWTGRRTAILPWGSWLRVLGRLVKLSLKQKEY

SEQ ID NO: 24654 - protein, 196 aa, Homo sapiens
  Payload ID: 4903
  Gene Symbol: DIS3L2
  Gene Name: DIS3 like 3'-5' exoribonuclease 2
  ENSP ID: ENSP00000392754
  MOD_RES (1)..(1): Any amino acid
XFADVLVHRLLAAALGYRERLDMAPDTLQKQADHCNDRRMASKRVQELSTSLFFAVLVKESGPLESEAMVMGILKQAFDVLVLRYGVQKRIYCNALALRSHHFQKVGKKPELTLVWEPEDMEQEPAQQETKNPTSEIPQLGDPARPPSRASQSASPLVCSELPVTLLMPIRAQPGIALRGGKLHETKNKLRGEHRP

SEQ ID NO: 24655 - protein, 166 aa, Homo sapiens
  Payload ID: 4903
  Gene Symbol: DIS3L2
  Gene Name: DIS3 like 3'-5' exoribonuclease 2
  ENSP ID: ENSP00000401700
  MOD_RES (1)..(1): Any amino acid
XVMGILKQAFDVLVLRYGVQKRIYCNALALRSHHFQKVGKKPELTLVWEPEDMEQEPAQQGILPGGGPHYRQASRGFQRPKEGPGVLLQGWRQSCASTSGPAILVPSRLGSAQVITIFSLVEVVLQAESTALKYSAILKRPGTQGHLGPEKEEEESDGEPEDSSTS

SEQ ID NO: 24656 - protein, 68 aa, Homo sapiens
  Payload ID: 4903
  Gene Symbol: DIS3L2
  Gene Name: DIS3 like 3'-5' exoribonuclease 2
  ENSP ID: ENSP00000408764
RSHHFQKVGKKPELTLVWEPEDMEQEPAQQGPLENLMKAMSLHPRNCLEPFSPTVCPERGPRPSGCVS

SEQ ID NO: 24657 - protein, 383 aa, Homo sapiens
  Payload ID: 4903
  Gene Symbol: DIS3L2
  Gene Name: DIS3 like 3'-5' exoribonuclease 2
  ENSP ID: ENSP00000415419
EEFSKRRDLRKDCIFTIDPSTARDLDDALSCKPLADGNFKVGVHIADVSYFVPEGSDLDKVAAERATSVYLVQKVVPMLPRLLCEELCSLNPMSDKLTFSVIWTLTPEGKILDEWFGRTIIRSCTKLSYEHAQSMIESPTEKIPAKELPPISPEHSSEEVHQAVLNLHGIAKQLRQQRFVDGALRLDQLKLAFTLDHETGLPQGCHIYEYRESNKLVEEFMLLANMAVAHKIHRAFPEQALLRRHPPPQTRMLSDLVEFCDQMGLPVDFSSAGALNKSLTQTFGDDKYSLARKEVLTNMCSRPMQMALYFCSGLLQDPAQFRHYALNVPLYTHFTSPIRRFADVLVHRLLAAALGYRERLDMAPDTLQKQADHCNDRRMASKR

SEQ ID NO: 24658 - protein, 971 aa, Homo sapiens
  Payload ID: 4904
  Gene Symbol: DIS3L
  Gene Name: DIS3 like exosome 3'-5' exoribonuclease
  Uniprot ID: Q8TF46
  ENSP ID: ENSP00000321583
MQTACQAVQHQRGRRQYNKLRNLLKDARHDCILFANEFQQCCYLPRERGESMEKWQTRSIYNAAVWYYHHCQDRMPIVMVTEDEEAIQQYGSETEGVFVITFKNYLDNFWPDLKAAHELCDSILQSRRERENESQESHGKEYPEHLPLEVLEAGIKSGRYIQGILNVNKHRAQIEAFVRLQGASSKDSDLVSDILIHGMKARNRSIHGDVVVVELLPKNEWKGRTVALCENDCDDKASGESPSEPMPTGRVVGILQKNWRDYVVTFPSKEEVQSQGKNAQKILVTPWDYRIPKIRISTQQAETLQDFRVVVRIDSWESTSVYPNGHFVRVLGRIGDLEGEIATILVENSISVIPFSEAQMCEMPVNTPESPWKVSPEEEQKRKDLRKSHLVFSIDPKGCEDVDDTLSVRTLNNGNLELGVHIADVTHFVAPNSYIDIEARTRATTYYLADRRYDMLPSVLSADLCSLLGGVDRYAVSIMWELDKASYEIKKVWYGRTIIRSAYKLFYEAAQELLDGNLSVVDDIPEFKDLDEKSRQAKLEELVWAIGKLTDIARHVRAKRDGCGALELEGVEVCVQLDDKKNIHDLIPKQPLEVHETVAECMILANHWVAKKIWESFPHQALLRQHPPPHQEFFSELRECAKAKGFFIDTRSNKTLADSLDNANDPHDPIVNRLLRSMATQAMSNALYFSTGSCAEEEFHHYGLALDKYTHFTSPIRRYSDIVVHRLLMAAISKDKKMEIKGNLFSNKDLEELCRHINNRNQAAQHSQKQSTELFQCMYFKDKDPATEERCISDGVIYSIRTNGVLLFIPRFGIKGAAYLKNKDGLVISCGPDSCSEWKPGSLQRFQNKITSTTTDGESVTFHLFDHVTVRISIQASRCHSDTIRLEIISNKPYKIPNTELIHQSSPLLKSELVKEVTKSVEEAQLAQEVKVNIIQEEYQEYRQTKGRSLYTLLEEIRDLALLDVSNNYGI

SEQ ID NO: 24659 - protein, 1054 aa, Homo sapiens
  Payload ID: 4904
  Gene Symbol: DIS3L
  Gene Name: DIS3 like exosome 3'-5' exoribonuclease
  Uniprot ID: Q8TF46
  ENSP ID: ENSP00000321711
MLQKREKVLLLRTFQGRTLRIVREHYLRPCVPCHSPLCPQPAACSHDGKLLSSDVTHYVIPDWKVVQDYLEILEFPELKGIIFMQTACQAVQHQRGRRQYNKLRNLLKDARHDCILFANEFQQCCYLPRERGESMEKWQTRSIYNAAVWYYHHCQDRMPIVMVTEDEEAIQQYGSETEGVFVITFKNYLDNFWPDLKAAHELCDSILQSRRERENESQESHGKEYPEHLPLEVLEAGIKSGRYIQGILNVNKHRAQIEAFVRLQGASSKDSDLVSDILIHGMKARNRSIHGDVVVVELLPKNEWKGRTVALCENDCDDKASGESPSEPMPTGRVVGILQKNWRDYVVTFPSKEEVQSQGKNAQKILVTPWDYRIPKIRISTQQAETLQDFRVVVRIDSWESTSVYPNGHFVRVLGRIGDLEGEIATILVENSISVIPFSEAQMCEMPVNTPESPWKVSPEEEQKRKDLRKSHLVFSIDPKGCEDVDDTLSVRTLNNGNLELGVHIADVTHFVAPNSYIDIEARTRATTYYLADRRYDMLPSVLSADLCSLLGGVDRYAVSIMWELDKASYEIKKVWYGRTIIRSAYKLFYEAAQELLDGNLSVVDDIPEFKDLDEKSRQAKLEELVWAIGKLTDIARHVRAKRDGCGALELEGVEVCVQLDDKKNIHDLIPKQPLEVHETVAECMILANHWVAKKIWESFPHQALLRQHPPPHQEFFSELRECAKAKGFFIDTRSNKTLADSLDNANDPHDPIVNRLLRSMATQAMSNALYFSTGSCAEEEFHHYGLALDKYTHFTSPIRRYSDIVVHRLLMAAISKDKKMEIKGNLFSNKDLEELCRHINNRNQAAQHSQKQSTELFQCMYFKDKDPATEERCISDGVIYSIRTNGVLLFIPRFGIKGAAYLKNKDGLVISCGPDSCSEWKPGSLQRFQNKITSTTTDGESVTFHLFDHVTVRISIQASRCHSDTIRLEIISNKPYKIPNTELIHQSSPLLKSELVKEVTKSVEEAQLAQEVKVNIIQEEYQEYRQTKGRSLYTLLEEIRDLALLDVSNNYGI

SEQ ID NO: 24660 - protein, 150 aa, Homo sapiens
  Payload ID: 4904
  Gene Symbol: DIS3L
  Gene Name: DIS3 like exosome 3'-5' exoribonuclease
  ENSP ID: ENSP00000432125
MEKWQTRSIYNAAVWYYHHCQDRMPIVMVTEDEEAIQQYGSETEGVFVITFKNYLDNFWPDLKAAHELCDSILQSRRERENESQESHGKEYPEHLPLEVLEAGIKSGRYIQGILNVNKHRAQIEAFVRLQGASSKDSDLVSDILIHGMKA

SEQ ID NO: 24661 - protein, 55 aa, Homo sapiens
  Payload ID: 4904
  Gene Symbol: DIS3L
  Gene Name: DIS3 like exosome 3'-5' exoribonuclease
  ENSP ID: ENSP00000432407
MQTACQAVQHQRGRSNAAICHGKEESPWRSGRPGAYTTQLFGTIITARTGCQLLW

SEQ ID NO: 24662 - protein, 55 aa, Homo sapiens; identical to SEQ ID NO: 24661
  Payload ID: 4904
  Gene Symbol: DIS3L
  Gene Name: DIS3 like exosome 3'-5' exoribonuclease
  ENSP ID: ENSP00000433504

SEQ ID NO: 24663 - protein, 57 aa, Homo sapiens
  Payload ID: 4904
  Gene Symbol: DIS3L
  Gene Name: DIS3 like exosome 3'-5' exoribonuclease
  ENSP ID: ENSP00000435792
MQTACQAVQHQRGRRQYNKLRNLLKDARHDCILFANEFQQCCYLPRERGESMEKWQT

SEQ ID NO: 24664 - protein, 97 aa, Homo sapiens
  Payload ID: 4904
  Gene Symbol: DIS3L
  Gene Name: DIS3 like exosome 3'-5' exoribonuclease
  ENSP ID: ENSP00000436573
MQTACQAVQHQRGRRQYNKLRNLLKDARHDCILFANEFQQCCYLPRERGESMEKWQTRSIYNAAVWYYHHCQDRMPIVMVTEDEEAIQQYGSETEGV

SEQ ID NO: 24665 - protein, 103 aa, Homo sapiens
  Payload ID: 4904
  Gene Symbol: DIS3L
  Gene Name: DIS3 like exosome 3'-5' exoribonuclease
  ENSP ID: ENSP00000436583
MQTACQAVQHQRGRRQYNKLRNLLKDARHDCILFANEFQQCCYLPRERGESMEKWQTRSIYNAAVWYYHHCQDRMPIVMVTEDEEAIQQYGSETEGVFVITFK

SEQ ID NO: 24666 - protein, 876 aa, Homo sapiens
  Payload ID: 4905
  Gene Symbol: DDR1
  Gene Name: discoidin domain receptor tyrosine kinase 1
  Uniprot ID: Q08345
  ENSP ID: ENSP00000259875
MGPEALSSLLLLLLVASGDADMKGHFDPAKCRYALGMQDRTIPDSDISASSSWSDSTAARHSRLESSDGDGAWCPAGSVFPKEEEYLQVDLQRLHLVALVGTQGRHAGGLGKEFSRSYRLRYSRDGRRWMGWKDRWGQEVISGNEDPEGVVLKDLGPPMVARLVRFYPRADRVMSVCLRVELYGCLWRDGLLSYTAPVGQTMYLSEAVYLNDSTYDGHTVGGLQYGGLGQLADGVVGLDDFRKSQELRVWPGYDYVGWSNHSFSSGYVEMEFEFDRLRAFQAMQVHCNNMHTLGARLPGGVECRFRRGPAMAWEGEPMRHNLGGNLGDPRARAVSVPLGGRVARFLQCRFLFAGPWLLFSEISFISDVVNNSSPALGGTFPPAPWWPPGPPPTNFSSLELEPRGQQPVAKAEGSPTAILIGCLVAIILLLLLIIALMLWRLHWRRLLSKAERRVLEEELTVHLSVPGDTILINNRPGPREPPPYQEPRPRGNPPHSAPCVPNGSAYSGDYMEPEKPGAPLLPPPPQNSVPHYAEADIVTLQGVTGGNTYAVPALPPGAVGDGPPRVDFPRSRLRFKEKLGEGQFGEVHLCEVDSPQDLVSLDFPLNVRKGHPLLVAVKILRPDATKNARNDFLKEVKIMSRLKDPNIIRLLGVCVQDDPLCMITDYMENGDLNQFLSAHQLEDKAAEGAPGDGQAAQGPTISYPMLLHVAAQIASGMRYLATLNFVHRDLATRNCLVGENFTIKIADFGMSRNLYAGDYYRVQGRAVLPIRWMAWECILMGKFTTASDVWAFGVTLWEVLMLCRAQPFGQLTDEQVIENAGEFFRDQGRQVYLSRPPACPQGLYELMLRCWSRESEQRPPFSQLHRFLAEDALNTV

SEQ ID NO: 24667 - protein, 913 aa, Homo sapiens
  Payload ID: 4905
  Gene Symbol: DDR1
  Gene Name: discoidin domain receptor tyrosine kinase 1
  Uniprot ID: Q08345
  ENSP ID: ENSP00000318217
MGPEALSSLLLLLLVASGDADMKGHFDPAKCRYALGMQDRTIPDSDISASSSWSDSTAARHSRLESSDGDGAWCPAGSVFPKEEEYLQVDLQRLHLVALVGTQGRHAGGLGKEFSRSYRLRYSRDGRRWMGWKDRWGQEVISGNEDPEGVVLKDLGPPMVARLVRFYPRADRVMSVCLRVELYGCLWRDGLLSYTAPVGQTMYLSEAVYLNDSTYDGHTVGGLQYGGLGQLADGVVGLDDFRKSQELRVWPGYDYVGWSNHSFSSGYVEMEFEFDRLRAFQAMQVHCNNMHTLGARLPGGVECRFRRGPAMAWEGEPMRHNLGGNLGDPRARAVSVPLGGRVARFLQCRFLFAGPWLLFSEISFISDVVNNSSPALGGTFPPAPWWPPGPPPTNFSSLELEPRGQQPVAKAEGSPTAILIGCLVAIILLLLLIIALMLWRLHWRRLLSKAERRVLEEELTVHLSVPGDTILINNRPGPREPPPYQEPRPRGNPPHSAPCVPNGSALLLSNPAYRLLLATYARPPRGPGPPTPAWAKPTNTQAYSGDYMEPEKPGAPLLPPPPQNSVPHYAEADIVTLQGVTGGNTYAVPALPPGAVGDGPPRVDFPRSRLRFKEKLGEGQFGEVHLCEVDSPQDLVSLDFPLNVRKGHPLLVAVKILRPDATKNARNDFLKEVKIMSRLKDPNIIRLLGVCVQDDPLCMITDYMENGDLNQFLSAHQLEDKAAEGAPGDGQAAQGPTISYPMLLHVAAQIASGMRYLATLNFVHRDLATRNCLVGENFTIKIADFGMSRNLYAGDYYRVQGRAVLPIRWMAWECILMGKFTTASDVWAFGVTLWEVLMLCRAQPFGQLTDEQVIENAGEFFRDQGRQVYLSRPPACPQGLYELMLRCWSRESEQRPPFSQLHRFLAEDALNTV

SEQ ID NO: 24668 - protein, 876 aa, Homo sapiens; identical to SEQ ID NO: 24666
  Payload ID: 4905
  Gene Symbol: DDR1
  Gene Name: discoidin domain receptor tyrosine kinase 1
  Uniprot ID: Q08345
  ENSP ID: ENSP00000365751

SEQ ID NO: 24669 - protein, 913 aa, Homo sapiens; identical to SEQ ID NO: 24667
  Payload ID: 4905
  Gene Symbol: DDR1
  Gene Name: discoidin domain receptor tyrosine kinase 1
  Uniprot ID: Q08345
  ENSP ID: ENSP00000365752

SEQ ID NO: 24670 - protein, 876 aa, Homo sapiens; identical to SEQ ID NO: 24666
  Payload ID: 4905
  Gene Symbol: DDR1
  Gene Name: discoidin domain receptor tyrosine kinase 1
  Uniprot ID: Q08345
  ENSP ID: ENSP00000365753

SEQ ID NO: 24671 - protein, 876 aa, Homo sapiens; identical to SEQ ID NO: 24666
  Payload ID: 4905
  Gene Symbol: DDR1
  Gene Name: discoidin domain receptor tyrosine kinase 1
  Uniprot ID: Q08345
  ENSP ID: ENSP00000365754

SEQ ID NO: 24672 - protein, 243 aa, Homo sapiens
  Payload ID: 4905
  Gene Symbol: DDR1
  Gene Name: discoidin domain receptor tyrosine kinase 1
  Uniprot ID: Q08345
  ENSP ID: ENSP00000365759
MGPEALSSLLLLLLVASGDADMKGHFDPAKCRYALGMQDRTIPDSDISASSSWSDSTAARHSRLESSDGDGAWCPAGSVFPKEEEYLQVDLQRLHLVALVGTQGRHAGGLGKEFSRSYRLRYSRDGRRWMGWKDRWGQEVISGNEDPEGVVLKDLGPPMVARLVRFYPRADRVMSVCLRVELYGCLWRDCSMGVWASWQMVWWGWMTLGRVRSCGSGQAMTMWDGATTASPVAMWRWSLSLTG

SEQ ID NO: 24673 - protein, 913 aa, Homo sapiens; identical to SEQ ID NO: 24667
  Payload ID: 4905
  Gene Symbol: DDR1
  Gene Name: discoidin domain receptor tyrosine kinase 1
  Uniprot ID: Q08345
  ENSP ID: ENSP00000372868

SEQ ID NO: 24674 - protein, 147 aa, Homo sapiens
  Payload ID: 4905
  Gene Symbol: DDR1
  Gene Name: discoidin domain receptor tyrosine kinase 1
  ENSP ID: ENSP00000379631
MGPEALSSLLLLLLVASGDADMKGHFDPAKCRYALGMQDRTIPDSDISASSSWSDSTAARHSRLESSDGDGAWCPAGSVFPKEEEYLQVDLQRLHLVALVGTQGRHAGGLGKEFSRSYRLRYSRDGRRWMGWKDRWGQEVISGNEDP

SEQ ID NO: 24675 - protein, 147 aa, Homo sapiens; identical to SEQ ID NO: 24674
  Payload ID: 4905
  Gene Symbol: DDR1
  Gene Name: discoidin domain receptor tyrosine kinase 1
  ENSP ID: ENSP00000383258

SEQ ID NO: 24676 - protein, 876 aa, Homo sapiens; identical to SEQ ID NO: 24666
  Payload ID: 4905
  Gene Symbol: DDR1
  Gene Name: discoidin domain receptor tyrosine kinase 1
  Uniprot ID: Q08345
  ENSP ID: ENSP00000383261

SEQ ID NO: 24677 - protein, 876 aa, Homo sapiens; identical to SEQ ID NO: 24666
  Payload ID: 4905
  Gene Symbol: DDR1
  Gene Name: discoidin domain receptor tyrosine kinase 1
  Uniprot ID: Q08345
  ENSP ID: ENSP00000383262

SEQ ID NO: 24678 - protein, 913 aa, Homo sapiens; identical to SEQ ID NO: 24667
  Payload ID: 4905
  Gene Symbol: DDR1
  Gene Name: discoidin domain receptor tyrosine kinase 1
  Uniprot ID: Q08345
  ENSP ID: ENSP00000383265

SEQ ID NO: 24679 - protein, 147 aa, Homo sapiens; identical to SEQ ID NO: 24674
  Payload ID: 4905
  Gene Symbol: DDR1
  Gene Name: discoidin domain receptor tyrosine kinase 1
  ENSP ID: ENSP00000383332

SEQ ID NO: 24680 - protein, 876 aa, Homo sapiens; identical to SEQ ID NO: 24666
  Payload ID: 4905
  Gene Symbol: DDR1
  Gene Name: discoidin domain receptor tyrosine kinase 1
  Uniprot ID: Q08345
  ENSP ID: ENSP00000383334

SEQ ID NO: 24681 - protein, 876 aa, Homo sapiens; identical to SEQ ID NO: 24666
  Payload ID: 4905
  Gene Symbol: DDR1
  Gene Name: discoidin domain receptor tyrosine kinase 1
  Uniprot ID: Q08345
  ENSP ID: ENSP00000383336

SEQ ID NO: 24682 - protein, 876 aa, Homo sapiens; identical to SEQ ID NO: 24666
  Payload ID: 4905
  Gene Symbol: DDR1
  Gene Name: discoidin domain receptor tyrosine kinase 1
  Uniprot ID: Q08345
  ENSP ID: ENSP00000383337

SEQ ID NO: 24683 - protein, 913 aa, Homo sapiens; identical to SEQ ID NO: 24667
  Payload ID: 4905
  Gene Symbol: DDR1
  Gene Name: discoidin domain receptor tyrosine kinase 1
  Uniprot ID: Q08345
  ENSP ID: ENSP00000383338

SEQ ID NO: 24684 - protein, 913 aa, Homo sapiens; identical to SEQ ID NO: 24667
  Payload ID: 4905
  Gene Symbol: DDR1
  Gene Name: discoidin domain receptor tyrosine kinase 1
  Uniprot ID: Q08345
  ENSP ID: ENSP00000383339

SEQ ID NO: 24685 - protein, 139 aa, Homo sapiens
  Payload ID: 4905
  Gene Symbol: DDR1
  Gene Name: discoidin domain receptor tyrosine kinase 1
  ENSP ID: ENSP00000388866
MGPEALSSLLLLLLVASGDADMKGHFDPAKCRYALGMQDRTIPDSDISASSSWSDSTAARHSRLESSDGDGAWCPAGSVFPKEEEYLQVDLQRLHLVALVGTQGRHAGGLGKEFSRSYRLRYSRDGRRWMGWKDRWGQE

SEQ ID NO: 24686 - protein, 139 aa, Homo sapiens; identical to SEQ ID NO: 24685
  Payload ID: 4905
  Gene Symbol: DDR1
  Gene Name: discoidin domain receptor tyrosine kinase 1
  ENSP ID: ENSP00000389085

SEQ ID NO: 24687 - protein, 139 aa, Homo sapiens; identical to SEQ ID NO: 24685
  Payload ID: 4905
  Gene Symbol: DDR1
  Gene Name: discoidin domain receptor tyrosine kinase 1
  ENSP ID: ENSP00000390043

SEQ ID NO: 24688 - protein, 139 aa, Homo sapiens; identical to SEQ ID NO: 24685
  Payload ID: 4905
  Gene Symbol: DDR1
  Gene Name: discoidin domain receptor tyrosine kinase 1
  ENSP ID: ENSP00000390361

SEQ ID NO: 24689 - protein, 267 aa, Homo sapiens
  Payload ID: 4905
  Gene Symbol: DDR1
  Gene Name: discoidin domain receptor tyrosine kinase 1
  ENSP ID: ENSP00000390593
MGPEALSSLLLLLLVASGDADMKGHFDPAKCRYALGMQDRTIPDSDISASSSWSDSTAARHSRLESSDGDGAWCPAGSVFPKEEEYLQVDLQRLHLVALVGTQGRHAGGLGKEFSRSYRLRYSRDGRRWMGWKDRWGQEVISGNEDPEGVVLKDLGPPMVARLVRFYPRADRVMSVCLRVELYGCLWRDGLLSYTAPVGQTMYLSEAVYLNDSTYDGHTVGGLQYGGLGQLADGVVGLDDFRKSQELRVWPGYDYVGWSNHSFSSGY

SEQ ID NO: 24690 - protein, 493 aa, Homo sapiens
  Payload ID: 4905
  Gene Symbol: DDR1
  Gene Name: discoidin domain receptor tyrosine kinase 1
  ENSP ID: ENSP00000391243
SEAVYLNDSTYDGHTVGGLQYGGLGQLADGVVGLDDFRKSQELRVWPGYDYVGWSNHSFSSGYVEMEFEFDRLRAFQAMQVHCNNMHTLGARLPGGVECRFRRGPAMAWEGEPMRHNLGGNLGDPRARAVSVPLGGRVARFLQCRFLFAGPWLLFSEISFISDVVNNSSPALGGTFPPAPWWPPGPPPTNFSSLELEPRGQQPVAKAEGSPTAILIGCLVAIILLLLLIIALMLWRLHWRRLLSKVLESHPRTRSPGLVGIRPTPLPVSPMALRCCSPIQPTASFWPLTPVPLEARAPPHPPGPNPPTPRGVTGGNTYAVPALPPGAVGDGPPRVDFPRSRLRFKEKLGEGQFGEVHLCEVDSPQDLVSLDFPLNVRKGHPLLVAVKILRPDATKNARNDFLKEVKIMSRLKDPNIIRLLGVCVQDDPLCMITDYMENGDLNQFLSAHQLEDKAAEGAPGDGQAAQGPTISYPMLLHVAAQIASGMRYLATLN

SEQ ID NO: 24691 - protein, 63 aa, Homo sapiens
  Payload ID: 4905
  Gene Symbol: DDR1
  Gene Name: discoidin domain receptor tyrosine kinase 1
  ENSP ID: ENSP00000391297
MGPEALSSLLLLLLVASGDADMKGHFDPAKCRYALGMQDRTIPDSDISASSSWSDSTAARHSR

SEQ ID NO: 24692 - protein, 913 aa, Homo sapiens; identical to SEQ ID NO: 24667
  Payload ID: 4905
  Gene Symbol: DDR1
  Gene Name: discoidin domain receptor tyrosine kinase 1
  Uniprot ID: Q08345
  ENSP ID: ENSP00000391805

SEQ ID NO: 24693 - protein, 139 aa, Homo sapiens; identical to SEQ ID NO: 24685
  Payload ID: 4905
  Gene Symbol: DDR1
  Gene Name: discoidin domain receptor tyrosine kinase 1
  ENSP ID: ENSP00000391895

SEQ ID NO: 24694 - protein, 139 aa, Homo sapiens; identical to SEQ ID NO: 24685
  Payload ID: 4905
  Gene Symbol: DDR1
  Gene Name: discoidin domain receptor tyrosine kinase 1
  ENSP ID: ENSP00000392200

SEQ ID NO: 24695 - protein, 58 aa, Homo sapiens
  Payload ID: 4905
  Gene Symbol: DDR1
  Gene Name: discoidin domain receptor tyrosine kinase 1
  ENSP ID: ENSP00000392413
MGPEALSSLLLLLLVASGDADMKGHFDPAKCRYALGMQDRTIPDSDISASSSWSDSTA

SEQ ID NO: 24696 - protein, 139 aa, Homo sapiens; identical to SEQ ID NO: 24685
  Payload ID: 4905
  Gene Symbol: DDR1
  Gene Name: discoidin domain receptor tyrosine kinase 1
  ENSP ID: ENSP00000392422

SEQ ID NO: 24697 - protein, 139 aa, Homo sapiens; identical to SEQ ID NO: 24685
  Payload ID: 4905
  Gene Symbol: DDR1
  Gene Name: discoidin domain receptor tyrosine kinase 1
  ENSP ID: ENSP00000393056

SEQ ID NO: 24698 - protein, 493 aa, Homo sapiens
  Payload ID: 4905
  Gene Symbol: DDR1
  Gene Name: discoidin domain receptor tyrosine kinase 1
  ENSP ID: ENSP00000394161
SEAVYLNDSTYDGHTVGGLQYGGLGQLADGVVGLDDFRKSQELRVWPGYDYVGWSNHSFSSGYVEMEFEFDRLRAFQAMQVHCNNMHTLGARLPGGVECRFRRGPAMAWEGEPMRHNLGGNLGDPRARAVSVPLGGRVARFLQCRFLFAGPWLLFSEISFISDVVNNSSPALGGTFPPAPWWPPGPPPTNFSSLELEPRGQQPVAKAEGSPTAILIGCLVAIILLLLLIIALMLWRLHWRRLLSKVLESHPRTRSPGLVGIRPTLLPVSPMALRCCSPIQPTASFWPLTPVPLEARAPPHPPGPNPPTPRGVTGGNTYAVPALPPGAVGDGPPRVDFPRSRLRFKEKLGEGQFGEVHLCEVDSPQDLVSLDFPLNVRKGHPLLVAVKILRPDATKNARNDFLKEVKIMSRLKDPNIIRLLGVCVQDDPLCMITDYMENGDLNQFLSAHQLEDKAAEGAPGDGQAAQGPTISYPMLLHVAAQIASGMRYLATLN

SEQ ID NO: 24699 - protein, 153 aa, Homo sapiens
  Payload ID: 4905
  Gene Symbol: DDR1
  Gene Name: discoidin domain receptor tyrosine kinase 1
  ENSP ID: ENSP00000394273
MGPEALSSLLLLLLVASGDADMKGHFDPAKCRYALGMQDRTIPDSDISASSSWSDSTAARHSRLESSDGDGAWCPAGSVFPKEEEYLQVDLQRLHLVALVGTQGRHAGGLGKEFSRSYRLRYSRDGRRWMGWKDRWGQEVISGNEDPEGVVLK

SEQ ID NO: 24700 - protein, 139 aa, Homo sapiens; identical to SEQ ID NO: 24685
  Payload ID: 4905
  Gene Symbol: DDR1
  Gene Name: discoidin domain receptor tyrosine kinase 1
  ENSP ID: ENSP00000395136

SEQ ID NO: 24701 - protein, 250 aa, Homo sapiens
  Payload ID: 4905
  Gene Symbol: DDR1
  Gene Name: discoidin domain receptor tyrosine kinase 1
  ENSP ID: ENSP00000395405
MGPEALSSLLLLLLVASGDADMKGHFDPAKCRYALGMQDRTIPDSDISASSSWSDSTAARHSRLESSDGDGAWCPAGSVFPKEEEYLQVDLQRLHLVALVGTQGRHAGGLGKEFSRSYRLRYSRDGRRWMGWKDRWGQEVISGNEDPEGVVLKDLGPPMVARLVRFYPRADRVMSVCLRVELYGCLWRDGLLSYTAPVGQTMYLSEAVYLNDSTYDGHTVGGLQYGGLGQLADGVVGLDDFRKSQELRVW

SEQ ID NO: 24702 - protein, 378 aa, Homo sapiens
  Payload ID: 4905
  Gene Symbol: DDR1
  Gene Name: discoidin domain receptor tyrosine kinase 1
  ENSP ID: ENSP00000396139
  MOD_RES (1)..(1): Any amino acid
XYSGDYMEPEKPGAPLLPPPPQNSVPHYAEADIVTLQGVTGGNTYAVPALPPGAVGDGPPRVDFPRSRLRFKEKLGEGQFGEVHLCEVDSPQDLVSLDFPLNVRKGHPLLVAVKILRPDATKNASFSLFSRNDFLKEVKIMSRLKDPNIIRLLGVCVQDDPLCMITDYMENGDLNQFLSAHQLEDKAAEGAPGDGQAAQGPTISYPMLLHVAAQIASGMRYLATLNFVHRDLATRNCLVGENFTIKIADFGMSRNLYAGDYYRVQGRAVLPIRWMAWECILMGKFTTASDVWAFGVTLWEVLMLCRAQPFGQLTDEQVIENAGEFFRDQGRQVYLSRPPACPQGLYELMLRCWSRESEQRPPFSQLHRFLAEDALNTV

SEQ ID NO: 24703 - protein, 250 aa, Homo sapiens; identical to SEQ ID NO: 24701
  Payload ID: 4905
  Gene Symbol: DDR1
  Gene Name: discoidin domain receptor tyrosine kinase 1
  ENSP ID: ENSP00000396187

SEQ ID NO: 24704 - protein, 166 aa, Homo sapiens
  Payload ID: 4905
  Gene Symbol: DDR1
  Gene Name: discoidin domain receptor tyrosine kinase 1
  ENSP ID: ENSP00000396609
MGPEALSSLLLLLLVASGDADMKGHFDPAKCRYALGMQDRTIPDSDISASSSWSDSTAARHSRLESSDGDGAWCPAGSVFPKEEEYLQVDLQRLHLVALVGTQGRHAGGLGKEFSRSYRLRYSRDGRRWMGWKDRWGQEVISGNEDPEGVVLKDLGPPMVARLVRF

SEQ ID NO: 24705 - protein, 913 aa, Homo sapiens; identical to SEQ ID NO: 24667
  Payload ID: 4905
  Gene Symbol: DDR1
  Gene Name: discoidin domain receptor tyrosine kinase 1
  Uniprot ID: Q08345
  ENSP ID: ENSP00000397769

SEQ ID NO: 24706 - protein, 63 aa, Homo sapiens; identical to SEQ ID NO: 24691
  Payload ID: 4905
  Gene Symbol: DDR1
  Gene Name: discoidin domain receptor tyrosine kinase 1
  ENSP ID: ENSP00000397897

SEQ ID NO: 24707 - protein, 378 aa, Homo sapiens; identical to SEQ ID NO: 24702
  Payload ID: 4905
  Gene Symbol: DDR1
  Gene Name: discoidin domain receptor tyrosine kinase 1
  ENSP ID: ENSP00000398339
  MOD_RES (1)..(1): Any amino acid

SEQ ID NO: 24708 - protein, 63 aa, Homo sapiens; identical to SEQ ID NO: 24691
  Payload ID: 4905
  Gene Symbol: DDR1
  Gene Name: discoidin domain receptor tyrosine kinase 1
  ENSP ID: ENSP00000398343

SEQ ID NO: 24709 - protein, 493 aa, Homo sapiens; identical to SEQ ID NO: 24690
  Payload ID: 4905
  Gene Symbol: DDR1
  Gene Name: discoidin domain receptor tyrosine kinase 1
  ENSP ID: ENSP00000398682

SEQ ID NO: 24710 - protein, 250 aa, Homo sapiens; identical to SEQ ID NO: 24701
  Payload ID: 4905
  Gene Symbol: DDR1
  Gene Name: discoidin domain receptor tyrosine kinase 1
  ENSP ID: ENSP00000398904

SEQ ID NO: 24711 - protein, 147 aa, Homo sapiens; identical to SEQ ID NO: 24674
  Payload ID: 4905
  Gene Symbol: DDR1
  Gene Name: discoidin domain receptor tyrosine kinase 1
  ENSP ID: ENSP00000399276

SEQ ID NO: 24712 - protein, 876 aa, Homo sapiens; identical to SEQ ID NO: 24666
  Payload ID: 4905
  Gene Symbol: DDR1
  Gene Name: discoidin domain receptor tyrosine kinase 1
  Uniprot ID: Q08345
  ENSP ID: ENSP00000400393

SEQ ID NO: 24713 - protein, 209 aa, Homo sapiens
  Payload ID: 4905
  Gene Symbol: DDR1
  Gene Name: discoidin domain receptor tyrosine kinase 1
  ENSP ID: ENSP00000400536
MGPEALSSLLLLLLVASGDADMKGHFDPAKCRYALGMQDRTIPDSDISASSSWSDSTAARHSRLESSDGDGAWCPAGSVFPKEEEYLQVDLQRLHLVALVGTQGRHAGGLGKEFSRSYRLRYSRDGRRWMGWKDRWGQEVISGNEDPEGVVLKDLGPPMVARLVRFYPRADRVMSVCLRVELYGCLWRDGLLSYTAPVGQTMYLSEAVY

SEQ ID NO: 24714 - protein, 166 aa, Homo sapiens; identical to SEQ ID NO: 24704
  Payload ID: 4905
  Gene Symbol: DDR1
  Gene Name: discoidin domain receptor tyrosine kinase 1
  ENSP ID: ENSP00000400697

SEQ ID NO: 24715 - protein, 876 aa, Homo sapiens; identical to SEQ ID NO: 24666
  Payload ID: 4905
  Gene Symbol: DDR1
  Gene Name: discoidin domain receptor tyrosine kinase 1
  Uniprot ID: Q08345
  ENSP ID: ENSP00000401208

SEQ ID NO: 24716 - protein, 250 aa, Homo sapiens; identical to SEQ ID NO: 24701
  Payload ID: 4905
  Gene Symbol: DDR1
  Gene Name: discoidin domain receptor tyrosine kinase 1
  ENSP ID: ENSP00000401304

SEQ ID NO: 24717 - protein, 913 aa, Homo sapiens; identical to SEQ ID NO: 24667
  Payload ID: 4905
  Gene Symbol: DDR1
  Gene Name: discoidin domain receptor tyrosine kinase 1
  Uniprot ID: Q08345
  ENSP ID: ENSP00000401397

SEQ ID NO: 24718 - protein, 139 aa, Homo sapiens; identical to SEQ ID NO: 24685
  Payload ID: 4905
  Gene Symbol: DDR1
  Gene Name: discoidin domain receptor tyrosine kinase 1
  ENSP ID: ENSP00000402013

SEQ ID NO: 24719 - protein, 139 aa, Homo sapiens; identical to SEQ ID NO: 24685
  Payload ID: 4905
  Gene Symbol: DDR1
  Gene Name: discoidin domain receptor tyrosine kinase 1
  ENSP ID: ENSP00000402647

SEQ ID NO: 24720 - protein, 147 aa, Homo sapiens; identical to SEQ ID NO: 24674
  Payload ID: 4905
  Gene Symbol: DDR1
  Gene Name: discoidin domain receptor tyrosine kinase 1
  ENSP ID: ENSP00000402765

SEQ ID NO: 24721 - protein, 209 aa, Homo sapiens; identical to SEQ ID NO: 24713
  Payload ID: 4905
  Gene Symbol: DDR1
  Gene Name: discoidin domain receptor tyrosine kinase 1
  ENSP ID: ENSP00000402992

SEQ ID NO: 24722 - protein, 493 aa, Homo sapiens; identical to SEQ ID NO: 24690
  Payload ID: 4905
  Gene Symbol: DDR1
  Gene Name: discoidin domain receptor tyrosine kinase 1
  ENSP ID: ENSP00000403247

SEQ ID NO: 24723 - protein, 250 aa, Homo sapiens; identical to SEQ ID NO: 24701
  Payload ID: 4905
  Gene Symbol: DDR1
  Gene Name: discoidin domain receptor tyrosine kinase 1
  ENSP ID: ENSP00000403454

SEQ ID NO: 24724 - protein, 209 aa, Homo sapiens; identical to SEQ ID NO: 24713
  Payload ID: 4905
  Gene Symbol: DDR1
  Gene Name: discoidin domain receptor tyrosine kinase 1
  ENSP ID: ENSP00000404001

SEQ ID NO: 24725 - protein, 63 aa, Homo sapiens; identical to SEQ ID NO: 24691
  Payload ID: 4905
  Gene Symbol: DDR1
  Gene Name: discoidin domain receptor tyrosine kinase 1
  ENSP ID: ENSP00000404054

SEQ ID NO: 24726 - protein, 913 aa, Homo sapiens; identical to SEQ ID NO: 24667
  Payload ID: 4905
  Gene Symbol: DDR1
  Gene Name: discoidin domain receptor tyrosine kinase 1
  Uniprot ID: Q08345
  ENSP ID: ENSP00000405039

SEQ ID NO: 24727 - protein, 493 aa, Homo sapiens; identical to SEQ ID NO: 24690
  Payload ID: 4905
  Gene Symbol: DDR1
  Gene Name: discoidin domain receptor tyrosine kinase 1
  ENSP ID: ENSP00000405419

SEQ ID NO: 24728 - protein, 876 aa, Homo sapiens; identical to SEQ ID NO: 24666
  Payload ID: 4905
  Gene Symbol: DDR1
  Gene Name: discoidin domain receptor tyrosine kinase 1
  Uniprot ID: Q08345
  ENSP ID: ENSP00000405540

SEQ ID NO: 24729 - protein, 378 aa, Homo sapiens; identical to SEQ ID NO: 24702
  Payload ID: 4905
  Gene Symbol: DDR1
  Gene Name: discoidin domain receptor tyrosine kinase 1
  ENSP ID: ENSP00000405579
  MOD_RES (1)..(1): Any amino acid

SEQ ID NO: 24730 - protein, 767 aa, Homo sapiens
  Payload ID: 4905
  Gene Symbol: DDR1
  Gene Name: discoidin domain receptor tyrosine kinase 1
  ENSP ID: ENSP00000405998
MGPEALSSLLLLLLVASGDADMKGHFDPAKCRYALGMQDRTIPDSDISASSSWSDSTAARHSRLESSDGDGAWCPAGSVFPKEEEYLQVDLQRLHLVALVGTQGRHAGGLGKEFSRSYRLRYSRDGRRWMGWKDRWGQEVISGNEDPEGVVLKDLGPPMVARLVRFYPRADRVMSVCLRVELYGCLWRDGLLSYTAPVGQTMYLSEAVYLNDSTYDGHTVGGLQYGGLGQLADGVVGLDDFRKSQELRVWPGYDYVGWSNHSFSSGYVEMEFEFDRLRAFQAMQVHCNNMHTLGARLPGGVECRFRRGPAMAWEGEPMRHNLGGNLGDPRARAVSVPLGGRVARFLQCRFLFAGPWLLFSEISFISDVVNNSSPALGGTFPPAPWWPPGPPPTNFSSLELEPRGQQPVAKAEGSPTAILIGCLVAIILLLLLIIALMLWRLHWRRLLSKVLESHPRTRSPGLVGIRPTPLPVSPMALVHLCEVDSPQDLVSLDFPLNVRKGHPLLVAVKILRPDATKNARNDFLKEVKIMSRLKDPNIIRLLGVCVQDDPLCMITDYMENGDLNQFLSAHQLEDKAAEGAPGDGQAAQGPTISYPMLLHVAAQIASGMRYLATLNFVHRDLATRNCLVGENFTIKIADFGMSRNLYAGDYYRVQGRAVLPIRWMAWECILMGKFTTASDVWAFGVTLWEVLMLCRAQPFGQLTDEQVIENAGEFFRDQGRQVYLSRPPACPQGLYELMLRCWSRESEQRPPFSQLHRFLAEDALNTV

SEQ ID NO: 24731 - protein, 63 aa, Homo sapiens; identical to SEQ ID NO: 24691
  Payload ID: 4905
  Gene Symbol: DDR1
  Gene Name: discoidin domain receptor tyrosine kinase 1
  ENSP ID: ENSP00000406089

SEQ ID NO: 24732 - protein, 876 aa, Homo sapiens; identical to SEQ ID NO: 24666
  Payload ID: 4905
  Gene Symbol: DDR1
  Gene Name: discoidin domain receptor tyrosine kinase 1
  Uniprot ID: Q08345
  ENSP ID: ENSP00000406091

SEQ ID NO: 24733 - protein, 63 aa, Homo sapiens; identical to SEQ ID NO: 24691
  Payload ID: 4905
  Gene Symbol: DDR1
  Gene Name: discoidin domain receptor tyrosine kinase 1
  ENSP ID: ENSP00000406200

SEQ ID NO: 24734 - protein, 139 aa, Homo sapiens; identical to SEQ ID NO: 24685
  Payload ID: 4905
  Gene Symbol: DDR1
  Gene Name: discoidin domain receptor tyrosine kinase 1
  ENSP ID: ENSP00000406688

SEQ ID NO: 24735 - protein, 147 aa, Homo sapiens; identical to SEQ ID NO: 24674
  Payload ID: 4905
  Gene Symbol: DDR1
  Gene Name: discoidin domain receptor tyrosine kinase 1
  ENSP ID: ENSP00000406865

SEQ ID NO: 24736 - protein, 166 aa, Homo sapiens; identical to SEQ ID NO: 24704
  Payload ID: 4905
  Gene Symbol: DDR1
  Gene Name: discoidin domain receptor tyrosine kinase 1
  ENSP ID: ENSP00000407068

SEQ ID NO: 24737 - protein, 876 aa, Homo sapiens; identical to SEQ ID NO: 24666
  Payload ID: 4905
  Gene Symbol: DDR1
  Gene Name: discoidin domain receptor tyrosine kinase 1
  Uniprot ID: Q08345
  ENSP ID: ENSP00000407699

SEQ ID NO: 24738 - protein, 378 aa, Homo sapiens; identical to SEQ ID NO: 24702
  Payload ID: 4905
  Gene Symbol: DDR1
  Gene Name: discoidin domain receptor tyrosine kinase 1
  ENSP ID: ENSP00000408328
  MOD_RES (1)..(1): Any amino acid

SEQ ID NO: 24739 - protein, 166 aa, Homo sapiens; identical to SEQ ID NO: 24704
  Payload ID: 4905
  Gene Symbol: DDR1
  Gene Name: discoidin domain receptor tyrosine kinase 1
  ENSP ID: ENSP00000408790

SEQ ID NO: 24740 - protein, 196 aa, Homo sapiens
  Payload ID: 4905
  Gene Symbol: DDR1
  Gene Name: discoidin domain receptor tyrosine kinase 1
  ENSP ID: ENSP00000409400
  MOD_RES (1)..(1): Any amino acid
XSLLLLLLVASGDADMKGHFDPAKCRYALGMQDRTIPDSDISASSSWLESSDGDGAWCPAGSVFPKEEEYLQVDLQRLHLVALVGTQGRHAGGLGKEFSRSYRLRYSRDGRRWMGWKDRWGQEVISGNEDPEGVVLKDLGPPMVARLVRFYPRADRVMSVCLRVELYGCLWRDGLLSYTAPVGQTMYLSEAVYLND

SEQ ID NO: 24741 - protein, 209 aa, Homo sapiens; identical to SEQ ID NO: 24713
  Payload ID: 4905
  Gene Symbol: DDR1
  Gene Name: discoidin domain receptor tyrosine kinase 1
  ENSP ID: ENSP00000409682

SEQ ID NO: 24742 - protein, 46 aa, Homo sapiens
  Payload ID: 4905
  Gene Symbol: DDR1
  Gene Name: discoidin domain receptor tyrosine kinase 1
  ENSP ID: ENSP00000412396
SEAVYLNDSTYDGHTVGGLQYGGLGQLADGVVGLDDFRKSQELRVW

SEQ ID NO: 24743 - protein, 913 aa, Homo sapiens; identical to SEQ ID NO: 24667
  Payload ID: 4905
  Gene Symbol: DDR1
  Gene Name: discoidin domain receptor tyrosine kinase 1
  Uniprot ID: Q08345
  ENSP ID: ENSP00000414285

SEQ ID NO: 24744 - protein, 139 aa, Homo sapiens; identical to SEQ ID NO: 24685
  Payload ID: 4905
  Gene Symbol: DDR1
  Gene Name: discoidin domain receptor tyrosine kinase 1
  ENSP ID: ENSP00000414878

SEQ ID NO: 24745 - protein, 139 aa, Homo sapiens; identical to SEQ ID NO: 24685
  Payload ID: 4905
  Gene Symbol: DDR1
  Gene Name: discoidin domain receptor tyrosine kinase 1
  ENSP ID: ENSP00000414928

SEQ ID NO: 24746 - protein, 876 aa, Homo sapiens; identical to SEQ ID NO: 24666
  Payload ID: 4905
  Gene Symbol: DDR1
  Gene Name: discoidin domain receptor tyrosine kinase 1
  Uniprot ID: Q08345
  ENSP ID: ENSP00000415730

SEQ ID NO: 24747 - protein, 209 aa, Homo sapiens; identical to SEQ ID NO: 24713
  Payload ID: 4905
  Gene Symbol: DDR1
  Gene Name: discoidin domain receptor tyrosine kinase 1
  ENSP ID: ENSP00000415865

SEQ ID NO: 24748 - protein, 209 aa, Homo sapiens; identical to SEQ ID NO: 24713
  Payload ID: 4905
  Gene Symbol: DDR1
  Gene Name: discoidin domain receptor tyrosine kinase 1
  ENSP ID: ENSP00000415870

SEQ ID NO: 24749 - protein, 876 aa, Homo sapiens; identical to SEQ ID NO: 24666
  Payload ID: 4905
  Gene Symbol: DDR1
  Gene Name: discoidin domain receptor tyrosine kinase 1
  Uniprot ID: Q08345
  ENSP ID: ENSP00000416145

SEQ ID NO: 24750 - protein, 876 aa, Homo sapiens; identical to SEQ ID NO: 24666
  Payload ID: 4905
  Gene Symbol: DDR1
  Gene Name: discoidin domain receptor tyrosine kinase 1
  Uniprot ID: Q08345
  ENSP ID: ENSP00000416183

SEQ ID NO: 24751 - protein, 100 aa, Homo sapiens
  Payload ID: 4905
  Gene Symbol: DDR1
  Gene Name: discoidin domain receptor tyrosine kinase 1
  ENSP ID: ENSP00000420833
MGPEALSSLLLLLLVASGDADMKGHFDPAKCRYALGMQDRTIPDSDISASSSWSDSTAARHSRLESSDGDGAWCPAGSVFPKEEEYLQVDLQRLHLVALV

SEQ ID NO: 24752 - protein, 69 aa, Homo sapiens
  Payload ID: 4905
  Gene Symbol: DDR1
  Gene Name: discoidin domain receptor tyrosine kinase 1
  ENSP ID: ENSP00000421152
MVARLVRFYPRADRVMSVCLRVELYGCLWRDGLLSYTAPVGQTMYLSEAVYLNDSTYDGHTVGGLQYGG

SEQ ID NO: 24753 - protein, 132 aa, Homo sapiens
  Payload ID: 4905
  Gene Symbol: DDR1
  Gene Name: discoidin domain receptor tyrosine kinase 1
  ENSP ID: ENSP00000421189
MGPEALSSLLLLLLVASGDADMKGHFDPAKCRYALGMQDRTIPDSDISASSSWSDSTAARHSRLESSDGDGAWCPAGSVFPKEEEYLQVDLQRLHLVALVGTQGRHAGGLGKEFSRSYRLRYSRDGRRWMGW

SEQ ID NO: 24754 - protein, 112 aa, Homo sapiens
  Payload ID: 4905
  Gene Symbol: DDR1
  Gene Name: discoidin domain receptor tyrosine kinase 1
  ENSP ID: ENSP00000421719
MGPEALSSLLLLLLVASGDADMKGHFDPAKCRYALGMQDRTIPDSDISASSSWSDSTAARHSRLESSDGDGAWCPAGSVFPKEEEYLQVDLQRLHLVALVGTQGRHAGGLGK

SEQ ID NO: 24755 - protein, 35 aa, Homo sapiens
  Payload ID: 4905
  Gene Symbol: DDR1
  Gene Name: discoidin domain receptor tyrosine kinase 1
  ENSP ID: ENSP00000421753
MGPEALSSLLLLLLVASGDADMKGHFDPGPDHPRQ

SEQ ID NO: 24756 - protein, 243 aa, Homo sapiens; identical to SEQ ID NO: 24672
  Payload ID: 4905
  Gene Symbol: DDR1
  Gene Name: discoidin domain receptor tyrosine kinase 1
  Uniprot ID: Q08345
  ENSP ID: ENSP00000421978

SEQ ID NO: 24757 - protein, 138 aa, Homo sapiens
  Payload ID: 4905
  Gene Symbol: DDR1
  Gene Name: discoidin domain receptor tyrosine kinase 1
  ENSP ID: ENSP00000422108
MGPEALSSLLLLLLVASGDADMKGHFDPAKCRYALGMQDRTIPDSDISASSSWSDSTAARHSRLESSDGDGAWCPAGSVFPKEEEYLQVDLQRLHLVALVGTQGRHAGGLGKEFSRSYRLRYSRDGRRWMGWKDRWGQ

SEQ ID NO: 24758 - protein, 114 aa, Homo sapiens
  Payload ID: 4905
  Gene Symbol: DDR1
  Gene Name: discoidin domain receptor tyrosine kinase 1
  ENSP ID: ENSP00000422331
MGPEALSSLLLLLLVASGDADMKGHFDPAKCRYALGMQDRTIPDSDISASSSWSDSTAARHSRLESSDGDGAWCPAGSVFPKEEEYLQVDLQRLHLVALVGTQGRHAGGLGKEF

SEQ ID NO: 24759 - protein, 894 aa, Homo sapiens
  Payload ID: 4905
  Gene Symbol: DDR1
  Gene Name: discoidin domain receptor tyrosine kinase 1
  Uniprot ID: Q08345
  ENSP ID: ENSP00000422442
MSLPRCCPHPLRPEGSGAMGPEALSSLLLLLLVASGDADMKGHFDPAKCRYALGMQDRTIPDSDISASSSWSDSTAARHSRLESSDGDGAWCPAGSVFPKEEEYLQVDLQRLHLVALVGTQGRHAGGLGKEFSRSYRLRYSRDGRRWMGWKDRWGQEVISGNEDPEGVVLKDLGPPMVARLVRFYPRADRVMSVCLRVELYGCLWRDGLLSYTAPVGQTMYLSEAVYLNDSTYDGHTVGGLQYGGLGQLADGVVGLDDFRKSQELRVWPGYDYVGWSNHSFSSGYVEMEFEFDRLRAFQAMQVHCNNMHTLGARLPGGVECRFRRGPAMAWEGEPMRHNLGGNLGDPRARAVSVPLGGRVARFLQCRFLFAGPWLLFSEISFISDVVNNSSPALGGTFPPAPWWPPGPPPTNFSSLELEPRGQQPVAKAEGSPTAILIGCLVAIILLLLLIIALMLWRLHWRRLLSKAERRVLEEELTVHLSVPGDTILINNRPGPREPPPYQEPRPRGNPPHSAPCVPNGSAYSGDYMEPEKPGAPLLPPPPQNSVPHYAEADIVTLQGVTGGNTYAVPALPPGAVGDGPPRVDFPRSRLRFKEKLGEGQFGEVHLCEVDSPQDLVSLDFPLNVRKGHPLLVAVKILRPDATKNARNDFLKEVKIMSRLKDPNIIRLLGVCVQDDPLCMITDYMENGDLNQFLSAHQLEDKAAEGAPGDGQAAQGPTISYPMLLHVAAQIASGMRYLATLNFVHRDLATRNCLVGENFTIKIADFGMSRNLYAGDYYRVQGRAVLPIRWMAWECILMGKFTTASDVWAFGVTLWEVLMLCRAQPFGQLTDEQVIENAGEFFRDQGRQVYLSRPPACPQGLYELMLRCWSRESEQRPPFSQLHRFLAEDALNTV

SEQ ID NO: 24760 - protein, 138 aa, Homo sapiens; identical to SEQ ID NO: 24757
  Payload ID: 4905
  Gene Symbol: DDR1
  Gene Name: discoidin domain receptor tyrosine kinase 1
  ENSP ID: ENSP00000422467

SEQ ID NO: 24761 - protein, 41 aa, Homo sapiens
  Payload ID: 4905
  Gene Symbol: DDR1
  Gene Name: discoidin domain receptor tyrosine kinase 1
  ENSP ID: ENSP00000422974
MGPEALSSLLLLLLVASGDADMKGHFDPAKCRYALGMQDRT

SEQ ID NO: 24762 - protein, 85 aa, Homo sapiens
  Payload ID: 4905
  Gene Symbol: DDR1
  Gene Name: discoidin domain receptor tyrosine kinase 1
  ENSP ID: ENSP00000423492
MGPEALSSLLLLLLVASGDADMKGHFDPAKCRYALGMQDRTIPDSDISASSSWSDSTAARHSRLESSDGDGAWCPAGSVFPKEEE

SEQ ID NO: 24763 - protein, 196 aa, Homo sapiens
  Payload ID: 4905
  Gene Symbol: DDR1
  Gene Name: discoidin domain receptor tyrosine kinase 1
  ENSP ID: ENSP00000423749
MPHLASLFTASSRCCPHPLRPEGSGAMGPEALSSLLLLLLVASGDADMKGHFDPAKCRYALGMQDRTIPDSDISASSSWSDSTAARHSRLESSDGDGAWCPAGSVFPKEEEYLQVDLQRLHLVALVGTQGRHAGGLGKEFSRSYRLRYSRDGRRWMGWKDRWGQEVISGNEDPEGVVLKDLGPPMVARLVRFYPRA

SEQ ID NO: 24764 - protein, 122 aa, Homo sapiens
  Payload ID: 4905
  Gene Symbol: DDR1
  Gene Name: discoidin domain receptor tyrosine kinase 1
  ENSP ID: ENSP00000423906
MGPEALSSLLLLLLVASGDADMKGHFDPAKCRYALGMQDRTIPDSDISASSSWSDSTAARHSRLESSDGDGAWCPAGSVFPKEEEYLQVDLQRLHLVALVGTQGRHAGGLGKEFSRSYRLRY

SEQ ID NO: 24765 - protein, 51 aa, Homo sapiens
  Payload ID: 4905
  Gene Symbol: DDR1
  Gene Name: discoidin domain receptor tyrosine kinase 1
  ENSP ID: ENSP00000423928
MGPEALSSLLLLLLVASGDADMKGHFDPAKCRYALGMQDRTIPDSDISASS

SEQ ID NO: 24766 - protein, 277 aa, Homo sapiens
  Payload ID: 4905
  Gene Symbol: DDR1
  Gene Name: discoidin domain receptor tyrosine kinase 1
  ENSP ID: ENSP00000424003
  MOD_RES (1)..(1): Any amino acid
XRKGHPLLVAVKILRPDATKNARNDFLKEVKIMSRLKDPNIIRLLGVCVQDDPLCMITDYMENGDLNQFLSAHQLEDKAAEGAPGDGQAAQGPTISYPMLLHVAAQIASGMRYLATLNFVHRDLATRNCLVGENFTIKIADFGMSRNLYAGDYYRVQGRAVLPIRWMAWECILMGKFTTASDVWAFGVTLWEVLMLCRAQPFGQLTDEQVIENAGEFFRDQGRQVRVEEREDGSEAGDRRGRVVILETKEYLFPDSHPHCHNAGVPVPAACLPAGPI

SEQ ID NO: 24767 - protein, 55 aa, Homo sapiens
  Payload ID: 4905
  Gene Symbol: DDR1
  Gene Name: discoidin domain receptor tyrosine kinase 1
  ENSP ID: ENSP00000424346
MGPEALSSLLLLLLVASGDADMKGHFDPAKCRYALGMQDRTIPDSDISASSSWSD

SEQ ID NO: 24768 - protein, 51 aa, Homo sapiens; identical to SEQ ID NO: 24765
  Payload ID: 4905
  Gene Symbol: DDR1
  Gene Name: discoidin domain receptor tyrosine kinase 1
  ENSP ID: ENSP00000424468

SEQ ID NO: 24769 - protein, 78 aa, Homo sapiens
  Payload ID: 4905
  Gene Symbol: DDR1
  Gene Name: discoidin domain receptor tyrosine kinase 1
  ENSP ID: ENSP00000424703
MGPEALSSLLLLLLVASGDADMKGHFDPAKCRYALGMQDRTIPDSDISASSSWSDSTAARHSRLESSDGDGAWCPAGS

SEQ ID NO: 24770 - protein, 73 aa, Homo sapiens
  Payload ID: 4905
  Gene Symbol: DDR1
  Gene Name: discoidin domain receptor tyrosine kinase 1
  ENSP ID: ENSP00000424758
MGPEALSSLLLLLLVASGDADMKGHFDPAKCRYALGMQDRTIPDSDISASSSWSDSTAARHSRLESSDGDGAW

SEQ ID NO: 24771 - protein, 142 aa, Homo sapiens
  Payload ID: 4905
  Gene Symbol: DDR1
  Gene Name: discoidin domain receptor tyrosine kinase 1
  ENSP ID: ENSP00000425113
MGPEALSSLLLLLLVASGDADMKGHFDPAKCRYALGMQDRTIPDSDISASSSWSDSTAARHSRLESSDGDGAWCPAGSVFPKEEEYLQVDLQRLHLVALVGTQGRHAGGLGKEFSRSYRLRYSRDGRRWMGWKDRWGQEVIS

SEQ ID NO: 24772 - protein, 70 aa, Homo sapiens
  Payload ID: 4905
  Gene Symbol: DDR1
  Gene Name: discoidin domain receptor tyrosine kinase 1
  ENSP ID: ENSP00000425713
MGPEALSSLLLLLLVASGDADMKGHFDPAKCRYALGMQDRTIPDSDISASSSWSDSTAARHSRLESSDGD

SEQ ID NO: 24773 - protein, 170 aa, Homo sapiens
  Payload ID: 4905
  Gene Symbol: DDR1
  Gene Name: discoidin domain receptor tyrosine kinase 1
  ENSP ID: ENSP00000426229
MGPEALSSLLLLLLVASGDADMKGHFDPAKCRYALGMQDRTIPDSDISASSSWSDSTAARHSRLESSDGDGAWCPAGSVFPKEEEYLQVDLQRLHLVALVGTQGRHAGGLGKEFSRSYRLRYSRDGRRWMGWKDRWGQEVISGNEDPEGVVLKDLGPPMVARLVRFYPRA

SEQ ID NO: 24774 - protein, 286 aa, Homo sapiens
  Payload ID: 4905
  Gene Symbol: DDR1
  Gene Name: discoidin domain receptor tyrosine kinase 1
  ENSP ID: ENSP00000426420
MGPEALSSLLLLLLVASGDADMKGHFDPAKCRYALGMQDRTIPDSDISASSSWSDSTAARHSRLESSDGDGAWCPAGSVFPKEEEYLQVDLQRLHLVALVGTQGRHAGGLGKEFSRSYRLRYSRDGRRWMGWKDRWGQEVISGNEDPEGVVLKDLGPPMVARLVRFYPRADRVMSVCLRVELYGCLWRDGLLSYTAPVGQTMYLSEAVYLNDSTYDGHTVGGLQYGGLGQLADGVVGLDDFRKSQELRVWPGYDYVGWSNHSFSSGYVEMEFEFDRLRAFQAMQVH

SEQ ID NO: 24775 - protein, 35 aa, Homo sapiens; identical to SEQ ID NO: 24755
  Payload ID: 4905
  Gene Symbol: DDR1
  Gene Name: discoidin domain receptor tyrosine kinase 1
  ENSP ID: ENSP00000426799

SEQ ID NO: 24776 - protein, 172 aa, Homo sapiens
  Payload ID: 4905
  Gene Symbol: DDR1
  Gene Name: discoidin domain receptor tyrosine kinase 1
  ENSP ID: ENSP00000427124
  MOD_RES (1)..(1): Any amino acid
XNNRPGPREPPPYQEPRPRGNPPHSAPCVPNGSAYSGDYMEPEKPGAPLLPPPPQNSVPHYAEADIVTLQGVTGGNTYAVPALPPGAVGDGPPRVDFPRSRLRFKEKLGEGQFGEVHLCEVDSPQDLVSLDFPLNVRKGHPLLVAVKILRPDATKNASFSLFSRNDFLKEVK

SEQ ID NO: 24777 - protein, 126 aa, Homo sapiens
  Payload ID: 4905
  Gene Symbol: DDR1
  Gene Name: discoidin domain receptor tyrosine kinase 1
  ENSP ID: ENSP00000427369
MGPEALSSLLLLLLVASGDADMKGHFDPAKCRYALGMQDRTIPDSDISASSSWSDSTAARHSRLESSDGDGAWCPAGSVFPKEEEYLQVDLQRLHLVALVGTQGRHAGGLGKEFSRSYRLRYSRDG

SEQ ID NO: 24778 - protein, 919 aa, Homo sapiens
  Payload ID: 4905
  Gene Symbol: DDR1
  Gene Name: discoidin domain receptor tyrosine kinase 1
  Uniprot ID: Q08345
  ENSP ID: ENSP00000427552
MGPEALSSLLLLLLVASGDADMKGHFDPAKCRYALGMQDRTIPDSDISASSSWSDSTAARHSRLESSDGDGAWCPAGSVFPKEEEYLQVDLQRLHLVALVGTQGRHAGGLGKEFSRSYRLRYSRDGRRWMGWKDRWGQEVISGNEDPEGVVLKDLGPPMVARLVRFYPRADRVMSVCLRVELYGCLWRDGLLSYTAPVGQTMYLSEAVYLNDSTYDGHTVGGLQYGGLGQLADGVVGLDDFRKSQELRVWPGYDYVGWSNHSFSSGYVEMEFEFDRLRAFQAMQVHCNNMHTLGARLPGGVECRFRRGPAMAWEGEPMRHNLGGNLGDPRARAVSVPLGGRVARFLQCRFLFAGPWLLFSEISFISDVVNNSSPALGGTFPPAPWWPPGPPPTNFSSLELEPRGQQPVAKAEGSPTAILIGCLVAIILLLLLIIALMLWRLHWRRLLSKAERRVLEEELTVHLSVPGDTILINNRPGPREPPPYQEPRPRGNPPHSAPCVPNGSALLLSNPAYRLLLATYARPPRGPGPPTPAWAKPTNTQAYSGDYMEPEKPGAPLLPPPPQNSVPHYAEADIVTLQGVTGGNTYAVPALPPGAVGDGPPRVDFPRSRLRFKEKLGEGQFGEVHLCEVDSPQDLVSLDFPLNVRKGHPLLVAVKILRPDATKNASFSLFSRNDFLKEVKIMSRLKDPNIIRLLGVCVQDDPLCMITDYMENGDLNQFLSAHQLEDKAAEGAPGDGQAAQGPTISYPMLLHVAAQIASGMRYLATLNFVHRDLATRNCLVGENFTIKIADFGMSRNLYAGDYYRVQGRAVLPIRWMAWECILMGKFTTASDVWAFGVTLWEVLMLCRAQPFGQLTDEQVIENAGEFFRDQGRQVYLSRPPACPQGLYELMLRCWSRESEQRPPFSQLHRFLAEDALNTV

SEQ ID NO: 24779 - protein, 160 aa, Homo sapiens
  Payload ID: 4905
  Gene Symbol: DDR1
  Gene Name: discoidin domain receptor tyrosine kinase 1
  ENSP ID: ENSP00000427597
MGPEALSSLLLLLLVASGDADMKGHFDPAKCRYALGMQDRTIPDSDISASSSWSDSTAARHSRLESSDGDGAWCPAGSVFPKEEEYLQVDLQRLHLVALVGTQGRHAGGLGKEFSRSYRLRYSRDGRRWMGWKDRWGQEVISGNEDPEGVVLKDLGPPMV

SEQ ID NO: 24780 - protein, 767 aa, Homo sapiens; identical to SEQ ID NO: 24730
  Payload ID: 4905
  Gene Symbol: DDR1
  Gene Name: discoidin domain receptor tyrosine kinase 1
  ENSP ID: ENSP00000447357

SEQ ID NO: 24781 - protein, 894 aa, Homo sapiens; identical to SEQ ID NO: 24759
  Payload ID: 4905
  Gene Symbol: DDR1
  Gene Name: discoidin domain receptor tyrosine kinase 1
  Uniprot ID: Q08345
  ENSP ID: ENSP00000447474

SEQ ID NO: 24782 - protein, 894 aa, Homo sapiens; identical to SEQ ID NO: 24759
  Payload ID: 4905
  Gene Symbol: DDR1
  Gene Name: discoidin domain receptor tyrosine kinase 1
  Uniprot ID: Q08345
  ENSP ID: ENSP00000448115

SEQ ID NO: 24783 - protein, 913 aa, Homo sapiens; identical to SEQ ID NO: 24667
  Payload ID: 4905
  Gene Symbol: DDR1
  Gene Name: discoidin domain receptor tyrosine kinase 1
  Uniprot ID: Q08345
  ENSP ID: ENSP00000448377

SEQ ID NO: 24784 - protein, 767 aa, Homo sapiens; identical to SEQ ID NO: 24730
  Payload ID: 4905
  Gene Symbol: DDR1
  Gene Name: discoidin domain receptor tyrosine kinase 1
  ENSP ID: ENSP00000448460

SEQ ID NO: 24785 - protein, 767 aa, Homo sapiens; identical to SEQ ID NO: 24730
  Payload ID: 4905
  Gene Symbol: DDR1
  Gene Name: discoidin domain receptor tyrosine kinase 1
  ENSP ID: ENSP00000448797

SEQ ID NO: 24786 - protein, 913 aa, Homo sapiens; identical to SEQ ID NO: 24667
  Payload ID: 4905
  Gene Symbol: DDR1
  Gene Name: discoidin domain receptor tyrosine kinase 1
  Uniprot ID: Q08345
  ENSP ID: ENSP00000449190

SEQ ID NO: 24787 - protein, 894 aa, Homo sapiens; identical to SEQ ID NO: 24759
  Payload ID: 4905
  Gene Symbol: DDR1
  Gene Name: discoidin domain receptor tyrosine kinase 1
  Uniprot ID: Q08345
  ENSP ID: ENSP00000449238

SEQ ID NO: 24788 - protein, 913 aa, Homo sapiens; identical to SEQ ID NO: 24667
  Payload ID: 4905
  Gene Symbol: DDR1
  Gene Name: discoidin domain receptor tyrosine kinase 1
  Uniprot ID: Q08345
  ENSP ID: ENSP00000449255

SEQ ID NO: 24789 - protein, 894 aa, Homo sapiens; identical to SEQ ID NO: 24759
  Payload ID: 4905
  Gene Symbol: DDR1
  Gene Name: discoidin domain receptor tyrosine kinase 1
  Uniprot ID: Q08345
  ENSP ID: ENSP00000449307

SEQ ID NO: 24790 - protein, 913 aa, Homo sapiens; identical to SEQ ID NO: 24667
  Payload ID: 4905
  Gene Symbol: DDR1
  Gene Name: discoidin domain receptor tyrosine kinase 1
  Uniprot ID: Q08345
  ENSP ID: ENSP00000449611

SEQ ID NO: 24791 - protein, 243 aa, Homo sapiens; identical to SEQ ID NO: 24672
  Payload ID: 4905
  Gene Symbol: DDR1
  Gene Name: discoidin domain receptor tyrosine kinase 1
  Uniprot ID: Q08345
  ENSP ID: ENSP00000479195

SEQ ID NO: 24792 - protein, 243 aa, Homo sapiens; identical to SEQ ID NO: 24672
  Payload ID: 4905
  Gene Symbol: DDR1
  Gene Name: discoidin domain receptor tyrosine kinase 1
  Uniprot ID: Q08345
  ENSP ID: ENSP00000479204

SEQ ID NO: 24793 - protein, 767 aa, Homo sapiens
  Payload ID: 4905
  Gene Symbol: DDR1
  Gene Name: discoidin domain receptor tyrosine kinase 1
  ENSP ID: ENSP00000482421
MGPEALSSLLLLLLVASGDADMKGHFDPAKCRYALGMQDRTIPDSDISASSSWSDSTAARHSRLESSDGDGAWCPAGSVFPKEEEYLQVDLQRLHLVALVGTQGRHAGGLGKEFSRSYRLRYSRDGRRWMGWKDRWGQEVISGNEDPEGVVLKDLGPPMVARLVRFYPRADRVMSVCLRVELYGCLWRDGLLSYTAPVGQTMYLSEAVYLNDSTYDGHTVGGLQYGGLGQLADGVVGLDDFRKSQELRVWPGYDYVGWSNHSFSSGYVEMEFEFDRLRAFQAMQVHCNNMHTLGARLPGGVECRFRRGPAMAWEGEPMRHNLGGNLGDPRARAVSVPLGGRVARFLQCRFLFAGPWLLFSEISFISDVVNNSSPALGGTFPPAPWWPPGPPPTNFSSLELEPRGQQPVAKAEGSPTAILIGCLVAIILLLLLIIALMLWRLHWRRLLSKVLESHPRTRSPGLVGIRPTLLPVSPMALVHLCEVDSPQDLVSLDFPLNVRKGHPLLVAVKILRPDATKNARNDFLKEVKIMSRLKDPNIIRLLGVCVQDDPLCMITDYMENGDLNQFLSAHQLEDKAAEGAPGDGQAAQGPTISYPMLLHVAAQIASGMRYLATLNFVHRDLATRNCLVGENFTIKIADFGMSRNLYAGDYYRVQGRAVLPIRWMAWECILMGKFTTASDVWAFGVTLWEVLMLCRAQPFGQLTDEQVIENAGEFFRDQGRQVYLSRPPACPQGLYELMLRCWSRESEQRPPFSQLHRFLAEDALNTV

SEQ ID NO: 24794 - protein, 243 aa, Homo sapiens; identical to SEQ ID NO: 24672
  Payload ID: 4905
  Gene Symbol: DDR1
  Gene Name: discoidin domain receptor tyrosine kinase 1
  Uniprot ID: Q08345
  ENSP ID: ENSP00000484013

SEQ ID NO: 24795 - protein, 243 aa, Homo sapiens; identical to SEQ ID NO: 24672
  Payload ID: 4905
  Gene Symbol: DDR1
  Gene Name: discoidin domain receptor tyrosine kinase 1
  Uniprot ID: Q08345
  ENSP ID: ENSP00000484588

SEQ ID NO: 24796 - protein, 855 aa, Homo sapiens
  Payload ID: 4906
  Gene Symbol: DDR2
  Gene Name: discoidin domain receptor tyrosine kinase 2
  Uniprot ID: Q16832
  ENSP ID: ENSP00000356898
MILIPRMLLVLFLLLPILSSAKAQVNPAICRYPLGMSGGQIPDEDITASSQWSESTAAKYGRLDSEEGDGAWCPEIPVEPDDLKEFLQIDLHTLHFITLVGTQGRHAGGHGIEFAPMYKINYSRDGTRWISWRNRHGKQVLDGNSNPYDIFLKDLEPPIVARFVRFIPVTDHSMNVCMRVELYGCVWLDGLVSYNAPAGQQFVLPGGSIIYLNDSVYDGAVGYSMTEGLGQLTDGVSGLDDFTQTHEYHVWPGYDYVGWRNESATNGYIEIMFEFDRIRNFTTMKVHCNNMFAKGVKIFKEVQCYFRSEASEWEPNAISFPLVLDDVNPSARFVTVPLHHRMASAIKCQYHFADTWMMFSEITFQSDAAMYNNSEALPTSPMAPTTYDPMLKVDDSNTRILIGCLVAIIFILLAIIVIILWRQFWQKMLEKASRRMLDDEMTVSLSLPSDSSMFNNNRSSSPSEQGSNSTYDRIFPLRPDYQEPSRLIRKLPEFAPGEEESGCSGVVKPVQPSGPEGVPHYAEADIVNLQGVTGGNTYSVPAVTMDLLSGKDVAVEEFPRKLLTFKEKLGEGQFGEVHLCEVEGMEKFKDKDFALDVSANQPVLVAVKMLRADANKNARNDFLKEIKIMSRLKDPNIIHLLAVCITDDPLCMITEYMENGDLNQFLSRHEPPNSSSSDVRTVSYTNLKFMATQIASGMKYLSSLNFVHRDLATRNCLVGKNYTIKIADFGMSRNLYSGDYYRIQGRAVLPIRWMSWESILLGKFTTASDVWAFGVTLWETFTFCQEQPYSQLSDEQVIENTGEFFRDQGRQTYLPQPAICPDSVYKLMLSCWRRDTKNRPSFQEIHLLLLQQGDE

SEQ ID NO: 24797 - protein, 855 aa, Homo sapiens; identical to SEQ ID NO: 24796
  Payload ID: 4906
  Gene Symbol: DDR2
  Gene Name: discoidin domain receptor tyrosine kinase 2
  Uniprot ID: Q16832
  ENSP ID: ENSP00000356899

SEQ ID NO: 24798 - protein, 148 aa, Homo sapiens
  Payload ID: 4906
  Gene Symbol: DDR2
  Gene Name: discoidin domain receptor tyrosine kinase 2
  ENSP ID: ENSP00000391310
MILIPRMLLVLFLLLPILSSAKAQVNPAICRYPLGMSGGQIPDEDITASSQWSESTAAKYGRLDSEEGDGAWCPEIPVEPDDLKEFLQIDLHTLHFITLVGTQGRHAGGHGIEFAPMYKINYSRDGTRWISWRNRHGKQVLDGNSNPY

SEQ ID NO: 24799 - protein, 171 aa, Homo sapiens
  Payload ID: 4906
  Gene Symbol: DDR2
  Gene Name: discoidin domain receptor tyrosine kinase 2
  ENSP ID: ENSP00000396864
  MOD_RES (1)..(1): Any amino acid
XIFILLAIIVIILWRQFWQKMLEKASRRMLDDEMTVSLSLPSDSSMFNNNRSSSPSEQGSNSTYDRIFPLRPDYQEPSRLIRKLPEFAPGEEESGCSGVVKPVQPSGPEGVPHYAEADIVNLQGVTGGNTYSVPAVTMDLLSGKDVAVEEFPRKLLTFKEKLGEGQFGEVS

SEQ ID NO: 24800 - protein, 130 aa, Homo sapiens
  Payload ID: 4906
  Gene Symbol: DDR2
  Gene Name: discoidin domain receptor tyrosine kinase 2
  ENSP ID: ENSP00000400309
MILIPRMLLVLFLLLPILSSAKAQVNPAICRYPLGMSGGQIPDEDITASSQWSESTAAKYGRLDSEEGDGAWCPEIPVEPDDLKEFLQIDLHTLHFITLVGTQGRHAGGHGIEFAPMYKINYSRDGTRWI

SEQ ID NO: 24801 - protein, 166 aa, Homo sapiens
  Payload ID: 4906
  Gene Symbol: DDR2
  Gene Name: discoidin domain receptor tyrosine kinase 2
  ENSP ID: ENSP00000417030
LKVDDSNTRILIGCLVAIIFILLAIIVIILWRQFWQKMLEKASRRMLDDEMTVSLSLPSDSSMFNNNRSSSPSEQGSNSTYDRIFPLRPDYQEPSRLIRKLPEFAPGEEESGEDDVVGRVSREKPQQASGRYDTPAPSSLHLFLVSANLLRSPHSLSRFGLPLLLA

SEQ ID NO: 24802 - protein, 539 aa, Homo sapiens
  Payload ID: 4907
  Gene Symbol: DCBLD1
  Gene Name: discoidin, CUB and LCCL domain containing 1
  Uniprot ID: Q8N8Z6
  ENSP ID: ENSP00000296955
MVPGARGGGALARAAGRGLLALLLAVSAPLRLQAEELGDGCGHLVTYQDSGTMTSKNYPGTYPNHTVCEKTITVPKGKRLILRLGDLDIESQTCASDYLLFTSSSDQYGPYCGSMTVPKELLLNTSEVTVRFESGSHISGRGFLLTYASSDHPDLITCLERASHYLKTEYSKFCPAGCRDVAGDISGNMVDGYRDTSLLCKAAIHAGIIADELGGQISVLQRKGISRYEGILANGVLSRDGSLSDKRFLFTSNGCSRSLSFEPDGQIRASSSWQSVNESGDQVHWSPGQARLQDQGPSWASGDSSNNHKPREWLEIDLGEKKKITGIRTTGSTQSNFNFYVKSFVMNFKNNNSKWKTYKGIVNNEEKVFQGNSNFRDPVQNNFIPPIVARYVRVVPQTWHQRIALKVELIGCQITQGNDSLVWRKTSQSTSVSTKKEDETITRPIPSEETSTGINITTVAIPLVLLVVLVFAGMGIFAAFRKKKKKGSPYGSAEAQKTDCWKQIKYPFARHQSAEFTISYDNEKEMTQKLDLITSDMAG

SEQ ID NO: 24803 - protein, 715 aa, Homo sapiens
  Payload ID: 4907
  Gene Symbol: DCBLD1
  Gene Name: discoidin, CUB and LCCL domain containing 1
  Uniprot ID: Q8N8Z6
  ENSP ID: ENSP00000342422
MVPGARGGGALARAAGRGLLALLLAVSAPLRLQAEELGDGCGHLVTYQDSGTMTSKNYPGTYPNHTVCEKTITVPKGKRLILRLGDLDIESQTCASDYLLFTSSSDQYGPYCGSMTVPKELLLNTSEVTVRFESGSHISGRGFLLTYASSDHPDLITCLERASHYLKTEYSKFCPAGCRDVAGDISGNMVDGYRDTSLLCKAAIHAGIIADELGGQISVLQRKGISRYEGILANGVLSRDGSLSDKRFLFTSNGCSRSLSFEPDGQIRASSSWQSVNESGDQVHWSPGQARLQDQGPSWASGDSSNNHKPREWLEIDLGEKKKITGIRTTGSTQSNFNFYVKSFVMNFKNNNSKWKTYKGIVNNEEKVFQGNSNFRDPVQNNFIPPIVARYVRVVPQTWHQRIALKVELIGCQITQGNDSLVWRKTSQSTSVSTKKEDETITRPIPSEETSTGINITTVAIPLVLLVVLVFAGMGIFAAFRKKKKKGSPYGSAEAQKTDCWKQIKYPFARHQSAEFTISYDNEKEMTQKLDLITSDMADYQQPLMIGTGTVTRKGSTFRPMDTDAEEAGVSTDAGGHYDCPQRAGRHEYALPLAPPEPEYATPIVERHVLRAHTFSAQSGYRVPGPQPGHKHSLSSGGFSPVAGVGAQDGDYQRPHSAQPADRGYDRPKAVSALATESGHPDSQKPPTHPGTSDSYSAPRDCLTPLNQTAMTALL

SEQ ID NO: 24804 - protein, 99 aa, Homo sapiens
  Payload ID: 4907
  Gene Symbol: DCBLD1
  Gene Name: discoidin, CUB and LCCL domain containing 1
  ENSP ID: ENSP00000391700
NNHKPREWLEIDLGEKKKITGIRTTGSTQSNFNFYVKSFVMNFKNNNSKWKTYKGIVNNEEKVMIHWCGARQVKAPVFQLRKKMRQSQGPSPRKKHPQE

SEQ ID NO: 24805 - protein, 775 aa, Homo sapiens
  Payload ID: 4908
  Gene Symbol: DCBLD2
  Gene Name: discoidin, CUB and LCCL domain containing 2
  Uniprot ID: Q96PD2
  ENSP ID: ENSP00000321573
MASRAVVRARRCPQCPQVRAAAAAPAWAALPLSRSLPPCSNSSSFSMPLFLLLLLVLLLLLEDAGAQQGDGCGHTVLGPESGTLTSINYPQTYPNSTVCEWEIRVKMGERVRIKFGDFDIEDSDSCHFNYLRIYNGIGVSRTEIGKYCGLGLQMNHSIESKGNEITLLFMSGIHVSGRGFLASYSVIDKQDLITCLDTASNFLEPEFSKYCPAGCLLPFAEISGTIPHGYRDSSPLCMAGVHAGVVSNTLGGQISVVISKGIPYYESSLANNVTSVVGHLSTSLFTFKTSGCYGTLGMESGVIADPQITASSVLEWTDHTGQENSWKPKKARLKKPGPPWAAFATDEYQWLQIDLNKEKKITGIITTGSTMVEHNYYVSAYRILYSDDGQKWTVYREPGVEQDKIFQGNKDYHQDVRNNFLPPIIARFIRVNPTQWQQKIAMKMELLGCQFIPKGRPPKLTQPPPPRNSNDLKNTTAPPKIAKGRAPKFTQPLQPRSSNEFPAQTEQTTASPDIRNTTVTPNVTKDVALAAVLVPVLVMVLTTLILILVCAWHWRNRKKKTEGTYDLPYWDRAGWWKGMKQFLPAKAVDHEETPVRYSSSEVNHLSPREVTTVLQADSAEYAQPLVGGIVGTLHQRSTFKPEEGKEAGYADLDPYNSPGQEVYHAYAEPLPITGPEYATPIIMDMSGHPTTSVGQPSTSTFKATGNQPPPLVGTYNTLLSRTDSCSSAQAQYDTPKAGKPGLPAPDELVYQVPQSTQEVSGAGRDGECDVFKEIL

SEQ ID NO: 24806 - protein, 789 aa, Homo sapiens
  Payload ID: 4908
  Gene Symbol: DCBLD2
  Gene Name: discoidin, CUB and LCCL domain containing 2
  Uniprot ID: Q96PD2
  ENSP ID: ENSP00000321646
MASRAVVRARRCPQCPQVRAAAAAPAWAALPLSRSLPPCSNSSSFSMPLFLLLLLVLLLLLEDAGAQQGDGCGHTVLGPESGTLTSINYPQTYPNSTVCEWEIRVKMGERVRIKFGDFDIEDSDSCHFNYLRIYNGIGVSRTEIGKYCGLGLQMNHSIESKGNEITLLFMSGIHVSGRGFLASYSVIDKQDLITCLDTASNFLEPEFSKYCPAGCLLPFAEISGTIPHGYRDSSPLCMAGVHAGVVSNTLGGQISVVISKGIPYYESSLANNVTSVVGHLSTSLFTFKTSGCYGTLGMESGVIADPQITASSVLEWTDHTGQENSWKPKKARLKKPGPPWAAFATDEYQWLQIDLNKEKKITGIITTGSTMVEHNYYVSAYRILYSDDGQKWTVYREPGVEQDKIFQGNKDYHQDVRNNFLPPIIARFIRVNPTQWQQKIAMKMELLGCQFIPKGRPPKLTQPPPPRNSNDLKNTTAPPKIAKGRAPKFTQPLQPRSSNEFPAQTEQTTASPDIRNTTVTPNVTKDVALAAVLVPVLVMVLTTLILILVCAWHWRNRKKKTEGTYDLPYWDRAGFYLMVSLACRHNEGWWKGMKQFLPAKAVDHEETPVRYSSSEVNHLSPREVTTVLQADSAEYAQPLVGGIVGTLHQRSTFKPEEGKEAGYADLDPYNSPGQEVYHAYAEPLPITGPEYATPIIMDMSGHPTTSVGQPSTSTFKATGNQPPPLVGTYNTLLSRTDSCSSAQAQYDTPKAGKPGLPAPDELVYQVPQSTQEVSGAGRDGECDVFKEIL

SEQ ID NO: 24807 - protein, 108 aa, Homo sapiens
  Payload ID: 4908
  Gene Symbol: DCBLD2
  Gene Name: discoidin, CUB and LCCL domain containing 2
  ENSP ID: ENSP00000396803
MGERVRIKFGDFDIEDSDSCHFNYLRIYNGIGVSRTEIGKYCGLGLQMNHSIESKGNEITLLFMSGIHVSGRGFLASYSVIDKQGNFHLLQWFLQFVISNNKNKMLFL

SEQ ID NO: 24808 - protein, 1567 aa, Homo sapiens
  Payload ID: 4909
  Gene Symbol: DIP2A
  Gene Name: disco-interacting protein 2 homolog A
  Uniprot ID: Q14689
  ENSP ID: ENSP00000383133
MADRGCPLEAAPLPAEVRESLAELELELSEGDITQKGYEKKRAKLLARYIPLIQGIDPSLQAENRIPGPSQTTAAAPKQQKSRPTASRDERFRSDVHTEAVQAALAKYKERKMPMPSKRRSVLVHSSVETYTPPDTSSASEDEGSLRRPGRLTSTPLQSHSSVEPWLDRVIQGSSTSSSASSTSSHPGGRPTTAPSAAATPGAAATTALAGLEAHTHIDLHSAPPDVTTGLVEHSYFERPQVASVRSVPRGCSGSMLETADGVPVNSRVSSKIQQLLNTLKRPKRPPLKEFFVDDFEELLEDPNQPKPEGSETSVLRGEPLTAGVPRPPSLLATLQRWGTTQPKSPCLTALDTTGKAVYTLTYGKLWSRSLKLAYTLLNKLTSKNEPLLKPGDRVALVFPNSDPVMFMVAFYGCLLAELVPVPIEVPLTRKDAGSQQVGFLLGSCGVFLALTTDACQKGLPKAQTGEVAAFKGWPPLSWLVIDGKHLAKPPKDWHPLAQDTGTGTAYIEYKTSKEGSTVGVTVSHASLLAQCRALTQACGYSEAETLTNVLDFKRDAGLWHGVLTSVMNRMHVVSVPYALMKANPLSWIQKVCFYKARAALVKSRDMHWSLLAQRGQRDVSLSSLRMLIVADGANPWSISSCDAFLNVFQSRGLRPEVICPCASSPEALTVAIRRPPDLGGPPPRKAVLSMNGLSYGVIRVDTEEKLSVLTVQDVGQVMPGANVCVVKLEGTPYLCKTDEVGEICVSSSATGTAYYGLLGITKNVFEAVPVTTGGAPIFDRPFTRTGLLGFIGPDNLVFIVGKLDGLMVTGVRRHNADDVVATALAVEPMKFVYRGRIAVFSVTVLHDDRIVLVAEQRPDASEEDSFQWMSRVLQAIDSIHQVGVYCLALVPANTLPKAPLGGIHISETKQRFLEGTLHPCNVLMCPHTCVTNLPKPRQKQPEVGPASMIVGNLVAGKRIAQASGRELAHLEDSDQARKFLFLADVLQWRAHTTPDHPLFLLLNAKGTVTSTATCVQLHKRAERVAAALMEKGRLSVGDHVALVYPPGVDLIAAFYGCLYCGCVPVTVRPPHPQNLGTTLPTVKMIVEVSKSACVLTTQAVTRLLRSKEAAAAVDIRTWPTILDTDDIPKKKIASVFRPPSPDVLAYLDFSVSTTGILAGVKMSHAATSALCRSIKLQCELYPSRQIAICLDPYCGLGFALWCLCSVYSGHQSVLVPPLELESNVSLWLSAVSQYKARVTFCSYSVMEMCTKGLGAQTGVLRMKGVNLSCVRTCMVVAEERPRIALTQSFSKLFKDLGLPARAVSTTFGCRVNVAICLQGTAGPDPTTVYVDMRALRHDRVRLVERGSPHSLPLMESGKILPGVKVIIAHTETKGPLGDSHLGEIWVSSPHNATGYYTVYGEEALHADHFSARLSFGDTQTIWARTGYLGFLRRTELTDASGGRHDALYVVGSLDETLELRGMRYHPIDIETSVIRAHRSIAECAVFTWTNLLVVVVELDGLEQDALDLVALVTNVVLEEHYLVVGVVVIVDPGVIPINSRGEKQRMHLRDGFLADQLDPIYVAYNM

SEQ ID NO: 24809 - protein, 1571 aa, Homo sapiens
  Payload ID: 4909
  Gene Symbol: DIP2A
  Gene Name: disco-interacting protein 2 homolog A
  Uniprot ID: Q14689
  ENSP ID: ENSP00000392066
MADRGCPLEAAPLPAEVRESLAELELELSEGDITQKGYEKKRAKLLARYIPLIQGIDPSLQAENRIPGPSQTTAAAPKQQKSRPTASRDERFRSDVHTEAVQAALAKYKERKMPMPSKRRSVLVHSSVETYTPPDTSSASEDEGSLRRPGRLTSTPLQSHSSVEPWLDRVIQGSSTSSSASSTSSHPGGRPTTAPSAAATPGAAATTALAGLEAHTHIDLHSAPPDVTTGLVEHSYFERPQVASVRSVPRGCSGSMLETADGVPVNSRVSSKIQQLLNTLKRPKRPPLKEFFVDDFEELLEVQQPDPNQPKPEGSETSVLRGEPLTAGVPRPPSLLATLQRWGTTQPKSPCLTALDTTGKAVYTLTYGKLWSRSLKLAYTLLNKLTSKNEPLLKPGDRVALVFPNSDPVMFMVAFYGCLLAELVPVPIEVPLTRKDAGSQQVGFLLGSCGVFLALTTDACQKGLPKAQTGEVAAFKGWPPLSWLVIDGKHLAKPPKDWHPLAQDTGTGTAYIEYKTSKEGSTVGVTVSHASLLAQCRALTQACGYSEAETLTNVLDFKRDAGLWHGVLTSVMNRMHVVSVPYALMKANPLSWIQKVCFYKARAALVKSRDMHWSLLAQRGQRDVSLSSLRMLIVADGANPWSISSCDAFLNVFQSRGLRPEVICPCASSPEALTVAIRRPPDLGGPPPRKAVLSMNGLSYGVIRVDTEEKLSVLTVQDVGQVMPGANVCVVKLEGTPYLCKTDEVGEICVSSSATGTAYYGLLGITKNVFEAVPVTTGGAPIFDRPFTRTGLLGFIGPDNLVFIVGKLDGLMVTGVRRHNADDVVATALAVEPMKFVYRGRIAVFSVTVLHDDRIVLVAEQRPDASEEDSFQWMSRVLQAIDSIHQVGVYCLALVPANTLPKAPLGGIHISETKQRFLEGTLHPCNVLMCPHTCVTNLPKPRQKQPEVGPASMIVGNLVAGKRIAQASGRELAHLEDSDQARKFLFLADVLQWRAHTTPDHPLFLLLNAKGTVTSTATCVQLHKRAERVAAALMEKGRLSVGDHVALVYPPGVDLIAAFYGCLYCGCVPVTVRPPHPQNLGTTLPTVKMIVEVSKSACVLTTQAVTRLLRSKEAAAAVDIRTWPTILDTDDIPKKKIASVFRPPSPDVLAYLDFSVSTTGILAGVKMSHAATSALCRSIKLQCELYPSRQIAICLDPYCGLGFALWCLCSVYSGHQSVLVPPLELESNVSLWLSAVSQYKARVTFCSYSVMEMCTKGLGAQTGVLRMKGVNLSCVRTCMVVAEERPRIALTQSFSKLFKDLGLPARAVSTTFGCRVNVAICLQGTAGPDPTTVYVDMRALRHDRVRLVERGSPHSLPLMESGKILPGVKVIIAHTETKGPLGDSHLGEIWVSSPHNATGYYTVYGEEALHADHFSARLSFGDTQTIWARTGYLGFLRRTELTDASGGRHDALYVVGSLDETLELRGMRYHPIDIETSVIRAHRSIAECAVFTWTNLLVVVVELDGLEQDALDLVALVTNVVLEEHYLVVGVVVIVDPGVIPINSRGEKQRMHLRDGFLADQLDPIYVAYNM

SEQ ID NO: 24810 - protein, 889 aa, Homo sapiens
  Payload ID: 4909
  Gene Symbol: DIP2A
  Gene Name: disco-interacting protein 2 homolog A
  Uniprot ID: Q14689
  ENSP ID: ENSP00000393434
MADRGCPLEAAPLPAEVRESLAELELELSEGDITQKGYEKKRAKLLARYIPLIQGIDPSLQAENRIPGPSQTTAAAPKQQKSRPTASRDERFRSDVHTEAVQAALAKYKERKMPMPSKRRSVLVHSSVETYTPPDTSSASEDEGSLRRPGRLTSTPLQSHSSVEPWLDRVIQGSSTSSSASSTSSHPGGRPTTAPSAAATPGAAATTALAGLEAHTHIDLHSAPPDVTTGLVEHSYFERPQVASVRSVPRGCSGSMLETADGVPVNSRVSSKIQQLLNTLKRPKRPPLKEFFVDDFEELLEVQQPDPNQPKPEGSETSVLRGEPLTAGVPRPPSLLATLQRWGTTQPKSPCLTALDTTGKAVYTLTYGKLWSRSLKLAYTLLNKLTSKNEPLLKPGDRVALVFPNSDPVMFMVAFYGCLLAELVPVPIEVPLTRKDAGSQQVGFLLGSCGVFLALTTDACQKGLPKAQTGEVAAFKGWPPLSWLVIDGKHLAKPPKDWHPLAQDTGTGTAYIEYKTSKEGSTVGVTVSHASLLAQCRALTQACGYSEAETLTNVLDFKRDAGLWHGVLTSVMNRMHVVSVPYALMKANPLSWIQKVCFYKARAALVKSRDMHWSLLAQRGQRDVSLSSLRMLIVADGANPWSISSCDAFLNVFQSRGLRPEVICPCASSPEALTVAIRRPPDLGGPPPRKAVLSMNGLSYGVIRVDTEEKLSVLTVQDVGQVMPGANVCVVKLEGTPYLCKTDEVGEICVSSSATGTAYYGLLGITKNVFEAVPVTTGGAPIFDRPFTRTGLLGFIGPDNLVFIVGKLDGLMVTGVRRHNADDVVATALAVEPMKFVYRGRIAVFSVTVLHDDRIVLVAEQRPDASEEDSFQWMSRVLQVGAPARPMVR

SEQ ID NO: 24811 - protein, 841 aa, Homo sapiens
  Payload ID: 4909
  Gene Symbol: DIP2A
  Gene Name: disco-interacting protein 2 homolog A
  Uniprot ID: Q14689
  ENSP ID: ENSP00000415089
MADRGCPLEAAPLPAEVRESLAELELELSEGDITQKGYEKKRAKLLARYIPLIQGIDPSLQAENRIPGPSQTTAAAPKQQKSRPTASRDERFRSDVHTEAVQAALAKYKERKMPMPSKRRSVLVHSSVETYTPPDTSSASEDEGSLRRPGRLTSTPLQSHSSVEPWLDRVIQGSSTSSSASSTSSHPGGRPTTAPSAAATPGAAATTALAGLEAHTHIDLHSAPPDVTTGLVEHSYFERPQVASVRSVPRGCSGSMLETADGVPVNSRVSSKIQQLLNTLKRPKRPPLKEFFVDDFEELLEVQQPDPNQPKPEGSETSVLRGEPLTAGVPRPPSLLATLQRWGTTQPKSPCLTALDTTGKAVYTLTYGKLWSRSLKLAYTLLNKLTSKNEPLLKPGDRVALVFPNSDPVMFMVAFYGCLLAELVPVPIEVPLTRKDAGSQQVGFLLGSCGVFLALTTDACQKGLPKAQTGEVAAFKGWPPLSWLVIDGKHLAKPPKDWHPLAQDTGTGTAYIEYKTSKEGSTVGVTVSHASLLAQCRALTQACGYSEAETLTNVLDFKRDAGLWHGVLTSVMNRMHVVSVPYALMKANPLSWIQKVCFYKARAALVKSRDMHWSLLAQRGQRDVSLSSLRMLIVADGANPWSISSCDAFLNVFQSRGLRPEVICPCASSPEALTVAIRRPPDLGGPPPRKAVLSMNGLSYGVIRVDTEEKLSVLTVQDVGQVMPGANVCVVKLEGTPYLCKTDEVGEICVSSSATGTAYYGLLGITKNVFEAVPVTTGGAPIFDRPFTRTGLLGFIGPDNLVFIVGKLDGLMVTGVRRHNADDVVATALAVEPMKFVYRGR

SEQ ID NO: 24812 - protein, 798 aa, Homo sapiens
  Payload ID: 4909
  Gene Symbol: DIP2A
  Gene Name: disco-interacting protein 2 homolog A
  Uniprot ID: Q14689
  ENSP ID: ENSP00000430249
MADRGCPLEAAPLPAEVRESLAELELELSEGDITQKGYEKKRAKLLARYIPLIQGIDPSLQAENRIPGPSQTTAAAPKQQKSRPTASRDERFRSDVHTEAVQAALAKYKERKMPMPSKRRSVLVHSSVETYTPPDTSSASEDEGSLRRPGRLTSTPLQSHSSVEPWLDRVIQGSSTSSSASSTSSHPGGRPTTAPSAAATPGAAATTALAGLEAHTHIGVPVNSRVSSKIQQLLNTLKRPKRPPLKEFFVDDFEELLEVQQPDPNQPKPEGSETSVLRGEPLTAGVPRPPSLLATLQRWGTTQPKSPCLTALDTTGKAVYTLTYGKLWSRSLKLAYTLLNKLTSKNEPLLKPGDRVALVFPNSDPVMFMVAFYGCLLAELVPVPIEVPLTRKDAGSQQVGFLLGSCGVFLALTTDACQKGLPKAQTGEVAAFKGWPPLSWLVIDGKHLAKPPKDWHPLAQDTGTGTAYIEYKTSKEGSTVGVTVSHASLLAQCRALTQACGYSEAETLTNVLDFKRDAGLWHGVLTSVMNRMHVVSVPYALMKANPLSWIQKVCFYKARAALVKSRDMHWSLLAQRGQRDVSLSSLRMLIVADGANPWSISSCDAFLNVFQSRGLRPEVICPCASSPEALTVAIRRPPDLGGPPPRKAVLSMNGLSYGVIRVDTEEKLSVLTVQDVGQVMPGANVCVVKLEGTPYLCKTDEVGEICVSSSATGTAYYGLLGITKNVFEAVPVTTGGAPIFDRPFTRTGLLGFIGPDNLVFIVGKLDGLMVTGVRRHNADDVVATALAVEPMKFVYRGR

SEQ ID NO: 24813 - protein, 1576 aa, Homo sapiens
  Payload ID: 4910
  Gene Symbol: DIP2B
  Gene Name: disco-interacting protein 2 homolog B
  Uniprot ID: Q9P265
  ENSP ID: ENSP00000301180
MAERGLEPSPAAVAALPPEVRAQLAELELELSEGDITQKGYEKKRSKLLSPYSPQTQETDSAVQKELRNQTPAPSAAQTSAPSKYHRTRSGGARDERYRSDIHTEAVQAALAKHKEQKMALPMPTKRRSTFVQSPADACTPPDTSSASEDEGSLRRQAALSAALQQSLQNAESWINRSIQGSSTSSSASSTLSHGEVKGTSGSLADVFANTRIENFSAPPDVTTTTSSSSSSSSIRPANIDLPPSGIVKGMHKGSNRSSLMDTADGVPVSSRVSTKIQQLLNTLKRPKRPPLKEFFVDDSEEIVEVPQPDPNQPKPEGRQMTPVKGEPLGVICNWPPALESALQRWGTTQAKCSCLTALDMTGKPVYTLTYGKLWSRSLKLAYTLLNKLGTKNEPVLKPGDRVALVYPNNDPVMFMVAFYGCLLAEVIPVPIEVPLTRKDAGGQQIGFLLGSCGIALALTSEVCLKGLPKTQNGEIVQFKGWPRLKWVVTDSKYLSKPPKDWQPHISPAGTEPAYIEYKTSKEGSVMGVTVSRLAMLSHCQALSQACNYSEGETIVNVLDFKKDAGLWHGMFANVMNKMHTISVPYSVMKTCPLSWVQRVHAHKAKVALVKCRDLHWAMMAHRDQRDVSLSSLRMLIVTDGANPWSVSSCDAFLSLFQSHGLKPEAICPCATSAEAMTVAIRRPGVPGAPLPGRAILSMNGLSYGVIRVNTEDKNSALTVQDVGHVMPGGMMCIVKPDGPPQLCKTDEIGEICVSSRTGGMMYFGLAGVTKNTFEVIPVNSAGSPVGDVPFIRSGLLGFVGPGSLVFVVGKMDGLLMVSGRRHNADDIVATGLAVESIKTVYRGRIAVFSVSVFYDERIVVVAEQRPDASEEDSFQWMSRVLQAIDSIHQVGVYCLALVPANTLPKTPLGGIHISQTKQLFLEGSLHPCNILMCPHTCVTNLPKPRQKQPGVGPASVMVGNLVAGKRIAQAAGRDLGQIEENDLVRKHQFLAEILQWRAQATPDHVLFMLLNAKGTTVCTASCLQLHKRAERIASVLGDKGHLNAGDNVVLLYPPGIELIAAFYGCLYAGCIPVTVRPPHAQNLTATLPTVRMIVDVSKAACILTSQTLMRLLRSREAAAAVDVKTWPTIIDTDDLPRKRLPQLYKPPTPEMLAYLDFSVSTTGMLTGVKMSHSAVNALCRAIKLQCELYSSRQIAICLDPYCGLGFALWCLCSVYSGHQSVLIPPMELENNLFLWLSTVNQYKIRDTFCSYSVMELCTKGLGNQVEVLKTRGINLSCVRTCVVVAEERPRVALQQSFSKLFKDIGLSPRAVSTTFGSRVNVAICLQGTSGPDPTTVYVDLKSLRHDRVRLVERGAPQSLLLSESGKILPGVKVVIVNPETKGPVGDSHLGEIWVNSPHTASGYYTIYDSETLQADHFNTRLSFGDAAQTLWARTGYLGFVRRTELTAATGERHDALYVVGALDETLELRGLRYHPIDIETSVSRIHRSIAECAVFTWTNLLVVVVELCGSEQEALDLVPLVTNVVLEEHYLIVGVVVVVDPGVIPINSRGEKQRMHLRDSFLADQLDPIYVAYNM

SEQ ID NO: 24814 - protein, 64 aa, Homo sapiens
  Payload ID: 4910
  Gene Symbol: DIP2B
  Gene Name: disco-interacting protein 2 homolog B
  ENSP ID: ENSP00000450181
  MOD_RES (1)..(1): Any amino acid
XALTSEVCLKGLPKTQNGEIVQFKGWPRLKWVVTDSKYLSKPPKDWQPHISPAGTEPAYIEGKQ

SEQ ID NO: 24815 - protein, 1556 aa, Homo sapiens
  Payload ID: 4911
  Gene Symbol: DIP2C
  Gene Name: disco-interacting protein 2 homolog C
  Uniprot ID: Q9Y2E4
  ENSP ID: ENSP00000280886
MADRSLEGMALPLEVRARLAELELELSEGDITQKGYEKKRSKLIGAYLPQPPRVDQALPQERRAPVTPSSASRYHRRRSSGSRDERYRSDVHTEAVQAALAKHKERKMAVPMPSKRRSLVVQTSMDAYTPPDTSSGSEDEGSVQGDSQGTPTSSQGSINMEHWISQAIHGSTTSTTSSSSTQSGGSGAAHRLADVMAQTHIENHSAPPDVTTYTSEHSIQVERPQGSTGSRTAPKYGNAELMETGDGVPVSSRVSAKIQQLVNTLKRPKRPPLREFFVDDFEELLEVQQPDPNQPKPEGAQMLAMRGEQLGVVTNWPPSLEAALQRWGTISPKAPCLTTMDTNGKPLYILTYGKLWTRSMKVAYSILHKLGTKQEPMVRPGDRVALVFPNNDPAAFMAAFYGCLLAEVVPVPIEVPLTRKDAGSQQIGFLLGSCGVTVALTSDACHKGLPKSPTGEIPQFKGWPKLLWFVTESKHLSKPPRDWFPHIKDANNDTAYIEYKTCKDGSVLGVTVTRTALLTHCQALTQACGYTEAETIVNVLDFKKDVGLWHGILTSVMNMMHVISIPYSLMKVNPLSWIQKVCQYKAKVACVKSRDMHWALVAHRDQRDINLSSLRMLIVADGANPWSISSCDAFLNVFQSKGLRQEVICPCASSPEALTVAIRRPTDDSNQPPGRGVLSMHGLTYGVIRVDSEEKLSVLTVQDVGLVMPGAIMCSVKPDGVPQLCRTDEIGELCVCAVATGTSYYGLSGMTKNTFEVFPMTSSGAPISEYPFIRTGLLGFVGPGGLVFVVGKMDGLMVVSGRRHNADDIVATALAVEPMKFVYRGRIAVFSVTVLHDERIVIVAEQRPDSTEEDSFQWMSRVLQAIDSIHQVGVYCLALVPANTLPKTPLGGIHLSETKQLFLEGSLHPCNVLMCPHTCVTNLPKPRQKQPEIGPASVMVGNLVSGKRIAQASGRDLGQIEDNDQARKFLFLSEVLQWRAQTTPDHILYTLLNCRGAIANSLTCVQLHKRAEKIAVMLMERGHLQDGDHVALVYPPGIDLIAAFYGCLYAGCVPITVRPPHPQNIATTLPTVKMIVEVSRSACLMTTQLICKLLRSREAAAAVDVRTWPLILDTDDLPKKRPAQICKPCNPDTLAYLDFSVSTTGMLAGVKMSHAATSAFCRSIKLQCELYPSREVAICLDPYCGLGFVLWCLCSVYSGHQSILIPPSELETNPALWLLAVSQYKVRDTFCSYSVMELCTKGLGSQTESLKARGLDLSRVRTCVVVAEERPRIALTQSFSKLFKDLGLHPRAVSTSFGCRVNLAICLQGTSGPDPTTVYVDMRALRHDRVRLVERGSPHSLPLMESGKILPGVRIIIANPETKGPLGDSHLGEIWVHSAHNASGYFTIYGDESLQSDHFNSRLSFGDTQTIWARTGYLGFLRRTELTDANGERHDALYVVGALDEAMELRGMRYHPIDIETSVIRAHKSVTECAVFTWTNLLVVVVELDGSEQEALDLVPLVTNVVLEEHYLIVGVVVVVDIGVIPINSRGEKQRMHLRDGFLADQLDPIYVAYNM

SEQ ID NO: 24816 - protein, 1537 aa, Homo sapiens
  Payload ID: 4911
  Gene Symbol: DIP2C
  Gene Name: disco-interacting protein 2 homolog C
  ENSP ID: ENSP00000370907
TELHFPSLAGDITQKGYEKKRSKLIGAYLPQPPRVDQALPQERRAPVTPSSASRYHRRRSSGSRDERYRSDVHTEAVQAALAKHKERKMAVPMPSKRRSLVVQTSMDAYTPPDTSSGSEDEGSVQGDSQGTPTSSQGSINMEHWISQAIHGSTTSTTSSSSTQSGGSGAAHRLADVMAQTHIENHSAPPDVTTYTSEHSIQVERPQGSTGSRTAPKYGNAELMETGDGVPVSSRVSAKIQQLVNTLKRPKRPPLREFFVDDFEELLEVQQPDPNQPKPEGAQMLAMRGEQLGVVTNWPPSLEAALQRWGTISPKAPCLTTMDTNGKPLYILTYGKLWTRSMKVAYSILHKLGTKQEPMVRPGDRVALVFPNNDPAAFMAAFYGCLLAEVVPVPIEVPLTRKDAGSQQIGFLLGSCGVTVALTSDACHKGLPKSPTGEIPQFKGWPKLLWFVTESKHLSKPPRDWFPHIKDANNDTAYIEYKTCKDGSVLGVTVTRTALLTHCQALTQACGYTEAETIVNVLDFKKDVGLWHGILTSVMNMMHVISIPYSLMKVNPLSWIQKVCQYKAKVACVKSRDMHWALVAHRDQRDINLSSLRMLIVADGANPWSISSCDAFLNVFQSKGLRQEVICPCASSPEALTVAIRRPTDDSNQPPGRGVLSMHGLTYGVIRVDSEEKLSVLTVQDVGLVMPGAIMCSVKPDGVPQLCRTDEIGELCVCAVATGTSYYGLSGMTKNTFEVFPMTSSGAPISEYPFIRTGLLGFVGPGGLVFVVGKMDGLMVVSGRRHNADDIVATALAVEPMKFVYRGRIAVFSVTVLHDERIVIVAEQRPDSTEEDSFQWMSRVLQAIDSIHQVGVYCLALVPANTLPKTPLGGIHLSETKQLFLEGSLHPCNVLMCPHTCVTNLPKPRQKQPEIGPASVMVGNLVSGKRIAQASGRDLGQIEDNDQARKFLFLSEVLQWRAQTTPDHILYTLLNCRGAIANSLTCVQLHKRAEKIAVMLMERGHLQDGDHVALVYPPGIDLIAAFYGCLYAGCVPITVRPPHPQNIATTLPTVKMIVEVSRSACLMTTQLICKLLRSREAAAAVDVRTWPLILDTDDLPKKRPAQICKPCNPDTLAYLDFSVSTTGMLAGVKMSHAATSAFCRSIKLQCELYPSREVAICLDPYCGLGFVLWCLCSVYSGHQSILIPPSELETNPALWLLAVSQYKVRDTFCSYSVMELCTKGLGSQTESLKARGLDLSRVRTCVVVAEERPRIALTQSFSKLFKDLGLHPRAVSTSFGCRVNLAICLQGTSGPDPTTVYVDMRALRHDRVRLVERGSPHSLPLMESGKILPGVRIIIANPETKGPLGDSHLGEIWVHSAHNASGYFTIYGDESLQSDHFNSRLSFGDTQTIWARTGYLGFLRRTELTDANGERHDALYVVGALDEAMELRGMRYHPIDIETSVIRAHKSVTECAVFTWTNLLVVVVELDGSEQEALDLVPLVTNVVLEEHYLIVGVVVVVDIGVIPINSRGEKQRMHLRDGFLADQLDPIYVAYNM

SEQ ID NO: 24817 - protein, 240 aa, Homo sapiens
  Payload ID: 4911
  Gene Symbol: DIP2C
  Gene Name: disco-interacting protein 2 homolog C
  ENSP ID: ENSP00000397571
  MOD_RES (1)..(1): Any amino acid
XTQACGYTEAETIVNVLDFKKDVGLWHGILTSVMNMMHVISIPYSLMKVNPLSWIQKVCQYKAKVACVKSRDMHWALVAHRDQRDINLSSLRMLIVADGANPWSISSCDAFLNVFQSKGLRQEVICPCASSPEALTVAIRRPTDDSNQPPGRGVLSMHGLTYGVIRVDSEEKLSVLTVQDVGLVMPGAIMCSVKPDGVPQLCRTDEIGELCVCAVATGTSYYGLSGMTKNTFEHTSNKGK

SEQ ID NO: 24818 - protein, 130 aa, Homo sapiens
  Payload ID: 4911
  Gene Symbol: DIP2C
  Gene Name: disco-interacting protein 2 homolog C
  ENSP ID: ENSP00000414462
  MOD_RES (1)..(1): Any amino acid
XVSQYKVRDTFCSYSVMELCTKGLGSQTESLKARGLDLSRVRTCVVVAEERPRIALTQSFSKLFKDLGLHPRAVSTSFGCRVNLAICLQCWDYRHEPPRPAPKCFKMVYKEGVRSVGEDKIREKRTKTWR

SEQ ID NO: 24819 - protein, 1622 aa, Homo sapiens
  Payload ID: 4911
  Gene Symbol: DIP2C
  Gene Name: disco-interacting protein 2 homolog C
  ENSP ID: ENSP00000489203
MADRSLEGMALPLEVRARLAELELELSEGDITQKGYEKKRSKLIGAYLPQPPTANGAAVVRCRLQHSEGAPRRTFRSAHIGVCDVREAAARERVASTAGNRPLFYFRFGVDQALPQERRAPVTPSSASRYHRRRSSGSRDERYRSDVHTEAVQAALAKHKERKMAVPMPSKRRSLVVQTSMDAYTPPDTSSGSEDEGSVQGDSQGTPTSSQGSINMEHWISQAIHGSTTSTTSSSSTQSGGSGAAHRLADVMAQTHIENHSAPPDVTTYTSEHSIQVERPQGSTGSRTAPKYGNAELMETGDGVPVSSRVSAKIQQLVNTLKRPKRPPLREFFVDDFEELLEVQQPDPNQPKPEGAQMLAMRGEQLGVVTNWPPSLEAALQRWGTISPKAPCLTTMDTNGKPLYILTYGKLWTRSMKVAYSILHKLGTKQEPMVRPGDRVALVFPNNDPAAFMAAFYGCLLAEVVPVPIEVPLTRKDAGSQQIGFLLGSCGVTVALTSDACHKGLPKSPTGEIPQFKGWPKLLWFVTESKHLSKPPRDWFPHIKDANNDTAYIEYKTCKDGSVLGVTVTRTALLTHCQALTQACGYTEAETIVNVLDFKKDVGLWHGILTSVMNMMHVISIPYSLMKVNPLSWIQKVCQYKAKVACVKSRDMHWALVAHRDQRDINLSSLRMLIVADGANPWSISSCDAFLNVFQSKGLRQEVICPCASSPEALTVAIRRPTDDSNQPPGRGVLSMHGLTYGVIRVDSEEKLSVLTVQDVGLVMPGAIMCSVKPDGVPQLCRTDEIGELCVCAVATGTSYYGLSGMTKNTFEVFPMTSSGAPISEYPFIRTGLLGFVGPGGLVFVVGKMDGLMVVSGRRHNADDIVATALAVEPMKFVYRGRIAVFSVTVLHDERIVIVAEQRPDSTEEDSFQWMSRVLQAIDSIHQVGVYCLALVPANTLPKTPLGGIHLSETKQLFLEGSLHPCNVLMCPHTCVTNLPKPRQKQPEIGPASVMVGNLVSGKRIAQASGRDLGQIEDNDQARKFLFLSEVLQWRAQTTPDHILYTLLNCRGAIANSLTCVQLHKRAEKIAVMLMERGHLQDGDHVALVYPPGIDLIAAFYGCLYAGCVPITVRPPHPQNIATTLPTVKMIVEVSRSACLMTTQLICKLLRSREAAAAVDVRTWPLILDTDDLPKKRPAQICKPCNPDTLAYLDFSVSTTGMLAGVKMSHAATSAFCRSIKLQCELYPSREVAICLDPYCGLGFVLWCLCSVYSGHQSILIPPSELETNPALWLLAVSQYKVRDTFCSYSVMELCTKGLGSQTESLKARGLDLSRVRTCVVVAEERPRIALTQSFSKLFKDLGLHPRAVSTSFGCRVNLAICLQPHRLWTLAEQGTSGPDPTTVYVDMRALRHDRVRLVERGSPHSLPLMESGKILPGVRIIIANPETKGPLGDSHLGEIWVHSAHNASGYFTIYGDESLQSDHFNSRLSFGDTQTIWARTGYLGFLRRTELTDANGERHDALYVVGALDEAMELRGMRYHPIDIETSVIRAHKSVTECAVFTWTNLLVVVVELDGSEQEALDLVPLVTNVVLEEHYLIVGVVVVVDIGVIPINSRGEKQRMHLRDGFLADQLDPIYVAYNM

SEQ ID NO: 24820 - protein, 977 aa, Homo sapiens
  Payload ID: 4912
  Gene Symbol: DLGAP1
  Gene Name: discs, large (Drosophila) homolog-associated protein 1
  Uniprot ID: O14490
  ENSP ID: ENSP00000316377
MKGLSGSRSHHHGVTCDSACDSLSHHSDRKPYLLSPVEHHPADHPYYTQRNSFQAECVGPFSDPLASSTFPRRHYTSQQELKDECALVPRTLATKANRIPANLLDQFERQLPLSRDGYHTLQYKRTAVEHRSDSPGRIRHLVHSVQKLFTKSHSLEGPSKGSVNGGKASPDEAQAARYGKRSKSKERRAEPKARPSTSPGWWSSDDNLDGDMCIYHAPSGVMTMGRCPDRSASQYFLEAYNTISEQAVKASRSNNDVKCSTCANLPVSLDTPLLKKSAWSSTLTVSRAREVYQKASVNMDQAMVKSESCQQERSCQYLQVPQDEWTGYTPRGKDDEIPCRRMRSGSYIKAMGDEDSGDSDTSPKPSPKVAARRESYLKATQPSLTELTTLKISNEHSPKLQIRSHSYLRAVSEVSINRSLDSLDPAGLLTSPKFRSRNESYMRAMSTISQVSEMEVNGQFESVCESVFSELESQAVEALDLPMPGCFRMRSHSYVRAIEKGCSQDDECVSLRSSSPPRTTTTVRTIQSSTVSSCITTYKKTPPPVPPRTTTKPFISITAQSSTESAQDAYMDGQGQRGDIISQSGLSNSTESLDSMKALTAAIEAANAQIHGPASQHMGNNTATVTTTTTIATVTTEDRKKDHFKKNRCLSIGIQVDDAEEPDKTGENKAPSKFQSVGVQVEEEKCFRRFTRSNSVTTAVQADLDFHDNLENSLESIEDNSCPGPMARQFSRDASTSTVSIQGSGNHYHACAADDDFDTDFDPSILPPPDPWIDSITEDPLEAVQRSVCHRDGHWFLKLLQAERDRMEGWCQQMEREERENNLPEDILGKIRTAVGSAQLLMAQKFYQFRELCEENLNPNAHPRPTSQDLAGFWDMLQLSIENISMKFDELHQLKANNWKQMDPLDKKERRAPPPVPKKPAKGPAPLIRERSLESSQRQEARKRLMAAKRAASVRQNSATESAESIEIYIPEAQTRL

SEQ ID NO: 24821 - protein, 627 aa, Homo sapiens
  Payload ID: 4912
  Gene Symbol: DLGAP1
  Gene Name: discs, large (Drosophila) homolog-associated protein 1
  Uniprot ID: O14490
  ENSP ID: ENSP00000383010
MNLIFHKDILFGIPANKVPQDEWTGYTPRGKDDEIPCRRMRSGSYIKAMGDEDSGDSDTSPKPSPKVAARRESYLKATQPSLTELTTLKISNEHSPKLQIRSHSYLRAVSEVSINRSLDSLDPAGLLTSPKFRSRNESYMRAMSTISQVSEMEVNGQFESVCESVFSELESQAVEALDLPMPGCFRMRSHSYVRAIEKGCSQDDECVSLRSSSPPRTTTTVRTIQSSTVSSCITTYKKTPPPVPPRTTTKPFISITAQSSTESAQDAYMDGQGQRGDIISQSGLSNSTESLDSMKALTAAIEAANAQIHGPASQHMGNNTATVTTTTTIATVTTEDRKKDHFKKNRCLSIGIQVDDAEEPDKTGENKAPSKFQSVGVQVEEEKCFRRFTRSNSVTTAVQADLDFHDNLENSLESIEDNSCPGPMARQFSRDASTSTVSIQGSGNHYHACAADDDFDTDFDPSILPPPDPWIDSITEDPLEAVQRSVCHRDGHWFLKLLQAERDRMEGWCQQMEREERENNLPEDILGKIRTAVGSAQLLMAQKFYQFRELCEENLNPNAHPRPTSQDLAGFWDMLQLSIENISMKFDELHQLKANNWKQMDPLDKKVEQCRFCMVHLKTCTNTGQSK

SEQ ID NO: 24822 - protein, 675 aa, Homo sapiens
  Payload ID: 4912
  Gene Symbol: DLGAP1
  Gene Name: discs, large (Drosophila) homolog-associated protein 1
  Uniprot ID: O14490
  ENSP ID: ENSP00000383011
MNLIFHKDILFGIPANKVPQDEWTGYTPRGKDDEIPCRRMRSGSYIKAMGDEDSGDSDTSPKPSPKVAARRESYLKATQPSLTELTTLKISNEHSPKLQIRSHSYLRAVSEVSINRSLDSLDPAGLLTSPKFRSRNESYMRAMSTISQVSEMEVNGQFESVCESVFSELESQAVEALDLPMPGCFRMRSHSYVRAIEKGCSQDDECVSLRSSSPPRTTTTVRTIQSSTVSSCITTYKKTPPPVPPRTTTKPFISITAQSSTESAQDAYMDGQGQRGDIISQSGLSNSTESLDSMKALTAAIEAANAQIHGPASQHMGNNTATVTTTTTIATVTTEDRKKDHFKKNRCLSIGIQVDDAEEPDKTGENKAPSKFQSVGVQVEEEKCFRRFTRSNSVTTAVQADLDFHDNLENSLESIEDNSCPGPMARQFSRDASTSTVSIQGSGNHYHACAADDDFDTDFDPSILPPPDPWIDSITEDPLEAVQRSVCHRDGHWFLKLLQAERDRMEGWCQQMEREERENNLPEDILGKIRTAVGSAQLLMAQKFYQFRELCEENLNPNAHPRPTSQDLAGFWDMLQLSIENISMKFDELHQLKANNWKQMDPLDKKERRAPPPVPKKPAKGPAPLIRERSLESSQRQEARKRLMAAKRAASVRQNSATESAESIEIYIPEAQTRL

SEQ ID NO: 24823 - protein, 667 aa, Homo sapiens
  Payload ID: 4912
  Gene Symbol: DLGAP1
  Gene Name: discs, large (Drosophila) homolog-associated protein 1
  ENSP ID: ENSP00000383013
MIDLFKAEWVSSVCVQVSRNGRTDQVWVPQDEWTGYTPRGKDDEIPCRRMRSGSYIKAMGDEDSGDSDTSPKPSPKVAARRESYLKATQPSLTELTTLKISNEHSPKLQIRSHSYLRAVSEVSINRSLDSLDPAGLLTSPKFRSRNESYMRAMSTISQVSEMEVNGQFESVCESVFSELESQAVEALDLPMPGCFRMRSHSYVRAIEKGCSQDDECVSLRSSSPPRTTTTVRTIQSSTGVIKLSSAVEAQSSTESAQDAYMDGQGQRGDIISQSGLSNSTESLDSMKALTAAIEAANAQIHGPASQHMGNNTATVTTTTTIATVTTEDRKKDHFKKNRCLSIGIQVDDAEEPDKTGENKAPSKFQSVGVQVEEEKCFRRFTRSNSVTTAVQADLDFHDNLENSLESIEDNSCPGPMARQFSRDASTSTVSIQGSGNHYHACAADDDFDTDFDPSILPPPDPWIDSITEDPLEAVQRSVCHRDGHWFLKLLQAERDRMEGWCQQMEREERENNLPEDILGKIRTAVGSAQLLMAQKFYQFRELCEENLNPNAHPRPTSQDLAGFWDMLQLSIENISMKFDELHQLKANNWKQMDPLDKKERRAPPPVPKKPAKGPAPLIRERSLESSQRQEARKRLMAAKRAASVRQNSATESAESIEIYIPEAQTRL

SEQ ID NO: 24824 - protein, 693 aa, Homo sapiens
  Payload ID: 4912
  Gene Symbol: DLGAP1
  Gene Name: discs, large (Drosophila) homolog-associated protein 1
  ENSP ID: ENSP00000383014
MIDLFKAEWVSSVCVQVSRNGRTDQVPQDEWTGYTPRGKDDEIPCRRMRSGSYIKAMGDEDSGDSDTSPKPSPKVAARRESYLKATQPSLTELTTLKISNEHSPKLQIRSHSYLRAVSEVSINRSLDSLDPAGLLTSPKFRSRNESYMRAMSTISQVSEMEVNGQFESVCESVFSELESQAVEALDLPMPGCFRMRSHSYVRAIEKGCSQDDECVSLRSSSPPRTTTTVRTIQSSTGVIKLSSAVEVSSCITTYKKTPPPVPPRTTTKPFISITAQSSTESAQDAYMDGQGQRGDIISQSGLSNSTESLDSMKALTAAIEAANAQIHGPASQHMGNNTATVTTTTTIATVTTEDRKKDHFKKNRCLSIGIQVDDAEEPDKTGENKAPSKFQSVGVQVEEEKCFRRFTRSNSVTTAVQADLDFHDNLENSLESIEDNSCPGPMARQFSRDASTSTVSIQGSGNHYHACAADDDFDTDFDPSILPPPDPWIDSITEDPLEAVQRSVCHRDGHWFLKLLQAERDRMEGWCQQMEREERENNLPEDILGKIRTAVGSAQLLMAQKFYQFRELCEENLNPNAHPRPTSQDLAGFWDMLQLSIENISMKFDELHQLKANNWKQMDPLDKKERRAPPPVPKKPAKGPAPLIRERSLESSQRQEARKRLMAAKRAASVRQNSATESAESIEIYIPEAQTRL

SEQ ID NO: 24825 - protein, 683 aa, Homo sapiens
  Payload ID: 4912
  Gene Symbol: DLGAP1
  Gene Name: discs, large (Drosophila) homolog-associated protein 1
  Uniprot ID: O14490
  ENSP ID: ENSP00000383019
MIDLFKAEWVSSVCVQVSRNGRTDQVPQDEWTGYTPRGKDDEIPCRRMRSGSYIKAMGDEDSGDSDTSPKPSPKVAARRESYLKATQPSLTELTTLKISNEHSPKLQIRSHSYLRAVSEVSINRSLDSLDPAGLLTSPKFRSRNESYMRAMSTISQVSEMEVNGQFESVCESVFSELESQAVEALDLPMPGCFRMRSHSYVRAIEKGCSQDDECVSLRSSSPPRTTTTVRTIQSSTVSSCITTYKKTPPPVPPRTTTKPFISITAQSSTESAQDAYMDGQGQRGDIISQSGLSNSTESLDSMKALTAAIEAANAQIHGPASQHMGNNTATVTTTTTIATVTTEDRKKDHFKKNRCLSIGIQVDDAEEPDKTGENKAPSKFQSVGVQVEEEKCFRRFTRSNSVTTAVQADLDFHDNLENSLESIEDNSCPGPMARQFSRDASTSTVSIQGSGNHYHACAADDDFDTDFDPSILPPPDPWIDSITEDPLEAVQRSVCHRDGHWFLKLLQAERDRMEGWCQQMEREERENNLPEDILGKIRTAVGSAQLLMAQKFYQFRELCEENLNPNAHPRPTSQDLAGFWDMLQLSIENISMKFDELHQLKANNWKQMDPLDKKERRAPPPVPKKPAKGPAPLIRERSLESSQRQEARKRLMAAKRAASVRQNSATESAESIEIYIPEAQTRL

SEQ ID NO: 24826 - protein, 661 aa, Homo sapiens
  Payload ID: 4912
  Gene Symbol: DLGAP1
  Gene Name: discs, large (Drosophila) homolog-associated protein 1
  Uniprot ID: O14490
  ENSP ID: ENSP00000437817
MDLKTLKLFNSQLRCGWLLYIWNKAFMAHLRVPQDEWTGYTPRGKDDEIPCRRMRSGSYIKAMGDEDSGDSDTSPKPSPKVAARRESYLKATQPSLTELTTLKISNEHSPKLQIRSHSYLRAVSEVSINRSLDSLDPAGLLTSPKFRSRNESYMRAMSTISQVSEMEVNGQFESVCESVFSELESQAVEALDLPMPGCFRMRSHSYVRAIEKGCSQDDECVSLRSSSPPRTTTTVRTIQSSTAQSSTESAQDAYMDGQGQRGDIISQSGLSNSTESLDSMKALTAAIEAANAQIHGPASQHMGNNTATVTTTTTIATVTTEDRKKDHFKKNRCLSIGIQVDDAEEPDKTGENKAPSKFQSVGVQVEEEKCFRRFTRSNSVTTAVQADLDFHDNLENSLESIEDNSCPGPMARQFSRDASTSTVSIQGSGNHYHACAADDDFDTDFDPSILPPPDPWIDSITEDPLEAVQRSVCHRDGHWFLKLLQAERDRMEGWCQQMEREERENNLPEDILGKIRTAVGSAQLLMAQKFYQFRELCEENLNPNAHPRPTSQDLAGFWDMLQLSIENISMKFDELHQLKANNWKQMDPLDKKERRAPPPVPKKPAKGPAPLIRERSLESSQRQEARKRLMAAKRAASVRQNSATESAESIEIYIPEAQTRL

SEQ ID NO: 24827 - protein, 699 aa, Homo sapiens
  Payload ID: 4912
  Gene Symbol: DLGAP1
  Gene Name: discs, large (Drosophila) homolog-associated protein 1
  ENSP ID: ENSP00000445973
MDLKTLKLFNSQLRCGWLLYIWNKAFMAHLRVPQDEWTGYTPRGKDDEIPCRRMRSGSYIKAMGDEDSGDSDTSPKPSPKVAARRESYLKATQPSLTELTTLKISNEHSPKLQIRSHSYLRAVSEVSINRSLDSLDPAGLLTSPKFRSRNESYMRAMSTISQVSEMEVNGQFESVCESVFSELESQAVEALDLPMPGCFRMRSHSYVRAIEKGCSQDDECVSLRSSSPPRTTTTVRTIQSSTGVIKLSSAVEVSSCITTYKKTPPPVPPRTTTKPFISITAQSSTESAQDAYMDGQGQRGDIISQSGLSNSTESLDSMKALTAAIEAANAQIHGPASQHMGNNTATVTTTTTIATVTTEDRKKDHFKKNRCLSIGIQVDDAEEPDKTGENKAPSKFQSVGVQVEEEKCFRRFTRSNSVTTAVQADLDFHDNLENSLESIEDNSCPGPMARQFSRDASTSTVSIQGSGNHYHACAADDDFDTDFDPSILPPPDPWIDSITEDPLEAVQRSVCHRDGHWFLKLLQAERDRMEGWCQQMEREERENNLPEDILGKIRTAVGSAQLLMAQKFYQFRELCEENLNPNAHPRPTSQDLAGFWDMLQLSIENISMKFDELHQLKANNWKQMDPLDKKERRAPPPVPKKPAKGPAPLIRERSLESSQRQEARKRLMAAKRAASVRQNSATESAESIEIYIPEAQTRL

SEQ ID NO: 24828 - protein, 685 aa, Homo sapiens
  Payload ID: 4912
  Gene Symbol: DLGAP1
  Gene Name: discs, large (Drosophila) homolog-associated protein 1
  Uniprot ID: O14490
  ENSP ID: ENSP00000446312
MNLIFHKDILFGIPANKVPQDEWTGYTPRGKDDEIPCRRMRSGSYIKAMGDEDSGDSDTSPKPSPKVAARRESYLKATQPSLTELTTLKISNEHSPKLQIRSHSYLRAVSEVSINRSLDSLDPAGLLTSPKFRSRNESYMRAMSTISQVSEMEVNGQFESVCESVFSELESQAVEALDLPMPGCFRMRSHSYVRAIEKGCSQDDECVSLRSSSPPRTTTTVRTIQSSTGVIKLSSAVEVSSCITTYKKTPPPVPPRTTTKPFISITAQSSTESAQDAYMDGQGQRGDIISQSGLSNSTESLDSMKALTAAIEAANAQIHGPASQHMGNNTATVTTTTTIATVTTEDRKKDHFKKNRCLSIGIQVDDAEEPDKTGENKAPSKFQSVGVQVEEEKCFRRFTRSNSVTTAVQADLDFHDNLENSLESIEDNSCPGPMARQFSRDASTSTVSIQGSGNHYHACAADDDFDTDFDPSILPPPDPWIDSITEDPLEAVQRSVCHRDGHWFLKLLQAERDRMEGWCQQMEREERENNLPEDILGKIRTAVGSAQLLMAQKFYQFRELCEENLNPNAHPRPTSQDLAGFWDMLQLSIENISMKFDELHQLKANNWKQMDPLDKKERRAPPPVPKKPAKGPAPLIRERSLESSQRQEARKRLMAAKRAASVRQNSATESAESIEIYIPEAQTRL

SEQ ID NO: 24829 - protein, 683 aa, Homo sapiens; identical to SEQ ID NO: 24825
  Payload ID: 4912
  Gene Symbol: DLGAP1
  Gene Name: discs, large (Drosophila) homolog-associated protein 1
  Uniprot ID: O14490
  ENSP ID: ENSP00000462848

SEQ ID NO: 24830 - protein, 977 aa, Homo sapiens; identical to SEQ ID NO: 24820
  Payload ID: 4912
  Gene Symbol: DLGAP1
  Gene Name: discs, large (Drosophila) homolog-associated protein 1
  Uniprot ID: O14490
  ENSP ID: ENSP00000462882

SEQ ID NO: 24831 - protein, 929 aa, Homo sapiens
  Payload ID: 4912
  Gene Symbol: DLGAP1
  Gene Name: discs, large (Drosophila) homolog-associated protein 1
  Uniprot ID: O14490
  ENSP ID: ENSP00000463864
MKGLSGSRSHHHGVTCDSACDSLSHHSDRKPYLLSPVEHHPADHPYYTQRNSFQAECVGPFSDPLASSTFPRRHYTSQQELKDECALVPRTLATKANRIPANLLDQFERQLPLSRDGYHTLQYKRTAVEHRSDSPGRIRHLVHSVQKLFTKSHSLEGPSKGSVNGGKASPDEAQAARYGKRSKSKERRAEPKARPSTSPGWWSSDDNLDGDMCIYHAPSGVMTMGRCPDRSASQYFLEAYNTISEQAVKASRSNNDVKCSTCANLPVSLDTPLLKKSAWSSTLTVSRAREVYQKASVNMDQAMVKSESCQQERSCQYLQVPQDEWTGYTPRGKDDEIPCRRMRSGSYIKAMGDEDSGDSDTSPKPSPKVAARRESYLKATQPSLTELTTLKISNEHSPKLQIRSHSYLRAVSEVSINRSLDSLDPAGLLTSPKFRSRNESYMRAMSTISQVSEMEVNGQFESVCESVFSELESQAVEALDLPMPGCFRMRSHSYVRAIEKGCSQDDECVSLRSSSPPRTTTTVRTIQSSTVSSCITTYKKTPPPVPPRTTTKPFISITAQSSTESAQDAYMDGQGQRGDIISQSGLSNSTESLDSMKALTAAIEAANAQIHGPASQHMGNNTATVTTTTTIATVTTEDRKKDHFKKNRCLSIGIQVDDAEEPDKTGENKAPSKFQSVGVQVEEEKCFRRFTRSNSVTTAVQADLDFHDNLENSLESIEDNSCPGPMARQFSRDASTSTVSIQGSGNHYHACAADDDFDTDFDPSILPPPDPWIDSITEDPLEAVQRSVCHRDGHWFLKLLQAERDRMEGWCQQMEREERENNLPEDILGKIRTAVGSAQLLMAQKFYQFRELCEENLNPNAHPRPTSQDLAGFWDMLQLSIENISMKFDELHQLKANNWKQMDPLDKKVEQCRFCMVHLKTCTNTGQSK

SEQ ID NO: 24832 - protein, 975 aa, Homo sapiens
  Payload ID: 4913
  Gene Symbol: DLGAP2
  Gene Name: discs, large (Drosophila) homolog-associated protein 2
  Uniprot ID: Q9P1A6
  ENSP ID: ENSP00000400258
MKGLSGSRTQPPLCSGHTCGLAPPEDCEHLHHGPDARPPYLLSPADSCPGGRHRCSPRSSVHSECVMMPVVLGDHVSSSTFPRMHYSSHYDTRDDCAVAHAGAKINRIPANLLDQFEKQLPLHRDGFHTLQYQRTSAAAEQRSESPGRIRHLVHSVQKLFTKSHSLEGSSKSNANGTKADGRADDHHHAHHAKHSKRSKSKERKPEGKPRPGMSSWWSSDDNLDSDSTYRTPSVLNRHHLGPVAHCYPDALQSPFGDLSLKTSKSNNDVKCSACEGLALTPDAKYLKRSSWSTLTVSQAKEAYRKSSLNLDKPLLHQDAKPALRPCHYLQVPQDEWGGYPTGGKDEEIPCRRMRSGSYIKAMGDEESGESDSSPKTSPKSAILPEPLLKSIGQRPLGEHQTQTYLQAASDVPVGHSLDPAANYNSPKFRSRNQSYMRAVSTLSQASCVSQVSEAEINGQFESVCESVFSEVESQAMDALDLPGCFRTRSHSYLRAIQAGYSQDDECIPMMTPSDITSTIRSTAAVSYTNYKKTPPPVPPRTTSKPLISVTAQSSTESTQDAYQDSRAQRMSPWPQDSRGLYNSTDSLDSNKAMNLALETAAAQRHLPESQSSSVRTSDKAILVSKAEELLKSRCSSIGIQDSEFPEHQPYPRSDVETATDSDTESRGLREYHSVGVQVEDEKRHGRFKRSNSVTAAVQADLELEGFPGHITTEDKGLQFGSSFQRHSEPSTPTQYSAVRTVRTQGLFSYREDYRTQVDTSTLPPPDPWLEPAIDTVETGRMSPCRRDGSWFLKLLHAETKRMEGWCKEMEREAEENDLSEEILGKIRSAVGSAQLLMSQKFQQFYWLCQQNMDPSAMPRPTSQDLAGYWDMLQLSIEDVSMKFDELQRLRLNDWKMMESPERKEERKVPPPIPKKPPKGKFPITREKSLDLPDRQRQEARRRLMAAKRAASFRQNSASERADSIEIYIPEAQTRL

SEQ ID NO: 24833 - protein, 961 aa, Homo sapiens
  Payload ID: 4913
  Gene Symbol: DLGAP2
  Gene Name: discs, large (Drosophila) homolog-associated protein 2
  ENSP ID: ENSP00000430563
MKGLSGSRTQPPLCSGHTCGLAPPEDCEHLHHGPDARPPYLLSPADSCPGGRHRCSPRSSVHSECVMMPVVLGDHVSSSTFPRMHYSSHYDTRDDCAVAHAGAKINRIPANLLDQFEKQLPLHRDGFHTLQYQRTSAAAEQRSESPGRIRHLVHSVQKLFTKSHSLEGSSKSNANGTKADGRADDHHHAHHAKHSKRSKSKERKPEGKPRPGMSSWWSSDDNLDSDSTYRTPSVLNRHHLGPVAHCYPDALQSPFGDLSLKTSKSNNDVKCSACEGLALTPDAKYLKRSSWSTLTVSQAKEAYRKSSLNLDKPLLHQDAKPALRPCHYLQVPQDEWGGYPTGGKDEEIPCRRMRSGSYIKAMGDEESGESDSSPKTSPKSAILPEPLLKSIGQRPLGEHQTQTYLQAASDVPVGHSLDPAANYNSPKFRSRNQSYMRAVSTLSQASCVSQVSEAEINGQFESVCESVFSEVESQAMDALDLPGCFRTRSHSYLRAIQAGYSQDDECIPMMTPSDITSTIRSTAAVSYTNYKKTPPPVPPRTTSKPLISVTAQSSTESTQDAYQDSRAQRMSPWPQDSRGLYNSTDSLDSNKAMNLALETAAAQRHLPESQSSSVRTSDKAILVSKAEELLKSRCSSIGIQVETATDSDTESRGLREYHSVGVQVEDEKRHGRFKRSNSVTAAVQADLELEGFPGHITTEDKGLQFGSSFQRHSEPSTPTQYSAVRTVRTQGLFSYREDYRTQVDTSTLPPPDPWLEPAIDTVETGRMSPCRRDGSWFLKLLHAETKRMEGWCKEMEREAEENDLSEEILGKIRSAVGSAQLLMSQKFQQFYWLCQQNMDPSAMPRPTSQDLAGYWDMLQLSIEDVSMKFDELQRLRLNDWKMMESPERKEERKVPPPIPKKPPKGKFPITREKSLDLPDRQRQEARRRLMAAKRAASFRQNSASERADSIEIYIPEAQTRL

SEQ ID NO: 24834 - protein, 975 aa, Homo sapiens
  Payload ID: 4913
  Gene Symbol: DLGAP2
  Gene Name: discs, large (Drosophila) homolog-associated protein 2
  ENSP ID: ENSP00000478085
MKGLSGSRTQPPLCSGHTCGLAPPEDCEHLHHGPDARPPYLLSPADSCPGGRHRCSPRSSVHSECVMMPVVLGDHVSSSTFPRMHYSSHYDTRDDCAVAHAGAKINRIPANLLDQFEKQLPLHRDGFHTLQYQRTSAAAEQRSESPGRIRHLVHSVQKLFTKSHSLEGSSKSNANGTKADGRADDHHHAHHAKHSKRSKSKERKPEGKPRPGMSSWWSSDDNLDSDSTYRTPSVLNRHHLGPVAHCYPDALQSPFGDLSLKTSKSNNDVKCSACEGLALTPDAKYLKRSSWSTLTVSQAKEAYRKSSLNLDKPLLHQDAKPALRPCHYLQVPQDEWGGYPTGGKDEEIPCRRMRSGSYIKAMGDEESGESDSSPKTSPKSAILQEPLLKSIGQRPLGEHQTQTYLQAASDVPVGHSLDPAANYNSPKFRSRNQSYMRAVSTLSQASCVSQVSEAEINGQFESVCESVFSEVESQAMDALDLPGCFRTRSHSYLRAIQAGYSQDDECIPMMTPSDITSTIRSTAAVSYTNYKKTPPPVPPRTTSKPLISVTAQSSTESTQDAYQDSRAQRMSPWPQDSRGLYNSTDSLDSNKAMNLALETAAAQRHLPESQSSSVRTSDKAILVSKAEELLKSRCSSIGIQDSEFPEHQPYPRSDVETATDSDTESRGLREYHSVGVQVEDEKRHGRFKRSNSVTAAVQADLELEGFPGHITTEDKGLQFGSSFQRHSEPSTPTQYSAVRTVRTQGLFSYREDYRTQVDTSTLPPPDPWLEPAIDTVETGRMSPCRRDGSWFLKLLHAETKRMEGWCKEMEREAEENDLSEEILGKIRSAVGSAQLLMSQKFQQFYWLCQQNMDPSAMPRPTSQDLAGYWDMLQLSIEDVSMKFDELQRLRLNDWKMMESPERKEERKVPPPIPKKPPKGKFPITREKSLDLPDRQRQEARRRLMAAKRAASFRQNSASERADSIEIYIPEAQTRL

SEQ ID NO: 24835 - protein, 961 aa, Homo sapiens
  Payload ID: 4913
  Gene Symbol: DLGAP2
  Gene Name: discs, large (Drosophila) homolog-associated protein 2
  ENSP ID: ENSP00000483427
MKGLSGSRTQPPLCSGHTCGLAPPEDCEHLHHGPDARPPYLLSPADSCPGGRHRCSPRSSVHSECVMMPVVLGDHVSSSTFPRMHYSSHYDTRDDCAVAHAGAKINRIPANLLDQFEKQLPLHRDGFHTLQYQRTSAAAEQRSESPGRIRHLVHSVQKLFTKSHSLEGSSKSNANGTKADGRADDHHHAHHAKHSKRSKSKERKPEGKPRPGMSSWWSSDDNLDSDSTYRTPSVLNRHHLGPVAHCYPDALQSPFGDLSLKTSKSNNDVKCSACEGLALTPDAKYLKRSSWSTLTVSQAKEAYRKSSLNLDKPLLHQDAKPALRPCHYLQVPQDEWGGYPTGGKDEEIPCRRMRSGSYIKAMGDEESGESDSSPKTSPKSAILQEPLLKSIGQRPLGEHQTQTYLQAASDVPVGHSLDPAANYNSPKFRSRNQSYMRAVSTLSQASCVSQVSEAEINGQFESVCESVFSEVESQAMDALDLPGCFRTRSHSYLRAIQAGYSQDDECIPMMTPSDITSTIRSTAAVSYTNYKKTPPPVPPRTTSKPLISVTAQSSTESTQDAYQDSRAQRMSPWPQDSRGLYNSTDSLDSNKAMNLALETAAAQRHLPESQSSSVRTSDKAILVSKAEELLKSRCSSIGIQVETATDSDTESRGLREYHSVGVQVEDEKRHGRFKRSNSVTAAVQADLELEGFPGHITTEDKGLQFGSSFQRHSEPSTPTQYSAVRTVRTQGLFSYREDYRTQVDTSTLPPPDPWLEPAIDTVETGRMSPCRRDGSWFLKLLHAETKRMEGWCKEMEREAEENDLSEEILGKIRSAVGSAQLLMSQKFQQFYWLCQQNMDPSAMPRPTSQDLAGYWDMLQLSIEDVSMKFDELQRLRLNDWKMMESPERKEERKVPPPIPKKPPKGKFPITREKSLDLPDRQRQEARRRLMAAKRAASFRQNSASERADSIEIYIPEAQTRL

SEQ ID NO: 24836 - protein, 961 aa, Homo sapiens; identical to SEQ ID NO: 24833
  Payload ID: 4913
  Gene Symbol: DLGAP2
  Gene Name: discs, large (Drosophila) homolog-associated protein 2
  ENSP ID: ENSP00000484215

SEQ ID NO: 24837 - protein, 176 aa, Homo sapiens
  Payload ID: 4913
  Gene Symbol: DLGAP2
  Gene Name: discs, large (Drosophila) homolog-associated protein 2
  ENSP ID: ENSP00000487701
  MOD_RES (1)..(1): Any amino acid
XTATDSDTESRGLREYHSVGVQVEDEKRHGRFKRSNSVTAAVQADLELEGFPGHITTEDKGLQFGSSFQRHSEPSTPTQYSAVRTVRTQGLFSYREDYRTQVDTSTLPPPDPWLEPAIDTVETGRMSPCRRDGSWFLKLLHAETKRMEGWCKEMEREAEENDLSEESKSSGFPRAS

SEQ ID NO: 24838 - protein, 400 aa, Homo sapiens
  Payload ID: 4913
  Gene Symbol: DLGAP2
  Gene Name: discs, large (Drosophila) homolog-associated protein 2
  ENSP ID: ENSP00000487728
MKGLSGSRTQPPLCSGHTCGLAPPEDCEHLHHGPDARPPYLLSPADSCPGGRHRCSPRSSVHSECVMMPVVLGDHVSSSTFPRMHYSSHYDTRDDCAVAHAGAKINRIPANLLDQFEKQLPLHRDGFHTLQYQRTSAAAEQRSESPGRIRHLVHSVQKLFTKSHSLEGSSKSNANGTKADGRADDHHHAHHAKHSKRSKSKERKPEGKPRPGMSSWWSSDDNLDSDSTYRTPSVLNRHHLGPVAHCYPDALQSPFGDLSLKTSKSNNDVKCSACEGLALTPDAKYLKRSSWSTLTVSQAKEAYRKSSLNLDKPLLHQDAKPALRPCHYLQVPQDEWGGYPTGGKDEEIPCRRMRSGSYIKAMGDEESGESDSSPKTSPKSAILPEPLLKSIGQRPLGEHQ

SEQ ID NO: 24839 - protein, 158 aa, Homo sapiens
  Payload ID: 4913
  Gene Symbol: DLGAP2
  Gene Name: discs, large (Drosophila) homolog-associated protein 2
  ENSP ID: ENSP00000488020
SAVRTVRTQGLFSYREDYRTQVDTSTLPPPDPWLEPAIDTVETGRMSPCRRDGSWFLKLLHAETKRMEGWCKEMEREAEENDLSEEKLLPAHALQENALALCQREVDGGDDGRRMLGRCCLPRDPQSPQHGCMGLVQVSTAVFRSFTRRLHFSWLGYI

SEQ ID NO: 24840 - protein, 961 aa, Homo sapiens; identical to SEQ ID NO: 24835
  Payload ID: 4913
  Gene Symbol: DLGAP2
  Gene Name: discs, large (Drosophila) homolog-associated protein 2
  ENSP ID: ENSP00000488195

SEQ ID NO: 24841 - protein, 561 aa, Homo sapiens
  Payload ID: 4913
  Gene Symbol: DLGAP2
  Gene Name: discs, large (Drosophila) homolog-associated protein 2
  ENSP ID: ENSP00000488273
  MOD_RES (1)..(1): Any amino acid
XQTYLQAASDVPVGHSLDPAANYNSPKFRSRNQSYMRAVSTLSQASCVSQVSEAEINGQFESVCESVFSEVESQAMDALDLPGCFRTRSHSYLRAIQAGYSQDDECIPMMTPSDITSTIRSTAAVSYTNYKKTPPPVPPRTTSKPLISVTAQSSTESTQDAYQDSRAQRMSPWPQDSRGLYNSTDSLDSNKAMNLALETAAAQRHLPESQSSSVRTSDKAILVSKAEELLKSRCSSIGIQVETATDSDTESRGLREYHSVGVQVEDEKRHGRFKRSNSVTAAVQADLELEGFPGHITTEDKGLQFGSSFQRHSEPSTPTQYSAVRTVRTQGLFSYREDYRTQVDTSTLPPPDPWLEPAIDTVETGRMSPCRRDGSWFLKLLHAETKRMEGWCKEMEREAEENDLSEEILGKIRSAVGSAQLLMSQKFQQFYWLCQQNMDPSAMPRPTSQDLAGYWDMLQLSIEDVSMKFDELQRLRLNDWKMMESPERKEERKVPPPIPKKPPKGKFPITREKSLDLPDRQRQEARRRLMAAKRAASFRQNSASERADSIEIYIPEAQTRL

SEQ ID NO: 24842 - protein, 158 aa, Homo sapiens; identical to SEQ ID NO: 24839
  Payload ID: 4913
  Gene Symbol: DLGAP2
  Gene Name: discs, large (Drosophila) homolog-associated protein 2
  ENSP ID: ENSP00000488445

SEQ ID NO: 24843 - protein, 176 aa, Homo sapiens; identical to SEQ ID NO: 24837
  Payload ID: 4913
  Gene Symbol: DLGAP2
  Gene Name: discs, large (Drosophila) homolog-associated protein 2
  ENSP ID: ENSP00000488645
  MOD_RES (1)..(1): Any amino acid

SEQ ID NO: 24844 - protein, 575 aa, Homo sapiens
  Payload ID: 4913
  Gene Symbol: DLGAP2
  Gene Name: discs, large (Drosophila) homolog-associated protein 2
  ENSP ID: ENSP00000488705
  MOD_RES (1)..(1): Any amino acid
XQTYLQAASDVPVGHSLDPAANYNSPKFRSRNQSYMRAVSTLSQASCVSQVSEAEINGQFESVCESVFSEVESQAMDALDLPGCFRTRSHSYLRAIQAGYSQDDECIPMMTPSDITSTIRSTAAVSYTNYKKTPPPVPPRTTSKPLISVTAQSSTESTQDAYQDSRAQRMSPWPQDSRGLYNSTDSLDSNKAMNLALETAAAQRHLPESQSSSVRTSDKAILVSKAEELLKSRCSSIGIQDSEFPEHQPYPRSDVETATDSDTESRGLREYHSVGVQVEDEKRHGRFKRSNSVTAAVQADLELEGFPGHITTEDKGLQFGSSFQRHSEPSTPTQYSAVRTVRTQGLFSYREDYRTQVDTSTLPPPDPWLEPAIDTVETGRMSPCRRDGSWFLKLLHAETKRMEGWCKEMEREAEENDLSEEILGKIRSAVGSAQLLMSQKFQQFYWLCQQNMDPSAMPRPTSQDLAGYWDMLQLSIEDVSMKFDELQRLRLNDWKMMESPERKEERKVPPPIPKKPPKGKFPITREKSLDLPDRQRQEARRRLMAAKRAASFRQNSASERADSIEIYIPEAQTRL

SEQ ID NO: 24845 - protein, 400 aa, Homo sapiens; identical to SEQ ID NO: 24838
  Payload ID: 4913
  Gene Symbol: DLGAP2
  Gene Name: discs, large (Drosophila) homolog-associated protein 2
  ENSP ID: ENSP00000488908

SEQ ID NO: 24846 - protein, 979 aa, Homo sapiens
  Payload ID: 4914
  Gene Symbol: DLGAP3
  Gene Name: discs, large (Drosophila) homolog-associated protein 3
  Uniprot ID: O95886
  ENSP ID: ENSP00000235180
MRGYHGDRGSHPRPARFADQQHMDVGPAARAPYLLGSREAFSTEPRFCAPRAGLGHISPEGPLSLSEGPSVGPEGGPAGAGVGGGSSTFPRMYPGQGPFDTCEDCVGHPQGKGAPRLPPTLLDQFEKQLPVQQDGFHTLPYQRGPAGAGPGPAPGTGTAPEPRSESPSRIRHLVHSVQKLFAKSHSLEAPGKRDYNGPKAEGRGGSGGDSYPGPGSGGPHTSHHHHHHHHHHHHQSRHGKRSKSKDRKGDGRHQAKSTGWWSSDDNLDSDSGFLAGGRPPGEPGGPFCLEGPDGSYRDLSFKGRSGGSEGRCLACTGMSMSLDGQSVKRSAWHTMMVSQGRDGYPGAGPGKGLLGPETKAKARTYHYLQVPQDDWGGYPTGGKDGEIPCRRMRSGSYIKAMGDEESGDSDGSPKTSPKAVARRFTTRRSSSVDQARINCCVPPRIHPRSSIPGYSRSLTTGQLSDELNQQLEAVCGSVFGELESQAVDALDLPGCFRMRSHSYLRAIQAGCSQDDDCLPLLATPAAVSGRPGSSFNFRKAPPPIPPGSQAPPRISITAQSSTDSAHESFTAAEGPARRCSSADGLDGPAMGARTLELAPVPPRASPKPPTLIIKTIPGREELRSLARQRKWRPSIGVQVETISDSDTENRSRREFHSIGVQVEEDKRRARFKRSNSVTAGVQADLELEGLAGLATVATEDKALQFGRSFQRHASEPQPGPRAPTYSVFRTVHTQGQWAYREGYPLPYEPPATDGSPGPAPAPTPGPGAGRRDSWIERGSRSLPDSGRASPCPRDGEWFIKMLRAEVEKLEHWCQQMEREAEDYELPEEILEKIRSAVGSTQLLLSQKVQQFFRLCQQSMDPTAFPVPTFQDLAGFWDLLQLSIEDVTLKFLELQQLKANSWKLLEPKEEKKVPPPIPKKPLRGRGVPVKERSLDSVDRQRQEARKRLLAAKRAASFRHSSATESADSIEIYIPEAQTRL

SEQ ID NO: 24847 - protein, 979 aa, Homo sapiens; identical to SEQ ID NO: 24846
  Payload ID: 4914
  Gene Symbol: DLGAP3
  Gene Name: discs, large (Drosophila) homolog-associated protein 3
  Uniprot ID: O95886
  ENSP ID: ENSP00000362444

SEQ ID NO: 24848 - protein, 992 aa, Homo sapiens
  Payload ID: 4915
  Gene Symbol: DLGAP4
  Gene Name: discs, large (Drosophila) homolog-associated protein 4
  Uniprot ID: Q9Y2H0
  ENSP ID: ENSP00000341633
MKGLGDSRPRHLSDSLDPPHEPLFAGTDRNPYLLSPTEAFAREARFPGQNTLPGDGLFPLNNQLPPPSSTFPRIHYNSHFEVPEESPFPSHAQATKINRLPANLLDQFEKQLPIHRDGFSTLQFPRGEAKARGESPGRIRHLVHSVQRLFFTKAPSLEGTAGKVGGNGSKKGGMEDGKGRRAKSKERAKAGEPKRRSRSNISGWWSSDDNLDGEAGAFRSSGPASGLMTLGRQAERSQPRYFMHAYNTISGHMLKTTKNNTTELTAPPPPPAPPATCPSLGVGTDTNYVKRGSWSTLTLSHAHEVCQKTSATLDKSLLKSKSCHQGLAYHYLQVPGGGGEWSTTLLSPRETDAAAEGPIPCRRMRSGSYIKAMGDEDSDESGGSPKPSPKTAARRQSYLRATQQSLGEQSNPRRSLDRLDSVDMLLPSKCPSWEEDYTPVSDSLNDSSCISQIFGQASLIPQLFGHEQQVREAELSDQYEAACESACSEAESTAAETLDLPLPSYFRSRSHSYLRAIQAGCSQEEDSVSLQSLSPPPSTGSLSNSRTLPSSSCLVAYKKTPPPVPPRTTSKPFISVTVQSSTESAQDTYLDSQDHKSEVTSQSGLSNSSDSLDSSTRPPSVTRGGVAPAPEAPEPPPKHAALKSEQGTLTSSESHPEAAPKRKLSSIGIQVDCIQPVPKEEPSPATKFQSIGVQVEDDWRSSVPSHSMSSRRDTDSDTQDANDSSCKSSERSLPDCTPHPNSISIDAGPRQAPKIAQIKRNLSYGDNSDPALEASSLPPPDPWLETSSSSPAEPAQPGACRRDGYWFLKLLQAETERLEGWCCQMDKETKENNLSEEVLGKVLSAVGSAQLLMSQKFQQFRGLCEQNLNPDANPRPTAQDLAGFWDLLQLSIEDISMKFDELYHLKANSWQLVETPEKRKEEKKPPPPVPKKPAKSKPAVSRDKASDASDKQRQEARKRLLAAKRAASVRQNSATESADSIEIYVPEAQTRL

SEQ ID NO: 24849 - protein, 453 aa, Homo sapiens
  Payload ID: 4915
  Gene Symbol: DLGAP4
  Gene Name: discs, large (Drosophila) homolog-associated protein 4
  Uniprot ID: Q9Y2H0
  ENSP ID: ENSP00000345700
MALCLELLKQCSSCLVAYKKTPPPVPPRTTSKPFISVTVQSSTESAQDTYLDSQDHKSEVTSQSGLSNSSDSLDSSTRPPSVTRGGVAPAPEAPEPPPKHAALKSEQGTLTSSESHPEAAPKRKLSSIGIQVDCIQPVPKEEPSPATKFQSIGVQVEDDWRSSVPSHSMSSRRDTDSDTQDANDSSCKSSERSLPDCTPHPNSISIDAGPRQAPKIAQIKRNLSYGDNSDPALEASSLPPPDPWLETSSSSPAEPAQPGACRRDGYWFLKLLQAETERLEGWCCQMDKETKENNLSEEVLGKVLSAVGSAQLLMSQKFQQFRGLCEQNLNPDANPRPTAQDLAGFWDLLQLSIEDISMKFDELYHLKANSWQLVETPEKRKEEKKPPPPVPKKPAKSKPAVSRDKASDASDKQRQEARKRLLAAKRAASVRQNSATESADSIEIYVPEAQTRL

SEQ ID NO: 24850 - protein, 992 aa, Homo sapiens; identical to SEQ ID NO: 24848
  Payload ID: 4915
  Gene Symbol: DLGAP4
  Gene Name: discs, large (Drosophila) homolog-associated protein 4
  Uniprot ID: Q9Y2H0
  ENSP ID: ENSP00000363014

SEQ ID NO: 24851 - protein, 989 aa, Homo sapiens
  Payload ID: 4915
  Gene Symbol: DLGAP4
  Gene Name: discs, large (Drosophila) homolog-associated protein 4
  Uniprot ID: Q9Y2H0
  ENSP ID: ENSP00000363023
MKGLGDSRPRHLSDSLDPPHEPLFAGTDRNPYLLSPTEAFAREARFPGQNTLPGDGLFPLNNQLPPPSSTFPRIHYNSHFEVPEESPFPSHAQATKINRLPANLLDQFEKQLPIHRDGFSTLQFPRGEAKARGESPGRIRHLVHSVQRLFFTKAPSLEGTAGKVGGNGSKKGGMEDGKGRRAKSKERAKAGEPKRRSRSNISGWWSSDDNLDGEAGAFRSSGPASGLMTLGRQAERSQPRYFMHAYNTISGHMLKTTKNNTTELTAPPPPPAPPATCPSLGVGTDTNYVKRGSWSTLTLSHAHEVCQKTSATLDKSLLKSKSCHQGLAYHYLQVPGGGGEWSTTLLSPRETDAAAEGPIPCRRMRSGSYIKAMGDEDSDESGGSPKPSPKTAARRQSYLRATQQSLGEQSNPRRSLDRLDSVDMLLPSKCPSWEEDYTPVSDSLNDSSCISQIFGQASLIPQLFGHEQQVREAELSDQYEAACESACSEAESTAAETLDLPLPSYFRSRSHSYLRAIQAGCSQEEDSVSLQSLSPPPSTGSLSNSRTLPSSSCLVAYKKTPPPVPPRTTSKPFISVTVQSSTESAQDTYLDSQDHKSEVTSQSGLSNSSDSLDSSTRPPSVTRGGVAPAPEAPEPPPKHAALKSEQGTLTSSESHPEAAPKRKLSSIGIQERTRRNGSHLSEDNGPKAIDVMAPSSESSVPSHSMSSRRDTDSDTQDANDSSCKSSERSLPDCTPHPNSISIDAGPRQAPKIAQIKRNLSYGDNSDPALEASSLPPPDPWLETSSSSPAEPAQPGACRRDGYWFLKLLQAETERLEGWCCQMDKETKENNLSEEVLGKVLSAVGSAQLLMSQKFQQFRGLCEQNLNPDANPRPTAQDLAGFWDLLQLSIEDISMKFDELYHLKANSWQLVETPEKRKEEKKPPPPVPKKPAKSKPAVSRDKASDASDKQRQEARKRLLAAKRAASVRQNSATESADSIEIYVPEAQTRL

SEQ ID NO: 24852 - protein, 989 aa, Homo sapiens; identical to SEQ ID NO: 24851
  Payload ID: 4915
  Gene Symbol: DLGAP4
  Gene Name: discs, large (Drosophila) homolog-associated protein 4
  Uniprot ID: Q9Y2H0
  ENSP ID: ENSP00000384954

SEQ ID NO: 24853 - protein, 244 aa, Homo sapiens
  Payload ID: 4915
  Gene Symbol: DLGAP4
  Gene Name: discs, large (Drosophila) homolog-associated protein 4
  ENSP ID: ENSP00000419311
MAPSSESSVPSHSMSSRRDTDSDTQDANDSSCKSSERSLPDCTPHPNSISIDAGPRQAPKIAQIKRNLSYGDNSDPALEASSLPPPDPWLETSSSSPAEPAQPGACRRDGYWFLKLLQAETERLEGWCCQMDKETKENNLSEEVLGKVLSAVGSAQLLMSQKFQQFRGLCEQNLNPDANPRPTAQDLAGFWDLLQLSIEDISMKFDELYHLKANSWQLVETPEKRKVSMEQCGGEVQGQIPGRQ

SEQ ID NO: 24854 - protein, 285 aa, Homo sapiens
  Payload ID: 4915
  Gene Symbol: DLGAP4
  Gene Name: discs, large (Drosophila) homolog-associated protein 4
  ENSP ID: ENSP00000477723
MSSRRDTDSDTQDANDSSCKSSERSLPDCTPHPNSISIDAGPRQAPKIAQIKRNLSYGDNSDPALEASSLPPPDPWLETSSSSPAEPAQPGACRRDGYWFLKLLQAETERLEGWCCQMDKETKENNLSEEVLGKVLSAVGSAQLLMSQKFQQFRGLCEQNLNPDANPRPTAQDLAGFWDLLQLSIEDISMKFDELYHLKANSWQLVETPEKRKEEKKPPPPVPKKPAKSKPAVSRDKASDASDKQRQEARKRLLAAKRAASVRQNSATESADSIEIYVPEAQTRL

SEQ ID NO: 24855 - protein, 46 aa, Homo sapiens
  Payload ID: 4915
  Gene Symbol: DLGAP4
  Gene Name: discs, large (Drosophila) homolog-associated protein 4
  ENSP ID: ENSP00000480166
MSSRRDTDSDTQDANDSSCKSSERSLPDCTPHPNSISIDAGPRQAP

SEQ ID NO: 24856 - protein, 125 aa, Homo sapiens
  Payload ID: 4915
  Gene Symbol: DLGAP4
  Gene Name: discs, large (Drosophila) homolog-associated protein 4
  ENSP ID: ENSP00000484696
MSSRRDTDSDTQDANDSSCKSSERSLPDCTPHPNSISIDAGPRQAPKIAQIKRNLSYGDNSDPALEASSLPPPDPWLETSSSSPAEPAQPGACRRDGYWFLKLLQAETERLEGWCCQMDKETKEN

SEQ ID NO: 24857 - protein, 846 aa, Homo sapiens
  Payload ID: 4916
  Gene Symbol: DLGAP5
  Gene Name: discs, large (Drosophila) homolog-associated protein 5
  Uniprot ID: Q15398
  ENSP ID: ENSP00000247191
MSSSHFASRHRKDISTEMIRTKIAHRKSLSQKENRHKEYERNRHFGLKDVNIPTLEGRILVELDETSQGLVPEKTNVKPRAMKTILGDQRKQMLQKYKEEKQLQKLKEQREKAKRGIFKVGRYRPDMPCFLLSNQNAVKAEPKKAIPSSVRITRSKAKDQMEQTKIDNESDVRAIRPGPRQTSEKKVSDKEKKVVQPVMPTSLRMTRSATQAAKQVPRTVSSTTARKPVTRAANENEPEGKVPSKGRPAKNVETKPDKGISCKVDSEENTLNSQTNATSGMNPDGVLSKMENLPEINTAKIKGKNSFAPKDFMFQPLDGLKTYQVTPMTPRSANAFLTPSYTWTPLKTEVDESQATKEILAQKCKTYSTKTIQQDSNKLPCPLGPLTVWHEEHVLNKNEATTKNLNGLPIKEVPSLERNEGRIAQPHHGVPYFRNILQSETEKLTSHCFEWDRKLELDIPDDAKDLIRTAVGQTRLLMKERFKQFEGLVDDCEYKRGIKETTCTDLDGFWDMVSFQIEDVIHKFNNLIKLEESGWQVNNNMNHNMNKNVFRKKVVSGIASKPKQDDAGRIAARNRLAAIKNAMRERIRQEECAETAVSVIPKEVDKIVFDAGFFRVESPVKLFSGLSVSSEGPSQRLGTPKSVNKAVSQSRNEMGIPQQTTSPENAGPQNTKSEHVKKTLFLSIPESRSSIEDAQCPGLPDLIEENHVVNKTDLKVDCLSSERMSLPLLAGGVADDINTNKKEGISDVVEGMELNSSITSQDVLMSSPEKNTASQNSILEEGETKISQSELFDNKSLTTECHLLDSPGLNCSNPFTQLERRHQEHARHISFGGNLITFSPLQPGEF

SEQ ID NO: 24858 - protein, 842 aa, Homo sapiens
  Payload ID: 4916
  Gene Symbol: DLGAP5
  Gene Name: discs, large (Drosophila) homolog-associated protein 5
  Uniprot ID: Q15398
  ENSP ID: ENSP00000378815
MSSSHFASRHRKDISTEMIRTKIAHRKSLSQKENRHKEYERNRHFGLKDVNIPTLEGRILVELDETSQGLVPEKTNVKPRAMKTILGDQRKQMLQKYKEEKQLQKLKEQREKAKRGIFKVGRYRPDMPCFLLSNQNAVKAEPKKAIPSSVRITRSKAKDQMEQTKIDNESDVRAIRPGPRQTSEKKVSDKEKKVVQPVMPTSLRMTRSATQAAKQVPRTVSSTTARKPVTRAANENEPEGKVPSKGRPAKNVETKPDKGISCKVDSEENTLNSQTNATSGMNPDGVLSKMENLPEINTAKIKGKNSFAPKDFMFQPLDGLKTYQVTPMTPRSANAFLTPSYTWTPLKTEVDESQATKEILAQKCKTYSTKTIQQDSNKLPCPLGPLTVWHEEHVLNKNEATTKNLNGLPIKEVPSLERNEGRIAQPHHGVPYFRNILQSETEKLTSHCFEWDRKLELDIPDDAKDLIRTAVGQTRLLMKERFKQFEGLVDDCEYKRGIKETTCTDLDGFWDMVSFQIEDVIHKFNNLIKLEESGWQVNNNMNHNMNKNVFRKKVVSGIASKPKQDDAGRIAARNRLAAIKNAMRERIRQEECAETAVSVIPKEVDKIVFDAGFFRVESPVKLFSGLSVSSEGPSQRLGTPKSVNKAVSQSRNEMGIPQQTTSPENAGPQNTKSEHVKKTLFLSIPESRSSIEDAQCPGLPDLIEENHVVNKTDLKVDCLSSERMSLPLLAGGVADDINTNKKEGISDVVEGMELNSSITSQDVLMSSPEKNTASQNSILEEGETKISQSELFDNKSLTTECHLLDSVGSCYVARAGLEVLGSSDPTTSASRVAGTTARSKLQ

SEQ ID NO: 24859 - protein, 234 aa, Homo sapiens
  Payload ID: 4916
  Gene Symbol: DLGAP5
  Gene Name: discs, large (Drosophila) homolog-associated protein 5
  ENSP ID: ENSP00000451747
MSSSHFASRHRKDISTEMIRTKIAHRKSLSQKENRHKEYERNRHFGLKDVNIPTLEGRILVELDETSQGLVPEKTNVKPRAMKTILGDQRKQMLQKYKEEKQLQKLKEQREKAKRGIFKVGRYRPDMPCFLLSNQNAVKAEPKKAIPSSVRITRSKAKDQMEQTKIDNESDVRAIRPGPRQTSEKKVSDKEKKVVQPVMPTSLRMTRSATQAAKQVPRTVSSTTARKPVTRAAN

SEQ ID NO: 24860 - protein, 111 aa, Homo sapiens
  Payload ID: 4916
  Gene Symbol: DLGAP5
  Gene Name: discs, large (Drosophila) homolog-associated protein 5
  ENSP ID: ENSP00000452168
MSSSHFASRHRKDISTEMIRTKIAHRKSLSQKENRHKEYERNRHFGLKDVNIPTLEGRILVELDETSQGLVPEKTNVKPRAMKTILGDQRKQMLQKYKEEKQLQKLKEQRE

SEQ ID NO: 24861 - protein, 926 aa, Homo sapiens
  Payload ID: 4917
  Gene Symbol: DLG1
  Gene Name: discs, large homolog 1 (Drosophila)
  Uniprot ID: Q12959
  ENSP ID: ENSP00000345731
MPVRKQDTQRALHLLEEYRSKLSQTEDRQLRSSIERVINIFQSNLFQALIDIQEFYEVTLLDNPKCIDRSKPSEPIQPVNTWEISSLPSSTVTSETLPSSLSPSVEKYRYQDEDTPPQEHISPQITNEVIGPELVHVSEKNLSEIENVHGFVSHSHISPIKPTEAVLPSPPTVPVIPVLPVPAENTVILPTIPQANPPPVLVNTDSLETPTYVNGTDADYEYEEITLERGNSGLGFSIAGGTDNPHIGDDSSIFITKIITGGAAAQDGRLRVNDCILRVNEVDVRDVTHSKAVEALKEAGSIVRLYVKRRKPVSEKIMEIKLIKGPKGLGFSIAGGVGNQHIPGDNSIYVTKIIEGGAAHKDGKLQIGDKLLAVNNVCLEEVTHEEAVTALKNTSDFVYLKVAKPTSMYMNDGYAPPDITNSSSQPVDNHVSPSSFLGQTPASPARYSPVSKAVLGDDEITREPRKVVLHRGSTGLGFNIVGGEDGEGIFISFILAGGPADLSGELRKGDRIISVNSVDLRAASHEQAAAALKNAGQAVTIVAQYRPEEYSRFEAKIHDLREQMMNSSISSGSGSLRTSQKRSLYVRALFDYDKTKDSGLPSQGLNFKFGDILHVINASDDEWWQARQVTPDGESDEVGVIPSKRRVEKKERARLKTVKFNSKTRDKGQSFNDKRKKNLFSRKFPFYKNKDQSEQETSDADQHVTSNASDSESSYRGQEEYVLSYEPVNQQEVNYTRPVIILGPMKDRINDDLISEFPDKFGSCVPHTTRPKRDYEVDGRDYHFVTSREQMEKDIQEHKFIEAGQYNNHLYGTSVQSVREVAEKGKHCILDVSGNAIKRLQIAQLYPISIFIKPKSMENIMEMNKRLTEEQARKTFERAMKLEQEFTEHFTAIVQGDTLEDIYNQVKQIIEEQSGSYIWVPAKEKL

SEQ ID NO: 24862 - protein, 892 aa, Homo sapiens
  Payload ID: 4917
  Gene Symbol: DLG1
  Gene Name: discs, large homolog 1 (Drosophila)
  ENSP ID: ENSP00000350303
MPVRKQDTQRALHLLEEYRSKLSQTEDRQLRSSIERVINIFQSNLFQALIDIQEFYEVTLLDNPKCIDRSKPSEPIQPVNTWEISSLPSSTVTSETLPSSLSPSVEKYRYQDEDTPPQEHISPQITNEVIGPELVHVSEKNLSEIENVHGFVSHSHISPIKANPPPVLVNTDSLETPTYVNGTDADYEYEEITLERGNSGLGFSIAGGTDNPHIGDDSSIFITKIITGGAAAQDGRLRVNDCILRVNEVDVRDVTHSKAVEALKEAGSIVRLYVKRRKPVSEKIMEIKLIKGPKGLGFSIAGGVGNQHIPGDNSIYVTKIIEGGAAHKDGKLQIGDKLLAVNNVCLEEVTHEEAVTALKNTSDFVYLKVAKPTSMYMNDGYAPPDITNSSSQPVDNHVSPSSFLGQTPASPARYSPVSKAVLGDDEITREPRKVVLHRGSTGLGFNIVGGEDGEGIFISFILAGGPADLSGELRKGDRIISVNSVDLRAASHEQAAAALKNAGQAVTIVAQYRPEEYSRFEAKIHDLREQMMNSSISSGSGSLRTSQKRSLYVRALFDYDKTKDSGLPSQGLNFKFGDILHVINASDDEWWQARQVTPDGESDEVGVIPSKRRVEKKERARLKTVKFNSKTRDKGSFNDKRKKNLFSRKFPFYKNKDQSEQETSDADQHVTSNASDSESSYRGQEEYVLSYEPVNQQEVNYTRPVIILGPMKDRINDDLISEFPDKFGSCVPHTTRPKRDYEVDGRDYHFVTSREQMEKDIQEHKFIEAGQYNNHLYGTSVQSVREVAEKGKHCILDVSGNAIKRLQIAQLYPISIFIKPKSMENIMEMNKRLTEEQARKTFERAMKLEQEFTEHFTAIVQGDTLEDIYNQVKQIIEEQSGSYIWVPAKEKL

SEQ ID NO: 24863 - protein, 208 aa, Homo sapiens
  Payload ID: 4917
  Gene Symbol: DLG1
  Gene Name: discs, large homolog 1 (Drosophila)
  ENSP ID: ENSP00000376185
MPVRKQDTQRALHLLEEYRSKLSQTEDRQLRSSIERVINIFQSNLFQALIDIQEFYEVTLLDNPKCIDRSKPSEPIQPVNTWEISSLPSSTVTSETLPSSLSPSVEKYRYQDEDTPPQEHISPQITNEVIGPELVHVSEKNLSEIENVHGFVSHSHISPIKPTEAVLPSPPTVPVIPVLPVPAENTVILPTIPQANPPPVLVNTDSLE

SEQ ID NO: 24864 - protein, 658 aa, Homo sapiens
  Payload ID: 4917
  Gene Symbol: DLG1
  Gene Name: discs, large homolog 1 (Drosophila)
  ENSP ID: ENSP00000376186
MPVRKQDTQRALHLLEEYRSKLSQTEDRQLRSSIERVINIFQSNLFQALIDIQEFYEVTLLDNPKCIDRSKPSEPIQPVNTWEISSLPSSTVTSETLPSSLSPSVEKYRYQDEDTPPQEHISPQITNEVIGPELVHVSEKNLSEIENVHGFVSHSHISPIKPTEAVLPSPPTVPVIPVLPVPAENTVILPTIPQANPPPVLVNTDSLETPTYVNGTDADYEYEEITLERGNSGLGFSIAGGTDNPHIGDDSSIFITKIITGGAAAQDGRLRVNDCILRVNEVDVRDVTHSKAVEALKEAGSIVRLYVKRRKPVSEKIMEIKLIKGPKGLGFSIAGGVGNQHIPGDNSIYVTKIIEGGAAHKDGKLQIGDKLLAVNNVCLEEVTHEEAVTALKNTSDFVYLKVAKPTSMYMNDGYAPPDITNSSSQPVDNHVSPSSFLGQTPASPARYSPVSKAVLGDDEITREPRKVVLHRGSTGLGFNIVGGEDGEGIFISFILAGGPADLSGELRKGDRIISVNSVDLRAASHEQAAAALKNAGQAVTIVAQYRPEEYSRFEAKIHDLREQMMNSSISSGSGSLRTSQKRSLYVRALFDYDKTKDSGLPSQGLNFKFGDILHVINASDDEWWQARQVTPDGESDEVGVIPSKRRYACFLPLECEAT

SEQ ID NO: 24865 - protein, 871 aa, Homo sapiens
  Payload ID: 4917
  Gene Symbol: DLG1
  Gene Name: discs, large homolog 1 (Drosophila)
  Uniprot ID: Q12959
  ENSP ID: ENSP00000376187
MPVRKQDTQRALHLLEEYRSKLSQTEDRQLRSSIERVINIFQSNLFQALIDIQEFYEVTLLDNPKCIDRSKPSEPIQPVNTWEISSLPSSTVTSETLPSSLSPSVEKYRYQDEDTPPQEHISPQITNEVIGPELVHVSEKNLSEIENVHGFVSHSHISPIKANPPPVLVNTDSLETPTYVNGTDADYEYEEITLERGNSGLGFSIAGGTDNPHIGDDSSIFITKIITGGAAAQDGRLRVNDCILRVNEVDVRDVTHSKAVEALKEAGSIVRLYVKRRKPVSEKIMEIKLIKGPKGLGFSIAGGVGNQHIPGDNSIYVTKIIEGGAAHKDGKLQIGDKLLAVNNVCLEEVTHEEAVTALKNTSDFVYLKVAKPTSMYMNDGYAPPDITNSSSQPVDNHVSPSSFLGQTPASPARYSPVSKAVLGDDEITREPRKVVLHRGSTGLGFNIVGGEDGEGIFISFILAGGPADLSGELRKGDRIISVNSVDLRAASHEQAAAALKNAGQAVTIVAQYRPEEYSRFEAKIHDLREQMMNSSISSGSGSLRTSQKRSLYVRALFDYDKTKDSGLPSQGLNFKFGDILHVINASDDEWWQARQVTPDGESDEVGVIPSKRRVEKKERARLKTVKFNSKTRDKGEIPDDMGSKGLKHVTSNASDSESSYRGQEEYVLSYEPVNQQEVNYTRPVIILGPMKDRINDDLISEFPDKFGSCVPHTTRPKRDYEVDGRDYHFVTSREQMEKDIQEHKFIEAGQYNNHLYGTSVQSVREVAEKGKHCILDVSGNAIKRLQIAQLYPISIFIKPKSMENIMEMNKRLTEEQARKTFERAMKLEQEFTEHFTAIVQGDTLEDIYNQVKQIIEEQSGSYIWVPAKEKL

SEQ ID NO: 24866 - protein, 106 aa, Homo sapiens
  Payload ID: 4917
  Gene Symbol: DLG1
  Gene Name: discs, large homolog 1 (Drosophila)
  ENSP ID: ENSP00000390403
MPVRKQDTQRALHLLEEYRSKLSQTEDRQLRSSIERVINIFQSNLFQALIDIQEFYEVTLLDNPKCIDRSKPSEPIQPVNTWEISSLPSSTVTSETLPSSLSPSVE

SEQ ID NO: 24867 - protein, 904 aa, Homo sapiens
  Payload ID: 4917
  Gene Symbol: DLG1
  Gene Name: discs, large homolog 1 (Drosophila)
  Uniprot ID: Q12959
  ENSP ID: ENSP00000391732
MPVRKQDTQRALHLLEEYRSKLSQTEDRQLRSSIERVINIFQSNLFQALIDIQEFYEVTLLDNPKCIDRSKPSEPIQPVNTWEISSLPSSTVTSETLPSSLSPSVEKYRYQDEDTPPQEHISPQITNEVIGPELVHVSEKNLSEIENVHGFVSHSHISPIKPTEAVLPSPPTVPVIPVLPVPAENTVILPTIPQANPPPVLVNTDSLETPTYVNGTDADYEYEEITLERGNSGLGFSIAGGTDNPHIGDDSSIFITKIITGGAAAQDGRLRVNDCILRVNEVDVRDVTHSKAVEALKEAGSIVRLYVKRRKPVSEKIMEIKLIKGPKGLGFSIAGGVGNQHIPGDNSIYVTKIIEGGAAHKDGKLQIGDKLLAVNNVCLEEVTHEEAVTALKNTSDFVYLKVAKPTSMYMNDGYAPPDITNSSSQPVDNHVSPSSFLGQTPASPARYSPVSKAVLGDDEITREPRKVVLHRGSTGLGFNIVGGEDGEGIFISFILAGGPADLSGELRKGDRIISVNSVDLRAASHEQAAAALKNAGQAVTIVAQYRPEEYSRFEAKIHDLREQMMNSSISSGSGSLRTSQKRSLYVRALFDYDKTKDSGLPSQGLNFKFGDILHVINASDDEWWQARQVTPDGESDEVGVIPSKRRVEKKERARLKTVKFNSKTRDKGEIPDDMGSKGLKHVTSNASDSESSYRGQEEYVLSYEPVNQQEVNYTRPVIILGPMKDRINDDLISEFPDKFGSCVPHTTRPKRDYEVDGRDYHFVTSREQMEKDIQEHKFIEAGQYNNHLYGTSVQSVREVAEKGKHCILDVSGNAIKRLQIAQLYPISIFIKPKSMENIMEMNKRLTEEQARKTFERAMKLEQEFTEHFTAIVQGDTLEDIYNQVKQIIEEQSGSYIWVPAKEKL

SEQ ID NO: 24868 - protein, 123 aa, Homo sapiens
  Payload ID: 4917
  Gene Symbol: DLG1
  Gene Name: discs, large homolog 1 (Drosophila)
  ENSP ID: ENSP00000393771
MPVRKQDTQRALHLLEEYRSKLSQTEDRQLRSSIERVINIFQSNLFQALIDIQEFYEVTLLDNPKCIDRSKPSEPIQPVNTWEISSLPSSTVTSETLPSSLSPSVEKYRYQDEDTPPQEHISP

SEQ ID NO: 24869 - protein, 179 aa, Homo sapiens
  Payload ID: 4917
  Gene Symbol: DLG1
  Gene Name: discs, large homolog 1 (Drosophila)
  ENSP ID: ENSP00000396474
MPVRKQDTQRALHLLEEYRSKLSQTEDRQLRSSIERVINIFQSNLFQALIDIQEFYEVTLLDNPKCIDRSKPSEPIQPVNTWEISSLPSSTVTSETLPSSLSPSVEKYRYQDEDTPPQEHISPQITNEVIGPELVHVSEKNLSEIENVHGFVSHSHISPIKANPPPVLVNTDSLETPTY

SEQ ID NO: 24870 - protein, 800 aa, Homo sapiens
  Payload ID: 4917
  Gene Symbol: DLG1
  Gene Name: discs, large homolog 1 (Drosophila)
  Uniprot ID: Q12959
  ENSP ID: ENSP00000396658
MNYIFGNNTLLYSRGSRGGNTSSSHGSAGPKQKHWAKKGSSDELQAEPEPSRWQQIVAFFTRRHSFIDCISVATSSTQANPPPVLVNTDSLETPTYVNGTDADYEYEEITLERGNSGLGFSIAGGTDNPHIGDDSSIFITKIITGGAAAQDGRLRVNDCILRVNEVDVRDVTHSKAVEALKEAGSIVRLYVKRRKPVSEKIMEIKLIKGPKGLGFSIAGGVGNQHIPGDNSIYVTKIIEGGAAHKDGKLQIGDKLLAVNNVCLEEVTHEEAVTALKNTSDFVYLKVAKPTSMYMNDGYAPPDITNSSSQPVDNHVSPSSFLGQTPASPARYSPVSKAVLGDDEITREPRKVVLHRGSTGLGFNIVGGEDGEGIFISFILAGGPADLSGELRKGDRIISVNSVDLRAASHEQAAAALKNAGQAVTIVAQYRPEEYSRFEAKIHDLREQMMNSSISSGSGSLRTSQKRSLYVRALFDYDKTKDSGLPSQGLNFKFGDILHVINASDDEWWQARQVTPDGESDEVGVIPSKRRVEKKERARLKTVKFNSKTRDKGEIPDDMGSKGLKHVTSNASDSESSYLILITDEYGCSKGGQEEYVLSYEPVNQQEVNYTRPVIILGPMKDRINDDLISEFPDKFGSCVPHTTRPKRDYEVDGRDYHFVTSREQMEKDIQEHKFIEAGQYNNHLYGTSVQSVREVAEKGKHCILDVSGNAIKRLQIAQLYPISIFIKPKSMENIMEMNKRLTEEQARKTFERAMKLEQEFTEHFTAIVQGDTLEDIYNQVKQIIEEQSGSYIWVPAKEKL

SEQ ID NO: 24871 - protein, 370 aa, Homo sapiens
  Payload ID: 4917
  Gene Symbol: DLG1
  Gene Name: discs, large homolog 1 (Drosophila)
  ENSP ID: ENSP00000396768
MPVRKQDTQRALHLLEEYRSKLSQTEDRQLRSSIERVINIFQSNLFQALIDIQEFYEVTLLDNPKCIDRSKPSEPIQPVNTWEISSLPSSTVTSETLPSSLSPSVEKYRYQDEDTPPQEHISPQITNEVIGPELVHVSEKNLSEIENVHGFVSHSHISPIKVNGTDADYEYEEITLERGNSGLGFSIAGGTDNPHIGDDSSIFITKIITGGAAAQDGRLRVNDCILRVNEVDVRDVTHSKAVEALKEAGSIVRLYVKRRKPVSEKIMEIKLIKGPKGLGFSIAGGVGNQHIPGDNSIYVTKIIEGGAAHKDGKLQIGDKLLAVNNVCLEEVTHEEAVTALKNTSDFVYLKVAKPTSMYMNDGYAPPDITN

SEQ ID NO: 24872 - protein, 286 aa, Homo sapiens
  Payload ID: 4917
  Gene Symbol: DLG1
  Gene Name: discs, large homolog 1 (Drosophila)
  ENSP ID: ENSP00000398702
FFTRRHSFIDCISVATSSTQANPPPVLVNTDSLETPTYGNSGLGFSIAGGTDNPHIGDDSSIFITKIITGGAAAQDGRLRVNDCILRVNEVDVRDVTHSKAVEALKEAGSIVRLYVKRRKPVSEKIMEIKLIKGPKGLGFSIAGGVGNQHIPGDNSIYVTKIIEGGAAHKDGKLQIGDKLLAVNNVCLEEVTHEEAVTALKNTSDFVYLKVAKPTSMYMNDGYAPPDITNSSSQPVDNHVSPSSFLGQTPASPARYSPVSKAVLGDDEITREPRKVVLHRGSTGLG

SEQ ID NO: 24873 - protein, 788 aa, Homo sapiens
  Payload ID: 4917
  Gene Symbol: DLG1
  Gene Name: discs, large homolog 1 (Drosophila)
  Uniprot ID: Q12959
  ENSP ID: ENSP00000398939
MNYIFGNNTLLYSRGSRGGNTSSSHGSAGPKQKHWAKKGSSDELQAEPEPSRWQQIVAFFTRRHSFIDCISVATSSTQANPPPVLVNTDSLETPTYVNGTDADYEYEEITLERGNSGLGFSIAGGTDNPHIGDDSSIFITKIITGGAAAQDGRLRVNDCILRVNEVDVRDVTHSKAVEALKEAGSIVRLYVKRRKPVSEKIMEIKLIKGPKGLGFSIAGGVGNQHIPGDNSIYVTKIIEGGAAHKDGKLQIGDKLLAVNNVCLEEVTHEEAVTALKNTSDFVYLKVAKPTSMYMNDGYAPPDITNSSSQPVDNHVSPSSFLGQTPASPARYSPVSKAVLGDDEITREPRKVVLHRGSTGLGFNIVGGEDGEGIFISFILAGGPADLSGELRKGDRIISVNSVDLRAASHEQAAAALKNAGQAVTIVAQYRPEEYSRFEAKIHDLREQMMNSSISSGSGSLRTSQKRSLYVRALFDYDKTKDSGLPSQGLNFKFGDILHVINASDDEWWQARQVTPDGESDEVGVIPSKRRVEKKERARLKTVKFNSKTRDKGEIPDDMGSKGLKHVTSNASDSESSYRGQEEYVLSYEPVNQQEVNYTRPVIILGPMKDRINDDLISEFPDKFGSCVPHTTRPKRDYEVDGRDYHFVTSREQMEKDIQEHKFIEAGQYNNHLYGTSVQSVREVAEKGKHCILDVSGNAIKRLQIAQLYPISIFIKPKSMENIMEMNKRLTEEQARKTFERAMKLEQEFTEHFTAIVQGDTLEDIYNQVKQIIEEQSGSYIWVPAKEKL

SEQ ID NO: 24874 - protein, 35 aa, Homo sapiens
  Payload ID: 4917
  Gene Symbol: DLG1
  Gene Name: discs, large homolog 1 (Drosophila)
  ENSP ID: ENSP00000400169
MPVRKQDTQRALHLLEEYRSKLSQTEDRQLRSSIE

SEQ ID NO: 24875 - protein, 904 aa, Homo sapiens; identical to SEQ ID NO: 24867
  Payload ID: 4917
  Gene Symbol: DLG1
  Gene Name: discs, large homolog 1 (Drosophila)
  Uniprot ID: Q12959
  ENSP ID: ENSP00000407531

SEQ ID NO: 24876 - protein, 893 aa, Homo sapiens
  Payload ID: 4917
  Gene Symbol: DLG1
  Gene Name: discs, large homolog 1 (Drosophila)
  Uniprot ID: Q12959
  ENSP ID: ENSP00000411278
MPVRKQDTQRALHLLEEYRSKLSQTEDRQLRSSIERVINIFQSNLFQALIDIQEFYEVTLLDNPKCIDRSKPSEPIQPVNTWEISSLPSSTVTSETLPSSLSPSVEKYRYQDEDTPPQEHISPQITNEVIGPELVHVSEKNLSEIENVHGFVSHSHISPIKANPPPVLVNTDSLETPTYVNGTDADYEYEEITLERGNSGLGFSIAGGTDNPHIGDDSSIFITKIITGGAAAQDGRLRVNDCILRVNEVDVRDVTHSKAVEALKEAGSIVRLYVKRRKPVSEKIMEIKLIKGPKGLGFSIAGGVGNQHIPGDNSIYVTKIIEGGAAHKDGKLQIGDKLLAVNNVCLEEVTHEEAVTALKNTSDFVYLKVAKPTSMYMNDGYAPPDITNSSSQPVDNHVSPSSFLGQTPASPARYSPVSKAVLGDDEITREPRKVVLHRGSTGLGFNIVGGEDGEGIFISFILAGGPADLSGELRKGDRIISVNSVDLRAASHEQAAAALKNAGQAVTIVAQYRPEEYSRFEAKIHDLREQMMNSSISSGSGSLRTSQKRSLYVRALFDYDKTKDSGLPSQGLNFKFGDILHVINASDDEWWQARQVTPDGESDEVGVIPSKRRVEKKERARLKTVKFNSKTRDKGQSFNDKRKKNLFSRKFPFYKNKDQSEQETSDADQHVTSNASDSESSYRGQEEYVLSYEPVNQQEVNYTRPVIILGPMKDRINDDLISEFPDKFGSCVPHTTRPKRDYEVDGRDYHFVTSREQMEKDIQEHKFIEAGQYNNHLYGTSVQSVREVAEKGKHCILDVSGNAIKRLQIAQLYPISIFIKPKSMENIMEMNKRLTEEQARKTFERAMKLEQEFTEHFTAIVQGDTLEDIYNQVKQIIEEQSGSYIWVPAKEKL

SEQ ID NO: 24877 - protein, 122 aa, Homo sapiens
  Payload ID: 4917
  Gene Symbol: DLG1
  Gene Name: discs, large homolog 1 (Drosophila)
  ENSP ID: ENSP00000412579
MDCLCIVTTKKYRYQDEDTPPQEHISPQITNEVIGPELVHVSEKNLSEIENVHGFVSHSHISPIKVNGTDADYEYEEITLERGNSGLGFSIAGGTDNPHIGDDSSIFITKIITGGAAAQDGR

SEQ ID NO: 24878 - protein, 853 aa, Homo sapiens
  Payload ID: 4917
  Gene Symbol: DLG1
  Gene Name: discs, large homolog 1 (Drosophila)
  Uniprot ID: Q12959
  ENSP ID: ENSP00000413238
MPVRKQDTQRALHLLEEYRSKLSQTEDRQLRSSIERVINIFQSNLFQALIDIQEFYEVTLLDNPKCIDRSKPSEPIQPVNTWEISSLPSSTVTSETLPSSLSPSVEKYRYQDEDTPPQEHISPQITNEVIGPELVHVSEKNLSEIENVHGFVSHSHISPIKVNGTDADYEYEEITLERGNSGLGFSIAGGTDNPHIGDDSSIFITKIITGGAAAQDGRLRVNDCILRVNEVDVRDVTHSKAVEALKEAGSIVRLYVKRRKPVSEKIMEIKLIKGPKGLGFSIAGGVGNQHIPGDNSIYVTKIIEGGAAHKDGKLQIGDKLLAVNNVCLEEVTHEEAVTALKNTSDFVYLKVAKPTSMYMNDGYAPPDITNSSSQPVDNHVSPSSFLGQTPASPARYSPVSKAVLGDDEITREPRKVVLHRGSTGLGFNIVGGEDGEGIFISFILAGGPADLSGELRKGDRIISVNSVDLRAASHEQAAAALKNAGQAVTIVAQYRPEEYSRFEAKIHDLREQMMNSSISSGSGSLRTSQKRSLYVRALFDYDKTKDSGLPSQGLNFKFGDILHVINASDDEWWQARQVTPDGESDEVGVIPSKRRVEKKERARLKTVKFNSKTRDKGEIPDDMGSKGLKHVTSNASDSESSYRGQEEYVLSYEPVNQQEVNYTRPVIILGPMKDRINDDLISEFPDKFGSCVPHTTRPKRDYEVDGRDYHFVTSREQMEKDIQEHKFIEAGQYNNHLYGTSVQSVREVAEKGKHCILDVSGNAIKRLQIAQLYPISIFIKPKSMENIMEMNKRLTEEQARKTFERAMKLEQEFTEHFTAIVQGDTLEDIYNQVKQIIEEQSGSYIWVPAKEKL

SEQ ID NO: 24879 - protein, 154 aa, Homo sapiens
  Payload ID: 4917
  Gene Symbol: DLG1
  Gene Name: discs, large homolog 1 (Drosophila)
  ENSP ID: ENSP00000414189
MPVRKQDTQRALHLLEEYRSKLSQTEDRQLRSSIERVINIFQSNLFQALIDIQEFYEVTLLDNPKCIDRSKPSEPIQPVNTWEISSLPSSTVTSETLPSSLSPSVEKYRYQDEDTPPQEHISPQITNEVIGPELVHVSEKNLSEIENVHGFVSH

SEQ ID NO: 24880 - protein, 909 aa, Homo sapiens
  Payload ID: 4918
  Gene Symbol: DLG2
  Gene Name: discs, large homolog 2 (Drosophila)
  Uniprot ID: Q15700
  ENSP ID: ENSP00000280241
MNAYLTKQHSCSRGSDGMDAVRSAPTLIRDAHCACGWQRNCQGLGYSSQTMPSSGPGGPASNRTGGSSFNRTLWDSVRKSPHKTSTKGKGTCGEHCTCPHGWFSPAQASPAPIIVNTDTLDTIPYVNGTEIEYEFEEITLERGNSGLGFSIAGGTDNPHIGDDPGIFITKIIPGGAAAEDGRLRVNDCILRVNEVDVSEVSHSKAVEALKEAGSIVRLYVRRRRPILETVVEIKLFKGPKGLGFSIAGGVGNQHIPGDNSIYVTKIIDGGAAQKDGRLQVGDRLLMVNNYSLEEVTHEEAVAILKNTSEVVYLKVGKPTTIYMTDPYGPPDITHSYSPPMENHLLSGNNGTLEYKTSLPPISPGRYSPIPKHMLVDDDYTRPPEPVYSTVNKLCDKPASPRHYSPVECDKSFLLSAPYSHYHLGLLPDSEMTSHSQHSTATRQPSMTLQRAVSLEGEPRKVVLHKGSTGLGFNIVGGEDGEGIFVSFILAGGPADLSGELQRGDQILSVNGIDLRGASHEQAAAALKGAGQTVTIIAQYQPEDYARFEAKIHDLREQMMNHSMSSGSGSLRTNQKRSLYVRAMFDYDKSKDSGLPSQGLSFKYGDILHVINASDDEWWQARRVMLEGDSEEMGVIPSKRRVERKERARLKTVKFNAKPGVIDSKGSFNDKRKKSFIFSRKFPFYKNKEQSEQETSDPERGQEDLILSYEPVTRQEINYTRPVIILGPMKDRINDDLISEFPDKFGSCVPHTTRPKRDYEVDGRDYHFVISREQMEKDIQEHKFIEAGQYNDNLYGTSVQSVRFVAERGKHCILDVSGNAIKRLQVAQLYPIAIFIKPRSLEPLMEMNKRLTEEQAKKTYDRAIKLEQEFGEYFTAIVQGDTLEDIYNQCKLVIEEQSGPFIWIPSKEKL

SEQ ID NO: 24881 - protein, 975 aa, Homo sapiens
  Payload ID: 4918
  Gene Symbol: DLG2
  Gene Name: discs, large homolog 2 (Drosophila)
  Uniprot ID: Q15700
  ENSP ID: ENSP00000365272
MGIFKSSLFQALLDIQEFYEVTLLNSQKSCEQKIEEANQVLQKWEKTSLLAPCHDRLQKSSELTDCSGSKENASCIEQNKENQSFENETDETTTQNQGRCPAQNCSVEAPAWMPVHHCTKYRYQDEDAPHDHSLPRLTHEVRGPELVHVSEKNLSQIENVHGYVLQSHISPLKASPAPIIVNTDTLDTIPYVNGTEIEYEFEEITLERGNSGLGFSIAGGTDNPHIGDDPGIFITKIIPGGAAAEDGRLRVNDCILRVNEVDVSEVSHSKAVEALKEAGSIVRLYVRRRRPILETVVEIKLFKGPKGLGFSIAGGVGNQHIPGDNSIYVTKIIDGGAAQKDGRLQVGDRLLMVNNYSLEEVTHEEAVAILKNTSEVVYLKVGKPTTIYMTDPYGPPDITHSYSPPMENHLLSGNNGTLEYKTSLPPISPGRYSPIPKHMLVDDDYTRPPEPVYSTVNKLCDKPASPRHYSPVECDKSFLLSAPYSHYHLGLLPDSEMTSHSQHSTATRQPSMTLQRAVSLEGEPRKVVLHKGSTGLGFNIVGGEDGEGIFVSFILAGGPADLSGELQRGDQILSVNGIDLRGASHEQAAAALKGAGQTVTIIAQYQPEDYARFEAKIHDLREQMMNHSMSSGSGSLRTNQKRSLYVRAMFDYDKSKDSGLPSQGLSFKYGDILHVINASDDEWWQARRVMLEGDSEEMGVIPSKRRVERKERARLKTVKFNAKPGVIDSKGSFNDKRKKSFIFSRKFPFYKNKEQSEQETSDPERGQEDLILSYEPVTRQEINYTRPVIILGPMKDRINDDLISEFPDKFGSCVPHTTRPKRDYEVDGRDYHFVISREQMEKDIQEHKFIEAGQYNDNLYGTSVQSVRFVAERGKHCILDVSGNAIKRLQVAQLYPIAIFIKPRSLEPLMEMNKRLTEEQAKKTYDRAIKLEQEFGEYFTAIVQGDTLEDIYNQCKLVIEEQSGPFIWIPSKEKL

SEQ ID NO: 24882 - protein, 232 aa, Homo sapiens
  Payload ID: 4918
  Gene Symbol: DLG2
  Gene Name: discs, large homolog 2 (Drosophila)
  ENSP ID: ENSP00000381344
MTKVNGTEIEYEFEEITLERGNSGLGFSIAGGTDNPHIGDDPGIFITKIIPGGAAAEDGRLRVNDCILRVNEVDVSEVSHSKAVEALKEAGSIVRLYVRRRRPILETVVEIKLFKGPKGLGFSIAGGVGNQHIPGDNSIYVTKIIDGGAAQKDGRLQVGDRLLMVNNYSLEEVTHEEAVAILKNTSEVVYLKVGKPTTIYMTDPYGPPDITHSYSPPMENHLLSGNNGTLEY

SEQ ID NO: 24883 - protein, 552 aa, Homo sapiens
  Payload ID: 4918
  Gene Symbol: DLG2
  Gene Name: discs, large homolog 2 (Drosophila)
  ENSP ID: ENSP00000381346
MNAYLTKQHSCSRGSDGMDAVRSAPTLIRDAHCACGWQRNCQGLGYSSQTMPSSGPGGPASNRTGGSSFNRTLWDSVRKSPHKTSTKGKGTCGEHCTCPHGWFSPAQASPAPIIVNTDTLDTIPYVNGTEIEYEFEEITLERGNSGLGFSIAGGTDNPHIGDDPGIFITKIIPGGAAAEDGRLRVNDCILRVNEVDVSEVSHSKAVEALKEAGSIVRLYVRRRRPILETVVEIKLFKGPKGLGFSIAGGVGNQHIPGDNSIYVTKIIDGGAAQKDGRLQVGDRLLMVNNYSLEEVTHEEAVAILKNTSEVVYLKVGKPTTIYMTDPYGPPDITHSYSPPMENHLLSGNNGTLEYKTSLPPISPGRYSPIPKHMLVDDDYTRPPEPVYSTVNKLCDKPASPRHYSPVECDKSFLLSAPYSHYHLGLLPDSEMTSHSQHSTATRQPSMTLQRAVSLEGEPRKVVLHKGSTGLGFNIVGGEDGEGIFVSFILAGGPADLSGELQRGDQILSVNGIDLRGASHEQAAAALKGAGQTVTIIAQYQPEGQSELKLIMF

SEQ ID NO: 24884 - protein, 129 aa, Homo sapiens
  Payload ID: 4918
  Gene Symbol: DLG2
  Gene Name: discs, large homolog 2 (Drosophila)
  ENSP ID: ENSP00000381349
MMNHSMSSGSGSLRTNQKRSLYVRAMFDYDKSKDSGLPSQGLSFKYGDILHVINASDDEWWQARRVMLEGDSEEMGVIPSKRRVERKERARLKTVKFNAKPGVIDSKGDIPGLGDDGYGTKTLNTFFIC

SEQ ID NO: 24885 - protein, 791 aa, Homo sapiens
  Payload ID: 4918
  Gene Symbol: DLG2
  Gene Name: discs, large homolog 2 (Drosophila)
  ENSP ID: ENSP00000381353
MQHAFIPASPAPIIVNTDTLDTIPYVNGTEIEYEFEEITLERGNSGLGFSIAGGTDNPHIGDDPGIFITKIIPGGAAAEDGRLRVNDCILRVNEVDVSEVSHSKAVEALKEAGSIVRLYVRRRRPILETVVEIKLFKGPKGLGFSIAGGVGNQHIPGDNSIYVTKIIDGGAAQKDGRLQVGDRLLMVNNYSLEEVTHEEAVAILKNTSEVVYLKVGKPTTIYMTDPYGPPDITHSYSPPMENHLLSGNNGTLEYKTSLPPISPGRYSPIPKHMLVDDDYTRPPEPVYSTVNKLCDKPASPRHYSPVECDKSFLLSAPYSHYHLGLLPDSEMTSHSQHSTATRQPSMTLQRAVSLEGEPRKVVLHKGSTGLGFNIVGGEDGEGIFVSFILAGGPADLSGELQRGDQILSVNGIDLRGASHEQAAAALKGAGQTVTIIAQYQPEDYARFEAKIHDLREQMMNHSMSSGSGSLRTNQKRSLYVRAMFDYDKSKDSGLPSQGLSFKYGDILHVINASDDEWWQARRVMLEGDSEEMGVIPSKRRVERKERARLKTVKFNAKPGVIDSKGDIPGLGDDGYGTKTLRGQEDLILSYEPVTRQEINYTRPVIILGPMKDRINDDLISEFPDKFGSCVPHTTRPKRDYEVDGRDYHFVISREQMEKDIQEHKFIEAGQYNDNLYGTSVQSVRFVAERGKHCILDVSGNAIKRLQVAQLYPIAIFIKPRSLEPLMEMNKRLTEEQAKKTYDRAIKLEQEFGEYFTAIVQGDTLEDIYNQCKLVIEEQSGPFIWIPSKEKL

SEQ ID NO: 24886 - protein, 870 aa, Homo sapiens
  Payload ID: 4918
  Gene Symbol: DLG2
  Gene Name: discs, large homolog 2 (Drosophila)
  Uniprot ID: Q15700
  ENSP ID: ENSP00000381355
MFFACYCALRTNVKKYRYQDEDAPHDHSLPRLTHEVRGPELVHVSEKNLSQIENVHGYVLQSHISPLKASPAPIIVNTDTLDTIPYVNGTEIEYEFEEITLERGNSGLGFSIAGGTDNPHIGDDPGIFITKIIPGGAAAEDGRLRVNDCILRVNEVDVSEVSHSKAVEALKEAGSIVRLYVRRRRPILETVVEIKLFKGPKGLGFSIAGGVGNQHIPGDNSIYVTKIIDGGAAQKDGRLQVGDRLLMVNNYSLEEVTHEEAVAILKNTSEVVYLKVGKPTTIYMTDPYGPPDITHSYSPPMENHLLSGNNGTLEYKTSLPPISPGRYSPIPKHMLVDDDYTRPPEPVYSTVNKLCDKPASPRHYSPVECDKSFLLSAPYSHYHLGLLPDSEMTSHSQHSTATRQPSMTLQRAVSLEGEPRKVVLHKGSTGLGFNIVGGEDGEGIFVSFILAGGPADLSGELQRGDQILSVNGIDLRGASHEQAAAALKGAGQTVTIIAQYQPEDYARFEAKIHDLREQMMNHSMSSGSGSLRTNQKRSLYVRAMFDYDKSKDSGLPSQGLSFKYGDILHVINASDDEWWQARRVMLEGDSEEMGVIPSKRRVERKERARLKTVKFNAKPGVIDSKGSFNDKRKKSFIFSRKFPFYKNKEQSEQETSDPERGQEDLILSYEPVTRQEINYTRPVIILGPMKDRINDDLISEFPDKFGSCVPHTTRPKRDYEVDGRDYHFVISREQMEKDIQEHKFIEAGQYNDNLYGTSVQSVRFVAERGKHCILDVSGNAIKRLQVAQLYPIAIFIKPRSLEPLMEMNKRLTEEQAKKTYDRAIKLEQEFGEYFTAIVQGDTLEDIYNQCKLVIEEQSGPFIWIPSKEKL

SEQ ID NO: 24887 - protein, 348 aa, Homo sapiens
  Payload ID: 4918
  Gene Symbol: DLG2
  Gene Name: discs, large homolog 2 (Drosophila)
  ENSP ID: ENSP00000385113
MMNHSMSSGSGSLRTNQKRSLYVRAMFDYDKSKDSGLPSQGLSFKYGDILHVINASDDEWWQARRVMLEGDSEEMGVIPSKRRVERKERARLKTVKFNAKPGVIDSKGDIPGLGDDGYGTKTLKHVSSNASDSESSYRGQEDLILSYEPVTRQEINYTRPVIILGPMKDRINDDLISEFPDKFGSCVPHTTRPKRDYEVDGRDYHFVISREQMEKDIQEHKFIEAGQYNDNLYGTSVQSVRFVAERGKHCILDVSGNAIKRLQVAQLYPIAIFIKPRSLEPLMEMNKRLTEEQAKKTYDRAIKLEQEFGEYFTAIVQGDTLEDIYNQCKLVIEEQSGPFIWIPSKEKL

SEQ ID NO: 24888 - protein, 221 aa, Homo sapiens
  Payload ID: 4918
  Gene Symbol: DLG2
  Gene Name: discs, large homolog 2 (Drosophila)
  ENSP ID: ENSP00000391017
MMNHSMSSGSGSLRTNQKRSLYVRAMFDYDKSKDSGLPSQGLSFKYGDILHVINASDDEWWQARRVMLEGDSEEMGVIPSKRRVERKERARLKTVKFNAKPGVIDSKGSFNDKRKKSFIFSRKFPFYKNKEQSEQETSDPERGQEDLILSYEPVTRQEINYTRPVIILGPMKDRINDDLISEFPDKFGSCVPHTTRPKRDYEVDGRDYHFVISREQMEKDI

SEQ ID NO: 24889 - protein, 334 aa, Homo sapiens
  Payload ID: 4918
  Gene Symbol: DLG2
  Gene Name: discs, large homolog 2 (Drosophila)
  Uniprot ID: Q15700
  ENSP ID: ENSP00000393049
MMNHSMSSGSGSLRTNQKRSLYVRAMFDYDKSKDSGLPSQGLSFKYGDILHVINASDDEWWQARRVMLEGDSEEMGVIPSKRRVERKERARLKTVKFNAKPGVIDSKGDIPGLGDDGYGTKTLRGQEDLILSYEPVTRQEINYTRPVIILGPMKDRINDDLISEFPDKFGSCVPHTTRPKRDYEVDGRDYHFVISREQMEKDIQEHKFIEAGQYNDNLYGTSVQSVRFVAERGKHCILDVSGNAIKRLQVAQLYPIAIFIKPRSLEPLMEMNKRLTEEQAKKTYDRAIKLEQEFGEYFTAIVQGDTLEDIYNQCKLVIEEQSGPFIWIPSKEKL

SEQ ID NO: 24890 - protein, 749 aa, Homo sapiens
  Payload ID: 4918
  Gene Symbol: DLG2
  Gene Name: discs, large homolog 2 (Drosophila)
  Uniprot ID: Q15700
  ENSP ID: ENSP00000402275
MQRPSVSRAENYQLLWDTIASLKQCEQAMQHAFIPVNGTEIEYEFEEITLERGNSGLGFSIAGGTDNPHIGDDPGIFITKIIPGGAAAEDGRLRVNDCILRVNEVDVSEVSHSKAVEALKEAGSIVRLYVRRRRPILETVVEIKLFKGPKGLGFSIAGGVGNQHIPGDNSIYVTKIIDGGAAQKDGRLQVGDRLLMVNNYSLEEVTHEEAVAILKNTSEVVYLKVGKPTTIYMTDPYGPPDITHSYSPPMENHLLSGNNGTLEYKTSLPPISPGRYSPIPKHMLVDDDYTSHSQHSTATRQPSMTLQRAVSLEGEPRKVVLHKGSTGLGFNIVGGEDGEGIFVSFILAGGPADLSGELQRGDQILSVNGIDLRGASHEQAAAALKGAGQTVTIIAQYQPEDYARFEAKIHDLREQMMNHSMSSGSGSLRTNQKRSLYVRAMFDYDKSKDSGLPSQGLSFKYGDILHVINASDDEWWQARRVMLEGDSEEMGVIPSKRRVERKERARLKTVKFNAKPGVIDSKGDIPGLGDDGYGTKTLRGQEDLILSYEPVTRQEINYTRPVIILGPMKDRINDDLISEFPDKFGSCVPHTTRPKRDYEVDGRDYHFVISREQMEKDIQEHKFIEAGQYNDNLYGTSVQSVRFVAERGKHCILDVSGNAIKRLQVAQLYPIAIFIKPRSLEPLMEMNKRLTEEQAKKTYDRAIKLEQEFGEYFTAIVQGDTLEDIYNQCKLVIEEQSGPFIWIPSKEKL

SEQ ID NO: 24891 - protein, 108 aa, Homo sapiens
  Payload ID: 4918
  Gene Symbol: DLG2
  Gene Name: discs, large homolog 2 (Drosophila)
  ENSP ID: ENSP00000403239
MSFDSQCDLRSSEPDYARFEAKIHDLREQMMNHSMSSGSGSLRTNQKRSLYVRAMFDYDKSKDSGLPSQGLSFKYGDILHVINASDDEWWQARRVMLEGDSEEMGVIP

SEQ ID NO: 24892 - protein, 165 aa, Homo sapiens
  Payload ID: 4918
  Gene Symbol: DLG2
  Gene Name: discs, large homolog 2 (Drosophila)
  ENSP ID: ENSP00000409133
RKKSFIFSRKFPFYKNKEQSEQETSDPELNYTRPVIILGPMKDRINDDLISEFPDKFGSCVPHTTRPKRDYEVDGRDYHFVISREQMEKDIQEHKFIEAGQYNDNLYGTSVQSVRFVAERGKHCILDVSGNAIKRLQVAQLYPIAIFIKPRSLEPLMEMNKRLTE

SEQ ID NO: 24893 - protein, 866 aa, Homo sapiens
  Payload ID: 4918
  Gene Symbol: DLG2
  Gene Name: discs, large homolog 2 (Drosophila)
  ENSP ID: ENSP00000432894
MFFACYCALRTNVKKYRYQDEDAPHDHSLPRLTHEVRGPELVHVSEKNLSQIENVHGYVLQSHISPLKASPAPIIVNTDTLDTIPYVNGTEIEYEFEEITLERGNSGLGFSIAGGTDNPHIGDDPGIFITKIIPGGAAAEDGRLRVNDCILRVNEVDVSEVSHSKAVEALKEAGSIVRLYVRRRRPILETVVEIKLFKGPKGLGFSIAGGVGNQHIPGDNSIYVTKIIDGGAAQKDGRLQVGDRLLMVNNYSLEEVTHEEAVAILKNTSEVVYLKVGKPTTIYMTDPYGPPDITHSYSPPMENHLLSGNNGTLEYKTSLPPISPGRYSPIPKHMLVDDDYTRPPEPVYSTVNKLCDKPASPRHYSPVECDKSFLLSAPYSHYHLGLLPDSEMTSHSQHSTATRQPSMTLQRAVSLEGEPRKVVLHKGSTGLGFNIVGGEDGEGIFVSFILAGGPADLSGELQRGDQILSVNGIDLRGASHEQAAAALKGAGQTVTIIAQYQPEDYARFEAKIHDLREQMMNHSMSSGSGSLRTNQKRSLYVRAMFDYDKSKDSGLPSQGLSFKYGDILHVINASDDEWWQARRVMLEGDSEEMGVIPSKRRVERKERARLKTVKFNAKPGVIDSKGDIPGLGDDGYGTKTLKHVSSNASDSESSYRGQEDLILSYEPVTRQEINYTRPVIILGPMKDRINDDLISEFPDKFGSCVPHTTRPKRDYEVDGRDYHFVISREQMEKDIQEHKFIEAGQYNDNLYGTSVQSVRFVAERGKHCILDVSGNAIKRLQVAQLYPIAIFIKPRSLEPLMEMNKRLTEEQAKKTYDRAIKLEQEFGEYFTAIVQGDTLEDIYNQCKLVIEEQSGPFIWIPSKEKL

SEQ ID NO: 24894 - protein, 811 aa, Homo sapiens
  Payload ID: 4918
  Gene Symbol: DLG2
  Gene Name: discs, large homolog 2 (Drosophila)
  ENSP ID: ENSP00000433848
MQRPSVSRAENYQLLWDTIASLKQCEQAMQHAFIPASPAPIIVNTDTLDTIPYVNGTEIEYEFEEITLERGNSGLGFSIAGGTDNPHIGDDPGIFITKIIPGGAAAEDGRLRVNDCILRVNEVDVSEVSHSKAVEALKEAGSIVRLYVRRRRPILETVVEIKLFKGPKGLGFSIAGGVGNQHIPGDNSIYVTKIIDGGAAQKDGRLQVGDRLLMVNNYSLEEVTHEEAVAILKNTSEVVYLKVGKPTTIYMTDPYGPPDITHSYSPPMENHLLSGNNGTLEYKTSLPPISPGRYSPIPKHMLVDDDYTRPPEPVYSTVNKLCDKPASPRHYSPVECDKSFLLSAPYSHYHLGLLPDSEMTSHSQHSTATRQPSMTLQRAVSLEGEPRKVVLHKGSTGLGFNIVGGEDGEGIFVSFILAGGPADLSGELQRGDQILSVNGIDLRGASHEQAAAALKGAGQTVTIIAQYQPEDYARFEAKIHDLREQMMNHSMSSGSGSLRTNQKRSLYVRAMFDYDKSKDSGLPSQGLSFKYGDILHVINASDDEWWQARRVMLEGDSEEMGVIPSKRRVERKERARLKTVKFNAKPGVIDSKGSFNDKRKKSFIFSRKFPFYKNKEQSEQETSDPERGQEDLILSYEPVTRQEINYTRPVIILGPMKDRINDDLISEFPDKFGSCVPHTTRPKRDYEVDGRDYHFVISREQMEKDIQEHKFIEAGQYNDNLYGTSVQSVRFVAERGKHCILDVSGNAIKRLQVAQLYPIAIFIKPRSLEPLMEMNKRLTEEQAKKTYDRAIKLEQEFGEYFTGKFTFTLVV

SEQ ID NO: 24895 - protein, 37 aa, Homo sapiens
  Payload ID: 4918
  Gene Symbol: DLG2
  Gene Name: discs, large homolog 2 (Drosophila)
  ENSP ID: ENSP00000434095
MQRPSVSRAENYQLLWDTIASLKQCEQAMQHAFIPLE

SEQ ID NO: 24896 - protein, 93 aa, Homo sapiens
  Payload ID: 4918
  Gene Symbol: DLG2
  Gene Name: discs, large homolog 2 (Drosophila)
  ENSP ID: ENSP00000434346
MMNHSMSSGSGSLRTNQKRSLYVRAMFDYDKSKDSGLPSQGLSFKYGDILHVINASDDEWWQARRVMLEGDSEEMGVIPSKRRVERKERARLK

SEQ ID NO: 24897 - protein, 74 aa, Homo sapiens
  Payload ID: 4918
  Gene Symbol: DLG2
  Gene Name: discs, large homolog 2 (Drosophila)
  ENSP ID: ENSP00000435809
MDCLCIVTTKQNQGRCPAQNCSVEAPAWMPVHHCTKYRYQDEDAPHDHSLPRLTHEVRGPELVHVSEKNLSQIE

SEQ ID NO: 24898 - protein, 852 aa, Homo sapiens
  Payload ID: 4918
  Gene Symbol: DLG2
  Gene Name: discs, large homolog 2 (Drosophila)
  ENSP ID: ENSP00000435849
MFFACYCALRTNVKKYRYQDEDAPHDHSLPRLTHEVRGPELVHVSEKNLSQIENVHGYVLQSHISPLKASPAPIIVNTDTLDTIPYVNGTEIEYEFEEITLERGNSGLGFSIAGGTDNPHIGDDPGIFITKIIPGGAAAEDGRLRVNDCILRVNEVDVSEVSHSKAVEALKEAGSIVRLYVRRRRPILETVVEIKLFKGPKGLGFSIAGGVGNQHIPGDNSIYVTKIIDGGAAQKDGRLQVGDRLLMVNNYSLEEVTHEEAVAILKNTSEVVYLKVGKPTTIYMTDPYGPPDITHSYSPPMENHLLSGNNGTLEYKTSLPPISPGRYSPIPKHMLVDDDYTRPPEPVYSTVNKLCDKPASPRHYSPVECDKSFLLSAPYSHYHLGLLPDSEMTSHSQHSTATRQPSMTLQRAVSLEGEPRKVVLHKGSTGLGFNIVGGEDGEGIFVSFILAGGPADLSGELQRGDQILSVNGIDLRGASHEQAAAALKGAGQTVTIIAQYQPEDYARFEAKIHDLREQMMNHSMSSGSGSLRTNQKRSLYVRAMFDYDKSKDSGLPSQGLSFKYGDILHVINASDDEWWQARRVMLEGDSEEMGVIPSKRRVERKERARLKTVKFNAKPGVIDSKGDIPGLGDDGYGTKTLRGQEDLILSYEPVTRQEINYTRPVIILGPMKDRINDDLISEFPDKFGSCVPHTTRPKRDYEVDGRDYHFVISREQMEKDIQEHKFIEAGQYNDNLYGTSVQSVRFVAERGKHCILDVSGNAIKRLQVAQLYPIAIFIKPRSLEPLMEMNKRLTEEQAKKTYDRAIKLEQEFGEYFTAIVQGDTLEDIYNQCKLVIEEQSGPFIWIPSKEKL

SEQ ID NO: 24899 - protein, 109 aa, Homo sapiens
  Payload ID: 4918
  Gene Symbol: DLG2
  Gene Name: discs, large homolog 2 (Drosophila)
  ENSP ID: ENSP00000436020
MMNHSMSSGSGSLRTNQKRSLYVRAMFDYDKSKDSGLPSQGLSFKYGDILHVINASDDEWWQARRVMLEGDSEEMGVIPSKRRVERKERARLKTVKFNAKPGVIDSKGD

SEQ ID NO: 24900 - protein, 142 aa, Homo sapiens
  Payload ID: 4918
  Gene Symbol: DLG2
  Gene Name: discs, large homolog 2 (Drosophila)
  ENSP ID: ENSP00000436302
MLKTPGNLLKSCDYARFEAKIHDLREQMMNHSMSSGSGSLRTNQKRSLYVRAMFDYDKSKDSGLPSQGLSFKYGDILHVINASDDEWWQARRVMLEGDSEEMGVIPSKRRVERKERARLKTVKFNAKPGVIDSKGLLEFKYA

SEQ ID NO: 24901 - protein, 849 aa, Homo sapiens
  Payload ID: 4919
  Gene Symbol: DLG3
  Gene Name: discs, large homolog 3 (Drosophila)
  ENSP ID: ENSP00000194900
MHKHQHCCKCPECYEVTRLAALRRLEPPGYGDWQVPDPYGPGGGNGASAGYGGYSSQTLPSQAGATPTPRTKAKLIPTGRDVGPVPPKPVPGKSTPKLNGSGPSWWPECTCTNRDWYEQARPAPLLVNPETLKHSLSVNGSDGMFKYEEIVLERGNSGLGFSIAGGIDNPHVPDDPGIFITKIIPGGAAAMDGRLGVNDCVLRVNEVDVSEVVHSRAVEALKEAGPVVRLVVRRRQPPPETIMEVNLLKGPKGLGFSIAGGIGNQHIPGDNSIYITKIIEGGAAQKDGRLQIGDRLLAVNNTNLQDVRHEEAVASLKNTSDMVYLKVAKPGSLHLNDMYAPPDYASTFTALADNHISHNSSLGYLGAVESKVSYPAPPQVPPTRYSPIPRHMLAEEDFTREPRKIILHKGSTGLGFNIVGGEDGEGIFVSFILAGGPADLSGELRRGDRILSVNGVNLRNATHEQAAAALKRAGQSVTIVAQYRPEEYSRFESKIHDLREQMMNSSMSSGSGSLRTSEKRSLYVRALFDYDRTRDSCLPSQGLSFSYGDILHVINASDDEWWQARLVTPHGESEQIGVIPSKKRVEKKERARLKTVKFHARTGMIESNRDFPGLSDDYYGAKNLKGVTSNTSDSESSSKGQEDAILSYEPVTRQEIHYARPVIILGPMKDRVNDDLISEFPHKFGSCVPHTTRPRRDNEVDGQDYHFVVSREQMEKDIQDNKFIEAGQFNDNLYGTSIQSVRAVAERGKHCILDVSGNAIKRLQQAQLYPIAIFIKPKSIEALMEMNRRQTYEQANKIYDKAMKLEQEFGEYFTAIVQGDSLEEIYNKIKQIIEDQSGHYIWVPSPEKL

SEQ ID NO: 24902 - protein, 512 aa, Homo sapiens
  Payload ID: 4919
  Gene Symbol: DLG3
  Gene Name: discs, large homolog 3 (Drosophila)
  Uniprot ID: Q92796
  ENSP ID: ENSP00000363475
MERARKFSGSGLAMGLGSASASAWRRASQRWAWPLRSLRPGGDAREPRKIILHKGSTGLGFNIVGGEDGEGIFVSFILAGGPADLSGELRRGDRILSVNGVNLRNATHEQAAAALKRAGQSVTIVAQYRPEEYSRFESKIHDLREQMMNSSMSSGSGSLRTSEKRSLYVRALFDYDRTRDSCLPSQGLSFSYGDILHVINASDDEWWQARLVTPHGESEQIGVIPSKKRVEKKERARLKTVKFHARTGMIESNRSIKTKRKKSFRLSRKFPFYKSKENMAQESSIQEQGVTSNTSDSESSSKGQEDAILSYEPVTRQEIHYARPVIILGPMKDRVNDDLISEFPHKFGSCVPHTTRPRRDNEVDGQDYHFVVSREQMEKDIQDNKFIEAGQFNDNLYGTSIQSVRAVAERGKHCILDVSGNAIKRLQQAQLYPIAIFIKPKSIEALMEMNRRQTYEQANKIYDKAMKLEQEFGEYFTAIVQGDSLEEIYNKIKQIIEDQSGHYIWVPSPEKL

SEQ ID NO: 24903 - protein, 817 aa, Homo sapiens
  Payload ID: 4919
  Gene Symbol: DLG3
  Gene Name: discs, large homolog 3 (Drosophila)
  Uniprot ID: Q92796
  ENSP ID: ENSP00000363480
MHKHQHCCKCPECYEVTRLAALRRLEPPGYGDWQVPDPYGPGGGNGASAGYGGYSSQTLPSQAGATPTPRTKAKLIPTGRDVGPVPPKPVPGKSTPKLNGSGPSWWPECTCTNRDWYEQVNGSDGMFKYEEIVLERGNSGLGFSIAGGIDNPHVPDDPGIFITKIIPGGAAAMDGRLGVNDCVLRVNEVDVSEVVHSRAVEALKEAGPVVRLVVRRRQPPPETIMEVNLLKGPKGLGFSIAGGIGNQHIPGDNSIYITKIIEGGAAQKDGRLQIGDRLLAVNNTNLQDVRHEEAVASLKNTSDMVYLKVAKPGSLHLNDMYAPPDYASTFTALADNHISHNSSLGYLGAVESKVSYPAPPQVPPTRYSPIPRHMLAEEDFTREPRKIILHKGSTGLGFNIVGGEDGEGIFVSFILAGGPADLSGELRRGDRILSVNGVNLRNATHEQAAAALKRAGQSVTIVAQYRPEEYSRFESKIHDLREQMMNSSMSSGSGSLRTSEKRSLYVRALFDYDRTRDSCLPSQGLSFSYGDILHVINASDDEWWQARLVTPHGESEQIGVIPSKKRVEKKERARLKTVKFHARTGMIESNRDFPGLSDDYYGAKNLKGQEDAILSYEPVTRQEIHYARPVIILGPMKDRVNDDLISEFPHKFGSCVPHTTRPRRDNEVDGQDYHFVVSREQMEKDIQDNKFIEAGQFNDNLYGTSIQSVRAVAERGKHCILDVSGNAIKRLQQAQLYPIAIFIKPKSIEALMEMNRRQTYEQANKIYDKAMKLEQEFGEYFTAIVQGDSLEEIYNKIKQIIEDQSGHYIWVPSPEKL

SEQ ID NO: 24904 - protein, 366 aa, Homo sapiens
  Payload ID: 4919
  Gene Symbol: DLG3
  Gene Name: discs, large homolog 3 (Drosophila)
  Uniprot ID: Q92796
  ENSP ID: ENSP00000441393
MMNSSMSSGSGSLRTSEKRSLYVRALFDYDRTRDSCLPSQGLSFSYGDILHVINASDDEWWQARLVTPHGESEQIGVIPSKKRVEKKERARLKTVKFHARTGMIESNRSIKTKRKKSFRLSRKFPFYKSKENMAQESSIQEQGVTSNTSDSESSSKGQEDAILSYEPVTRQEIHYARPVIILGPMKDRVNDDLISEFPHKFGSCVPHTTRPRRDNEVDGQDYHFVVSREQMEKDIQDNKFIEAGQFNDNLYGTSIQSVRAVAERGKHCILDVSGNAIKRLQQAQLYPIAIFIKPKSIEALMEMNRRQTYEQANKIYDKAMKLEQEFGEYFTAIVQGDSLEEIYNKIKQIIEDQSGHYIWVPSPEKL

SEQ ID NO: 24905 - protein, 721 aa, Homo sapiens
  Payload ID: 4920
  Gene Symbol: DLG4
  Gene Name: discs, large homolog 4 (Drosophila)
  Uniprot ID: P78352
  ENSP ID: ENSP00000307471
MDCLCIVTTKKYRYQDEDTPPLEHSPAHLPNQANSPPVIVNTDTLEAPGYVNGTEGEMEYEEITLERGNSGLGFSIAGGTDNPHIGDDPSIFITKIIPGGAAAQDGRLRVNDSILFVNEVDVREVTHSAAVEALKEAGSIVRLYVMRRKPPAEKVMEIKLIKGPKGLGFSIAGGVGNQHIPGDNSIYVTKIIEGGAAHKDGRLQIGDKILAVNSVGLEDVMHEDAVAALKNTYDVVYLKVAKPSNAYLSDSYAPPDITTSYSQHLDNEISHSSYLGTDYPTAMTPTSPRRYSPVAKDLLGEEDIPREPRRIVIHRGSTGLGFNIVGGEDGEGIFISFILAGGPADLSGELRKGDQILSVNGVDLRNASHEQAAIALKNAGQTVTIIAQYKPEEYSRFEAKIHDLREQLMNSSLGSGTASLRSNPKRGFYIRALFDYDKTKDCGFLSQALSFRFGDVLHVIDASDEEWWQARRVHSDSETDDIGFIPSKRRVERREWSRLKAKDWGSSSGSQGREDSVLSYETVTQMEVHYARPIIILGPTKDRANDDLLSEFPDKFGSCVPHTTRPKREYEIDGRDYHFVSSREKMEKDIQAHKFIEAGQYNSHLYGTSVQSVREVAEQGKHCILDVSANAVRRLQAAHLHPIAIFIRPRSLENVLEINKRITEEQARKAFDRATKLEQEFTECFSAIVEGDSFEEIYHKVKRVIEDLSGPYIWVPARERL

SEQ ID NO: 24906 - protein, 724 aa, Homo sapiens
  Payload ID: 4920
  Gene Symbol: DLG4
  Gene Name: discs, large homolog 4 (Drosophila)
  Uniprot ID: P78352
  ENSP ID: ENSP00000382425
MDCLCIVTTKKYRYQDEDTPPLEHSPAHLPNQANSPPVIVNTDTLEAPGYELQVNGTEGEMEYEEITLERGNSGLGFSIAGGTDNPHIGDDPSIFITKIIPGGAAAQDGRLRVNDSILFVNEVDVREVTHSAAVEALKEAGSIVRLYVMRRKPPAEKVMEIKLIKGPKGLGFSIAGGVGNQHIPGDNSIYVTKIIEGGAAHKDGRLQIGDKILAVNSVGLEDVMHEDAVAALKNTYDVVYLKVAKPSNAYLSDSYAPPDITTSYSQHLDNEISHSSYLGTDYPTAMTPTSPRRYSPVAKDLLGEEDIPREPRRIVIHRGSTGLGFNIVGGEDGEGIFISFILAGGPADLSGELRKGDQILSVNGVDLRNASHEQAAIALKNAGQTVTIIAQYKPEEYSRFEAKIHDLREQLMNSSLGSGTASLRSNPKRGFYIRALFDYDKTKDCGFLSQALSFRFGDVLHVIDASDEEWWQARRVHSDSETDDIGFIPSKRRVERREWSRLKAKDWGSSSGSQGREDSVLSYETVTQMEVHYARPIIILGPTKDRANDDLLSEFPDKFGSCVPHTTRPKREYEIDGRDYHFVSSREKMEKDIQAHKFIEAGQYNSHLYGTSVQSVREVAEQGKHCILDVSANAVRRLQAAHLHPIAIFIRPRSLENVLEINKRITEEQARKAFDRATKLEQEFTECFSAIVEGDSFEEIYHKVKRVIEDLSGPYIWVPARERL

SEQ ID NO: 24907 - protein, 767 aa, Homo sapiens
  Payload ID: 4920
  Gene Symbol: DLG4
  Gene Name: discs, large homolog 4 (Drosophila)
  Uniprot ID: P78352
  ENSP ID: ENSP00000382428
MSQRPRAPRSALWLLAPPLLRWAPPLLTVLHSDLFQALLDILDYYEASLSESQKYRYQDEDTPPLEHSPAHLPNQANSPPVIVNTDTLEAPGYELQVNGTEGEMEYEEITLERGNSGLGFSIAGGTDNPHIGDDPSIFITKIIPGGAAAQDGRLRVNDSILFVNEVDVREVTHSAAVEALKEAGSIVRLYVMRRKPPAEKVMEIKLIKGPKGLGFSIAGGVGNQHIPGDNSIYVTKIIEGGAAHKDGRLQIGDKILAVNSVGLEDVMHEDAVAALKNTYDVVYLKVAKPSNAYLSDSYAPPDITTSYSQHLDNEISHSSYLGTDYPTAMTPTSPRRYSPVAKDLLGEEDIPREPRRIVIHRGSTGLGFNIVGGEDGEGIFISFILAGGPADLSGELRKGDQILSVNGVDLRNASHEQAAIALKNAGQTVTIIAQYKPEEYSRFEAKIHDLREQLMNSSLGSGTASLRSNPKRGFYIRALFDYDKTKDCGFLSQALSFRFGDVLHVIDASDEEWWQARRVHSDSETDDIGFIPSKRRVERREWSRLKAKDWGSSSGSQGREDSVLSYETVTQMEVHYARPIIILGPTKDRANDDLLSEFPDKFGSCVPHTTRPKREYEIDGRDYHFVSSREKMEKDIQAHKFIEAGQYNSHLYGTSVQSVREVAEQGKHCILDVSANAVRRLQAAHLHPIAIFIRPRSLENVLEINKRITEEQARKAFDRATKLEQEFTECFSAIVEGDSFEEIYHKVKRVIEDLSGPYIWVPARERL

SEQ ID NO: 24908 - protein, 234 aa, Homo sapiens
  Payload ID: 4920
  Gene Symbol: DLG4
  Gene Name: discs, large homolog 4 (Drosophila)
  ENSP ID: ENSP00000388122
MDCLCIVTTKKYRYQDEDTPPLEHSPAHLPNQVNAPELVHVAERNLSHLEAGHGVVGHAHLSPFKANSPPVIVNTDTLEAPGYVNGTEGEMEYEEITLERGNSGLGFSIAGGTDNPHIGDDPSIFITKIIPGGAAAQDGRLRVNDSILFVNEVDVREVTHSAAVEALKEAGSIVRLYVMRRKPPAEKVMEIKLIKGPKGLGFSIAGGVGNQHIPGDNSIYVTKIIEGGAAHKDG

SEQ ID NO: 24909 - protein, 281 aa, Homo sapiens
  Payload ID: 4920
  Gene Symbol: DLG4
  Gene Name: discs, large homolog 4 (Drosophila)
  ENSP ID: ENSP00000407918
MPINGVNLAWKYRYQDEDTPPLEHSPAHLPNQVNAPELVHVAERNLSHLEAGHGVVGHAHLSPFKANSPPVIVNTDTLEAPGYELQVNGTEGEMEYEEITLERGNSGLGFSIAGGTDNPHIGDDPSIFITKIIPGGAAAQDGRLRVNDSILFVNEVDVREVTHSAAVEALKEAGSIVRLYVMRRKPPAEKVMEIKLIKGPKGLGFSIAGGVGNQHIPGDNSIYVTKIIEGGAAHKDGRLQIGDKILAVNSVGLEDVMHEDAVAALKNTYDVVYLKVAKPSN

SEQ ID NO: 24910 - protein, 296 aa, Homo sapiens
  Payload ID: 4920
  Gene Symbol: DLG4
  Gene Name: discs, large homolog 4 (Drosophila)
  ENSP ID: ENSP00000460625
MDCLCIVTTKKYRYQDEDTPPLEHSPAHLPNQANSPPVIVNTDTLEAPGYVNGTEGEMEYEEITLERGNSGLGFSIAGGTDNPHIGDDPSIFITKIIPGGAAAQDGRLRVNDSILFVNEVDVREVTHSAAVEALKEAGSIVRLYVMRRKPPAEKVMEIKLIKGPKGLGFSIAGGVGNQHIPGDNSIYVTKIIEGGAAHKDGRLQIGDKILAVNSVGLEDVMHEDAVAALKNTYDVVYLKVAKPSNAYLSDSYAPPDITTCESPSNTKVPHDPSRLTHDMQSHDIPVAVPLQIFPMK

SEQ ID NO: 24911 - protein, 115 aa, Homo sapiens
  Payload ID: 4920
  Gene Symbol: DLG4
  Gene Name: discs, large homolog 4 (Drosophila)
  ENSP ID: ENSP00000465720
MEYEEITLERGNSGLGFSIAGGTDNPHIGDDPSIFITKIIPGGAAAQDGRLRVNDSILFVNEVDVREVTHSAAVEALKEAGSIVRLYVMRRKPPAEKVMEIKLIKGPKGLGFSIA

SEQ ID NO: 24912 - protein, 91 aa, Homo sapiens
  Payload ID: 4920
  Gene Symbol: DLG4
  Gene Name: discs, large homolog 4 (Drosophila)
  ENSP ID: ENSP00000465789
MEYEEITLERGNSGLGFSIAGGTDNPHIGDDPSIFITKIIPGGAAAQDGRLRVNDSILFVNEVDVREVTHSAAVEALKEAGSIVRLYVMRR

SEQ ID NO: 24913 - protein, 85 aa, Homo sapiens
  Payload ID: 4920
  Gene Symbol: DLG4
  Gene Name: discs, large homolog 4 (Drosophila)
  ENSP ID: ENSP00000467897
  MOD_RES (1)..(1): Any amino acid
XGPTKDRANDDLLSEFPDKFGSCVPHTTRPKREYEIDGRDYHFVSSREKMEKDIQAHKFIEAGQYNSHLYGTSVQSVREVAEQRD

SEQ ID NO: 24914 - protein, 1919 aa, Homo sapiens
  Payload ID: 4921
  Gene Symbol: DLG5
  Gene Name: discs, large homolog 5 (Drosophila)
  Uniprot ID: Q8TDM6
  ENSP ID: ENSP00000361467
MEPQRRELLAQCQQSLAQAMTEVEAVLGLLEAAGALSPGERRQLDEEAGGAKAELLLKLLLAKERDHFQDLRAALEKTQPHLLPILYLNGVVGPPQPAEGAGSTYSVLSTMPSDSESSSSLSSVGTTGKAPSPPPLLTDQQVNEKVENLSIQLRLMTRERNELRKRLAFATHGTAFDKRPYHRLNPDYERLKIQCVRAMSDLQSLQNQHTNALKRCEEVAKETDFYHTLHSRLLSDQTRLKDDVDMLRRENGQLLRERNLLQQSWEDMKRLHEEDQKEIGDLRAQQQQVLKHNGSSEILNKLYDTAMDKLEVVKKDYDALRKRYSEKVAIHNADLSRLEQLGEENQRLLKQTEMLTQQRDTAIQLQHQCALSLRRFEAIHHELNKATAQNKDLQWEMELLQSELTELRTTQVKTAKESEKYREERDAVYSEYKLIMSERDQVISELDKLQTEVELAESKLKSSTSEKKAANEEMEALRQIKDTVTMDAGRANKEVEILRKQCKALCQELKEALQEADVAKCRRDWAFQERDKIVAERDSIRTLCDNLRRERDRAVSELAEALRSLDDTRKQKNDVSRELKELKEQMESQLEKEARFRQLMAHSSHDSAIDTDSMEWETEVVEFERETEDIDLKALGFDMAEGVNEPCFPGDCGIFVTKVDKGSIADGRLRVNDWLLRINDVDLINKDKKQAIKALLNGEGAINMVVRRRKSLGGKVVTPLHINLSGQKDSGISLENGVYAAAVLPGSPAAKEGSLAVGDRIVAINGIALDNKSLNECESLLRSCQDSLTLSLLKVFPQSSSWSGQNIFENIKDSDKMLSFRAHGPEVQAHNKRNLIQHNNSTQTDIFYTDRLEDRKEPGPPGGSSSFLHKPFPGGPLQVCPQACPSASERSLSSFRSDASGDRGFGLVDVRGRRPLLPFETEVGPCGVGEASLDKADSEGSNSGGTWPKAMLSSTAVPEKLSVYKKPKQRKSIFDPNTFKRPQTPPKIDYLLPGPGPAHSPQPSKRAGPLTPPKPPRRSDSIKFQHRLETSSESEATLVGSSPSTSPPSALPPDVDPGEPMHASPPRKARVRIASSYYPEGDGDSSHLPAKKSCDEDLTSQKVDELGQKRRRPKSAPSFRPKLAPVVIPAQFLEEQKCVPASGELSPELQEWAPYSPGHSSRHSNPPLYPSRPSVGTVPRSLTPSTTVSSILRNPIYTVRSHRVGPCSSPPAARDAGPQGLHPSVQHQGRLSLDLSHRTCSDYSEMRATHGSNSLPSSARLGSSSNLQFKAERIKIPSTPRYPRSVVGSERGSVSHSECSTPPQSPLNIDTLSSCSQSQTSASTLPRIAVNPASLGERRKDRPYVEEPRHVKVQKGSEPLGISIVSGEKGGIYVSKVTVGSIAHQAGLEYGDQLLEFNGINLRSATEQQARLIIGQQCDTITILAQYNPHVHQLSSHSRSSSHLDPAGTHSTLQGSGTTTPEHPSVIDPLMEQDEGPSTPPAKQSSSRIAGDANKKTLEPRVVFIKKSQLELGVHLCGGNLHGVFVAEVEDDSPAKGPDGLVPGDLILEYGSLDVRNKTVEEVYVEMLKPRDGVRLKVQYRPEEFTKAKGLPGDSFYIRALYDRLADVEQELSFKKDDILYVDDTLPQGTFGSWMAWQLDENAQKIQRGQIPSKYVMDQEFSRRLSMSEVKDDNSATKTLSAAARRSFFRRKHKHKRSGSKDGKDLLALDAFSSDSIPLFEDSVSLAYQRVQKVDCTALRPVLILGPLLDVVKEMLVNEAPGKFCRCPLEVMKASQQAIERGVKDCLFVDYKRRSGHFDVTTVASIKEITEKNRHCLLDIAPHAIERLHHMHIYPIVIFIHYKSAKHIKEQRDPIYLRDKVTQRHSKEQFEAAQKLEQEYSRYFTGVIQGGALSSICTQILAMVNQEQNKVLWIPACPL

SEQ ID NO: 24915 - protein, 880 aa, Homo sapiens
  Payload ID: 4921
  Gene Symbol: DLG5
  Gene Name: discs, large homolog 5 (Drosophila)
  ENSP ID: ENSP00000394797
GAINMVVRRRKSLGGKVVTPLHINLSGQKDSGISLENGVYAAAVLPGSPAAKEGSLAVGDRIVAINGIALDNKSLNECESLLRSCQDSLTLSLLKEQKCVPASGELSPELQEWAPYSPGHSSRHSNPPLYPSRPSVGTVPRSLTPSTTVSSILRNPIYTVRSHRVGPCSSPPAARDAGPQGLHPSVQHQGRLSLDLSHRTCSDYSEMRATHGSNSLPSSARLGSSSNLQFKAERIKIPSTPRYPRSVVGSERGSVSHSECSTPPQSPLNIDTLSSCSQSQTSASTLPRIAVNPASLGERRKDRPYVEEPRHVKVQKGSEPLGISIVSGEKGGIYVSKVTVGSIAHQAGLEYGDQLLEFNGINLRSATEQQARLIIGQQCDTITILAQYNPHVHQLSSHSRSSSHLDPAGTHSTLQGSGTTTPEHPSVIDPLMEQDEGPSTPPAKQSSSRIAGDANKKTLEPRVVFIKKSQLELGVHLCGGNLHGVFVAEVEDDSPAKGPDGLVPGDLILEYGSLDVRNKTVEEVYVEMLKPRDGVRLKVQYRPEEFTKAKGLPGDSFYIRALYDRLADVEQELSFKKDDILYVDDTLPQGTFGSWMAWQLDENAQKIQRGQIPSKYVMDQEFSRRLSMSEVKDDNSATKTLSAAARRSFFRRKHKHKRSGSKDGKDLLALDAFSSDSIPLFEDSVSLAYQRVQKVDCTALRPVLILGPLLDVVKEMLVNEAPGKFCRCPLEVMKASQQAIERGVKDCLFVDYKRRSGHFDVTTVASIKEITEKNRHCLLDIAPHAIERLHHMHIYPIVIFIHYKSAKHIKEQRDPIYLRDKVTQRHSKEQFEAAQKLEQEYSRYFTGVIQGGALSSICTQILAMVNQEQNKVLWIPACPL

SEQ ID NO: 24916 - protein, 214 aa, Homo sapiens
  Payload ID: 4921
  Gene Symbol: DLG5
  Gene Name: discs, large homolog 5 (Drosophila)
  ENSP ID: ENSP00000473298
SATVLDTHGKQVAFVMSWWTECAVSTGSTYSVLSTMPSDSESSSSLSSVGTTGKAPSPPPLLTDQQVNEKVENLSIQLRLMTRERNELRKRLAFATHGTAFDKRPYHRLNPDYERLKIQCVRAMSDLQSLQNQHTNALKRCEEVAKETDFYHTLHSRLLSDQTRLKDDVDMLRRENGQLLRERNLLQQSWEDMKRLHEEDQKEIGDLRAQQQQS

SEQ ID NO: 24917 - protein, 1919 aa, Homo sapiens; identical to SEQ ID NO: 24914
  Payload ID: 4921
  Gene Symbol: DLG5
  Gene Name: discs, large homolog 5 (Drosophila)
  Uniprot ID: Q8TDM6
  ENSP ID: ENSP00000484894

SEQ ID NO: 24918 - protein, 880 aa, Homo sapiens; identical to SEQ ID NO: 24915
  Payload ID: 4921
  Gene Symbol: DLG5
  Gene Name: discs, large homolog 5 (Drosophila)
  ENSP ID: ENSP00000488188

SEQ ID NO: 24919 - protein, 214 aa, Homo sapiens; identical to SEQ ID NO: 24916
  Payload ID: 4921
  Gene Symbol: DLG5
  Gene Name: discs, large homolog 5 (Drosophila)
  ENSP ID: ENSP00000488289

SEQ ID NO: 24920 - protein, 598 aa, Homo sapiens
  Payload ID: 4921
  Gene Symbol: DLG5
  Gene Name: discs, large homolog 5 (Drosophila)
  ENSP ID: ENSP00000488845
  MOD_RES (1)..(1): Any amino acid
XQTPPKIDYLLPGPGPAHSPQPSKRAGPLTPPKPPRRSDSIKFQHRLETSSESEATLVGSSPSTSPPSALPPDVDPGEPMHASPPRKARVRIASSYYPEGDGDSSHLPAKKSCDEDLTSQKVDELGQKRRRPKSAPSFRPKLAPVVIPAQFLEEQKCVPASGELSPELQEWAPYSPGHSSRHSNPPLYPSRPSVGTVPRSLTPSTTVSSILRNPIYTVRSHRVGPCSSPPAARDAGPQGLHPSVQHQGRLSLDLSHRTCSDYSEMRATHGSNSLPSSARLGSSSNLQFKAERIKIPSTPRYPRSVVGSERGSVSHSECSTPPQSPLNIDTLSSCSQSQTSASTLPRIAVNPASLGERRKDRPYVEEPRHVKVQKGSEPLGISIVSGEKGGIYVSKVTVGSIAHQAGLEYGDQLLEFNGINLRSATEQQARLIIGQQCDTITILAQYNPHVHQLSSHSRSSSHLDPAGTHSTLQGSGTTTPEHPSVIDPLMEQDEGPSTPPAKQSSSRIAGDANKKTLEPRVVFIKKSQLELGVHLCGGNLHGVFVAEVEDDSPAKGPDGLVPGDLILEPGRAEQDSGGSLCGDAEAQGWRPPEGAVPP

SEQ ID NO: 24921 - protein, 1068 aa, Homo sapiens
  Payload ID: 4922
  Gene Symbol: DAAM1
  Gene Name: dishevelled associated activator of morphogenesis 1
  Uniprot ID: Q9Y4D1
  ENSP ID: ENSP00000354162
MAPRKRGGRGISFIFCCFRNNDHPEITYRLRNDSNFALQTMEPALPMPPVEELDVMFSELVDELDLTDKHREAMFALPAEKKWQIYCSKKKDQEENKGATSWPEFYIDQLNSMAARKSLLALEKEEEEERSKTIESLKTALRTKPMRFVTRFIDLDGLSCILNFLKTMDYETSESRIHTSLIGCIKALMNNSQGRAHVLAHSESINVIAQSLSTENIKTKVAVLEILGAVCLVPGGHKKVLQAMLHYQKYASERTRFQTLINDLDKSTGRYRDEVSLKTAIMSFINAVLSQGAGVESLDFRLHLRYEFLMLGIQPVIDKLREHENSTLDRHLDFFEMLRNEDELEFAKRFELVHIDTKSATQMFELTRKRLTHSEAYPHFMSILHHCLQMPYKRSGNTVQYWLLLDRIIQQIVIQNDKGQDPDSTPLENFNIKNVVRMLVNENEVKQWKEQAEKMRKEHNELQQKLEKKERECDAKTQEKEEMMQTLNKMKEKLEKETTEHKQVKQQVADLTAQLHELSRRAVCASIPGGPSPGAPGGPFPSSVPGSLLPPPPPPPLPGGMLPPPPPPLPPGGPPPPPGPPPLGAIMPPPGAPMGLALKKKSIPQPTNALKSFNWSKLPENKLEGTVWTEIDDTKVFKILDLEDLERTFSAYQRQQKEADAIDDTLSSKLKVKELSVIDGRRAQNCNILLSRLKLSNDEIKRAILTMDEQEDLPKDMLEQLLKFVPEKSDIDLLEEHKHELDRMAKADRFLFEMSRINHYQQRLQSLYFKKKFAERVAEVKPKVEAIRSGSEEVFRSGALKQLLEVVLAFGNYMNKGQRGNAYGFKISSLNKIADTKSSIDKNITLLHYLITIVENKYPSVLNLNEELRDIPQAAKVNMTELDKEISTLRSGLKAVETELEYQKSQPPQPGDKFVSVVSQFITVASFSFSDVEDLLAEAKDLFTKAVKHFGEEAGKIQPDEFFGIFDQFLQAVSEAKQENENMRKKKEEEERRARMEAQLKEQRERERKMRKAKENSEESGEFDDLVSALRSGEVFDKDLSKLKRNRKRITNQMTDSSRERPITKLNF

SEQ ID NO: 24922 - protein, 1078 aa, Homo sapiens
  Payload ID: 4922
  Gene Symbol: DAAM1
  Gene Name: dishevelled associated activator of morphogenesis 1
  Uniprot ID: Q9Y4D1
  ENSP ID: ENSP00000378557
MAPRKRGGRGISFIFCCFRNNDHPEITYRLRNDSNFALQTMEPALPMPPVEELDVMFSELVDELDLTDKHREAMFALPAEKKWQIYCSKKKDQEENKGATSWPEFYIDQLNSMAARKSLLALEKEEEEERSKTIESLKTALRTKPMRFVTRFIDLDGLSCILNFLKTMDYETSESRIHTSLIGCIKALMNNSQGRAHVLAHSESINVIAQSLSTENIKTKVAVLEILGAVCLVPGGHKKVLQAMLHYQKYASERTRFQTLINDLDKSTGRYRDEVSLKTAIMSFINAVLSQGAGVESLDFRLHLRYEFLMLGIQPVIDKLREHENSTLDRHLDFFEMLRNEDELEFAKRFELVHIDTKSATQMFELTRKRLTHSEAYPHFMSILHHCLQMPYKRSGNTVQYWLLLDRIIQQIVIQNDKGQDPDSTPLENFNIKNVVRMLVNENEVKQWKEQAEKMRKEHNELQQKLEKKERECDAKTQEKEEMMQTLNKMKEKLEKETTEHKQVKQQVADLTAQLHELSRRAVCASIPGGPSPGAPGGPFPSSVPGSLLPPPPPPPLPGGMLPPPPPPLPPGGPPPPPGPPPLGAIMPPPGAPMGLALKKKSIPQPTNALKSFNWSKLPENKLEGTVWTEIDDTKVFKILDLEDLERTFSAYQRQQDFFVNSNSKQKEADAIDDTLSSKLKVKELSVIDGRRAQNCNILLSRLKLSNDEIKRAILTMDEQEDLPKDMLEQLLKFVPEKSDIDLLEEHKHELDRMAKADRFLFEMSRINHYQQRLQSLYFKKKFAERVAEVKPKVEAIRSGSEEVFRSGALKQLLEVVLAFGNYMNKGQRGNAYGFKISSLNKIADTKSSIDKNITLLHYLITIVENKYPSVLNLNEELRDIPQAAKVNMTELDKEISTLRSGLKAVETELEYQKSQPPQPGDKFVSVVSQFITVASFSFSDVEDLLAEAKDLFTKAVKHFGEEAGKIQPDEFFGIFDQFLQAVSEAKQENENMRKKKEEEERRARMEAQLKEQRERERKMRKAKENSEESGEFDDLVSALRSGEVFDKDLSKLKRNRKRITNQMTDSSRERPITKLNF

SEQ ID NO: 24923 - protein, 96 aa, Homo sapiens
  Payload ID: 4922
  Gene Symbol: DAAM1
  Gene Name: dishevelled associated activator of morphogenesis 1
  ENSP ID: ENSP00000450498
MAPRKRGGRGISFIFCCFRNNDHPEITYRLRNDSNFALQTMEPALPMPPVEELDVMFSELVDELDLTDKHREAMFALPAEKKWQIYCSKKKVRFSL

SEQ ID NO: 24924 - protein, 1068 aa, Homo sapiens
  Payload ID: 4923
  Gene Symbol: DAAM2
  Gene Name: dishevelled associated activator of morphogenesis 2
  Uniprot ID: Q86T65
  ENSP ID: ENSP00000274867
MAPRKRSHHGLGFLCCFGGSDIPEINLRDNHPLQFMEFSSPIPNAEELNIRFAELVDELDLTDKNREAMFALPPEKKWQIYCSKKKEQEDPNKLATSWPDYYIDRINSMAAMQSLYAFDEEETEMRNQVVEDLKTALRTQPMRFVTRFIELEGLTCLLNFLRSMDHATCESRIHTSLIGCIKALMNNSQGRAHVLAQPEAISTIAQSLRTENSKTKVAVLEILGAVCLVPGGHKKVLQAMLHYQVYAAERTRFQTLLNELDRSLGRYRDEVNLKTAIMSFINAVLNAGAGEDNLEFRLHLRYEFLMLGIQPVIDKLRQHENAILDKHLDFFEMVRNEDDLELARRFDMVHIDTKSASQMFELIHKKLKYTEAYPCLLSVLHHCLQMPYKRNGGYFQQWQLLDRILQQIVLQDERGVDPDLAPLENFNVKNIVNMLINENEVKQWRDQAEKFRKEHMELVSRLERKERECETKTLEKEEMMRTLNKMKDKLARESQELRQARGQVAELVAQLSELSTGPVSSPPPPGGPLTLSSSMTTNDLPPPPPPLPFACCPPPPPPPLPPGGPPTPPGAPPCLGMGLPLPQDPYPSSDVPLRKKRVPQPSHPLKSFNWVKLNEERVPGTVWNEIDDMQVFRILDLEDFEKMFSAYQRHQKELGSTEDIYLASRKVKELSVIDGRRAQNCIILLSKLKLSNEEIRQAILKMDEQEDLAKDMLEQLLKFIPEKSDIDLLEEHKHEIERMARADRFLYEMSRIDHYQQRLQALFFKKKFQERLAEAKPKVEAILLASRELVRSKRLRQMLEVILAIGNFMNKGQRGGAYGFRVASLNKIADTKSSIDRNISLLHYLIMILEKHFPDILNMPSELQHLPEAAKVNLAELEKEVGNLRRGLRAVEVELEYQRRQVREPSDKFVPVMSDFITVSSFSFSELEDQLNEARDKFAKALMHFGEHDSKMQPDEFFGIFDTFLQAFSEARQDLEAMRRRKEEEERRARMEAMLKEQRERERWQRQRKVLAAGSSLEEGGEFDDLVSALRSGEVFDKDLCKLKRSRKRSGSQALEVTRERAINRLNY

SEQ ID NO: 24925 - protein, 1068 aa, Homo sapiens; identical to SEQ ID NO: 24924
  Payload ID: 4923
  Gene Symbol: DAAM2
  Gene Name: dishevelled associated activator of morphogenesis 2
  Uniprot ID: Q86T65
  ENSP ID: ENSP00000381876

SEQ ID NO: 24926 - protein, 132 aa, Homo sapiens
  Payload ID: 4923
  Gene Symbol: DAAM2
  Gene Name: dishevelled associated activator of morphogenesis 2
  ENSP ID: ENSP00000384637
MAPRKRSHHGLGFLCCFGGSDIPEINLRDNHPLQFMEFSSPIPNAEELNIRFAELVDELDLTDKNREAMFALPPEKKWQIYCSKKKVPSLTPLATSQGSWHGVALAALACSCIHLMFITCQPCSRCWRNNSE

SEQ ID NO: 24927 - protein, 1067 aa, Homo sapiens
  Payload ID: 4923
  Gene Symbol: DAAM2
  Gene Name: dishevelled associated activator of morphogenesis 2
  Uniprot ID: Q86T65
  ENSP ID: ENSP00000437808
MAPRKRSHHGLGFLCCFGGSDIPEINLRDNHPLQFMEFSSPIPNAEELNIRFAELVDELDLTDKNREAMFALPPEKKWQIYCSKKKEQEDPNKLATSWPDYYIDRINSMAAMQSLYAFDEEETEMRNQVVEDLKTALRTQPMRFVTRFIELEGLTCLLNFLRSMDHATCESRIHTSLIGCIKALMNNSQGRAHVLAQPEAISTIAQSLRTENSKTKVAVLEILGAVCLVPGGHKKVLQAMLHYQVYAAERTRFQTLLNELDRSLGRYRDEVNLKTAIMSFINAVLNAGAGEDNLEFRLHLRYEFLMLGIQPVIDKLRQHENAILDKHLDFFEMVRNEDDLELARRFDMVHIDTKSASQMFELIHKKLKYTEAYPCLLSVLHHCLQMPYKRNGGYFQQWQLLDRILQQIVLQDERGVDPDLAPLENFNVKNIVNMLINENEVKQWRDQAEKFRKEHMELVSRLERKERECETKTLEKEEMMRTLNKMKDKLARESQELRQARGQVAELVAQLSELSTGPVSSPPPPGGPLTLSSSMTTNDLPPPPPPLPFACCPPPPPPPLPPGGPPTPPGAPPCLGMGLPLPQDPYPSSDVPLRKKRVPQPSHPLKSFNWVKLNEERVPGTVWNEIDDMQVFRILDLEDFEKMFSAYQRHQKELGSTEDIYLASRKVKELSVIDGRRAQNCIILLSKLKLSNEEIRQAILKMDEQEDLAKDMLEQLLKFIPEKSDIDLLEEHKHEIERMARADRFLYEMSRIDHYQQRLQALFFKKKFQERLAEAKPKVEAILLASRELVRSKRLRQMLEVILAIGNFMNKGQRGGAYGFRVASLNKIADTKSSIDRNISLLHYLIMILEKHFPDILNMPSELQHLPEAAKVNLAELEKEVGNLRRGLRAVEVLEYQRRQVREPSDKFVPVMSDFITVSSFSFSELEDQLNEARDKFAKALMHFGEHDSKMQPDEFFGIFDTFLQAFSEARQDLEAMRRRKEEEERRARMEAMLKEQRERERWQRQRKVLAAGSSLEEGGEFDDLVSALRSGEVFDKDLCKLKRSRKRSGSQALEVTRERAINRLNY

SEQ ID NO: 24928 - protein, 97 aa, Homo sapiens
  Payload ID: 4923
  Gene Symbol: DAAM2
  Gene Name: dishevelled associated activator of morphogenesis 2
  ENSP ID: ENSP00000488196
MAPRKRSHHGLGFLCCFGGSDIPEINLRDNHPLQFMEFSSPIPNAEELNIRFAELVDELDLTDKNREAMFALPPEKKWQIYCSKKKPCSRCWRNNSE

SEQ ID NO: 24929 - protein, 1077 aa, Homo sapiens
  Payload ID: 4923
  Gene Symbol: DAAM2
  Gene Name: dishevelled associated activator of morphogenesis 2
  ENSP ID: ENSP00000488831
MAPRKRSHHGLGFLCCFGGSDIPEINLRDNHPLQFMEFSSPIPNAEELNIRFAELVDELDLTDKNREAMFALPPEKKWQIYCSKKKEQEDPNKLATSWPDYYIDRINSMAAMQSLYAFDEEETEMRNQVVEDLKTALRTQPMRFVTRFIELEGLTCLLNFLRSMDHATCESRIHTSLIGCIKALMNNSQGRAHVLAQPEAISTIAQSLRTENSKTKVAVLEILGAVCLVPGGHKKVLQAMLHYQVYAAERTRFQTLLNELDRSLGRYRDEVNLKTAIMSFINAVLNAGAGEDNLEFRLHLRYEFLMLGIQPVIDKLRQHENAILDKHLDFFEMVRNEDDLELARRFDMVHIDTKSASQMFELIHKKLKYTEAYPCLLSVLHHCLQMPYKRNGGYFQQWQLLDRILQQIVLQDERGVDPDLAPLENFNVKNIVNMLINENEVKQWRDQAEKFRKEHMELVSRLERKERECETKTLEKEEMMRTLNKMKDKLARESQELRQARGQVAELVAQLSELSTGPVSSPPPPGGPLTLSSSMTTNDLPPPPPPLPFACCPPPPPPPLPPGGPPTPPGAPPCLGMGLPLPQDPYPSSDVPLRKKRVPQPSHPLKSFNWVKLNEERVPGTVWNEIDDMQVFRILDLEDFEKMFSAYQRHQELITNPSQQKELGSTEDIYLASRKVKELSVIDGRRAQNCIILLSKLKLSNEEIRQAILKMDEQEDLAKDMLEQLLKFIPEKSDIDLLEEHKHEIERMARADRFLYEMSRIDHYQQRLQALFFKKKFQERLAEAKPKVEAILLASRELVRSKRLRQMLEVILAIGNFMNKGQRGGAYGFRVASLNKIADTKSSIDRNISLLHYLIMILEKHFPDILNMPSELQHLPEAAKVNLAELEKEVGNLRRGLRAVEVELEYQRRQVREPSDKFVPVMSDFITVSSFSFSELEDQLNEARDKFAKALMHFGEHDSKMQPDEFFGIFDTFLQAFSEARQDLEAMRRRKEEEERRARMEAMLKEQRERERWQRQRKVLAAGSSLEEGGEFDDLVSALRSGEVFDKDLCKLKRSRKRSGSQALEVTRERAINRLNY

SEQ ID NO: 24930 - protein, 695 aa, Homo sapiens
  Payload ID: 4924
  Gene Symbol: DVL1
  Gene Name: dishevelled segment polarity protein 1
  Uniprot ID: O14640
  ENSP ID: ENSP00000368166
MAETKIIYHMDEEETPYLVKLPVAPERVTLADFKNVLSNRPVHAYKFFFKSMDQDFGVVKEEIFDDNAKLPCFNGRVVSWLVLAEGAHSDAGSQGTDSHTDLPPPLERTGGIGDSRPPSFHPNVASSRDGMDNETGTESMVSHRRERARRRNREEAARTNGHPRGDRRRDVGLPPDSASTALSSELESSSFVDSDEDGSTSRLSSSTEQSTSSRLIRKHKRRRRKQRLRQADRASSFSSITDSTMSLNIVTVTLNMERHHFLGISIVGQSNDRGDGGIYIGSIMKGGAVAADGRIEPGDMLLQVNDVNFENMSNDDAVRVLREIVSQTGPISLTVAKCWDPTPRSYFTVPRADPVRPIDPAAWLSHTAALTGALPRYGTSPCSSAVTRTSSSSLTSSVPGAPQLEEAPLTVKSDMSAVVRVMQLPDSGLEIRDRMWLKITIANAVIGADVVDWLYTHVEGFKERREARKYASSLLKHGFLRHTVNKITFSEQCYYVFGDLCSNLATLNLNSGSSGTSDQDTLAPLPHPAAPWPLGQGYPYQYPGPPPCFPPAYQDPGFSYGSGSTGSQQSEGSKSSGSTRSSRRAPGREKERRAAGAGGSGSESDHTAPSGVGSSWRERPAGQLSRGSSPRSQASATAPGLPPPHPTTKAYTVVGGPPGGPPVRELAAVPPELTGSRQSFQKAMGNPCEFFVDIM

SEQ ID NO: 24931 - protein, 670 aa, Homo sapiens
  Payload ID: 4924
  Gene Symbol: DVL1
  Gene Name: dishevelled segment polarity protein 1
  Uniprot ID: O14640
  ENSP ID: ENSP00000368169
MAETKIIYHMDEEETPYLVKLPVAPERVTLADFKNVLSNRPVHAYKFFFKSMDQDFGVVKEEIFDDNAKLPCFNGRVVSWLVLAEGAHSDAGSQGTDSHTDLPPPLERTGGIGDSRPPSFHPNVASSRDGMDNETGTESMVSHRRERARRRNREEAARTNGHPRGDRRRDVGLPPDSASTALSSELESSSFVDSDEDGSTSRLSSSTEQSTSSRLIRKHKRRRRKQRLRQADRASSFSSITDSTMSLNIVTVTLNMERHHFLGISIVGQSNDRGDGGIYIGSIMKGGAVAADGRIEPGDMLLQVNDVNFENMSNDDAVRVLREIVSQTGPISLTVAKCWDPTPRSYFTVPRADPVRPIDPAAWLSHTAALTGALPRYELEEAPLTVKSDMSAVVRVMQLPDSGLEIRDRMWLKITIANAVIGADVVDWLYTHVEGFKERREARKYASSLLKHGFLRHTVNKITFSEQCYYVFGDLCSNLATLNLNSGSSGTSDQDTLAPLPHPAAPWPLGQGYPYQYPGPPPCFPPAYQDPGFSYGSGSTGSQQSEGSKSSGSTRSSRRAPGREKERRAAGAGGSGSESDHTAPSGVGSSWRERPAGQLSRGSSPRSQASATAPGLPPPHPTTKAYTVVGGPPGGPPVRELAAVPPELTGSRQSFQKAMGNPCEFFVDIM

SEQ ID NO: 24932 - protein, 444 aa, Homo sapiens
  Payload ID: 4924
  Gene Symbol: DVL1
  Gene Name: dishevelled segment polarity protein 1
  ENSP ID: ENSP00000480077
MAETKIIYHMDEEETPYLVKLPVAPERVTLADFKNVLSNRPVHAYKFFFKSMDQDFGVVKEEIFDDNAKLPCFNGRVVSWLVLAEGAHSDAGSQGTDSHTDLPPPLERTGGIGDSRPPSFHPNVASSRDGMDNETGTESMVSHRRERARRRNREEAARTNGHPRGDRRRDVGLPPDSASTALSSELESSSFVDSDEDGSTSRLSSSTEQSTSSRLIRKYASSLLKHGFLRHTVNKITFSEQCYYVFGDLCSNLATLNLNSGSSGTSDQDTLAPLPHPAAPWPLGQGYPYQYPGPPPCFPPAYQDPGFSYGSGSTGSQQSEGSKSSGSTRSSRRAPGREKERRAAGAGGSGSESDHTAPSGVGSSWRERPAGQLSRGSSPRSQASATAPGLPPPHPTTKAYTVVGGPPGGPPVRELAAVPPELTGSRQSFQKAMGNPCEFFVDIM

SEQ ID NO: 24933 - protein, 251 aa, Homo sapiens
  Payload ID: 4924
  Gene Symbol: DVL1
  Gene Name: dishevelled segment polarity protein 1
  ENSP ID: ENSP00000488181
DMLLQVNDVNFENMSNDDAVRVLREIVSQTGPISLTVAKCWDPTPRSYFTVPRADPVRPIDPAAWLSHTAALTGALPRYELEEAPLTVKSDMSAVVRVMQLPDSGLEIRDRMWLKITIANAVIGADVVDWLYTHVEGFKERREARKYASSLLKHGFLRHTVNKITFSEQCYYVFGDLCSNLATLNLNSGSSGTSDQDTLAPLPHPAAPWPLGQGYPYQYPGPPPCFPPAYQDPGFSYGSGSTGSQQSEALD

SEQ ID NO: 24934 - protein, 217 aa, Homo sapiens
  Payload ID: 4924
  Gene Symbol: DVL1
  Gene Name: dishevelled segment polarity protein 1
  ENSP ID: ENSP00000488888
IDPAAWLSHTAALTGALPRYGTSPCSSAVTRTSSSSLTSSVPGAPQLEEAPLTVKSDMSAVVRVMQLPDSGLEIRDRMWLKITIANAVIGADVVDWLYTHVEGFKERREARKYASSLLKHGFLRHTVNKITFSEQCYYVFGDLCSNLATLNLNSGSSGTSDQDTLAPLPHPAAPWPLGQGYPYQYPGPPPCFPPAYQDPGFSYGSGSTGSQQSEALD

SEQ ID NO: 24935 - protein, 736 aa, Homo sapiens
  Payload ID: 4925
  Gene Symbol: DVL2
  Gene Name: dishevelled segment polarity protein 2
  Uniprot ID: O14641
  ENSP ID: ENSP00000005340
MAGSSTGGGGVGETKVIYHLDEEETPYLVKIPVPAERITLGDFKSVLQRPAGAKYFFKSMDQDFGVVKEEISDDNARLPCFNGRVVSWLVSSDNPQPEMAPPVHEPRAELAPPAPPLPPLPPERTSGIGDSRPPSFHPNVSSSHENLEPETETESVVSLRRERPRRRDSSEHGAGGHRTGGPSRLERHLAGYESSSTLMTSELESTSLGDSDEEDTMSRFSSSTEQSSASRLLKRHRRRRKQRPPRLERTSSFSSVTDSTMSLNIITVTLNMEKYNFLGISIVGQSNERGDGGIYIGSIMKGGAVAADGRIEPGDMLLQVNDMNFENMSNDDAVRVLRDIVHKPGPIVLTVAKCWDPSPQAYFTLPRNEPIQPIDPAAWVSHSAALTGTFPAYPGSSSMSTITSGSSLPDGCEGRGLSVHTDMASVTKAMAAPESGLEVRDRMWLKITIPNAFLGSDVVDWLYHHVEGFPERREARKYASGLLKAGLIRHTVNKITFSEQCYYVFGDLSGGCESYLVNLSLNDNDGSSGASDQDTLAPLPGATPWPLLPTFSYQYPAPHPYSPQPPPYHELSSYTYGGGSASSQHSEGSRSSGSTRSDGGAGRTGRPEERAPESKSGSGSESEPSSRGGSLRRGGEASGTSDGGPPPSRGSTGGAPNLRAHPGLHPYGPPPGMALPYNPMMVVMMPPPPPPVPPAVQPPGAPPVRDLGSVPPELTASRQSFHMAMGNPSEFFVDVM

SEQ ID NO: 24936 - protein, 291 aa, Homo sapiens
  Payload ID: 4925
  Gene Symbol: DVL2
  Gene Name: dishevelled segment polarity protein 2
  ENSP ID: ENSP00000458209
MLRVVKEEISDDNARLPCFNGRVVSWLVSSDNPQPEMAPPVHEPRAELAPPAPPLPPLPPERTSGIGDSRPPSFHPNVSSSHENLEPETETESVVSLRRERPRRRDSTGGHRTGGPSRLERHLAGYESSSTLMTSELESTSLGDSDEEDTMSRFSSSTEQSSASRLLKRHRRRRKQRPPRLERTSSFSSVTDSTMSLNIITVTLNMEKYNFLGISIVGQSNERGDGGIYIGSIMKGGAVAADGRIEPGDMLLQVNDMNFENMSNDDAVRVLRDIVHKPGPIVLTVAKCWDP

SEQ ID NO: 24937 - protein, 300 aa, Homo sapiens
  Payload ID: 4925
  Gene Symbol: DVL2
  Gene Name: dishevelled segment polarity protein 2
  ENSP ID: ENSP00000458465
  MOD_RES (1)..(1): Any amino acid
XNFENMSNDDAVRVLRDIVHKPGPIVLTVAKCWDPSPQAYFTLPRTYPGSSSMSTITSGSSLPDGCEGRGLSVHTDMASVTKAMAAPESGLEVRDRMWLKITIPNAFLGSDVVDWLYHHVEGFPERREARKYASGLLKAGLIRHTVNKITFSEQCYYVFGDLSGGCESYLVNLSLNDNDGSSGASDQDTLAPLPGATPWPLLPTFSYQYPAPHPYSPQPPPYHELSSYTYGGGSASSQHSEGSRSSGSTRSDGGAGRTGRPEERAPESKSGSGSESEPSSRGGSLRRGGEASGTSDGGPP

SEQ ID NO: 24938 - protein, 730 aa, Homo sapiens
  Payload ID: 4925
  Gene Symbol: DVL2
  Gene Name: dishevelled segment polarity protein 2
  ENSP ID: ENSP00000459797
MAGSSTGGGGVGETKVIYHLDEEETPYLVKIPVPAERITLGDFKSVLQRPAGAKYFFKSMDQDFGVVKEEISDDNARLPCFNGRVVSWLVSSDNPQPEMAPPVHEPRAELAPPAPPLPPLPPERTSGIGDSRPPSFHHENLEPETETESVVSLRRERPRRRDSSEHGAGGHRTGGPSRLERHLAGYESSSTLMTSELESTSLGDSDEEDTMSRFSSSTEQSSASRLLKRHRRRRKQRPPRLERTSSFSSVTDSTMSLNIITVTLNMEKYNFLGISIVGQSNERGDGGIYIGSIMKGGAVAADGRIEPGDMLLQVNDMNFENMSNDDAVRVLRDIVHKPGPIVLTVAKCWDPSPQAYFTLPRNEPIQPIDPAAWVSHSAALTGTFPAYPGSSSMSTITSGSSLPDGCEGRGLSVHTDMASVTKAMAAPESGLEVRDRMWLKITIPNAFLGSDVVDWLYHHVEGFPERREARKYASGLLKAGLIRHTVNKITFSEQCYYVFGDLSGGCESYLVNLSLNDNDGSSGASDQDTLAPLPGATPWPLLPTFSYQYPAPHPYSPQPPPYHELSSYTYGGGSASSQHSEGSRSSGSTRSDGGAGRTGRPEERAPESKSGSGSESEPSSRGGSLRRGGEASGTSDGGPPPSRGSTGGAPNLRAHPGLHPYGPPPGMALPYNPMMVVMMPPPPPPVPPAVQPPGAPPVRDLGSVPPELTASRQSFHMAMGNPSEFFVDVM

SEQ ID NO: 24939 - protein, 363 aa, Homo sapiens
  Payload ID: 4925
  Gene Symbol: DVL2
  Gene Name: dishevelled segment polarity protein 2
  ENSP ID: ENSP00000459991
MAGSSTGGGGVGETKVIYHLDEEETPYLVKIPVPAERITLGDFKSVLQRPAGAKYFFKSMDQDFGVVKEEISDDNARLPCFNGRVVSWLVSSDNPQPEMAPPVHEPRAELAPPAPPLPPLPPERTSGIGDSRPPSFHPNVSSSHENLEPETETESVVSLRRERPRRRDSTGGHRTGGPSRLERHLAGYESSSTLMTSELESTSLGDSDEEDTMSRFSSSTEQSSASRLLKRHRRRRKQRPPRLERTSSFSSVTDSTMSLNIITVTLNMEKYNFLGISIVGQSNERGDGGIYIGSIMKGGAVAADGRIEPGDMLLQVNDMNFENMSNDDAVRVLRDIVHKPGPIVLTVAKCWDPSPQAYFTLPR

SEQ ID NO: 24940 - protein, 716 aa, Homo sapiens
  Payload ID: 4926
  Gene Symbol: DVL3
  Gene Name: dishevelled segment polarity protein 3
  Uniprot ID: Q92997
  ENSP ID: ENSP00000316054
MGETKIIYHLDGQETPYLVKLPLPAERVTLADFKGVLQRPSYKFFFKSMDDDFGVVKEEISDDNAKLPCFNGRVVSWLVSAEGSHPDPAPFCADNPSELPPPMERTGGIGDSRPPSFHPHAGGGSQENLDNDTETDSLVSAQRERPRRRDGPEHATRLNGTAKGERRREPGGYDSSSTLMSSELETTSFFDSDEDDSTSRFSSSTEQSSASRLMRRHKRRRRKQKVSRIERSSSFSSITDSTMSLNIITVTLNMEKYNFLGISIVGQSNERGDGGIYIGSIMKGGAVAADGRIEPGDMLLQVNEINFENMSNDDAVRVLREIVHKPGPITLTVAKCWDPSPRGCFTLPRSEPIRPIDPAAWVSHTAAMTGTFPAYGMSPSLSTITSTSSSITSSIPDTERLDDFHLSIHSDMAAIVKAMASPESGLEVRDRMWLKITIPNAFIGSDVVDWLYHNVEGFTDRREARKYASNLLKAGFIRHTVNKITFSEQCYYIFGDLCGNMANLSLHDHDGSSGASDQDTLAPLPHPGAAPWPMAFPYQYPPPPHPYNPHPGFPELGYSYGGGSASSQHSEGSRSSGSNRSGSDRRKEKDPKAGDSKSGGSGSESDHTTRSSLRGPRERAPSERSGPAASEHSHRSHHSLASSLRSHHTHPSYGPPGVPPLYGPPMLMMPPPPAAMGPPGAPPGRDLASVPPELTASRQSFRMAMGNPSEFFVDVM

SEQ ID NO: 24941 - protein, 220 aa, Homo sapiens
  Payload ID: 4926
  Gene Symbol: DVL3
  Gene Name: dishevelled segment polarity protein 3
  ENSP ID: ENSP00000393849
MERTGGIGDSRPPSFHPHAGGGSQENLDNDTETDSLVSAQRERPRRRDGPEHATRLNGTAKGERRREPGGYDSSSTLMSSELETTSFFDSDEDDSTSRFSSSTEQSSASRLMRRHKRRRRKQKVSRIERSSSFSSITDSTMSLNIITVTLNMEKYNFLGISIVGQSNERGDGGIYIGSIMKGGAVAADGRIEPGDMLLQVNEINFENMSNDDAVRVLREI

SEQ ID NO: 24942 - protein, 699 aa, Homo sapiens
  Payload ID: 4926
  Gene Symbol: DVL3
  Gene Name: dishevelled segment polarity protein 3
  Uniprot ID: Q92997
  ENSP ID: ENSP00000405885
MGETKIIYHLDGQETPYLVKLPLPAERVTLADFKGVLQRPSYKFFFKSMDDDFGVVKEEISDDNAKLPCFNGRVVSWLVSAEGSHPDPAPFCADNPSELPPPMERTGGIGDSRPPSFHPHAGGGSQENLDNDTETDSLVSAQRERPRRRDGPEHATRLNGTAKGERRREPGGYDSSSTLMSSELETTSFFDSDEDDSTSRFSSSTEQSSASRLMRRHKRRRRKQKVSRIERSSSFSSITDSTMSLNIITVTLNMEKYNFLGISIVGQSNERGDGGIYIGSIMKGGAVAADGRIEPGDMLLQVNEINFENMSNDDAVRVLREIVHKPGPITLTVAKCWDPSPRGCFTLPRTMTGTFPAYGMSPSLSTITSTSSSITSSIPDTERLDDFHLSIHSDMAAIVKAMASPESGLEVRDRMWLKITIPNAFIGSDVVDWLYHNVEGFTDRREARKYASNLLKAGFIRHTVNKITFSEQCYYIFGDLCGNMANLSLHDHDGSSGASDQDTLAPLPHPGAAPWPMAFPYQYPPPPHPYNPHPGFPELGYSYGGGSASSQHSEGSRSSGSNRSGSDRRKEKDPKAGDSKSGGSGSESDHTTRSSLRGPRERAPSERSGPAASEHSHRSHHSLASSLRSHHTHPSYGPPGVPPLYGPPMLMMPPPPAAMGPPGAPPGRDLASVPPELTASRQSFRMAMGNPSEFFVDVM

SEQ ID NO: 24943 - protein, 77 aa, Homo sapiens
  Payload ID: 4926
  Gene Symbol: DVL3
  Gene Name: dishevelled segment polarity protein 3
  ENSP ID: ENSP00000412345
MGETKIIYHLDGQETPYLVKLPLPAERVTLADFKGVLQRPSYKFFFKSMDDDFGCLPSPLWAVVGVVTGTESLTPAE

SEQ ID NO: 24944 - protein, 836 aa, Homo sapiens
  Payload ID: 4927
  Gene Symbol: DACT1
  Gene Name: dishevelled-binding antagonist of beta-catenin 1
  Uniprot ID: Q9NYF0
  ENSP ID: ENSP00000337439
MKPSPAGTAKELEPPAPARGEQRTAEPEGRWREKGEADTERQRTRERQEATLAGLAELEYLRQRQELLVRGALRGAGGAGAAAPRAGELLGEAAQRSRLEEKFLEENILLLRKQLNCLRRRDAGLLNQLQELDKQISDLRLDVEKTSEEHLETDSRPSSGFYELSDGASGSLSNSSNSVFSECLSSCHSSTCFCSPLEATLSLSDGCPKSADLIGLLEYKEGHCEDQASGAVCRSLSTPQFNSLDVIADVNPKYQCDLVSKNGNDVYRYPSPLHAVAVQSPMFLLCLTGNPLREEDRLGNHASDICGGSELDAVKTDSSLPSPSSLWSASHPSSSKKMDGYILSLVQKKTHPVRTNKPRTSVNADPTKGLLRNGSVCVRAPGGVSQGNSVNLKNSKQACLPSGGIPSLNNGTFSPPKQWSKESKAEQAESKRVPLPEGCPSGAASDLQSKHLPKTAKPASQEHARCSAIGTGESPKESAQLSGASPKESPSRGPAPPQENKVVQPLKKMSQKNSLQGVPPATPPLLSTAFPVEERPALDFKSEGSSQSLEEAHLVKAQFIPGQQPSVRLHRGHRNMGVVKNSSLKHRGPALQGLENGLPTVREKTRAGSKKCRFPDDLDTNKKLKKASSKGRKSGGGPEAGVPGRPAGGGHRAGSRAHGHGREAVVAKPKHKRTDYRRWKSSAEISYEEALRRARRGRRENVGLYPAPVPLPYASPYAYVASDSEYSAECESLFHSTVVDTSEDEQSNYTTNCFGDSESSVSEGEFVGESTTTSDSEESGGLIWSQFVQTLPIQTVTAPDLHNHPAKTFVKIKASHNLKKKILRFRSGSLKLMTTV

SEQ ID NO: 24945 - protein, 799 aa, Homo sapiens
  Payload ID: 4927
  Gene Symbol: DACT1
  Gene Name: dishevelled-binding antagonist of beta-catenin 1
  Uniprot ID: Q9NYF0
  ENSP ID: ENSP00000378582
MKPSPAGTAKELEPPAPARGEQRTAEPEGRWREKGEADTERQRTRERQEATLAGLAELEYLRQRQELLVRGALRGAGGAGAAAPRAGELLGEAAQRSRLEEKFLEENILLLRKQLNCLRRRDAGLLNQLQELDKQISDLRLDVEKTSEEHLETDSRPSSGFYELSDGASGSLSNSSNSVFSECLSSCHSSTCFCSPLEATLSLSDGCPKSADVNPKYQCDLVSKNGNDVYRYPSPLHAVAVQSPMFLLCLTGNPLREEDRLGNHASDICGGSELDAVKTDSSLPSPSSLWSASHPSSSKKMDGYILSLVQKKTHPVRTNKPRTSVNADPTKGLLRNGSVCVRAPGGVSQGNSVNLKNSKQACLPSGGIPSLNNGTFSPPKQWSKESKAEQAESKRVPLPEGCPSGAASDLQSKHLPKTAKPASQEHARCSAIGTGESPKESAQLSGASPKESPSRGPAPPQENKVVQPLKKMSQKNSLQGVPPATPPLLSTAFPVEERPALDFKSEGSSQSLEEAHLVKAQFIPGQQPSVRLHRGHRNMGVVKNSSLKHRGPALQGLENGLPTVREKTRAGSKKCRFPDDLDTNKKLKKASSKGRKSGGGPEAGVPGRPAGGGHRAGSRAHGHGREAVVAKPKHKRTDYRRWKSSAEISYEEALRRARRGRRENVGLYPAPVPLPYASPYAYVASDSEYSAECESLFHSTVVDTSEDEQSNYTTNCFGDSESSVSEGEFVGESTTTSDSEESGGLIWSQFVQTLPIQTVTAPDLHNHPAKTFVKIKASHNLKKKILRFRSGSLKLMTTV

SEQ ID NO: 24946 - protein, 130 aa, Homo sapiens
  Payload ID: 4927
  Gene Symbol: DACT1
  Gene Name: dishevelled-binding antagonist of beta-catenin 1
  ENSP ID: ENSP00000404297
MFLLCLTGNPLREEDRLGNHASDICGGSELDAVKTDSSLPSPSSLWSASHPSSSKKMDGYILSLVQKKTHPVRTNKPRTSVNADPTKGLLRNGSVCVRAPGGVSQGNSVNLKNSKQACLPSGGIPSLNNG

SEQ ID NO: 24947 - protein, 555 aa, Homo sapiens
  Payload ID: 4927
  Gene Symbol: DACT1
  Gene Name: dishevelled-binding antagonist of beta-catenin 1
  ENSP ID: ENSP00000442850
MFLLCLTGNPLREEDRLGNHASDICGGSELDAVKTDSSLPSPSSLWSASHPSSSKKMDGYILSLVQKKTHPVRTNKPRTSVNADPTKGLLRNGSVCVRAPGGVSQGNSVNLKNSKQACLPSGGIPSLNNGTFSPPKQWSKESKAEQAESKRVPLPEGCPSGAASDLQSKHLPKTAKPASQEHARCSAIGTGESPKESAQLSGASPKESPSRGPAPPQENKVVQPLKKMSQKNSLQGVPPATPPLLSTAFPVEERPALDFKSEGSSQSLEEAHLVKAQFIPGQQPSVRLHRGHRNMGVVKNSSLKHRGPALQGLENGLPTVREKTRAGSKKCRFPDDLDTNKKLKKASSKGRKSGGGPEAGVPGRPAGGGHRAGSRAHGHGREAVVAKPKHKRTDYRRWKSSAEISYEEALRRARRGRRENVGLYPAPVPLPYASPYAYVASDSEYSAECESLFHSTVVDTSEDEQSNYTTNCFGDSESSVSEGEFVGESTTTSDSEESGGLIWSQFVQTLPIQTVTAPDLHNHPAKTFVKIKASHNLKKKILRFRSGSLKLMTTV

SEQ ID NO: 24948 - protein, 555 aa, Homo sapiens; identical to SEQ ID NO: 24947
  Payload ID: 4927
  Gene Symbol: DACT1
  Gene Name: dishevelled-binding antagonist of beta-catenin 1
  ENSP ID: ENSP00000451598

SEQ ID NO: 24949 - protein, 774 aa, Homo sapiens
  Payload ID: 4928
  Gene Symbol: DACT2
  Gene Name: dishevelled-binding antagonist of beta-catenin 2
  Uniprot ID: Q5SW24
  ENSP ID: ENSP00000355760
MWTPGGPPGSAGWDRRRLGARLRAAFAGLQELQGLRATQQERVRGALALQPPPAPAAPCGPHGLHGPEQQLEAALAALQEQLSRLRQQDIGLKTHLDQLDLQISKLQLDVGTASGEALDSDSRPSSGFYEMSDGGSCSLSTSCASVCSDHISPSLGSLLPVAQAHKARPSMGDWRPRSVDETTVPAWRPQATEEGARPPGSVEDAGQPWGTFWPRPVSTGDLDRALPADTGLQKASADAELLGLLCQGVDIPLHVPDPKYRQDLVSQGGREVYPYPSPLHAVALQSPLFVLTKETPQRGGPSFPRESPRGPAGLNTIQTGPVLEAGPARARAYIDRLLHLWGRETPAKGSEGEQGPLRHAASPSPQRQGGWSTDGGGRLLVFAPGREDEGGPAQSRGAGRGGPQQQGYMPLEGPQQSGSLPEEGSKPSNSCVLRETMVQASPSSKAQQTPSAQDYGRGNIISPSRMLDKSPSPASGHFAHPSFAASLKMGPPKSKAEKIKRSPMDKVLRFARQPLLLLDRPEGAHAAPQPSLEWDPAHWPTGRGGLQRRPALAWEAPGRSCSESTLYPMPVLVPLAVAPQESHRTSAQALFPFEASLLTSVARRKHRRWQSTVEISARARLASCPESNLGPPRPVARRAGGPLARGRPSLVRQDAYTRSDSEPSKHSAECDPRFPSVIPETSEGESSDHTTNRFGDRESSSSDEEGGAQSRDCDLALGYVAAGHAELAWTQEAPVSSGPLLSPVPKLCRIKASKALKKKIRRFQPTALKVMTMV

SEQ ID NO: 24950 - protein, 280 aa, Homo sapiens
  Payload ID: 4928
  Gene Symbol: DACT2
  Gene Name: dishevelled-binding antagonist of beta-catenin 2
  Uniprot ID: Q5SW24
  ENSP ID: ENSP00000355761
MWTPGGPPGSAGWDRRRLGARLRAAFAGLQELQGLRATQQERVRGALALQPPPAPAAPCGPHGLHGPEQQLEAALAALQEQLSRLRQQDIGLKTHLDQLDLQISKLQLDVGTASGEALDSDSRPSSGFYEMSDGGSCSLSTSCASVCSDHISPSLGSLLPVAQAHKARPSMGDWRPRSVDETTVPAWRPQATEEGARPPGSVEDAGQPWGTFWPRPVSTELCNAPGELDMHAPPAGCTSSSLTGVGSGLRGKCGLCGCQLPFCSVNTSSKTKSSGISRQQ

SEQ ID NO: 24951 - protein, 366 aa, Homo sapiens
  Payload ID: 4928
  Gene Symbol: DACT2
  Gene Name: dishevelled-binding antagonist of beta-catenin 2
  Uniprot ID: Q5SW24
  ENSP ID: ENSP00000476434
MPLEGPQQSGSLPEEGSKPSNSCVLRETMVQASPSSKAQQTPSAQDYGRGNIISPSRMLDKSPSPASGHFAHPSFAASLKMGPPKSKAEKIKRSPMDKVLRFARQPLLLLDRPEGAHAAPQPSLEWDPAHWPTGRGGLQRRPALAWEAPGRSCSESTLYPMPVLVPLAVAPQESHRTSAQALFPFEASLLTSVARRKHRRWQSTVEISARARLASCPESNLGPPRPVARRAGGPLARGRPSLVRQDAYTRSDSEPSKHSAECDPRFPSVIPETSEGESSDHTTNRFGDRESSSSDEEGGAQSRDCDLALGYVAAGHAELAWTQEAPVSSGPLLSPVPKLCRIKASKALKKKIRRFQPTALKVMTMV

SEQ ID NO: 24952 - protein, 604 aa, Homo sapiens
  Payload ID: 4928
  Gene Symbol: DACT2
  Gene Name: dishevelled-binding antagonist of beta-catenin 2
  Uniprot ID: Q5SW24
  ENSP ID: ENSP00000476573
MGDWRPRSVDETTVPAWRPQATEEGARPPGSVEDAGQPWGTFWPRPVSTGDLDRALPADTGLQKASADAELLGLLCQGVDIPLHVPDPKYRQDLVSQGGREVYPYPSPLHAVALQSPLFVLTKETPQRGGPSFPRESPRGPAGLNTIQTGPVLEAGPARARAYIDRLLHLWGRETPAKGSEGEQGPLRHAASPSPQRQGGWSTDGGGRLLVFAPGREDEGGPAQSRGAGRGGPQQQGYMPLEGPQQSGSLPEEGSKPSNSCVLRETMVQASPSSKAQQTPSAQDYGRGNIISPSRMLDKSPSPASGHFAHPSFAASLKMGPPKSKAEKIKRSPMDKVLRFARQPLLLLDRPEGAHAAPQPSLEWDPAHWPTGRGGLQRRPALAWEAPGRSCSESTLYPMPVLVPLAVAPQESHRTSAQALFPFEASLLTSVARRKHRRWQSTVEISARARLASCPESNLGPPRPVARRAGGPLARGRPSLVRQDAYTRSDSEPSKHSAECDPRFPSVIPETSEGESSDHTTNRFGDRESSSSDEEGGAQSRDCDLALGYVAAGHAELAWTQEAPVSSGPLLSPVPKLCRIKASKALKKKIRRFQPTALKVMTMV

SEQ ID NO: 24953 - protein, 404 aa, Homo sapiens
  Payload ID: 4929
  Gene Symbol: DACT3
  Gene Name: dishevelled-binding antagonist of beta-catenin 3
  ENSP ID: ENSP00000300875
MRSPRPCGRPPTDSPDAGGAGRPLDGYISALLRRRRRRGAGQPRTSPGGADGGPRRQNSVRQRPPDASPSPGSARPAREPSLERVGGHPTSPAALSRAWASSWESEAAPEPAAPPAAPSPPDSPAEGRLVKAQYIPGAQAATRGLPGRAARRKPPPLTRGRSVEQSPPRERPRAAGRRGRMAEASGRRGSPRARKASRSQSETSLLGRASAVPSGPPKYPTAEREEPRPPRPRRGPAPTLAAQAAGSCRRWRSTAEIDAADGRRVRPRAPAARVPGPGPSPSAPQRRLLYGCAGSDSECSAGRLGPLGRRGPAGGVGGGYGESESSASEGESPAFSSASSDSDGSGGLVWPQQLVAATAASGGGAGAGAPAGPAKVFVKIKASHALKKKILRFRSGSLKVMTTV

SEQ ID NO: 24954 - protein, 629 aa, Homo sapiens
  Payload ID: 4929
  Gene Symbol: DACT3
  Gene Name: dishevelled-binding antagonist of beta-catenin 3
  Uniprot ID: Q96B18
  ENSP ID: ENSP00000375783
MIRAFSFPVSPERGRLRGWLEGSLAGLCELHWLRERQEYRVQQALRLAQPGMGGAEAEDEEDADEDEDAAAARRAAAALEEQLEALPGLVWDLGQQLGDLSLESGGLEQESGRSSGFYEDPSSTGGPDSPPSTFCGDSGFSGSSSYGRLGPSEPRGIYASERPKSLGDASPSAPEVVGARAAVPRSFSAPYPTAGGSAGPEACSSAERRARAGPFLTPSPLHAVAMRSPRPCGRPPTDSPDAGGAGRPLDGYISALLRRRRRRGAGQPRTSPGGADGGPRRQNSVRQRPPDASPSPGSARPAREPSLERVGGHPTSPAALSRAWASSWESEAAPEPAAPPAAPSPPDSPAEGRLVKAQYIPGAQAATRGLPGRAARRKPPPLTRGRSVEQSPPRERPRAAGRRGRMAEASGRRGSPRARKASRSQSETSLLGRASAVPSGPPKYPTAEREEPRPPRPRRGPAPTLAAQAAGSCRRWRSTAEIDAADGRRVRPRAPAARVPGPGPSPSAPQRRLLYGCAGSDSECSAGRLGPLGRRGPAGGVGGGYGESESSASEGESPAFSSASSDSDGSGGLVWPQQLVAATAASGGGAGAGAPAGPAKVFVKIKASHALKKKILRFRSGSLKVMTTV

SEQ ID NO: 24955 - protein, 181 aa, Homo sapiens
  Payload ID: 4929
  Gene Symbol: DACT3
  Gene Name: dishevelled-binding antagonist of beta-catenin 3
  ENSP ID: ENSP00000387300
MIRAFSFPVSPERGRLRGWLEGSLAGLCELHWLRERQEYRVQQALRLAQPGMGGAEAEDEEDADEDEDAAAARRAAAALEEQLEALPGLVWDLGQQLGDLSLESGGLEQESGRSSGFYEDPSSTGGPDSPPSTFCGDSGFSGSSSYGRLGPSEPRGIYASERPKSLGKVGEGGALGPGKGQ

SEQ ID NO: 24956 - protein, 1524 aa, Homo sapiens
  Payload ID: 4930
  Gene Symbol: DISP1
  Gene Name: dispatched homolog 1 (Drosophila)
  Uniprot ID: Q96F81
  ENSP ID: ENSP00000284476
MAMSNGNNDFVVLSNSSIATSAANPSPLTPCDGDHAAQQLTPKEATRTKVSPNGCLQLNGTVKSSFLPLDNQRMPQMLPQCCHPCPYHHPLTSHSSHQECHPEAGPAAPSALASCCMQPHSEYSASLCPNHSPVYQTTCCLQPSPSFCLHHPWPDHFQHQPVQQHIANIRPSRPFKLPKSYAALIADWPVVVLGMCTMFIVVCALVGVLVPELPDFSDPLLGFEPRGTAIGQRLVTWNNMVKNTGYKATLANYPFKYADEQAKSHRDDRWSDDHYEREKREVDWNFHKDSFFCDVPSDRYSRVVFTSSGGETLWNLPAIKSMCNVDNSRIRSHPQFGDLCQRTTAASCCPSWTLGNYIAILNNRSSCQKIVERDVSHTLKLLRTCAKHYQNGTLGPDCWDMAARRKDQLKCTNVPRKCTKYNAVYQILHYLVDKDFMTPKTADYATPALKYSMLFSPTEKGESMMNIYLDNFENWNSSDGVTTITGIEFGIKHSLFQDYLLMDTVYPAIAIVIVLLVMCVYTKSMFITLMTMFAIISSLIVSYFLYRVVFHFEFFPFMNLTALIILVGIGADDAFVLCDVWNYTKFDKPHAETSETVSITLQHAALSMFVTSFTTAAAFYANYVSNITAIRCFGVYAGTAILVNYVLMVTWLPAVVVLHERYLLNIFTCFKKPQQQIYDNKSCWTVACQKCHKVLFAISEASRIFFEKVLPCIVIKFRYLWLFWFLALTVGGAYIVCINPKMKLPSLELSEFQVFRSSHPFERYDAEYKKLFMFERVHHGEELHMPITVIWGVSPEDNGNPLNPKSKGKLTLDSSFNIASPASQAWILHFCQKLRNQTFFYQTDEQDFTSCFIETFKQWMENQDCDEPALYPCCSHWSFPYKQEIFELCIKRAIMELERSTGYHLDSKTPGPRFDINDTIRAVVLEFQSTYLFTLAYEKMHQFYKEVDSWISSELSSAPEGLSNGWFVSNLEFYDLQDSLSDGTLIAMGLSVAVAFSVMLLTTWNIIISLYAIISIAGTIFVTVGSLVLLGWELNVLESVTISVAVGLSVDFAVHYGVAYRLAPDPDREGKVIFSLSRVGSAMAMAALTTFVAGAMMMPSTVLAYTQLGTFMMLIMCISWAFATFFFQCMCRCLGPQGTCGQIPLPKKLQCSAFSHALSTSPSDKGQSKTHTINAYHLDPRGPKSELEHEFYELEPLASHSCTAPEKTTYEETHICSEFFNSQAKNLGMPVHAAYNSELSKSTESDAGSALLQPPLEQHTVCHFFSLNQRCSCPDAYKHLNYGPHSCQQMGDCLCHQCSPTTSSFVQIQNGVAPLKATHQAVEGFVHPITHIHHCPCLQGRVKPAGMQNSLPRNFFLHPVQHIQAQEKIGKTNVHSLQRSIEEHLPKMAEPSSFVCRSTGSLLKTCCDPENKQRELCKNRDVSNLESSGGTENKAGGKVELSLSQTDASVNSEHFNQNEPKVLFNHLMGEAGCRSCPNNSQSCGRIVRVKCNSVDCQMPNMEANVPAVLTHSELSGESLLIKTL

SEQ ID NO: 24957 - protein, 1401 aa, Homo sapiens
  Payload ID: 4931
  Gene Symbol: DISP2
  Gene Name: dispatched homolog 2 (Drosophila)
  Uniprot ID: A7MBM2
  ENSP ID: ENSP00000267889
MDGDSSSSSGGSGPAPGPGPEGEQRPEGEPLAPDGGSPDSTQTKAVPPEASPERSCSLHSCPLEDPSSSSGPPPTTSTLQPVGPSSPLAPAHFTYPRALQEYQGGSSLPGLGDRAALCSHGSSLSPSPAPSQRDGTWKPPAVQHHVVSVRQERAFQMPKSYSQLIAEWPVAVLMLCLAVIFLCTLAGLLGARLPDFSKPLLGFEPRDTDIGSKLVVWRALQALTGPRKLLFLSPDLELNSSSSHNTLRPAPRGSAQESAVRPRRMVEPLEDRRQENFFCGPPEKSYAKLVFMSTSSGSLWNLHAIHSMCRMEQDQIRSHTSFGALCQRTAANQCCPSWSLGNYLAVLSNRSSCLDTTQADAARTLALLRTCALYYHSGALVPSCLGPGQNKSPRCAQVPTKCSQSSAIYQLLHFLLDRDFLSPQTTDYQVPSLKYSLLFLPTPKGASLMDIYLDRLATPWGLADNYTSVTGMDLGLKQELLRHFLVQDTVYPLLALVAIFFGMALYLRSLFLTLMVLLGVLGSLLVAFFLYQVAFRMAYFPFVNLAALLLLSSVCANHTLIFFDLWRLSKSQLPSGGLAQRVGRTMHHFGYLLLVSGLTTSAAFYASYLSRLPAVRCLALFMGTAVLVHLALTLVWLPASAVLHERYLARGCARRARGRWEGSAPRRLLLALHRRLRGLRRAAAGTSRLLFQRLLPCGVIKFRYIWICWFAALAAGGAYIAGVSPRLRLPTLPPPGGQVFRPSHPFERFDAEYRQLFLFEQLPQGEGGHMPVVLVWGVLPVDTGDPLDPRSNSSLVRDPAFSASGPEAQRWLLALCHRARNQSFFDTLQEGWPTLCFVETLQRWMESPSCARLGPDLCCGHSDFPWAPQFFLHCLKMMALEQGPDGTQDLGLRFDAHGSLAALVLQFQTNFRNSPDYNQTQLFYNEVSHWLAAELGMAPPGLRRGWFTSRLELYSLQHSLSTEPAVVLGLALALAFATLLLGTWNVPLSLFSVAAVAGTVLLTVGLLVLLEWQLNTAEALFLSASVGLSVDFTVNYCISYHLCPHPDRLSRVAFSLRQTSCATAVGAAALFAAGVLMLPATVLLYRKLGIILMMVKCVSCGFASFFFQSLCCFFGPEKNCGQILWPCAHLPWDAGTGDPGGEKAGRPRPGSVGGMPGSCSEQYELQPLARRRSPSFDTSTATSKLSHRPSVLSEDLQLHDGPCCSRPPPAPASPRELLLDHQAVFSQCPALQTSSPYKQAGPSPKTRARQDSQGEEAEPLPASPEAPAHSPKAKAADPPDGFCSSASTLEGLSVSDETCLSTSEPSARVPDSVGVSPDDLDDTGQPVLERGQLNGKRDTLWLALRETVYDPSLPASHHSSLSWKGRGGPGDGSPVVLPNSQPDLPDVWLRRPSTHTSGYSS

SEQ ID NO: 24958 - protein, 104 aa, Homo sapiens
  Payload ID: 4932
  Gene Symbol: DIRC1
  Gene Name: disrupted in renal carcinoma 1
  Uniprot ID: Q969H9
  ENSP ID: ENSP00000307860
MPEAHMQPAKLQTSLPTTDHGSKKPVSCYLPPLSNAHPMCIEVQNAQNCSSAAATLEPSIISDTCFYKPITKDQLSSRSELNTVRLKCLNSLRGWKILNQLSLT

SEQ ID NO: 24959 - protein, 478 aa, Homo sapiens
  Payload ID: 4933
  Gene Symbol: DIRC2
  Gene Name: disrupted in renal carcinoma 2
  Uniprot ID: Q96SL1
  ENSP ID: ENSP00000261038
MGSRWSSEEERQPLLGPGLGPGLGASWRSREAAAAALPAAVPGPGRVYGRRWLVLLLFSLLAFVQGLVWNTWGPIQNSARQAYGFSSWDIALLVLWGPIGFLPCFAFMWLLDKRGLRITVLLTSFLMVLGTGLRCIPISDLILKRRLIHGGQMLNGLAGPTVMNAAPFLSTTWFSADERATATAIASMLSYLGGACAFLVGPLVVPAPNGTSPLLAAESSRAHIKDRIEAVLYAEFGVVCLIFSATLAYFPPRPPLPPSVAAASQRLSYRRSVCRLLSNFRFLMIALAYAIPLGVFAGWSGVLDLILTPAHVSQVDAGWIGFWSIVGGCVVGIAMARFADFIRGMLKLILLLLFSGATLSSTWFTLTCLNSITHLPLTTVTLYASCILLGVFLNSSVPIFFELFVETVYPVPEGITCGVVTFLSNMFMGVLLFFLTFYHTELSWFNWCLPGSCLLSLLLILCFRESYDRLYLDVVVSV

SEQ ID NO: 24960 - protein, 115 aa, Homo sapiens
  Payload ID: 4933
  Gene Symbol: DIRC2
  Gene Name: disrupted in renal carcinoma 2
  ENSP ID: ENSP00000418554
MGSRWSSEEERQPLLGPGLGPGLGASWRSREAAAAALPAAVPGPGRVYGRRWLVLLLFSLLAFVQGLVWNTWGPIQNSARQAYGFSSWDIALLVLWGPIGFLPCFAFMWLLDKRD

SEQ ID NO: 24961 - protein, 131 aa, Homo sapiens
  Payload ID: 4934
  Gene Symbol: DIRC3
  Gene Name: disrupted in renal carcinoma 3
  ENSP ID: ENSP00000389455
MNSQNWWDFPTSCFSCRGRKMRGSTAQASGAPFLALTVLDQESVIQIIPEPLPQFYLCLLDAELTGVVRGGEDASATPRSLSHSLANCMISENGLVSRLTALETGLLCFSCKQVSPVSCRWRQNMVFKPNS

SEQ ID NO: 24962 - protein, 547 aa, Homo sapiens
  Payload ID: 4935
  Gene Symbol: DISC1
  Gene Name: disrupted in schizophrenia 1
  ENSP ID: ENSP00000295051
MPGGGPQGAPAAAGGGGVSHRAGSRDCLPPAACFRRRRLARRPGYMRSSTGPGIGFLSPAVGTLFRFPGGVSGEESHHSESRARQCGLDSRGLLVRSPVSKSAAAPTVTSVRGTSAHFGIQLRGGTRLPDRLSWPCGPGSAGWQQEFAAMDSSETLDASWEAACSDGARRVRAAGSLPSAELSSNSCSPGCGPEVPPTPPGSHSAFTSSFSFIRLSLGSAGERGEAEGCPPSREAESHCQSPQEMGAKAASLDGPHEDPRCLSRPFSLLATRVSADLAQAARNSSRPERDMHSLPDMDPGSSSSLDPSLAGCGGDGSSGSGDAHSWDTLLRKWEPVLRDCLLRNRRQMEVISLRLKLQKLQEDAVENDDYDKAETLQQRLEDLEQEKISLHFQLPSRQPALSSFLGHLAAQVQAALRRGATQQASGDDTHTPLRMEPRLLEPTAQDSLHVSITRRDWLLQEKQQLQKEIEALQARMFVLEAKDQQLRREIEEQEQQLQWQGCDLTPLVGQLSLGQLQEVSKALQDTLASAGQIPFHAEPPETIRRCV

SEQ ID NO: 24963 - protein, 369 aa, Homo sapiens
  Payload ID: 4935
  Gene Symbol: DISC1
  Gene Name: disrupted in schizophrenia 1
  Uniprot ID: Q9NRI5
  ENSP ID: ENSP00000320784
MPGGGPQGAPAAAGGGGVSHRAGSRDCLPPAACFRRRRLARRPGYMRSSTGPGIGFLSPAVGTLFRFPGGVSGEESHHSESRARQCGLDSRGLLVRSPVSKSAAAPTVTSVRGTSAHFGIQLRGGTRLPDRLSWPCGPGSAGWQQEFAAMDSSETLDASWEAACSDGARRVRAAGSLPSAELSSNSCSPGCGPEVPPTPPGSHSAFTSSFSFIRLSLGSAGERGEAEGCPPSREAESHCQSPQEMGAKAASLDGPHEDPRCLSRPFSLLATRVSADLAQAARNSSRPERDMHSLPDMDPGSSSSLDPSLAGCGGDGSSGSGDAHSWDTLLRKWEPVLRDCLLRNRRQMELEPIALDPPWKPRHPEPNSY

SEQ ID NO: 24964 - protein, 382 aa, Homo sapiens
  Payload ID: 4935
  Gene Symbol: DISC1
  Gene Name: disrupted in schizophrenia 1
  ENSP ID: ENSP00000355592
MPGGGPQGAPAAAGGGGVSHRAGSRDCLPPAACFRRRRLARRPGYMRSSTGPGIGFLSPAVGTLFRFPGGVSGEESHHSESRARQCGLDSRGLLVRSPVSKSAAAPTVTSVRGTSAHFGIQLRGGTRLPDRLSWPCGPGSAGWQQEFAAMDSSETLDASWEAACSDGARRVRAAGSLPSAELSSNSCSPGCGPEVPPTPPGSHSAFTSSFSFIRLSLGSAGERGEAEGCPPSREAESHCQSPQEMGAKAASLDGPHEDPRCLSRPFSLLATRVSADLAQAARNSSRPERDMHSLPDMDPGSSSSLDPSLAGCGGDGSSGSGDAHSWDTLLRKWEPVLRDCLLRNRRQMEVISLRLKLQKLQEDAVENDDYDKGPAEMTPTPH

SEQ ID NO: 24965 - protein, 755 aa, Homo sapiens
  Payload ID: 4935
  Gene Symbol: DISC1
  Gene Name: disrupted in schizophrenia 1
  Uniprot ID: Q9NRI5
  ENSP ID: ENSP00000355593
MPGGGPQGAPAAAGGGGVSHRAGSRDCLPPAACFRRRRLARRPGYMRSSTGPGIGFLSPAVGTLFRFPGGVSGEESHHSESRARQCGLDSRGLLVRSPVSKSAAAPTVTSVRGTSAHFGIQLRGGTRLPDRLSWPCGPGSAGWQQEFAAMDSSETLDASWEAACSDGARRVRAAGSLPSAELSSNSCSPGCGPEVPPTPPGSHSAFTSSFSFIRLSLGSAGERGEAEGCPPSREAESHCQSPQEMGAKAASLDGPHEDPRCLSRPFSLLATRVSADLAQAARNSSRPERDMHSLPDMDPGSSSSLDPSLAGCGGDGSSGSGDAHSWDTLLRKWEPVLRDCLLRNRRQMEVISLRLKLQKLQEDAVENDDYDKAETLQQRLEDLEQEKISLHFQLPSRQPALSSFLGHLAAQVQAALRRGATQQASGDDTHTPLRMEPRLLEPTAQDSLHVSITRRDWLLQEKQQLQKEIEALQARMFVLEAKDQQLRREIEEQEQQLQWQGCDLTPLVGQLSLGQLQEVSKALQDTLASAGQIPFHAEPPETIRSLQERIKSLNLSLKEITTKVCMSEKFCSTLRKKVNDIETQLPALLEAKMHAISGNHFWTAKDLTEEIRSLTSEREGLEGLLSKLLVLSSRNVKKLGSVKEDYNRLRREVEHQETAYDGVSLCRPVWSAVVRSCSLQPLPPEFKQFSCLSLRSSWDYRCPPPCLANFVFLVEMGFYHVDQTGLKLLTSSDPPSSASQSAGITDMSHCAWPLQ

SEQ ID NO: 24966 - protein, 678 aa, Homo sapiens
  Payload ID: 4935
  Gene Symbol: DISC1
  Gene Name: disrupted in schizophrenia 1
  Uniprot ID: Q9NRI5
  ENSP ID: ENSP00000355596
MPGGGPQGAPAAAGGGGVSHRAGSRDCLPPAACFRRRRLARRPGYMRSSTGPGIGFLSPAVGTLFRFPGGVSGEESHHSESRARQCGLDSRGLLVRSPVSKSAAAPTVTSVRGTSAHFGIQLRGGTRLPDRLSWPCGPGSAGWQQEFAAMDSSETLDASWEAACSDGARRVRAAGSLPSAELSSNSCSPGCGPEVPPTPPGSHSAFTSSFSFIRLSLGSAGERGEAEGCPPSREAESHCQSPQEMGAKAASLDGPHEDPRCLSRPFSLLATRVSADLAQAARNSSRPERDMHSLPDMDPGSSSSLDPSLAGCGGDGSSGSGDAHSWDTLLRKWEPVLRDCLLRNRRQMEVISLRLKLQKLQEDAVENDDYDKAETLQQRLEDLEQEKISLHFQLPSRQPALSSFLGHLAAQVQAALRRGATQQASGDDTHTPLRMEPRLLEPTAQDSLHVSITRRDWLLQEKQQLQKEIEALQARMFVLEAKDQQLRREIEEQEQQLQWQGCDLTPLVGQLSLGQLQEVSKALQDTLASAGQIPFHAEPPETIRSLQERIKSLNLSLKEITTKVCMSEKFCSTLRKKVNDIETQLPALLEAKMHAISGNHFWTAKDLTEEIRSLTSEREGLEGLLSKLLVLSSRNVKKLGSVKEDYNRLRREVEHQETAYGYKYCDAESWTQRSQQLA

SEQ ID NO: 24967 - protein, 832 aa, Homo sapiens
  Payload ID: 4935
  Gene Symbol: DISC1
  Gene Name: disrupted in schizophrenia 1
  ENSP ID: ENSP00000355597
MPGGGPQGAPAAAGGGGVSHRAGSRDCLPPAACFRRRRLARRPGYMRSSTGPGIGFLSPAVGTLFRFPGGVSGEESHHSESRARQCGLDSRGLLVRSPVSKSAAAPTVTSVRGTSAHFGIQLRGGTRLPDRLSWPCGPGSAGWQQEFAAMDSSETLDASWEAACSDGARRVRAAGSLPSAELSSNSCSPGCGPEVPPTPPGSHSAFTSSFSFIRLSLGSAGERGEAEGCPPSREAESHCQSPQEMGAKAASLDGPHEDPRCLSRPFSLLATRVSADLAQAARNSSRPERDMHSLPDMDPGSSSSLDPSLAGCGGDGSSGSGDAHSWDTLLRKWEPVLRDCLLRNRRQMEVISLRLKLQKLQEDAVENDDYDKAETLQQRLEDLEQEKISLHFQLPSRQPALSSFLGHLAAQVQAALRRGATQQASGDDTHTPLRMEPRLLEPTAQDSLHVSITRRDWLLQEKQQLQKEIEALQARMFVLEAKDQQLRREIEEQEQQLQWQGCDLTPLVGQLSLGQLQEVSKALQDTLASAGQIPFHAEPPETIRSLQERIKSLNLSLKEITTKVCMSEKFCSTLRKKVNDIETQLPALLEAKMHAISGNHFWTAKDLTEEIRSLTSEREGLEGLLSKLLVLSSRNVKKLGSVKEDYNRLRREVEHQETAYETSVKENTMKYMETLKNKLCSCKCPLLGKVWEADLEACRLLIQSLQLQEARGSLSVEDERQMDDLEGAAPPIPPRLHSEDKRKTPLKESYILSAELGEKCEDIGKKLLYLEDQLHTAIHSHDEDLIHSLRRELQMVKETLQAMILQLQPAKEAGEREAAASCMTAGVHEAQA

SEQ ID NO: 24968 - protein, 854 aa, Homo sapiens [sequence omitted]

SEQ ID NO: 24969 - protein, 44 aa, Homo sapiens
  Payload ID: 4935
  Gene Symbol: DISC1
  Gene Name: disrupted in schizophrenia 1
  ENSP ID: ENSP00000415147
MPGGGPQGAPAAAGGGGVSHRAAGIAYHLQRAFGGGGWHGGRAT

SEQ ID NO: 24970 - protein, 622 aa, Homo sapiens
  Payload ID: 4935
  Gene Symbol: DISC1
  Gene Name: disrupted in schizophrenia 1
  ENSP ID: ENSP00000440909
MPGGGPQGAPAAAGGGGVSHRAGSRDCLPPAACFRRRRLARRPGYMRSSTGPGIGFLSPAVGTLFRFPGGVSGEESHHSESRARQCGLDSRGLLVRSPVSKSAAAPTVTSVRGTSAHFGIQLRGGTRLPDRLSWPCGPGSAGWQQEFAAMDSSETLDASWEAACSDGARRVRAAGSLPSAELSSNSCSPGCGPEVPPTPPGSHSAFTSSFSFIRLSLGSAGERGEAEGCPPSREAESHCQSPQEMGAKAASLDGPHEDPRCLSRPFSLLATRVSADLAQAARNSSRPERDMHSLPDMDPGSSSSLDPSLAGCGGDGSSGSGDAHSWDTLLRKWEPVLRDCLLRNRRQMEVISLRLKLQKLQEDAVENDDYDKAETLQQRLEDLEQEKISLHFQLPSRQPALSSFLGHLAAQVQAALRRGATQQASGDDTHTPLRMEPRLLEPTAQDSLHVSITRRDWLLQEKQQLQKEIEALQARMFVLEAKDQQLRREIEEQEQQLQWQGCDLTPLVGQLSLGQLQEVSKALQDTLASAGQIPFHAEPPETIRSLQERIKSLNLSLKEITTKVCMSEKFCSTLRKKVNDIETQLPALLEAKMHAISGGHGTLWHILPDVSGGIVGAHPTFY

SEQ ID NO: 24971 - protein, 579 aa, Homo sapiens
  Payload ID: 4935
  Gene Symbol: DISC1
  Gene Name: disrupted in schizophrenia 1
  Uniprot ID: Q9NRI5
  ENSP ID: ENSP00000440953
MPGGGPQGAPAAAGGGGVSHRAGSRDCLPPAACFRRRRLARRPGYMRSSTGPGIGFLSPAVGTLFRFPGGVSGEESHHSESRARQCGLDSRGLLVRSPVSKSAAAPTVTSVRGTSAHFGIQLRGGTRLPDRLSWPCGPGSAGWQQEFAAMDSSETLDASWEAACSDGARRVRAAGSLPSAELSSNSCSPGCGPEVPPTPPGSHSAFTSSFSFIRLSLGSAGERGEAEGCPPSREAESHCQSPQEMGAKAASLDGPHEDPRCLSRPFSLLATRVSADLAQAARNSSRPERDMHSLPDMDPGSSSSLDPSLAGCGGDGSSGSGDAHSWDTLLRKWEPVLRDCLLRNRRQMEVISLRLKLQKLQEDAVENDDYDKAETLQQRLEDLEQEKISLHFQLPSRQPALSSFLGHLAAQVQAALRRGATQQASGDDTHTPLRMEPRLLEPTAQDSLHVSITRRDWLLQEKQQLQKEIEALQARMFVLEAKDQQLRREIEEQEQQLQWQGCDLTPLVGQLSLGQLQEVSKALQDTLASAGQIPFHAEPPETIRSLQERIKSLNLSLKEITTKETISGRLKTSPRRLDH

SEQ ID NO: 24972 - protein, 609 aa, Homo sapiens
  Payload ID: 4935
  Gene Symbol: DISC1
  Gene Name: disrupted in schizophrenia 1
  ENSP ID: ENSP00000441193
MPGGGPQGAPAAAGGGGVSHRAGSRDCLPPAACFRRRRLARRPGYMRSSTGPGIGFLSPAVGTLFRFPGGVSGEESHHSESRARQCGLDSRGLLVRSPVSKSAAAPTVTSVRGTSAHFGIQLRGGTRLPDRLSWPCGPGSAGWQQEFAAMDSSETLDASWEAACSDGARRVRAAGSLPSAELSSNSCSPGCGPEVPPTPPGSHSAFTSSFSFIRLSLGSAGERGEAEGCPPSREAESHCQSPQEMGAKAASLDGPHEDPRCLSRPFSLLATRVSADLAQAARNSSRPERDMHSLPDMDPGSSSSLDPSLAGCGGDGSSGSGDAHSWDTLLRKWEPVLRDCLLRNRRQMEVISLRLKLQKLQEDAVENDDYDKAETLQQRLEDLEQEKISLHFQLPSRQPALSSFLGHLAAQVQAALRRGATQQASGDDTHTPLRMEPRLLEPTAQDSLHVSITRRDWLLQEKQQLQKEIEALQARMFVLEAKDQQLRREIEEQEQQLQWQGCDLTPLVGQLSLGQLQEVSKALQDTLASAGQIPFHAEPPETIRREVRHQTAPCRNHQLEKPVINIWAFHLRRKICLFQADGLQHGSAEVKHLKETSVEPAGSTASRKE

SEQ ID NO: 24973 - protein, 695 aa, Homo sapiens
  Payload ID: 4935
  Gene Symbol: DISC1
  Gene Name: disrupted in schizophrenia 1
  Uniprot ID: Q9NRI5
  ENSP ID: ENSP00000443996
MPGGGPQGAPAAAGGGGVSHRAGSRDCLPPAACFRRRRLARRPGYMRSSTGPGIGFLSPAVGTLFRFPGGVSGEESHHSESRARQCGLDSRGLLVRSPVSKSAAAPTVTSVRGTSAHFGIQLRGGTRLPDRLSWPCGPGSAGWQQEFAAMDSSETLDASWEAACSDGARRVRAAGSLPSAELSSNSCSPGCGPEVPPTPPGSHSAFTSSFSFIRLSLGSAGERGEAEGCPPSREAESHCQSPQEMGAKAASLDGPHEDPRCLSRPFSLLATRVSADLAQAARNSSRPERDMHSLPDMDPGSSSSLDPSLAGCGGDGSSGSGDAHSWDTLLRKWEPVLRDCLLRNRRQMEVISLRLKLQKLQEDAVENDDYDKAETLQQRLEDLEQEKISLHFQLPSRQPALSSFLGHLAAQVQAALRRGATQQASGDDTHTPLRMEPRLLEPTAQDSLHVSITRRDWLLQEKQQLQKEIEALQARMFVLEAKDQQLRREIEEQEQQLQWQGCDLTPLVGQLSLGQLQEVSKALQDTLASAGQIPFHAEPPETIRSLQERIKSLNLSLKEITTKVCMSEKFCSTLRKKVNDIETQLPALLEAKMHAISGNHFWTAKDLTEEIRSLTSEREGLEGLLSKLLVLSSRNVKKLGSVKEDYNRLRREVEHQETAYAASVHCLGKCGKLTWKLVDCLSRAYSSRKPGEACL

SEQ ID NO: 24974 - protein, 356 aa, Homo sapiens
  Payload ID: 4935
  Gene Symbol: DISC1
  Gene Name: disrupted in schizophrenia 1
  Uniprot ID: Q9NRI5
  ENSP ID: ENSP00000473261
MPGGGPQGAPAAAGGGGVSHRAGSRDCLPPAACFRRRRLARRPGYMRSSTGPGIGFLSPAVGTLFRFPGGVSGEESHHSESRARQCGLDSRGLLVRSPVSKSAAAPTVTSVRGTSAHFGIQLRGGTRLPDRLSWPCGPGSAGWQQEFAAMDSSETLDASWEAACSDGARRVRAAGSLPSAELSSNSCSPGCGPEVPPTPPGSHSAFTSSFSFIRLSLGSAGERGEAEGCPPSREAESHCQSPQEMGAKAASLDGPHEDPRCLSRPFSLLATRVSADLAQAARNSSRPERDMHSLPDMDPGSSSSLDPSLAGCGGDGSSGSGDAHSWDTLLRKWEPVLRDCLLRNRRQMELRRYNKD

SEQ ID NO: 24975 - protein, 201 aa, Homo sapiens
  Payload ID: 4935
  Gene Symbol: DISC1
  Gene Name: disrupted in schizophrenia 1
  Uniprot ID: Q9NRI5
  ENSP ID: ENSP00000473386
MPGGGPQGAPAAAGGGGVSHRAAETLQQRLEDLEQEKISLHFQLPSRQPALSSFLGHLAAQVQAALRRGATQQASGDDTHTPLRMEPRLLEPTAQDSLHVSITRRDWLLQEKQQLQKEIEALQARMFVLEAKDQQLRREIEEQEQQLQWQGCDLTPLVGQLSLGQLQEVSKALQDTLASAGQIPFHAEPPETIRRKPFLDG

SEQ ID NO: 24976 - protein, 356 aa, Homo sapiens; identical to SEQ ID NO: 24974
  Payload ID: 4935
  Gene Symbol: DISC1
  Gene Name: disrupted in schizophrenia 1
  Uniprot ID: Q9NRI5
  ENSP ID: ENSP00000473417

SEQ ID NO: 24977 - protein, 662 aa, Homo sapiens
  Payload ID: 4935
  Gene Symbol: DISC1
  Gene Name: disrupted in schizophrenia 1
  Uniprot ID: Q9NRI5
  ENSP ID: ENSP00000473425
MPGGGPQGAPAAAGGGGVSHRAGSRDCLPPAACFRRRRLARRPGYMRSSTGPGIGFLSPAVGTLFRFPGGVSGEESHHSESRARQCGLDSRGLLVRSPVSKSAAAPTVTSVRGTSAHFGIQLRGGTRLPDRLSWPCGPGSAGWQQEFAAMDSSETLDASWEAACSDGARRVRAAGSLPSAELSSNSCSPGCGPEVPPTPPGSHSAFTSSFSFIRLSLGSAGERGEAEGCPPSREAESHCQSPQEMGAKAASLDGPHEDPRCLSRPFSLLATRVSADLAQAARNSSRPERDMHSLPDMDPGSSSSLDPSLAGCGGDGSSGSGDAHSWDTLLRKWEPVLRDCLLRNRRQMEVISLRLKLQKLQEDAVENDDYDKAETLQQRLEDLEQEKISLHFQLPSRQPALSSFLGHLAAQVQAALRRGATQQASGDDTHTPLRMEPRLLEPTAQDSLHVSITRRDWLLQEKQQLQKEIEALQARMFVLEAKDQQLRREIEEQEQQLQWQGCDLTPLVGQLSLGQLQEVSKALQDTLASAGQIPFHAEPPETIRSLQERIKSLNLSLKEITTKVCMSEKFCSTLRKKVNDIETQLPALLEAKMHAISGNHFWTAKDLTEEIRSLTSEREGLEGLLSKLLVLSSRNVKKLGSVKEDYNRLRREVEHQETAYGR

SEQ ID NO: 24978 - protein, 356 aa, Homo sapiens; identical to SEQ ID NO: 24974
  Payload ID: 4935
  Gene Symbol: DISC1
  Gene Name: disrupted in schizophrenia 1
  Uniprot ID: Q9NRI5
  ENSP ID: ENSP00000473586

SEQ ID NO: 24979 - protein, 442 aa, Homo sapiens
  Payload ID: 4935
  Gene Symbol: DISC1
  Gene Name: disrupted in schizophrenia 1
  ENSP ID: ENSP00000481791
MPGGGPQGAPAAAGGGGVSHRAGSRDCLPPAACFRRRRLARRPGYMRSSTGPGIGFLSPAVGTLFRFPGGVSGEESHHSESRARQCGLDSRGLLVRSPVSKSAAAPTVTSVRGTSAHFGIQLRGGTRLPDRLSWPCGPGSAGWQQEFAAMDSSETLDASWEAACSDGARRVRAAGSLPSAELSSNSCSPGCGPEVPPTPPGSHSAFTSSFSFIRLSLGSAGERGEAEGCPPSREAESHCQSPQEMGAKAASLDGPHEDPRCLSRPFSLLATRVSADLAQAARNSSRPERDMHSLPDMDPGSSSSLDPSLAGCGGDGSSGSGDAHSWDTLLRKWEPVLRDCLLRNRRQMEVISLRLKLQKLQEDAVENDDYDKAETLQQRLEDLEQEKISLHFQLPSRQPALSSFLGHLAAQVQAALRRGATQQKKSKLSKQGCLCWKPKINS

SEQ ID NO: 24980 - protein, 732 aa, Homo sapiens
  Payload ID: 4935
  Gene Symbol: DISC1
  Gene Name: disrupted in schizophrenia 1
  ENSP ID: ENSP00000482174
MPGGGPQGAPAAAGGGGVSHRAGSRDCLPPAACFRRRRLARRPGYMRSSTGPGIGFLSPAVGTLFRFPGGVSGEESHHSESRARQCGLDSRGLLVRSPVSKSAAAPTVTSVRGTSAHFGIQLRGGTRLPDRLSWPCGPGSAGWQQEFAAMDSSETLDASWEAACSDGARRVRAAGSLPSAELSSNSCSPGCGPEVPPTPPGSHSAFTSSFSFIRLSLGSAGERGEAEGCPPSREAESHCQSPQEMGAKAASLDGPHEDPRCLSRPFSLLATRVSADLAQAARNSSRPERDMHSLPDMDPGSSSSLDPSLAGCGGDGSSGSGDAHSWDTLLRKWEPVLRDCLLRNRRQMEVISLRLKLQKLQEDAVENDDYDKAETLQQRLEDLEQEKISLHFQLPSRQPALSSFLGHLAAQVQAALRRGATQHLQERIKSLNLSLKEITTKVCMSEKFCSTLRKKVNDIETQLPALLEAKMHAISGNHFWTAKDLTEEIRSLTSEREGLEGLLSKLLVLSSRNVKKLGSVKEDYNRLRREVEHQETAYETSVKENTMKYMETLKNKLCSCKCPLLGKVWEADLEACRLLIQSLQLQEARGSLSVEDERQMDDLEGAAPPIPPRLHSEDKRKTPLKVLEEWKTHLIPSLHCAGGEQKEESYILSAELGEKCEDIGKKLLYLEDQLHTAIHSHDEDLIHSLRRELQMVKETLQAMILQLQPAKEAGEREAAASCMTAGVHEAQA

SEQ ID NO: 24981 - protein, 559 aa, Homo sapiens
  Payload ID: 4935
  Gene Symbol: DISC1
  Gene Name: disrupted in schizophrenia 1
  Uniprot ID: Q9NRI5
  ENSP ID: ENSP00000487190
MPGGGPQGAPAAAGGGGVSHRAGSRDCLPPAACFRRRRLARRPGYMRSSTGPGIGFLSPAVGTLFRFPGGVSGEESHHSESRARQCGLDSRGLLVRSPVSKSAAAPTVTSVRGTSAHFGIQLRGGTRLPDRLSWPCGPGSAGWQQEFAAMDSSETLDASWEAACSDGARRVRAAGSLPSAELSSNSCSPGCGPEVPPTPPGSHSAFTSSFSFIRLSLGSAGERGEAEGCPPSREAESHCQSPQEMGAKAASLDGPHEDPRCLSRPFSLLATRVSADLAQAARNSSRPERDMHSLPDMDPGSSSSLDPSLAGCGGDGSSGSGDAHSWDTLLRKWEPVLRDCLLRNRRQMEVISLRLKLQKLQEDAVENDDYDKAETLQQRLEDLEQEKISLHFQLPSRQPALSSFLGHLAAQVQAALRRGATQQASGDDTHTPLRMEPRLLEPTAQDSLHVSITRRDWLLQEKQQLQKEIEALQARMFVLEAKDQQLRREIEEQEQQLQWQGCDLTPLVGQLSLGQLQEVSKALQDTLASAGQIPFHAEPPETIRRNKCEGKYYEVHGNT

SEQ ID NO: 24982 - protein, 129 aa, Homo sapiens
  Payload ID: 4936
  Gene Symbol: DLX1
  Gene Name: distal-less homeobox 1
  Uniprot ID: P56177
  ENSP ID: ENSP00000341786
MTMTTMPESLNSPVSGKAVFMEFGPPNQQMSPSPMSHGHYSMHCLHSAGHSQPDGAYSSASSFSRPLGYPYVNSVSSHASSPYISSVQSYPGSASLAQSRLEDPGQDLVPKQAIQVQEADEAGWGGSGG

SEQ ID NO: 24983 - protein, 255 aa, Homo sapiens
  Payload ID: 4936
  Gene Symbol: DLX1
  Gene Name: distal-less homeobox 1
  Uniprot ID: P56177
  ENSP ID: ENSP00000354478
MTMTTMPESLNSPVSGKAVFMEFGPPNQQMSPSPMSHGHYSMHCLHSAGHSQPDGAYSSASSFSRPLGYPYVNSVSSHASSPYISSVQSYPGSASLAQSRLEDPGADSEKSTVVEGGEVRFNGKGKKIRKPRTIYSSLQLQALNRRFQQTQYLALPERAELAASLGLTQTQVKIWFQNKRSKFKKLMKQGGAALEGSALANGRALSAGSPPVPPGWNPNSSSGKGSGGNAGSYIPSYTSWYPSAHQEAMQQPQLM

SEQ ID NO: 24984 - protein, 171 aa, Homo sapiens
  Payload ID: 4936
  Gene Symbol: DLX1
  Gene Name: distal-less homeobox 1
  ENSP ID: ENSP00000354865
MTMTTMPESLNSPVSGKAVFMEFGPPNQQMSPSPMSHGHYSMHCLHSAGHSQPDGAYSSASSFSRPLGYPYVNSVSSHASSPYISSVQSYPGSASLAQSRLEDPGADSEKSTVVEGGEVRFNGKGKKIRKPRTIYSSLQLQALNRRFQQTQYLALPERAELAASLGLTQTQ

SEQ ID NO: 24985 - protein, 187 aa, Homo sapiens
  Payload ID: 4936
  Gene Symbol: DLX1
  Gene Name: distal-less homeobox 1
  ENSP ID: ENSP00000448827
MTMTTMPESLNSPVSGKAVFMEFGPPNQQMSPSPMSHGHYSMHCLHSAGHSQPDGAYSSASSFSRPLGYPYVNSVSSHASSPYISSVQSYPGSASLAQSRLEDPGADSEKSTVVEGGEVRFNGKGKKIRKPRTIYSSLQLQALNRRFQQTQYLALPERAELAASLGLTQTQVKIWFQNKRSKFKKLM

SEQ ID NO: 24986 - protein, 328 aa, Homo sapiens
  Payload ID: 4937
  Gene Symbol: DLX2
  Gene Name: distal-less homeobox 2
  Uniprot ID: Q07687
  ENSP ID: ENSP00000234198
MTGVFDSLVADMHSTQIAASSTYHQHQQPPSGGGAGPGGNSSSSSSLHKPQESPTLPVSTATDSSYYTNQQHPAGGGGGGGSPYAHMGSYQYQASGLNNVPYSAKSSYDLGYTAAYTSYAPYGTSSSPANNEPEKEDLEPEIRIVNGKPKKVRKPRTIYSSFQLAALQRRFQKTQYLALPERAELAASLGLTQTQVKIWFQNRRSKFKKMWKSGEIPSEQHPGASASPPCASPPVSAPASWDFGVPQRMAGGGGPGSGGSGAGSSGSSPSSAASAFLGNYPWYHQTSGSASHLQATAPLLHPTQTPQPHHHHHHHGGGGAPVSAGTIF

SEQ ID NO: 24987 - protein, 217 aa, Homo sapiens
  Payload ID: 4937
  Gene Symbol: DLX2
  Gene Name: distal-less homeobox 2
  Uniprot ID: Q07687
  ENSP ID: ENSP00000446904
MTGVFDSLVADMHSTQIAASSTYHQHQQPPSGGGAGPGGNSSSSSSLHKPQESPTLPVSTATDSSYYTNQQHPAGGGGGGGSPYAHMGSYQYQASGLNNVPYSAKSSYDLGYTAAYTSYAPYGTSSSPANNEPEKEDLEPEIRIVNGKPKKVRKPRTIYSSFQLAALQRRFQKTQYLALPERAELAASLGLTQTQVGLAPCRGEESAGLRWLGSRRV

SEQ ID NO: 24988 - protein, 287 aa, Homo sapiens
  Payload ID: 4938
  Gene Symbol: DLX3
  Gene Name: distal-less homeobox 3
  Uniprot ID: O60479
  ENSP ID: ENSP00000389870
MSGSFDRKLSSILTDISSSLSCHAGSKDSPTLPESSVTDLGYYSAPQHDYYSGQPYGQTVNPYTYHHQFNLNGLAGTGAYSPKSEYTYGASYRQYGAYREQPLPAQDPVSVKEEPEAEVRMVNGKPKKVRKPRTIYSSYQLAALQRRFQKAQYLALPERAELAAQLGLTQTQVKIWFQNRRSKFKKLYKNGEVPLEHSPNNSDSMACNSPPSPALWDTSSHSTPAPARSQLPPPLPYSASPSYLDDPTNSWYHAQNLSGPHLQQQPPQPATLHHASPGPPPNPGAVY

SEQ ID NO: 24989 - protein, 167 aa, Homo sapiens
  Payload ID: 4938
  Gene Symbol: DLX3
  Gene Name: distal-less homeobox 3
  ENSP ID: ENSP00000449976
MVNGKPKKVRKPRTIYSSYQLAALQRRFQKAQYLALPERAELAAQLGLTQTQVKIWFQNRRSKFKKLYKNGEVPLEHSPNNSDSMACNSPPSPALWDTSSHSTPAPARSQLPPPLPYSASPSYLDDPTNSWYHAQNLSGPHLQQQPPQPATLHHASPGPPPNPGAVY

SEQ ID NO: 24990 - protein, 240 aa, Homo sapiens
  Payload ID: 4939
  Gene Symbol: DLX4
  Gene Name: distal-less homeobox 4
  Uniprot ID: Q92988
  ENSP ID: ENSP00000240306
MTSLPCPLPGRDASKAVFPDLAPVPSVAAAYPLGLSPTTAASPNLSYSRPYGHLLSYPYTEPANPGDSYLSCQQPAALSQPLCGPAEHPQELEADSEKPRLSPEPSERRPQAPAKKLRKPRTIYSSLQLQHLNQRFQHTQYLALPERAQLAAQLGLTQTQVKIWFQNKRSKYKKLLKQNSGGQEGDFPGRTFSVSPCSPPLPSLWDLPKAGTLPTSGYGNSFGAWYQHHSSDVLASPQMM

SEQ ID NO: 24991 - protein, 168 aa, Homo sapiens
  Payload ID: 4939
  Gene Symbol: DLX4
  Gene Name: distal-less homeobox 4
  Uniprot ID: Q92988
  ENSP ID: ENSP00000410622
MKLSVLPPRSLLAPYTVLCCPPDSEKPRLSPEPSERRPQAPAKKLRKPRTIYSSLQLQHLNQRFQHTQYLALPERAQLAAQLGLTQTQVKIWFQNKRSKYKKLLKQNSGGQEGDFPGRTFSVSPCSPPLPSLWDLPKAGTLPTSGYGNSFGAWYQHHSSDVLASPQMM

SEQ ID NO: 24992 - protein, 114 aa, Homo sapiens
  Payload ID: 4939
  Gene Symbol: DLX4
  Gene Name: distal-less homeobox 4
  Uniprot ID: Q92988
  ENSP ID: ENSP00000480366
MKLSVLPPRSLLAPYTVLCCPPDSEKPRLSPEPSERRPQAPAKKLRKPRTIYSSLQLQHLNQRFQHTQYLALPERAQLAAQLGLTQTQVGPVSSFPISHLPWFSGNSSPSPSCE

SEQ ID NO: 24993 - protein, 289 aa, Homo sapiens
  Payload ID: 4940
  Gene Symbol: DLX5
  Gene Name: distal-less homeobox 5
  Uniprot ID: P56178
  ENSP ID: ENSP00000222598
MTGVFDRRVPSIRSGDFQAPFQTSAAMHHPSQESPTLPESSATDSDYYSPTGGAPHGYCSPTSASYGKALNPYQYQYHGVNGSAGSYPAKAYADYSYASSYHQYGGAYNRVPSATNQPEKEVTEPEVRMVNGKPKKVRKPRTIYSSFQLAALQRRFQKTQYLALPERAELAASLGLTQTQVKIWFQNKRSKIKKIMKNGEMPPEHSPSSSDPMACNSPQSPAVWEPQGSSRSLSHHPHAHPPTSNQSPASSYLENSASWYTSAASSINSHLPPPGSLQHPLALASGTLY

SEQ ID NO: 24994 - protein, 191 aa, Homo sapiens
  Payload ID: 4940
  Gene Symbol: DLX5
  Gene Name: distal-less homeobox 5
  Uniprot ID: P56178
  ENSP ID: ENSP00000475008
MTGVFDRRVPSIRSGDFQAPFQTSAAMHHPSQESPTLPESSATDSDYYSPTGGAPHGYCSPTSASYGKALNPYQYQYHGVNGSAGSYPAKAYADYSYASSYHQYGGAYNRVPSATNQPEKEVTEPEVRMVNGKPKKVRKPRTIYSSFQLAALQRRFQKTQYLALPERAELAASLGLTQTQVNTALPCTRPA

SEQ ID NO: 24995 - protein, 293 aa, Homo sapiens
  Payload ID: 4941
  Gene Symbol: DLX6
  Gene Name: distal-less homeobox 6
  Uniprot ID: P56179
  ENSP ID: ENSP00000428480
MMTMTTMADGLEGQDSSKSAFMEFGQQQQQQQQQQQQQQQQQQQPPPPPPPPPQPHSQQSSPAMAGAHYPLHCLHSAAAAAAAGSHHHHHHQHHHHGSPYASGGGNSYNHRSLAAYPYMSHSQHSPYLQSYHNSSAAAQTRGDDTDQQKTTVIENGEIRFNGKGKKIRKPRTIYSSLQLQALNHRFQQTQYLALPERAELAASLGLTQTQVKIWFQNKRSKFKKLLKQGSNPHESDPLQGSAALSPRSPALPPVWDVSASAKGVSMPPNSYMPGYSHWYSSPHQDTMQRPQMM

SEQ ID NO: 24996 - protein, 165 aa, Homo sapiens
  Payload ID: 4941
  Gene Symbol: DLX6
  Gene Name: distal-less homeobox 6
  ENSP ID: ENSP00000451635
MAAVASRVTAPLYYLLTDQQKTTVIENGEIRFNGKGKKIRKPRTIYSSLQLQALNHRFQQTQYLALPERAELAASLGLTQTQVKIWFQNKRSKFKKLLKQGSNPHESDPLQGSAALSPRSPALPPVWDVSASAKGVSMPPNSYMPGYSHWYSSPHQDTMQRPQMM

SEQ ID NO: 24997 - protein, 191 aa, Homo sapiens
  Payload ID: 4942
  Gene Symbol: DPRX
  Gene Name: divergent-paired related homeobox
  Uniprot ID: A6NFQ7
  ENSP ID: ENSP00000365838
MPGSEDLRKGKDQMHSHRKRTMFTKKQLEDLNILFNENPYPNPSLQKEMASKIDIHPTVLQVWFKNHRAKLKKAKCKHIHQKQETPQPPIPEGGVSTSVGLRNADTLPRLPNAAHPIGLVYTGHRVPSFQLILYPNLKVPANDFIGHRIVHFGCCRDPNIYCLYPILESQVCAPSFHSGSPACSSNQSRER

SEQ ID NO: 24998 - protein, 683 aa, Homo sapiens
  Payload ID: 4943
  Gene Symbol: DIXDC1
  Gene Name: DIX domain containing 1
  Uniprot ID: Q155Q3
  ENSP ID: ENSP00000394352
MLACLTRGNLLDVLQEGFNEQQLQAYVAWVNAQLKKRPAVKPVQDLRQDLRDGVILAYLIEIVAGEKLSGVQLSPGNQQEMKNNVEKVLQFVASKKIRMHQTSAKDIVDGNLKSIMRLVLALAAHFKPGSSRTVNQGRDSRAPLQSHRPHCATAVAQGAAAALADVCHDMSRSGRDVFRYRQRNSSMDEEIENPYWSVRALVQQYEGQQRSPSESSCSSLTSPSPIHSAKSESIITQSEEKADFVIIPAEGIENRTEGTDSPLSRDWRPGSPGTYLETSWEEQLLEQQEYLEKEMEEAKKMISGLQALLLNGSLPEDEQERPLALCEPGVNPEEQLIIIQSRLDQSMEENQDLKKELLKCKQEARNLQGIKDALQQRLTQQDTSVLQLKQELLRANMDKDELHNQNVDLQRKLDERNRLLGEYKKELGQKDRLLQQHQAKLEEALRKLSDVSYHQVDLERELEHKDVLLAHCMKREADEATNYNSHNSQSNGFLLPTAGKGATSVSNRGTSDLQLVRDALRSLRNSFSGHDPQHHTIDSLEQGISSLMERLHVMETQKKQERKVRVKSPRTQVGSEYRESWPPNSKLPHSQSSPTVSSTCTKVLYFTDRSLTPFMVNIPKRLEEVTLKDFKAAIDREGNHRYHFKALDPEFGTVKEEIFHDDDAIPGWEGKIVAWVEEDHGEN

SEQ ID NO: 24999 - protein, 218 aa, Homo sapiens
  Payload ID: 4943
  Gene Symbol: DIXDC1
  Gene Name: DIX domain containing 1
  Uniprot ID: Q155Q3
  ENSP ID: ENSP00000434130
MGTQVVMRFNNSLLPTEPSQQLQAYVAWVNAQLKKRPAVKPVQDLRQDLRDGVILAYLIEIVAGEKLSGVQLSPGNQQEMKNNVEKVLQFVASKKIRMHQTSAKDIVDGNLKSIMRLVLALAAHFKPGSSRTVNQGRDSRAPLQSHRPHCATAVAQGAAAALADVCHDMSRSGRDVFRYRQRNSSMDEEIENPYWSVRALVQQYEGQQRSPSESSCSR

SEQ ID NO: 25000 - protein, 77 aa, Homo sapiens
  Payload ID: 4943
  Gene Symbol: DIXDC1
  Gene Name: DIX domain containing 1
  ENSP ID: ENSP00000479434
MEEAKKMISGLQALLLNGSLPEDEQERPLALCEPGVNPEEQLIIIQSRLDQSMEENQDLKKELLKCKQEARNLQGIK

SEQ ID NO: 25001 - protein, 472 aa, Homo sapiens
  Payload ID: 4943
  Gene Symbol: DIXDC1
  Gene Name: DIX domain containing 1
  Uniprot ID: Q155Q3
  ENSP ID: ENSP00000480808
MGGTQVKCLTSPSPIHSAKSESIITQSEEKADFVIIPAEGIENRTEGTDSPLSRDWRPGSPGTYLETSWEEQLLEQQEYLEKEMEEAKKMISGLQALLLNGSLPEDEQERPLALCEPGVNPEEQLIIIQSRLDQSMEENQDLKKELLKCKQEARNLQGIKDALQQRLTQQDTSVLQLKQELLRANMDKDELHNQNVDLQRKLDERNRLLGEYKKELGQKDRLLQQHQAKLEEALRKLSDVSYHQVDLERELEHKDVLLAHCMKREADEATNYNSHNSQSNGFLLPTAGKGATSVSNRGTSDLQLVRDALRSLRNSFSGHDPQHHTIDSLEQGISSLMERLHVMETQKKQERKVRVKSPRTQVGSEYRESWPPNSKLPHSQSSPTVSSTCTKVLYFTDRSLTPFMVNIPKRLEEVTLKDFKAAIDREGNHRYHFKALDPEFGTVKEEIFHDDDAIPGWEGKIVAWVEEDHGEN

SEQ ID NO: 25002 - protein, 1528 aa, Homo sapiens
  Payload ID: 4944
  Gene Symbol: DLC1
  Gene Name: DLC1 Rho GTPase activating protein
  Uniprot ID: Q96QB1
  ENSP ID: ENSP00000276297
MSVAIRKRSWEEHVTHWMGQPFNSDDRNTACHHGLVADSLQASMEKDATLNVDRKEKCVSLPDCCHGSELRDFPGRPMGHLSKDVDENDSHEGEDQFLSLEASTETLVHVSDEDNNADLCLTDDKQVLNTQGQKTSGQHMIQGAGSLEKALPIIQSNQVSSNSWGIAGETELALVKESGERKVTDSISKSLELCNEISLSEIKDAPKVNAVDTLNVKDIAPEKQLLNSAVIAQQRRKPDPPKDENERSTCNVVQNEFLDTPCTNRGLPLLKTDFGSCLLQPPSCPNGMSAENGLEKSGFSQHQNKSPPKVKAEDGMQCLQLKETLATQEPTDNQVRLRKRKEIREDRDRARLDSMVLLIMKLDQLDQDIENALSTSSSPSGTPTNLRRHVPDLESGSESGADTISVNQTRVNLSSDTESTDLPSSTPVANSGTKPKTTAIQGISEKEKAEIEAKEACDWLRATGFPQYAQLYEDFLFPIDISLVKREHDFLDRDAIEALCRRLNTLNKCAVMKLEISPHRKRSDDSDEDEPCAISGKWTFQRDSKRWSRLEEFDVFSPKQDLVPGSPDDSHPKDGPSPGGTLMDLSERQEVSSVRSLSSTGSLPSHAPPSEDAATPRTNSVISVCSSSNLAGNDDSFGSLPSPKELSSFSFSMKGHEKTAKSKTRSLLKRMESLKLKSSHHSKHKAPSKLGLIISGPILQEGMDEEKLKQLNCVEISALNGNRINVPMVRKRSVSNSTQTSSSSSQSETSSAVSTPSPVTRTRSLSACNKRVGMYLEGFDPFNQSTFNNVVEQNFKNRESYPEDTVFYIPEDHKPGTFPKALTNGSFSPSGNNGSVNWRTGSFHGPGHISLRRENSSDSPKELKRRNSSSSMSSRLSIYDNVPGSILYSSSGDLADLENEDIFPELDDILYHVKGMQRIVNQWSEKFSDEGDSDSALDSVSPCPSSPKQIHLDVDNDRTTPSDLDSTGNSLNEPEEPSEIPERRDSGVGASLTRSNRHRLRWHSFQSSHRPSLNSVSLQINCQSVAQMNLLQKYSLLKLTALLEKYTPSNKHGFSWAVPKFMKRIKVPDYKDRSVFGVPLTVNVQRTGQPLPQSIQQAMRYLRNHCLDQVGLFRKSGVKSRIQALRQMNEGAIDCVNYEGQSAYDVADMLKQYFRDLPEPLMTNKLSETFLQIYQYVPKDQRLQAIKAAIMLLPDENREVLQTLLYFLSDVTAAVKENQMTPTNLAVCLAPSLFHLNTLKRENSSPRVMQRKQSLGKPDQKDLNENLAATQGLAHMIAECKKLFQVPEEMSRCRNSYTEQELKPLTLEALGHLGNDDSADYQHFLQDCVDGLFKEVKEKFKGWVSYSTSEQAELSYKKVSEGPPLRLWRSVIEVPAVPEEILKRLLKEQHLWDVDLLDSKVIEILDSQTEIYQYVQNSMAPHPARDYVVLRTWRTNLPKGACALLLTSVDHDRAPVVGVRVNVLLSRYLIEPCGPGKSKLTYMCRVDLRGHMPEWYTKSFGHLCAAEVVKIRDSFSNQNTETKDTKSR

SEQ ID NO: 25003 - protein, 498 aa, Homo sapiens
  Payload ID: 4944
  Gene Symbol: DLC1
  Gene Name: DLC1 Rho GTPase activating protein
  Uniprot ID: Q96QB1
  ENSP ID: ENSP00000321034
MSVAIRKRSWEEHVTHWMGQPFNSDDRNTACHHGLVADSLQASMEKDATLNVDRKEKCVSLPDCCHGSELRDFPGRPMGHLSKDVDENDSHEGEDQFLSLEASTETLVHVSDEDNNADLCLTDDKQVLNTQGQKTSGQHMIQGAGSLEKALPIIQSNQVSSNSWGIAGETELALVKESGERKVTDSISKSLELCNEISLSEIKDAPKVNAVDTLNVKDIAPEKQLLNSAVIAQQRRKPDPPKDENERSTCNVVQNEFLDTPCTNRGLPLLKTDFGSCLLQPPSCPNGMSAENGLEKSGFSQHQNKSPPKVKAEDGMQCLQLKETLATQEPTDNQVRLRKRKEIREDRDRARLDSMVLLIMKLDQLDQDIENALSTSSSPSGTPTNLRRHVPDLESGSESGADTISVNQTRVNLSSDTESTDLPSSTPVANSGTKPKTTAIQGISEKEKAAVKSVKLEVDEDKSTKGSNFSNSEVAIGLSPYTFPQKRLFHVAGEENIT

SEQ ID NO: 25004 - protein, 1091 aa, Homo sapiens
  Payload ID: 4944
  Gene Symbol: DLC1
  Gene Name: DLC1 Rho GTPase activating protein
  Uniprot ID: Q96QB1
  ENSP ID: ENSP00000351797
MCRKKPDTMILTQIEAKEACDWLRATGFPQYAQLYEDFLFPIDISLVKREHDFLDRDAIEALCRRLNTLNKCAVMKLEISPHRKRSDDSDEDEPCAISGKWTFQRDSKRWSRLEEFDVFSPKQDLVPGSPDDSHPKDGPSPGGTLMDLSERQEVSSVRSLSSTGSLPSHAPPSEDAATPRTNSVISVCSSSNLAGNDDSFGSLPSPKELSSFSFSMKGHEKTAKSKTRSLLKRMESLKLKSSHHSKHKAPSKLGLIISGPILQEGMDEEKLKQLNCVEISALNGNRINVPMVRKRSVSNSTQTSSSSSQSETSSAVSTPSPVTRTRSLSACNKRVGMYLEGFDPFNQSTFNNVVEQNFKNRESYPEDTVFYIPEDHKPGTFPKALTNGSFSPSGNNGSVNWRTGSFHGPGHISLRRENSSDSPKELKRRNSSSSMSSRLSIYDNVPGSILYSSSGDLADLENEDIFPELDDILYHVKGMQRIVNQWSEKFSDEGDSDSALDSVSPCPSSPKQIHLDVDNDRTTPSDLDSTGNSLNEPEEPSEIPERRDSGVGASLTRSNRHRLRWHSFQSSHRPSLNSVSLQINCQSVAQMNLLQKYSLLKLTALLEKYTPSNKHGFSWAVPKFMKRIKVPDYKDRSVFGVPLTVNVQRTGQPLPQSIQQAMRYLRNHCLDQVGLFRKSGVKSRIQALRQMNEGAIDCVNYEGQSAYDVADMLKQYFRDLPEPLMTNKLSETFLQIYQYVPKDQRLQAIKAAIMLLPDENREVLQTLLYFLSDVTAAVKENQMTPTNLAVCLAPSLFHLNTLKRENSSPRVMQRKQSLGKPDQKDLNENLAATQGLAHMIAECKKLFQVPEEMSRCRNSYTEQELKPLTLEALGHLGNDDSADYQHFLQDCVDGLFKEVKEKFKGWVSYSTSEQAELSYKKVSEGPPLRLWRSVIEVPAVPEEILKRLLKEQHLWDVDLLDSKVIEILDSQTEIYQYVQNSMAPHPARDYVVLRTWRTNLPKGACALLLTSVDHDRAPVVGVRVNVLLSRYLIEPCGPGKSKLTYMCRVDLRGHMPEWYTKSFGHLCAAEVVKIRDSFSNQNTETKDTKSR

SEQ ID NO: 25005 - protein, 1125 aa, Homo sapiens
  Payload ID: 4944
  Gene Symbol: DLC1
  Gene Name: DLC1 Rho GTPase activating protein
  Uniprot ID: Q96QB1
  ENSP ID: ENSP00000422595
MGDPKAHVMARPLRAPLRRSFSDHIRDSTARALDVIWKNTRDRRLAEIEAKEACDWLRATGFPQYAQLYEDFLFPIDISLVKREHDFLDRDAIEALCRRLNTLNKCAVMKLEISPHRKRSDDSDEDEPCAISGKWTFQRDSKRWSRLEEFDVFSPKQDLVPGSPDDSHPKDGPSPGGTLMDLSERQEVSSVRSLSSTGSLPSHAPPSEDAATPRTNSVISVCSSSNLAGNDDSFGSLPSPKELSSFSFSMKGHEKTAKSKTRSLLKRMESLKLKSSHHSKHKAPSKLGLIISGPILQEGMDEEKLKQLNCVEISALNGNRINVPMVRKRSVSNSTQTSSSSSQSETSSAVSTPSPVTRTRSLSACNKRVGMYLEGFDPFNQSTFNNVVEQNFKNRESYPEDTVFYIPEDHKPGTFPKALTNGSFSPSGNNGSVNWRTGSFHGPGHISLRRENSSDSPKELKRRNSSSSMSSRLSIYDNVPGSILYSSSGDLADLENEDIFPELDDILYHVKGMQRIVNQWSEKFSDEGDSDSALDSVSPCPSSPKQIHLDVDNDRTTPSDLDSTGNSLNEPEEPSEIPERRDSGVGASLTRSNRHRLRWHSFQSSHRPSLNSVSLQINCQSVAQMNLLQKYSLLKLTALLEKYTPSNKHGFSWAVPKFMKRIKVPDYKDRSVFGVPLTVNVQRTGQPLPQSIQQAMRYLRNHCLDQVGLFRKSGVKSRIQALRQMNEGAIDCVNYEGQSAYDVADMLKQYFRDLPEPLMTNKLSETFLQIYQYVPKDQRLQAIKAAIMLLPDENREVLQTLLYFLSDVTAAVKENQMTPTNLAVCLAPSLFHLNTLKRENSSPRVMQRKQSLGKPDQKDLNENLAATQGLAHMIAECKKLFQVPEEMSRCRNSYTEQELKPLTLEALGHLGNDDSADYQHFLQDCVDGLFKEVKEKFKGWVSYSTSEQAELSYKKVSEGPPLRLWRSVIEVPAVPEEILKRLLKEQHLWDVDLLDSKVIEILDSQTEIYQYVQNSMAPHPARDYVVLRTWRTNLPKGACALLLTSVDHDRAPVVGVRVNVLLSRYLIEPCGPGKSKLTYMCRVDLRGHMPEWYTKSFGHLCAAEVVKIRDSFSNQNTETKDTKSR

SEQ ID NO: 25006 - protein, 463 aa, Homo sapiens
  Payload ID: 4944
  Gene Symbol: DLC1
  Gene Name: DLC1 Rho GTPase activating protein
  Uniprot ID: Q96QB1
  ENSP ID: ENSP00000425878
MSVAIRKRSWEEHVTHWMGQPFNSDDRNTACHHGLVADSLQASMEKDATLNVDRKEKCVSLPDCCHGSELRDFPGRPMGHLSKDVDENDSHEGEDQFLSLEASTETLVHVSDEDNNADLCLTDDKQVLNTQGQKTSGQHMIQGAGSLEKALPIIQSNQVSSNSWGIAGETELALVKESGERKVTDSISKSLELCNEISLSEIKDAPKVNAVDTLNVKDIAPEKQLLNSAVIAQQRRKPDPPKDENERSTCNVVQNEFLDTPCTNRGLPLLKTDFGSCLLQPPSCPNGMSAENGLEKSGFSQHQNKSPPKVKAEDGMQCLQLKETLATQEPTDNQVRLRKRKEIREDRDRARLDSMVLLIMKLDQLDQDIENALSTSSSPSGTPTNLRRHVPDLESGSESGADTISVNQTRVNLSSDTESTDLPSSTPVANSGTKPKTTAIQGISEKEKAGKLTFWFCFLANLF

SEQ ID NO: 25007 - protein, 1017 aa, Homo sapiens
  Payload ID: 4944
  Gene Symbol: DLC1
  Gene Name: DLC1 Rho GTPase activating protein
  Uniprot ID: Q96QB1
  ENSP ID: ENSP00000428028
MKLEISPHRKRSDDSDEDEPCAISGKWTFQRDSKRWSRLEEFDVFSPKQDLVPGSPDDSHPKDGPSPGGTLMDLSERQEVSSVRSLSSTGSLPSHAPPSEDAATPRTNSVISVCSSSNLAGNDDSFGSLPSPKELSSFSFSMKGHEKTAKSKTRSLLKRMESLKLKSSHHSKHKAPSKLGLIISGPILQEGMDEEKLKQLNCVEISALNGNRINVPMVRKRSVSNSTQTSSSSSQSETSSAVSTPSPVTRTRSLSACNKRVGMYLEGFDPFNQSTFNNVVEQNFKNRESYPEDTVFYIPEDHKPGTFPKALTNGSFSPSGNNGSVNWRTGSFHGPGHISLRRENSSDSPKELKRRNSSSSMSSRLSIYDNVPGSILYSSSGDLADLENEDIFPELDDILYHVKGMQRIVNQWSEKFSDEGDSDSALDSVSPCPSSPKQIHLDVDNDRTTPSDLDSTGNSLNEPEEPSEIPERRDSGVGASLTRSNRHRLRWHSFQSSHRPSLNSVSLQINCQSVAQMNLLQKYSLLKLTALLEKYTPSNKHGFSWAVPKFMKRIKVPDYKDRSVFGVPLTVNVQRTGQPLPQSIQQAMRYLRNHCLDQVGLFRKSGVKSRIQALRQMNEGAIDCVNYEGQSAYDVADMLKQYFRDLPEPLMTNKLSETFLQIYQYVPKDQRLQAIKAAIMLLPDENREVLQTLLYFLSDVTAAVKENQMTPTNLAVCLAPSLFHLNTLKRENSSPRVMQRKQSLGKPDQKDLNENLAATQGLAHMIAECKKLFQVPEEMSRCRNSYTEQELKPLTLEALGHLGNDDSADYQHFLQDCVDGLFKEVKEKFKGWVSYSTSEQAELSYKKVSEGPPLRLWRSVIEVPAVPEEILKRLLKEQHLWDVDLLDSKVIEILDSQTEIYQYVQNSMAPHPARDYVVLRTWRTNLPKGACALLLTSVDHDRAPVVGVRVNVLLSRYLIEPCGPGKSKLTYMCRVDLRGHMPEWYTKSFGHLCAAEVVKIRDSFSNQNTETKDTKSR

SEQ ID NO: 25008 - protein, 48 aa, Homo sapiens
  Payload ID: 4944
  Gene Symbol: DLC1
  Gene Name: DLC1 Rho GTPase activating protein
  ENSP ID: ENSP00000429537
MSLVPSVANGLSKGTARGGPGLKSLMSFLQNKTWSLGPQTTPTRRTAP

SEQ ID NO: 25009 - protein, 75 aa, Homo sapiens
  Payload ID: 4944
  Gene Symbol: DLC1
  Gene Name: DLC1 Rho GTPase activating protein
  ENSP ID: ENSP00000473289
  MOD_RES (1)..(1): Any amino acid
XLLQPPSCPNGMSAENGLEKSGFSQHQNKSPPKVKAEDGMQCLQLKETLATQEPTDNQVRLRKRKVRHMHRFSGF

SEQ ID NO: 25010 - protein, 122 aa, Homo sapiens
  Payload ID: 4944
  Gene Symbol: DLC1
  Gene Name: DLC1 Rho GTPase activating protein
  ENSP ID: ENSP00000488100
MSVAIRKRSWEEHVTHWMGQPFNSDDRNTACHHGLVADSLQASMEKDATLNVDRKEKCVSLPDCCHGSELRDFPGRPMGHLSKDVDENDSHEGEDQFLSLEASTETLVHVSDEDNNADLCLT

SEQ ID NO: 25011 - protein, 504 aa, Homo sapiens
  Payload ID: 4945
  Gene Symbol: DMRTA1
  Gene Name: DMRT-like family A1
  Uniprot ID: Q5VZB9
  ENSP ID: ENSP00000319651
MERSQCGSRDRGVSGRPHLAPGLVVAAPPPPSPALPVPSGMQVPPAFLRPPSLFLRAAAAAAAAAAATSGSGGCPPAPGLESGVGAVGCGYPRTPKCARCRNHGVVSALKGHKRFCRWRDCACAKCTLIAERQRVMAAQVALRRQQAQEESEARGLQRLLCSGLSWPPGGRASGGGGRAENPQSTGGPAAGAALGLGALRQASGSATPAFEVFQQDYPEEKQEQKESKCESCQNGQEELISKSHQLYLGSSSRSNGVIGKQSIGSSISEYSNKPDSILSPHPGEQSGGEESPRSLSSSDLESGNESEWVKDLTATKASLPTVSSRPRDPLDILTKIFPNYRRSRLEGILRFCKGDVVQAIEQVLNGKEHKPDNRNLANSEELENTAFQRASSFSLAGIGFGTLGNKSAFSPLQTTSASYGGDSSLYGVNPRVGISPLRLAYSSAGRGLSGFMSPYLTPGLVPTLPFRPALDYAFSGMIRDSSYLSSKDSITCGRLYFRPNQDNP

SEQ ID NO: 25012 - protein, 542 aa, Homo sapiens
  Payload ID: 4946
  Gene Symbol: DMRTA2
  Gene Name: DMRT-like family A2
  Uniprot ID: Q96SC8
  ENSP ID: ENSP00000383909
MELRSELPSVPGAATAAAATATGPPVASVASVAAAAAAAASLPVSVAGGLLRGPPLLLRAAEKYPRTPKCARCRNHGVVSALKGHKRYCRWKDCLCAKCTLIAERQRVMAAQVALRRQQAQEENEARELQLLYGTAEGLALAAANGIIPPRPAYEVFGSVCAADGGGPGAGAPAGTGGGAAGAGGSEAKLQKFDLFPKTLLQAGRPGSPLPPPVKPLSPDGADSGPGTSSPEVRPGSGSENGDGESFSGSPLARASKEAGGSCPGSAGPGGGGEEDSPGSASPLGSESGSEADKEEGEAAPAPGLGGGSGPRQRTPLDILTRVFPGHRRGVLELVLQGCGGDVVQAIEQVLNHHRGGLAAGLGPAAPPDKAAVGAAAAADDAWPSRVDAAAAAAAAAGGPGLPAPLQAGPAAPPHHRPLLAGAMAPGALGSLSSRSAFSPLQPNASHFGADAGAYPLGAPLGLSPLRLAYSAAAAHSRGLAFMAPYSTAGLVPTLGFRPPMDYAFSDLMRDRSAAAAAAVHKEPTYGGGLYGPMVNGAPEKQ

SEQ ID NO: 25013 - protein, 542 aa, Homo sapiens; identical to SEQ ID NO: 25012
  Payload ID: 4946
  Gene Symbol: DMRTA2
  Gene Name: DMRT-like family A2
  Uniprot ID: Q96SC8
  ENSP ID: ENSP00000399370

SEQ ID NO: 25014 - protein, 342 aa, Homo sapiens
  Payload ID: 4947
  Gene Symbol: DMRTB1
  Gene Name: DMRT-like family B with proline-rich C-terminal, 1
  Uniprot ID: Q96MA1
  ENSP ID: ENSP00000360500
MADKMVRTPKCSRCRNHGFLVPVKGHAGKCRWKQCLCEKCYLISERQKIMAAQKVLKTQAAEEEQEAALCAQGPKQASGAAAAAPAPVPVPAASLRPLSPGTPSGDADPGPEGRAAACFFEQPPRGRNPGPRALQPVLGGRSHVEPSERAAVAMPSLAGPPFGAEAAGSGYPGPLDLRRPMRTVPGPLFTDFVRPLNINPDRALGPEYPGGSSMHPYCPFPLGYLDAPPGVPLQQGFRHVSRSQYQGGGLVSEPGGDFQPSYYLPPPPPPLPPLPPLPPQPQFLPPGYLSALHFLPPPPPPPPPSSFSLTVLFDTDKENTDDQDAEVLSGEPSQPSSQEQSD

SEQ ID NO: 25015 - protein, 127 aa, Homo sapiens
  Payload ID: 4948
  Gene Symbol: DMRTC1
  Gene Name: DMRT-like family C1
  Uniprot ID: Q5HYR2
  ENSP ID: ENSP00000469615
MAAPPKAPIRVRNLTIRAGALTGKENNMLQPETHIFTAPEEVPKVSDQALVSAHSEWQRKLEAAEALLTLRNSAQAPPDSISLHQPCNPPAPAGDKGFQPPSPSLRPRPASSISLPIGHLGCISLLS

SEQ ID NO: 25016 - protein, 192 aa, Homo sapiens
  Payload ID: 4948
  Gene Symbol: DMRTC1
  Gene Name: DMRT-like family C1
  Uniprot ID: Q5HYR2
  ENSP ID: ENSP00000471224
MAAPPKAPIRVRNLTIRAGALTGKENNMLQPETHIFTAPEEGSSQGALLLGQAPEPLSLPCTPVTLEQQLVSPSGDPHRAPALPSICSTLILQPCATLDPLLLQPQVPKVSDQALVSAHSEWQRKLEAAEALLTLRNSAQAPPDSISLHQPCNPPAPAGDKGFQPPSPSLRPRPASSISLPIGHLGCISLLS

SEQ ID NO: 25017 - protein, 110 aa, Homo sapiens
  Payload ID: 4948
  Gene Symbol: DMRTC1
  Gene Name: DMRT-like family C1
  ENSP ID: ENSP00000482641
MAAPPKAPIRVRNLTIRAGALTGKENNMLQPETHIFTAPEEGSSQGALLLGQAPEPLSLPCTPVTLEQQLVSPSGDPHRAPALPSICSTLILQPCATLDPLLLQPQVLGK

SEQ ID NO: 25018 - protein, 138 aa, Homo sapiens
  Payload ID: 4948
  Gene Symbol: DMRTC1
  Gene Name: DMRT-like family C1
  ENSP ID: ENSP00000484718
MAAPPKAPIRVRNLTIRAGALTGKENNMLQPETHIFTAPEEGSSQGALLLGQAPEPLSLPCTPVTLEQQLVSPSGDPHRAPALPSICSTLILQPCATLDPLLLQPQVPKVSDQALVSAHSEWQRKLEAAEALLTLRNS

SEQ ID NO: 25019 - protein, 192 aa, Homo sapiens; identical to SEQ ID NO: 25016
  Payload ID: 4949
  Gene Symbol: DMRTC1B
  Gene Name: DMRT-like family C1B
  Uniprot ID: Q5HYR2
  ENSP ID: ENSP00000334501

SEQ ID NO: 25020 - protein, 192 aa, Homo sapiens; identical to SEQ ID NO: 25016
  Payload ID: 4949
  Gene Symbol: DMRTC1B
  Gene Name: DMRT-like family C1B
  Uniprot ID: Q5HYR2
  ENSP ID: ENSP00000362632

SEQ ID NO: 25021 - protein, 127 aa, Homo sapiens; identical to SEQ ID NO: 25015
  Payload ID: 4949
  Gene Symbol: DMRTC1B
  Gene Name: DMRT-like family C1B
  Uniprot ID: Q5HYR2
  ENSP ID: ENSP00000362633

SEQ ID NO: 25022 - protein, 100 aa, Homo sapiens
  Payload ID: 4949
  Gene Symbol: DMRTC1B
  Gene Name: DMRT-like family C1B
  ENSP ID: ENSP00000397859
MAAPPKAPIRVRNLTIRAGALTGKENNMLQPETHIFTAPEEGSSQGALLLGQAPEPLSLPCTPVTLEQQLVSPSGDPHRAPALPSICSTLILQPCATLDP

SEQ ID NO: 25023 - protein, 64 aa, Homo sapiens
  Payload ID: 4949
  Gene Symbol: DMRTC1B
  Gene Name: DMRT-like family C1B
  ENSP ID: ENSP00000404476
MAAPPKAPIRVRNLTIRAGALTGKENNMLQPETHIFTAPEEGSSQGALLLGQAPEPLSLPCTPV

SEQ ID NO: 25024 - protein, 111 aa, Homo sapiens
  Payload ID: 4949
  Gene Symbol: DMRTC1B
  Gene Name: DMRT-like family C1B
  ENSP ID: ENSP00000434020
AAPPKAPIRVRNLTIRAGALTGKENNMLQPETHIFTAPEEGSSQGALLLGQAPEPLSLPCTPVTLEQQLVSPSGDPHRAPALPSMSPKSLTRLWFLPTQSGSGSWRPLRLC

SEQ ID NO: 25025 - protein, 110 aa, Homo sapiens; identical to SEQ ID NO: 25017
  Payload ID: 4949
  Gene Symbol: DMRTC1B
  Gene Name: DMRT-like family C1B
  ENSP ID: ENSP00000435159

SEQ ID NO: 25026 - protein, 367 aa, Homo sapiens
  Payload ID: 4950
  Gene Symbol: DMRTC2
  Gene Name: DMRT-like family C2
  Uniprot ID: Q8IXT2
  ENSP ID: ENSP00000269945
MEPSDMPAGYHCPLDSAPWDETRDPQSTELIPRRAISRSPTCARCRNHGVTAHLKGHKRLCLFQACECHKCVLILERRRVMAAQVALRRQQEAQLKKHLMRRGEASPKAPNHFRKGTTQPQVPSGKENIAPQPQTPHGAVLLAPTPPGKNSCGPLLLSHPPEASPLSWTPVPPGPWVPGHWLPPGFSMPPPVVCRLLYQEPAVSLPPFPGFDPGTSLQLPTHGPFTTCPGSHPVLTAPLSGEPQGPPSQPRTHSTLILQPCGTPDPLQLQPQASGASCLARTSGPSEWQLQQEAAEALVGLKDSSQAPRVTPSVPPNPAWISLLHPCGPPAPAGGRGFQPVGPCLRPSPAPSVALHIGRLGSISLLS

SEQ ID NO: 25027 - protein, 418 aa, Homo sapiens
  Payload ID: 4950
  Gene Symbol: DMRTC2
  Gene Name: DMRT-like family C2
  ENSP ID: ENSP00000469525
MEPSDMPAGYHCPLDSAPWDETRDPQSTELIPRRAISRSPTCARCRNHGVTAHLKGHKRLCLFQACECHKCVLILERRRVMAAQVALRRQQEAQLKKHLMRRGEASPKAPNHFRKGTTQPQVPSGKENIAPQPQTPHGAVLLAPTPPGKNSCGPLLLSHPPEASPLSWTPVPPGPWVPGHWLPPGFSMPPPVVCRLLYQEPAVSLPPFPGFDPGTSLQLPTHGPFTTCPGSHPVLTAPLSGEPQGPPSQPRTHSTLILQPCGTPDPLQLQPQVLGKKWDLGPWEEVEPGEGKSRKLKEAGAEEHLEGGQKRGFPVCLSPFPLQASGASCLARTSGPSEWQLQQEAAEALVGLKDSSQAPRVTPSVPPNPAWISLLHPCGPPAPAGGRGFQPVGPCLRPSPAPSVALHIGRLGSISLLS

SEQ ID NO: 25028 - protein, 161 aa, Homo sapiens
  Payload ID: 4950
  Gene Symbol: DMRTC2
  Gene Name: DMRT-like family C2
  ENSP ID: ENSP00000470553
MEPSDMPAGYHCPLDSAPWDETRDPQSTELIPRRAISRSPTCARCRNHGVTAHLKGHKRLCLFQACECHKCVLILERRRVMAAQVALRRQQEAQLKKHLMRRGEASPKAPNHFRKGTTQPQVPSGKENIAPQPQTPHGAVLLAPTPPGKNSCGPLLLSHPP

SEQ ID NO: 25029 - protein, 224 aa, Homo sapiens
  Payload ID: 4950
  Gene Symbol: DMRTC2
  Gene Name: DMRT-like family C2
  Uniprot ID: Q8IXT2
  ENSP ID: ENSP00000472159
MEPSDMPAGYHCPLDSAPWDETRDPQSTELIPRRAISRSPTCARCRNHGVTAHLKGHKRLCLFQACECHKCVLILERRRVMAAQVALRRQQEAQLKKHLMRRGEASPKAPNHFRKGTTQPQVPSGKENIAPQPQTPHGAVLLAPTPPGKPCTQLQPVPSAPAELLWASAAQPSPGSLALVLDSGASWPLGPWTLAASRLLHATTSGVPPAVPRTCCLSASLPWL

SEQ ID NO: 25030 - protein, 134 aa, Homo sapiens
  Payload ID: 4950
  Gene Symbol: DMRTC2
  Gene Name: DMRT-like family C2
  ENSP ID: ENSP00000472215
MEPSDMPAGYHCPLDSAPWDETRDPQSTELIPRRAISRSPTCARCRNHGVTAHLKGHKRLCLFQACECHKCVLILERRRVMAAQVALRRQQEAQLKKHLMRRGEASPKAPNHFRKGTTQPQVPSGKENIAPQPQ

SEQ ID NO: 25031 - protein, 165 aa, Homo sapiens
  Payload ID: 4950
  Gene Symbol: DMRTC2
  Gene Name: DMRT-like family C2
  ENSP ID: ENSP00000472488
MEPSDMPAGYHCPLDSAPWDETRDPQSTELIPRRAISRSPTCARCRNHGVTAHLKGHKRLCLFQACECHKCVLILERRRVMAAQVALRRQQEAQLKKHLMRRGEASPKAPNHFRKGTTQPQVPSGKENIAPQPQTPHGAVLLAPTPPGKNSCGPLLLSHPPEASP

SEQ ID NO: 25032 - protein, 3027 aa, Homo sapiens
  Payload ID: 4951
  Gene Symbol: DMXL1
  Gene Name: Dmx-like 1
  Uniprot ID: Q9Y485
  ENSP ID: ENSP00000309690
MNLHQVLTGAVNPGDHCFSVGSIGDQRFTAYASGCDIVILGSDFERLQIIPGAKHGNIQVGCVDCSMQQGKIAASYGNVISIFEPVNLPKQKKNLELYSQWQKSGQFFLESIAHNITWDPTGSRLLTGSSYLQLWSNTNLEKPTEDENLNKTDLNFGDWKCIWHCKTASQVHLMKFSPDGEFFATAGKDDCLLKVWYNVENWRTAVTSPDGSSEKQSQGEIDFSFVYLAHPRAVNGFSWRKTSKYMPRASVCNVLLTCCKDNVCRLWVETFLPNDCLLYGGDCSHWTESINLTNNFKRNASSKERVQNALEVNLRHFRRGRRRSLALVAHTGYLPHQQDPHHVHRNTPLHANALCHFHIAASINPATDIPLLPSITSLSLNENEEKTGPFVVHWLNNKELHFTLSMEVFLQQLRKSFEQPSSEASVEDSNQADVKSDEETDDGVDDLKINPEKKELGCDKMVPNSSFTSLSSAAIDHQIEVLLSEWSKNADMLFSIHPMDGSLLVWHVDWLDEYQPGMFRQVQVSFVSRIPVAFPTGDANSLCKSIMMYACTKNVDLAIQQGKQKPSGLTRSTSMLISSGHNKSSNSLKLSIFTPNVMMISKHADGSLNQWLVSFAEESAFSTVLSISHKSRYCGHRFHLNDLACHSVLPLLLTTSHHNALRTPDVDNPEQPFDALNIEECSLTQQNKSTVDVAFQDPSAVYSELILWRVDPVGPLSFSGGVSELARINSLHVSAFSNVAWLPTLIPSYCLGAYCNSPSACFVASDGQYLRLYEAVIDAKKLLSELSNPEISKYVGEVFNIVSQQSTARPGCIIALDPITKLHGRKTQLLHVFEEDFILNNLEKKSLGKDSILSNAGSSPNGFSEKFYLIVIECTQDNRSLLHMWNLHLKSIPVSLDEKVDTKLSEAVWQPEEHYSSSPEKILSPFSQKYQACRANLQSTSRLTLFSEMVYSQELHLPEGVEIISIKPSAGHLSSSSIYPACSAPYLLATSCSDEKVRFWRCRVTDGESATSKNGKIDLAYIWEEWPLLIEDGLQSNSSITVPGRPVEVSCAHTNRLAVAYKQPASNSRSSQDFVMHVSIFECESTGGSCWVLEQTIHLDELSTVLDSGISVDSNLVAYNKQDMYLSSKENITSNTKHLVHLDWMSREDGSHILTVGIGSKLFMYGPLAGKVQDQTGKETLAFPLWESTKVVPLSKFVLLRSVDLVSSVDGSPPFPVSLSWVRDGILVVGMDCEMHVYCQWQPSSKQEPVITDSYSGSTPSITSLIKQSNSSSGLHPPKKTLTRSMTSLAQKICGKKTAFDPSVDMEDSGLFEAAHVLSPTLPQYHPLQLLELMDLGKVRRAKAILSHLVKCIAGEVVALNEAESNHERRLRSLTISASGSTTRDPQAFNKAENTDYTEIDSVPPLPLYALLAADDDSCYSSLEKSSNESTLSKSNQLSKESYDELFQTQLLMTDTHMLETDEENTKPRVIDLSQYSPTYFGPEHAQVLSGHLLHSSLPGLSRMEQMSLMALADTIATTSTDIGESRDRSQGGETLDECGLKFLLAVRLHTFLTTSLPAYRAQLLHQGLSTSHFAWAFHSVAEEELLNMLPAMQKDDPTWSELRAMGVGWWVRNTRILRKCIEKVAKAAFYRKNDPLDAAIFYLAMKKKAVIWGLYRAEKNTRMTQFFGHNFEDERWRKAALKNAFSLLGKQRFEHSAAFFLLAGCLRDAIEVCLEKLNDIQLALVIARLYESEFDTSAAYKSILRKKVLGIDSPVSELCSLNINMHHDPFLRSMAYWILEDYSGALETLIKQPIRENDDQVLSASNPTVFNFYNYLRTHPLLLRRHFGSSDTFSTHMSLTGKSGLAGTINLSERRLFFTTASAHLKAGCPMLALEVLSKMPKVIKKTRPFYRASSFLDTSKDCSPSSPLKLDAREDKSSAVDWSQSLINGFGSSSEGSSEKQSNSTLSFDWSQPSVVFQDDSLELKWDSDNDEENEDVPISMKELKPLQRKTDKKLDDISSNYTESFSTLDENDLLNPSEDIIAVQLKFRACLKILTVELRTLSTGYEIDGGKLRYQLYHWLEKEVIALQRTCDFCSDAEELQSAFGRNEDEFGLNEDAEDLPHQTKVKQLRENFQEKRQWLLKYQSLLRMFLSYCILHGSHGGGLASVRMELILLLQESQQETSEPLFSSPLSEQTSVPLLFACTANAKTVVANPLLHLSNLTHDILHAIINFDSPPHPDIQSNKVYVMHTLAASLSACIYQCLCGSHNYSSFQTNQFTGMVYQTVLLPHRPSLKTGSLDEALTPNTSPAQWPGITCLIRLLNSSGEEAQSGLTVLLCEILTAVYLSLFIHGLATHSSNELFRIVAHPLNEKMWSAVFGGGAHVPSKEQTHSKTLPVSSLVEEGEKQNKRFRPSKMSCRESAPLTPSSAPVSQESLAVKEKFIPPELSIWDYFIAKPFLPSSQSRAEYDSEESLGSDDDDNDDDDDVLASDFHLQEHSNSNSYSWSLMRLAMVQLVLNNLKTFYPFAGHDLAELPVSSPLCHAVLKTLQCWEQVLLRRLEIHGGPPQNYIASHTAEESLSAGPAILRHKALLEPTNTPFKSKHHLALSVKRLWQYLVKQEEIQETFIKNIFTKKRCLNEIEADLGYPGGKARIIHKESDIITAFAVNKANRNCIAIASSHDVQELDVSGILATQVYTWVDDDIEVETKGSEDFLVIHARDDLTAVQGTTPYTHSNPGTPINMPWLGSTQTGRGASVMIKKAINNVRRMTSHPTLPYYLTGAQDGSVRMFEWGHSQQITCFRSGGNSRVTRMRFNYQGNKFGIVDADGYLSLYQTNWKCCPVTGSMPKPYLTWQCHNKTANDFVFVSSSSLIATAGLSTDNRNVCLWDTLVAPANSLVHAFTCHDSGATVLAYAPKHQLLISGGRKGFTYVFDLCQRQQRQLFQSHDSPVKAVAVDPTEEYFVTGSAEGNIKIWSLSTFGLLHTFVSEHARQSIFRNIGTGVMQIETGPANHIFSCGADGTMKMRILPDQFSPLNEVLKNDVKFML

SEQ ID NO: 25033 - protein, 589 aa, Homo sapiens
  Payload ID: 4951
  Gene Symbol: DMXL1
  Gene Name: Dmx-like 1
  ENSP ID: ENSP00000427692
MNLHQVLTGAVNPGDHCFSVGSIGDQRFTAYASGCDIVILGSDFERLQIIPGAKHGNIQVGCVDCSMQQGKIAASYGNVISIFEPVNLPKQKKNLELYSQWQKSGQFFLESIAHNITWDPTGSRLLTGSSYLQLWSNTNLEKPTEDENLNKTDLNFGDWKCIWHCKTASQVHLMKFSPDGEFFATAGKDDCLLKVWYNVENWRTAVTSPDGSSEKQSQGEIDFSFVYLAHPRAVNGFSWRKTSKYMPRASVCNVLLTCCKDNVCRLWVETFLPNDCLLYGGDCSHWTESINLTNNFKRNASSKERVQNALEVNLRHFRRGRRRSLALVAHTGYLPHQQDPHHVHRNTPLHANALCHFHIAASINPATDIPLLPSITSLSLNENEEKTGPFVVHWLNNKELHFTLSMEVFLQQLRKSFEQPSSEASVEDSNQADVKSDEETDDGVDDLKINPEKKELGCDKMVPNSSFTSLSSAAIDHQIEVLLSEWSKNADMLFSIHPMDGSLLVWHVDWLDEYQPGMFRQVQVSFVSRIPVAFPTGDANSLCKSIMMYACTKNVDLAIQQGKQKPSGLTRSTSMLISSGHNKSSNSLK

SEQ ID NO: 25034 - protein, 3048 aa, Homo sapiens
  Payload ID: 4951
  Gene Symbol: DMXL1
  Gene Name: Dmx-like 1
  ENSP ID: ENSP00000439479
MNLHQVLTGAVNPGDHCFSVGSIGDQRFTAYASGCDIVILGSDFERLQIIPGAKHGNIQVGCVDCSMQQGKIAASYGNVISIFEPVNLPKQKKNLELYSQWQKSGQFFLESIAHNITWDPTGSRLLTGSSYLQLWSNTNLEKPTEDENLNKTDLNFGDWKCIWHCKTASQVHLMKFSPDGEFFATAGKDDCLLKVWYNVENWRTAVTSPDGSSEKQSQGEIDFSFVYLAHPRAVNGFSWRKTSKYMPRASVCNVLLTCCKDNVCRLWVETFLPNDCLLYGGDCSHWTESINLTNNFKRNASSKERVQNALEVNLRHFRRGRRRSLALVAHTGYLPHQQDPHHVHRNTPLHANALCHFHIAASINPATDIPLLPSITSLSLNENEEKTGPFVVHWLNNKELHFTLSMEVFLQQLRKSFEQPSSEASVEDSNQADVKSDEETDDGVDDLKINPEKKELGCDKMVPNSSFTSLSSAAIDHQIEVLLSEWSKNADMLFSIHPMDGSLLVWHVDWLDEYQPGMFRQVQVSFVSRIPVAFPTGDANSLCKSIMMYACTKNVDLAIQQGKQKPSGLTRSTSMLISSGHNKSSNSLKLSIFTPNVMMISKHADGSLNQWLVSFAEESAFSTVLSISHKSRYCGHRFHLNDLACHSVLPLLLTTSHHNALRTPDVDNPEQPFDALNIEECSLTQQNKSTVDVAFQDPSAVYSELILWRVDPVGPLSFSGGVSELARINSLHVSAFSNVAWLPTLIPSYCLGAYCNSPSACFVASDGQYLRLYEAVIDAKKLLSELSNPEISKYVGEVFNIVSQQSTARPGCIIALDPITKLHGRKTQLLHVFEEDFILNNLEKKSLGKDSILSNAGSSPNGFSEKFYLIVIECTQDNRSLLHMWNLHLKSIPVSLDEKVDTKLSEAVWQPEEHYSSSPEKILSPFSQKYQACRANLQSTSRLTLFSEMVYSQELHLPEGVEIISIKPSAGHLSSSSIYPACSAPYLLATSCSDEKVRFWRCRVTDGESATSKNGKIDLAYIWEEWPLLIEDGLQSNSSITVPGRPVEVSCAHTNRLAVAYKQPASNSRSSQDFVMHVSIFECESTGGSCWVLEQTIHLDELSTVLDSGISVDSNLVAYNKQDMYLSSKENITSNTKHLVHLDWMSREDGSHILTVGIGSKLFMYGPLAGKVQDQTGKETLAFPLWESTKVVPLSKFVLLRSVDLVSSVDGSPPFPVSLSWVRDGILVVGMDCEMHVYCQWQPSSKQEPVITDSYSGSTPSITSLIKQSNSSSGLHPPKKTLTRSMTSLAQKICGKKTAFDPSVDMEDSGLFEAAHVLSPTLPQYHPLQLLELMDLGKVRRAKAILSHLVKCIAGEVVALNEAESNHERRLRSLTISASGSTTRDPQAFNKAENTDYTEIDSVPPLPLYALLAADDDSCYSSLEKSSNESTLSKSNQLSKESYDELFQTQLLMTDTHMLETDEENTKPRVIDLSQYSPTYFGPEHAQVLSGHLLHSSLPGLSRMEQMSLMALADTIATTSTDIGESRDRSQGGETLDECGLKFLLAVRLHTFLTTSLPAYRAQLLHQGLSTSHFAWAFHSVAEEELLNMLPAMQKDDPTWSELRAMGVGWWVRNTRILRKCIEKVAKAAFYRKNDPLDAAIFYLAMKKKAVIWGLYRAEKNTRMTQFFGHNFEDERWRKAALKNAFSLLGKQRFEHSAAFFLLAGCLRDAIEVCLEKLNDIQLALVIARLYESEFDTSAAYKSILRKKVLGIDSPVSELCSLNINMHHDPFLRSMAYWILEDYSGALETLIKQPIRENDDQVLSASNPTVFNFYNYLRTHPLLLRRHFGSSDTFSTHMSLTGKSGLAGTINLSERRLFFTTASAHLKAGCPMLALEVLSKMPKVIKKTRPFYRASSFLDTSKDCSPSSPLKLDAREDKSSAVDWSQSLINGFGSSSEGSSEKQSNSTLSFDWSQPSVVFQDDSLELKWDSDNDEENEDVPISMKELKPLQRKTDKKLDDISSNYTESFSTLDENDLLNPSEDIIAVQLKFRACLKILTVELRTLSTGYEIDGGKLRYQLYHWLEKEVIALQRTCDFCSDAEELQSAFGRNEDEFGLNEDAEDLPHQTKVKQLRENFQEKRQWLLKYQSLLRMFLSYCILHGSHGGGLASVRMELILLLQESQQETSEPLFSSPLSEQTSVPLLFACTANAKTVVANPLLHLSNLTHDILHAIINFDSPPHPDIQSNKVYVMHTLAASLSACIYQCLCGSHNYSSFQTNQFTGMVYQTVLLPHRPSLKTGSLDEALTPNTSPAQWPGITCLIRLLNSSGEEAQSGLTVLLCEILTAVYLSLFIHGLATHSSNELFRIVAHPLNEKMWSAVFGGGAHVPSKEQTHSKTLPVSSLVEEGEKQNKRFRPSKMSCRESAPLTPSSAPVSQESLAVKEKFIPPELSIWDYFIAKPFLPSSQSRAEYDSEESLGSDDDDNDDDDDVLASDFHLQEHSNSNSYSWSLMRLAMVQLVLNNLKTFYPFAGHDLAELPVSSPLCHAVLKTLQCWEQVLLRRLEIHGGPPQNYIASHTAEESLSAGPAILRHKALLEPTNTPFKSKHHLALSVKRLWQYLVKQEEIQETFIKNIFTKKRCLNESLEDNSETIKNSMMEEPNINKIEADLGYPGGKARIIHKESDIITAFAVNKANRNCIAIASSHDVQELDVSGILATQVYTWVDDDIEVETKGSEDFLVIHARDDLTAVQGTTPYTHSNPGTPINMPWLGSTQTGRGASVMIKKAINNVRRMTSHPTLPYYLTGAQDGSVRMFEWGHSQQITCFRSGGNSRVTRMRFNYQGNKFGIVDADGYLSLYQTNWKCCPVTGSMPKPYLTWQCHNKTANDFVFVSSSSLIATAGLSTDNRNVCLWDTLVAPANSLVHAFTCHDSGATVLAYAPKHQLLISGGRKGFTYVFDLCQRQQRQLFQSHDSPVKAVAVDPTEEYFVTGSAEGNIKIWSLSTFGLLHTFVSEHARQSIFRNIGTGVMQIETGPANHIFSCGADGTMKMRILPDQFSPLNEVLKNDVKFML

SEQ ID NO: 25035 - protein, 3036 aa, Homo sapiens
  Payload ID: 4952
  Gene Symbol: DMXL2
  Gene Name: Dmx-like 2
  Uniprot ID: Q8TDJ6
  ENSP ID: ENSP00000251076
MHLHQVLTGAVNPGDNCYSVGSVGDVPFTAYGSGCDIVILANDFECVQIIPGAKHGNIQVSCVECSNQQGRIAASYGNAVCIFEPLGINSHKRNCQLKCQWLKTGQFFLSSVTYNLAWDPQDNRLLTATDSIQLWAPPGDDILEEEEEIDNTVPPVLNDWKCVWQCKTSVSVHLMEWSPDGEYFATAGKDDCLLKVWYPMTGWKSSIIPQDHHEVKRRQSSTQFSFVYLAHPRAVTGFSWRKTSKYMPRGSVCNVLLTSCHDGVCRLWAETLLPEDCLLGEQICETTTSSIASSLSHAGRHKDRIQHALETIHHLKNLRKGQRRSSVLVTHAELMPDQTAMHEVQRHISHHANALCHFHIAASINPATDIPNVLVGTAFNVDDGNGGFVVHWLNNKEFHFTSSTEVFMHQLRKLSDKQVDHENDDADREDEEHSQEDRERGLHMKLDHDLSLDRESEAGTGSSEHEDGEREGSPRTYSRLSVPMPLPTVLLDRKIETLLTEWNKNPDMLFTIHPVDGTFLVWHVKYLDEYNPGIFRQVQVSFSSRIPVAFPSGDASSLSKNIMMYACINATKDSHHTLLHQEGMSVGSPHGSQPHSRSHSTHMNILAPTVMMISKHIDGSLNQWAVTFADKSAFTTVLTVSHKFRYCGHRFHLNDLACHSVLPLLLTSSHHNALLTPELDCQWDSDNKLSRLMDPVKHIKGSSKQPLRNAATRTFHDPNAIYSELILWRVDPIGPLSYTGGVSELARINSLHTSAFSNVAWLPTLIPSYCLGTYCNSASACFVASDGKNLRLYQAVVDARKLLDELSDPESSKLIGEVFNIVSQQSTARPGCIIELDAITNQCGSNTQLLHVFQEDFIIGYKPHKEDMEKKETEIFFQPSQGYRPPPFSEKFFLVVIEKDSNNNSILHMWHLHLKSVQACLAKASEGASSESLLSVPGQKNVDSSPETSPSVSPMPHSSSIANLQTASKLILSSRLVYSQPLDLPESVEVIRATPSAGHLSSSSIYPVCLAPYLVVTTCSDNKVRFWKCCMEANPECNKSDEKEIYHWKRWPLMNDEGEDNSSTVSIVGRPVAVSCSYTGRLAVAYKQPIHHNGFVSKEFSMHVCIFECESTGGSEWVLEQTIHLDDLVKVGSVLDSRVSVDSNLFVYSKSDALLSKDRYLIPNIKHLVHLDWVSKEDGSHILTVGVGANIFMYGRLSGIVTEQTNSKDGVAVITLPLGGSIKQGVKSRWVLLRSIDLVSSVDGTPSLPVSLSWVRDGILVVGMDCEMHVYAQWKHAVKFGDTEADSSNAEEAAMQDHSTFKSNMLARKSVVEGTAISDDVFCSPTVIQDGGLFEAAHVLSPTLPQYHPTQLLELMDLGKVRRAKAILSHLVKCIAGEVAIVRDPDAGEGTKRHLSRTISVSGSTAKETVTVGKDGTRDYTEIDSIPPLPLYALLAADQDTSYRISEESTKIPQSYEDQTVSQPEDQYSELFQIQDIPTDDIDLEPEKRENKSKVINLSQYGPAYFGQEHARVLSSHLMHSSLPGLTRLEQMFLVALADTVATTSTELDESRDKSCSGRDTLDECGLRYLLAMRLHTCLLTSLPPLYRVQLLHQGVSTCHFAWAFHSEAEEELINMIPAIQRGDPQWSELRAMGIGWWVRNINTLRRCIEKVAKASFQRNNDALDAALFYLSMKKKAVVWGLFRSQHDEKMTTFFSHNFNEDRWRKAALKNAFSLLGKQRFEQSAAFFLLAGSLKDAIEVCLEKMEDIQLAMVIARLYESEFETSSTYISILNQKILGCQKDGSGFSCKRLHPDPFLRSLAYWVMKDYTRALDTLLEQTPKEDDEHQVIIKSCNPVAFSFYNYLRTHPLLIRRNLASPEGTLATLGLKTEKNFVDKINLIERKLFFTTANAHFKVGCPVLALEVLSKIPKVTKTSALSAKKDQPDFISHRMDDVPSHSKALSDGNGSSGIEWSNVTSSQYDWSQPIVKVDEEPLNLDWGEDHDSALDEEEDDAVGLVMKSTDAREKDKQSDQKASDPNMLLTPQEEDDPEGDTEVDVIAEQLKFRACLKILMTELRTLATGYEVDGGKLRFQLYNWLEKEIAALHEICNHESVIKEYSSKTYSKVESDLLDQEEMVDKPDIGSYERHQIERRRLQAKREHAERRKSWLQKNQDLLRVFLSYCSLHGAQGGGLASVRMELKFLLQESQQETTVKQLQSPLPLPTTLPLLSASIASTKTVIANPVLYLNNHIHDILYTIVQMKTPPHPSIEDVKVHTLHSLAASLSASIYQALCDSHSYSQTEGNQFTGMAYQGLLLSDRRRLRTESIEEHATPNSSPAQWPGVSSLINLLSSAQDEDQPKLNILLCEAVVAVYLSLLIHALATNSSSELFRLAAHPLNNRMWAAVFGGGVKLVVKPRRQSENISAPPVLSEDIDKHRRRFNMRMLVPGRPVKDATPPPVPAERPSYKEKFIPPELSMWDYFVAKPFLPLSDSGVIYDSDESIHSDEEDDAFFSDTQIQEHQDPNSYSWALLHLTMVKLALHNVKNFFPIAGLEFSELPVTSPLGIAVIKNLENWEQILQEKMDQFEGPPPNYINTYPTDLSVGAGPAILRNKAMLEPENTPFKSRDSSAFPVKRLWHFLVKQEVLQETFIRYIFTKKRKQSEVEADLGYPGGKAKVIHKESDMIMAFSVNKANCNEIVLASTHDVQELDVTSLLACQSYIWIGEEYDRESKSSDDVDYRGSTTTLYQPSATSYSASQVHPPSSLPWLGTGQTSTGASVLMKRNLHNVKRMTSHPVHQYYLTGAQDGSVRMFEWTRPQQLVCFRQAGNARVTRLYFNSQGNKCGVADGEGFLSIWQVNQTASNPKPYMSWQCHSKATSDFAFITSSSLVATSGHSNDNRNVCLWDTLISPGNSLIHGFTCHDHGATVLQYAPKQQLLISGGRKGHVCIFDIRQRQLIHTFQAHDSAIKALALDPYEEYFTTGSAEGNIKVWRLTGHGLIHSFKSEHAKQSIFRNIGAGVMQIDIIQGNRLFSCGADGTLKTRVLPNAFNIPNRILDIL

SEQ ID NO: 25036 - protein, 2400 aa, Homo sapiens
  Payload ID: 4952
  Gene Symbol: DMXL2
  Gene Name: Dmx-like 2
  Uniprot ID: Q8TDJ6
  ENSP ID: ENSP00000400855
MHLHQVLTGAVNPGDNCYSVGSVGDVPFTAYGSGCDIVILANDFECVQIIPGAKHGNIQVSCVECSNQQGRIAASYGNAVCIFEPLGINSHKRNCQLKCQWLKTGQFFLSSVTYNLAWDPQDNRLLTATDSIQLWAPPGDDILEEEEEIDNTVPPVLNDWKCVWQCKTSVSVHLMEWSPDGEYFATAGKDDCLLKVWYPMTGWKSSIIPQDHHEVKRRQSSTQFSFVYLAHPRAVTGFSWRKTSKYMPRGSVCNVLLTSCHDGVCRLWAETLLPEDCLLGEQICETTTSSIASSLSHAGRHKDRIQHALETIHHLKNLRKGQRRSSVLVTHAELMPDQTAMHEVQRHISHHANALCHFHIAASINPATDIPNVLVGTAFNVDDGNGGFVVHWLNNKEFHFTSSTEVFMHQLRKLSDKQVDHENDDADREDEEHSQEDRERGLHMKLDHDLSLDRESEAGTGSSEHEDGEREGSPRTYSRLSVPMPLPTVLLDRKIETLLTEWNKNPDMLFTIHPVDGTFLVWHVKYLDEYNPGIFRQVQVSFSSRIPVAFPSGDASSLSKNIMMYACINATKDSHHTLLHQEGMSVGSPHGSQPHSRSHSTHMNILAPTVMMISKHIDGSLNQWAVTFADKSAFTTVLTVSHKFRYCGHRFHLNDLACHSVLPLLLTSSHHNALLTPELDCQWDSDNKLSRLMDPVKHIKGSSKQPLRNAATRTFHDPNAIYSELILWRVDPIGPLSYTGGVSELARINSLHTSAFSNVAWLPTLIPSYCLGTYCNSASACFVASDGKNLRLYQAVVDARKLLDELSDPESSKLIGEVFNIVSQQSTARPGCIIELDAITNQCGSNTQLLHVFQEDFIIGYKPHKEDMEKKETEIFFQPSQGYRPPPFSEKFFLVVIEKDSNNNSILHMWHLHLKSVQACLGRDTLDECGLRYLLAMRLHTCLLTSLPPLYRVQLLHQGVSTCHFAWAFHSEAEEELINMIPAIQRGDPQWSELRAMGIGWWVRNINTLRRCIEKVAKASFQRNNDALDAALFYLSMKKKAVVWGLFRSQHDEKMTTFFSHNFNEDRWRKAALKNAFSLLGKQRFEQSAAFFLLAGSLKDAIEVCLEKMEDIQLAMVIARLYESEFETSSTYISILNQKILGCQKDGSGFSCKRLHPDPFLRSLAYWVMKDYTRALDTLLEQTPKEDDEHQVIIKSCNPVAFSFYNYLRTHPLLIRRNLASPEGTLATLGLKTEKNFVDKINLIERKLFFTTANAHFKVGCPVLALEVLSKIPKVTKTSALSAKKDQPDFISHRMDDVPSHSKALSDGNGSSGIEWSNVTSSQYDWSQPIVKVDEEPLNLDWGEDHDSALDEEEDDAVGLVMKSTDAREKDKQSDQKASDPNMLLTPQEEDDPEGDTEVDVIAEQLKFRACLKILMTELRTLATGYEVDGGKLRFQLYNWLEKEIAALHEICNHESVIKEYSSKTYSKVESDLLDQEEMVDKPDIGSYERHQIERRRLQAKREHAERRKSWLQKNQDLLRVFLSYCSLHGAQGGGLASVRMELKFLLQESQQETTVKQLQSPLPLPTTLPLLSASIASTKTVIANPVLYLNNHIHDILYTIVQMKTPPHPSIEDVKVHTLHSLAASLSASIYQALCDSHSYSQTEGNQFTGMAYQGLLLSDRRRLRTESIEEHATPNSSPAQWPGVSSLINLLSSAQDEDQPKLNILLCEAVVAVYLSLLIHALATNSSSELFRLAAHPLNNRMWAAVFGGGVKLVVKPRRQSENISAPPVLSEDIDKHRRRFNMRMLVPGRPVKDATPPPVPAERPSYKEKFIPPELSMWDYFVAKPFLPLSDSGVIYDSDESIHSDEEDDAFFSDTQIQEHQDPNSYSWALLHLTMVKLALHNVKNFFPIAGLEFSELPVTSPLGIAVIKNLENWEQILQEKMDQFEGPPPNYINTYPTDLSVGAGPAILRNKAMLEPENTPFKSRDSSAFPVKRLWHFLVKQEVLQETFIRYIFTKKRKQSEVEADLGYPGGKAKVIHKESDMIMAFSVNKANCNEIVLASTHDVQELDVTSLLACQSYIWIGEEYDRESKSSDDVDYRGSTTTLYQPSATSYSASQVHPPSSLPWLGTGQTSTGASVLMKRNLHNVKRMTSHPVHQYYLTGAQDGSVRMFEWTRPQQLVCFRQAGNARVTRLYFNSQGNKCGVADGEGFLSIWQVNQTASNPKPYMSWQCHSKATSDFAFITSSSLVATSGHSNDNRNVCLWDTLISPGNSLIHGFTCHDHGATVLQYAPKQQLLISGGRKGHVCIFDIRQRQLIHTFQAHDSAIKALALDPYEEYFTTGSAEGNIKVWRLTGHGLIHSFKSEHAKQSIFRNIGAGVMQIDIIQGNRLFSCGADGTLKTRVLPNAFNIPNRILDIL

SEQ ID NO: 25037 - protein, 3037 aa, Homo sapiens
  Payload ID: 4952
  Gene Symbol: DMXL2
  Gene Name: Dmx-like 2
  Uniprot ID: Q8TDJ6
  ENSP ID: ENSP00000441858
MHLHQVLTGAVNPGDNCYSVGSVGDVPFTAYGSGCDIVILANDFECVQIIPGAKHGNIQVSCVECSNQQGRIAASYGNAVCIFEPLGINSHKRNCQLKCQWLKTGQFFLSSVTYNLAWDPQDNRLLTATDSIQLWAPPGDDILEEEEEIDNTVPPVLNDWKCVWQCKTSVSVHLMEWSPDGEYFATAGKDDCLLKVWYPMTGWKSSIIPQDHHEVKRRQSSTQFSFVYLAHPRAVTGFSWRKTSKYMPRGSVCNVLLTSCHDGVCRLWAETLLPEDCLLGEQICETTTSSIASSLSHAGRHKDRIQHALETIHHLKNLRKGQRRSSVLVTHAELMPDQTAMHEVQRHISHHANALCHFHIAASINPATDIPNVLVGTAFNVDDGNGGFVVHWLNNKEFHFTSSTEVFMHQLRKLSDKQVDHENDDADREDEEHSQEDRERGLHMKLDHDLSLDRESEAGTGSSEHEDGEREGSPRTYSRLSVPMPLPTVLLDRKIETLLTEWNKNPDMLFTIHPVDGTFLVWHVKYLDEYNPGIFRQVQVSFSSRIPVAFPSGDASSLSKNIMMYACINATKDSHHTLLHQEGMSVGSPHGSQPHSRSHSTHMNILAPTVMMISKHIDGSLNQWAVTFADKSAFTTVLTVSHKFRYCGHRFHLNDLACHSVLPLLLTSSHHNALLTPELDCQWDSDNKLSRLMDPVKHIKGSSKQPLRNAATRTFHDPNAIYSELILWRVDPIGPLSYTGGVSELARINSLHTSAFSNVAWLPTLIPSYCLGTYCNSASACFVASDGKNLRLYQAVVDARKLLDELSDPESSKLIGEVFNIVSQQSTARPGCIIELDAITNQCGSNTQLLHVFQEDFIIGYKPHKEDMEKKETEIFFQPSQGYRPPPFSEKFFLVVIEKDSNNNSILHMWHLHLKSVQACLAKASEGASSESLLSVPGQKNVDSSPETSPSVSPMPHSSSIANLQTASKLILSSRLVYSQPLDLPESVEVIRATPSAGHLSSSSIYPVCLAPYLVVTTCSDNKVRFWKCCMEANPECNKSDEKEIYHWKRWPLMNDEGEDNSSTVSIVGRPVAVSCSYTGRLAVAYKQPIHHNGFVSKEFSMHVCIFECESTGGSEWVLEQTIHLDDLVKVGSVLDSRVSVDSNLFVYSKSDALLSKDRYLIPNIKHLVHLDWVSKEDGSHILTVGVGANIFMYGRLSGIVTEQTNSKDGVAVITLPLGGSIKQGVKSRWVLLRSIDLVSSVDGTPSLPVSLSWVRDGILVVGMDCEMHVYAQWKHAVKFGDTEADSSNAEEAAMQDHSTFKSNMLARKSVVEGTAISDDVFCSPTVIQDGGLFEAAHVLSPTLPQYHPTQLLELMDLGKVRRAKAILSHLVKCIAGEVAIVRDPDAGEGTKRHLSRTISVSGSTAKETVTVGKDGTRDYTEIDSIPPLPLYALLAADQDTSYRISEESTKIPQSYEDQTVSQPEDQYSELFQIQDIPTDDIDLEPEKRENKSKVINLSQYGPAYFGQEHARVLSSHLMHSSLPGLTRLEQMFLVALADTVATTSTELDESRDKSCSGRDTLDECGLRYLLAMRLHTCLLTSLPPLYRVQLLHQGVSTCHFAWAFHSEAEEELINMIPAIQRGDPQWSELRAMGIGWWVRNINTLRRCIEKVAKASFQRNNDALDAALFYLSMKKKAVVWGLFRSQHDEKMTTFFSHNFNEDRWRKAALKNAFSLLGKQRFEQSAAFFLLAGSLKDAIEVCLEKMEDIQLAMVIARLYESEFETSSTYISILNQKILGCQKDGSGFSCKRLHPDPFLRSLAYWVMKDYTRALDTLLEQTPKEDDEHQVIIKSCNPVAFSFYNYLRTHPLLIRRNLASPEGTLATLGLKTEKNFVDKINLIERKLFFTTANAHFKVGCPVLALEVLSKIPKVTKTSALSAKKDQPDFISHRMDDVPSHSKALSDGNGSSGIEWSNVTSSQYDWSQPIVKVDEEPLNLDWGEDHDSALDEEEDDAVGLVMKSTDAREKDKQSDQKASDPNMLLTPQEEDDPEGDTEVDVIAEQLKFRACLKILMTELRTLATGYEVDGGKLRFQLYNWLEKEIAALHEICNHESVIKEYSSKTYSKVESDLLDQEEMVDKPDIGSYERHQIERRRLQAKREHAERRKSWLQKNQDLLRVFLSYCSLHGAQGGGLASVRMELKFLLQESQQETTVKQLQSPLPLPTTLPLLSASIASTKTVIANPVLYLNNHIHDILYTIVQMKTPPHPSIEDVKVHTLHSLAASLSASIYQALCDSHSYSSQTEGNQFTGMAYQGLLLSDRRRLRTESIEEHATPNSSPAQWPGVSSLINLLSSAQDEDQPKLNILLCEAVVAVYLSLLIHALATNSSSELFRLAAHPLNNRMWAAVFGGGVKLVVKPRRQSENISAPPVLSEDIDKHRRRFNMRMLVPGRPVKDATPPPVPAERPSYKEKFIPPELSMWDYFVAKPFLPLSDSGVIYDSDESIHSDEEDDAFFSDTQIQEHQDPNSYSWALLHLTMVKLALHNVKNFFPIAGLEFSELPVTSPLGIAVIKNLENWEQILQEKMDQFEGPPPNYINTYPTDLSVGAGPAILRNKAMLEPENTPFKSRDSSAFPVKRLWHFLVKQEVLQETFIRYIFTKKRKQSEVEADLGYPGGKAKVIHKESDMIMAFSVNKANCNEIVLASTHDVQELDVTSLLACQSYIWIGEEYDRESKSSDDVDYRGSTTTLYQPSATSYSASQVHPPSSLPWLGTGQTSTGASVLMKRNLHNVKRMTSHPVHQYYLTGAQDGSVRMFEWTRPQQLVCFRQAGNARVTRLYFNSQGNKCGVADGEGFLSIWQVNQTASNPKPYMSWQCHSKATSDFAFITSSSLVATSGHSNDNRNVCLWDTLISPGNSLIHGFTCHDHGATVLQYAPKQQLLISGGRKGHVCIFDIRQRQLIHTFQAHDSAIKALALDPYEEYFTTGSAEGNIKVWRLTGHGLIHSFKSEHAKQSIFRNIGAGVMQIDIIQGNRLFSCGADGTLKTRVLPNAFNIPNRILDIL

SEQ ID NO: 25038 - protein, 1183 aa, Homo sapiens
  Payload ID: 4952
  Gene Symbol: DMXL2
  Gene Name: Dmx-like 2
  ENSP ID: ENSP00000453267
  MOD_RES (1)..(1): Any amino acid
XINLIERKLFFTTANAHFKVGCPVLALEVLSKIPKVTKTSALSAKKDQPDFISHRMDDVPSHSKALSDGNGSSGIEWSNVTSSQYDWSQPIVKVDEEPLNLDWGEDHDSALDEEEDDAVGLVMKSTDAREKDKQSDQKASDPNMLLTPQEEDDPEGDTEVDVIAEQLKFRACLKILMTELRTLATGYEVDGGKLRFQLYNWLEKEIAALHEICNHESVIKEYSSKTYSKVESDLLDQEEMVDKPDIGSYERHQIERRRLQAKREHAERRKSWLQKNQDLLRVFLSYCSLHGAQGGGLASVRMELKFLLQESQQETTVKQLQSPLPLPTTLPLLSASIASTKTVIANPVLYLNNHIHDILYTIVQMKTPPHPSIEDVKVHTLHSLAASLSASIYQALCDSHSYSSQTEGNQFTGMAYQGLLLSDRRRLRTESIEEHATPNSSPAQWPGVSSLINLLSSAQDEDQPKLNILLCEAVVAVYLSLLIHALATNSSSELFRLAAHPLNNRMWAAVFGGGVKLVVKPRRQSENISAPPVLSEDIDKHRRRFNMRMLVPGRPVKDATPPPVPAERPSYKEKFIPPELSMWDYFVAKPFLPLSDSGVIYDSDESIHSDEEDDAFFSDTQIQEHQDPNSYSWALLHLTMVKLALHNVKNFFPIAGLEFSELPVTSPLGIAVIKNLENWEQILQEKMDQFEGPPPNYINTYPTDLSVGAGPAILRNKAMLEPENTPFKSRDSSAFPVKRLWHFLVKQEVLQETFIRYIFTKKRKQSESIEEHVEQVNQNCIAEDCHIKVEADLGYPGGKAKVIHKESDMIMAFSVNKANCNEIVLASTHDVQELDVTSLLACQSYIWIGEEYDRESKSSDDVDYRGSTTTLYQPSATSYSASQVHPPSSLPWLGTGQTSTGASVLMKRNLHNVKRMTSHPVHQYYLTGAQDGSVRMFEWTRPQQLVCFRQAGNARVTRLYFNSQGNKCGVADGEGFLSIWQVNQTASNPKPYMSWQCHSKATSDFAFITSSSLVATSGHSNDNRNVCLWDTLISPGNSLIHGFTCHDHGATVLQYAPKQQLLISGGRKGHVCIFDIRQRQLIHTFQAHDSAIKALALDPYEEYFTTGSAEGNIKVWRLTGHGLIHSFKSEHAKQSIFRNIGAGVMQIDIIQGNRLFSCGADGTLKTRVLPNAFNIPNRILDIL

SEQ ID NO: 25039 - protein, 115 aa, Homo sapiens
  Payload ID: 4952
  Gene Symbol: DMXL2
  Gene Name: Dmx-like 2
  ENSP ID: ENSP00000453454
  MOD_RES (1)..(1): Any amino acid
XRMLVPGRPVKDATPPPVPAERPSYKEKFIPPELSMWDYFVAKPFLPLSDSGVIYDSDESIHSDEEDDAFFSDTQIQEHQDPNSYSWALLHLTMVKLALHNVKNFFPIAGLEFSG

SEQ ID NO: 25040 - protein, 76 aa, Homo sapiens
  Payload ID: 4952
  Gene Symbol: DMXL2
  Gene Name: Dmx-like 2
  ENSP ID: ENSP00000453570
GEGFLSIWQVNQTASNPKPYMSWQCHSKATSDFAFITSSSLVATSGHSNDNRFHVPRSWCHGTAVCTQTATPNLGG

SEQ ID NO: 25041 - protein, 1616 aa, Homo sapiens
  Payload ID: 4953
  Gene Symbol: DNMT1
  Gene Name: DNA (cytosine-5-)-methyltransferase 1
  Uniprot ID: P26358
  ENSP ID: ENSP00000345739
MPARTAPARVPTLAVPAISLPDDVRRRLKDLERDSLTEKECVKEKLNLLHEFLQTEIKNQLCDLETKLRKEELSEEGYLAKVKSLLNKDLSLENGAHAYNREVNGRLENGNQARSEARRVGMADANSPPKPLSKPRTPRRSKSDGEAKPEPSPSPRITRKSTRQTTITSHFAKGPAKRKPQEESERAKSDESIKEEDKDQDEKRRRVTSRERVARPLPAEEPERAKSGTRTEKEEERDEKEEKRLRSQTKEPTPKQKLKEEPDREARAGVQADEDEDGDEKDEKKHRSQPKDLAAKRRPEEKEPEKVNPQISDEKDEDEKEEKRRKTTPKEPTEKKMARAKTVMNSKTHPPKCIQCGQYLDDPDLKYGQHPPDAVDEPQMLTNEKLSIFDANESGFESYEALPQHKLTCFSVYCKHGHLCPIDTGLIEKNIELFFSGSAKPIYDDDPSLEGGVNGKNLGPINEWWITGFDGGEKALIGFSTSFAEYILMDPSPEYAPIFGLMQEKIYISKIVVEFLQSNSDSTYEDLINKIETTVPPSGLNLNRFTEDSLLRHAQFVVEQVESYDEAGDSDEQPIFLTPCMRDLIKLAGVTLGQRRAQARRQTIRHSTREKDRGPTKATTTKLVYQIFDTFFAEQIEKDDREDKENAFKRRRCGVCEVCQQPECGKCKACKDMVKFGGSGRSKQACQERRCPNMAMKEADDDEEVDDNIPEMPSPKKMHQGKKKKQNKNRISWVGEAVKTDGKKSYYKKVCIDAETLEVGDCVSVIPDDSSKPLYLARVTALWEDSSNGQMFHAHWFCAGTDTVLGATSDPLELFLVDECEDMQLSYIHSKVKVIYKAPSENWAMEGGMDPESLLEGDDGKTYFYQLWYDQDYARFESPPKTQPTEDNKFKFCVSCARLAEMRQKEIPRVLEQLEDLDSRVLYYSATKNGILYRVGDGVYLPPEAFTFNIKLSSPVKRPRKEPVDEDLYPEHYRKYSDYIKGSNLDAPEPYRIGRIKEIFCPKKSNGRPNETDIKIRVNKFYRPENTHKSTPASYHADINLLYWSDEEAVVDFKAVQGRCTVEYGEDLPECVQVYSMGGPNRFYFLEAYNAKSKSFEDPPNHARSPGNKGKGKGKGKGKPKSQACEPSEPEIEIKLPKLRTLDVFSGCGGLSEGFHQAGISDTLWAIEMWDPAAQAFRLNNPGSTVFTEDCNILLKLVMAGETTNSRGQRLPQKGDVEMLCGGPPCQGFSGMNRFNSRTYSKFKNSLVVSFLSYCDYYRPRFFLLENVRNFVSFKRSMVLKLTLRCLVRMGYQCTFGVLQAGQYGVAQTRRRAIILAAAPGEKLPLFPEPLHVFAPRACQLSVVVDDKKFVSNITRLSSGPFRTITVRDTMSDLPEVRNGASALEISYNGEPQSWFQRQLRGAQYQPILRDHICKDMSALVAARMRHIPLAPGSDWRDLPNIEVRLSDGTMARKLRYTHHDRKNGRSSSGALRGVCSCVEAGKACDPAARQFNTLIPWCLPHTGNRHNHWAGLYGRLEWDGFFSTTVTNPEPMGKQGRVLHPEQHRVVSVRECARSQGFPDTYRLFGNILDKHRQVGNAVPPPLAKAIGLEIKLCMLAKARESASAKIKEEEAAKD

SEQ ID NO: 25042 - protein, 1632 aa, Homo sapiens
  Payload ID: 4953
  Gene Symbol: DNMT1
  Gene Name: DNA (cytosine-5-)-methyltransferase 1
  Uniprot ID: P26358
  ENSP ID: ENSP00000352516
MPARTAPARVPTLAVPAISLPDDVRRRLKDLERDSLTEKECVKEKLNLLHEFLQTEIKNQLCDLETKLRKEELSEEGYLAKVKSLLNKDLSLENGAHAYNREVNGRLENGNQARSEARRVGMADANSPPKPLSKPRTPRRSKSDGEAKRSRDPPASASQVTGIRAEPSPSPRITRKSTRQTTITSHFAKGPAKRKPQEESERAKSDESIKEEDKDQDEKRRRVTSRERVARPLPAEEPERAKSGTRTEKEEERDEKEEKRLRSQTKEPTPKQKLKEEPDREARAGVQADEDEDGDEKDEKKHRSQPKDLAAKRRPEEKEPEKVNPQISDEKDEDEKEEKRRKTTPKEPTEKKMARAKTVMNSKTHPPKCIQCGQYLDDPDLKYGQHPPDAVDEPQMLTNEKLSIFDANESGFESYEALPQHKLTCFSVYCKHGHLCPIDTGLIEKNIELFFSGSAKPIYDDDPSLEGGVNGKNLGPINEWWITGFDGGEKALIGFSTSFAEYILMDPSPEYAPIFGLMQEKIYISKIVVEFLQSNSDSTYEDLINKIETTVPPSGLNLNRFTEDSLLRHAQFVVEQVESYDEAGDSDEQPIFLTPCMRDLIKLAGVTLGQRRAQARRQTIRHSTREKDRGPTKATTTKLVYQIFDTFFAEQIEKDDREDKENAFKRRRCGVCEVCQQPECGKCKACKDMVKFGGSGRSKQACQERRCPNMAMKEADDDEEVDDNIPEMPSPKKMHQGKKKKQNKNRISWVGEAVKTDGKKSYYKKVCIDAETLEVGDCVSVIPDDSSKPLYLARVTALWEDSSNGQMFHAHWFCAGTDTVLGATSDPLELFLVDECEDMQLSYIHSKVKVIYKAPSENWAMEGGMDPESLLEGDDGKTYFYQLWYDQDYARFESPPKTQPTEDNKFKFCVSCARLAEMRQKEIPRVLEQLEDLDSRVLYYSATKNGILYRVGDGVYLPPEAFTFNIKLSSPVKRPRKEPVDEDLYPEHYRKYSDYIKGSNLDAPEPYRIGRIKEIFCPKKSNGRPNETDIKIRVNKFYRPENTHKSTPASYHADINLLYWSDEEAVVDFKAVQGRCTVEYGEDLPECVQVYSMGGPNRFYFLEAYNAKSKSFEDPPNHARSPGNKGKGKGKGKGKPKSQACEPSEPEIEIKLPKLRTLDVFSGCGGLSEGFHQAGISDTLWAIEMWDPAAQAFRLNNPGSTVFTEDCNILLKLVMAGETTNSRGQRLPQKGDVEMLCGGPPCQGFSGMNRFNSRTYSKFKNSLVVSFLSYCDYYRPRFFLLENVRNFVSFKRSMVLKLTLRCLVRMGYQCTFGVLQAGQYGVAQTRRRAIILAAAPGEKLPLFPEPLHVFAPRACQLSVVVDDKKFVSNITRLSSGPFRTITVRDTMSDLPEVRNGASALEISYNGEPQSWFQRQLRGAQYQPILRDHICKDMSALVAARMRHIPLAPGSDWRDLPNIEVRLSDGTMARKLRYTHHDRKNGRSSSGALRGVCSCVEAGKACDPAARQFNTLIPWCLPHTGNRHNHWAGLYGRLEWDGFFSTTVTNPEPMGKQGRVLHPEQHRVVSVRECARSQGFPDTYRLFGNILDKHRQVGNAVPPPLAKAIGLEIKLCMLAKARESASAKIKEEEAAKD

SEQ ID NO: 25043 - protein, 1280 aa, Homo sapiens
  Payload ID: 4953
  Gene Symbol: DNMT1
  Gene Name: DNA (cytosine-5-)-methyltransferase 1
  Uniprot ID: P26358
  ENSP ID: ENSP00000440457
MARAKTVMNSKTHPPKCIQCGQYLDDPDLKYGQHPPDAVDEPQMLTNEKLSIFDANESGFESYEALPQHKLTCFSVYCKHGHLCPIDTGLIEKNIELFFSGSAKPIYDDDPSLEGGVNGKNLGPINEWWITGFDGGEKALIGFSTSFAEYILMDPSPEYAPIFGLMQEKIYISKIVVEFLQSNSDSTYEDLINKIETTVPPSGLNLNRFTEDSLLRHAQFVVEQVESYDEAGDSDEQPIFLTPCMRDLIKLAGVTLGQRRAQARRQTIRHSTREKDRGPTKATTTKLVYQIFDTFFAEQIEKDDREDKENAFKRRRCGVCEVCQQPECGKCKACKDMVKFGGSGRSKQACQERRCPNMAMKEADDDEEVDDNIPEMPSPKKMHQGKKKKQNKNRISWVGEAVKTDGKKSYYKKVCIDAETLEVGDCVSVIPDDSSKPLYLARVTALWEDSSNGQMFHAHWFCAGTDTVLGATSDPLELFLVDECEDMQLSYIHSKVKVIYKAPSENWAMEGGMDPESLLEGDDGKTYFYQLWYDQDYARFESPPKTQPTEDNKFKFCVSCARLAEMRQKEIPRVLEQLEDLDSRVLYYSATKNGILYRVGDGVYLPPEAFTFNIKLSSPVKRPRKEPVDEDLYPEHYRKYSDYIKGSNLDAPEPYRIGRIKEIFCPKKSNGRPNETDIKIRVNKFYRPENTHKSTPASYHADINLLYWSDEEAVVDFKAVQGRCTVEYGEDLPECVQVYSMGGPNRFYFLEAYNAKSKSFEDPPNHARSPGNKGKGKGKGKGKPKSQACEPSEPEIEIKLPKLRTLDVFSGCGGLSEGFHQAGISDTLWAIEMWDPAAQAFRLNNPGSTVFTEDCNILLKLVMAGETTNSRGQRLPQKGDVEMLCGGPPCQGFSGMNRFNSRTYSKFKNSLVVSFLSYCDYYRPRFFLLENVRNFVSFKRSMVLKLTLRCLVRMGYQCTFGVLQAGQYGVAQTRRRAIILAAAPGEKLPLFPEPLHVFAPRACQLSVVVDDKKFVSNITRLSSGPFRTITVRDTMSDLPEVRNGASALEISYNGEPQSWFQRQLRGAQYQPILRDHICKDMSALVAARMRHIPLAPGSDWRDLPNIEVRLSDGTMARKLRYTHHDRKNGRSSSGALRGVCSCVEAGKACDPAARQFNTLIPWCLPHTGNRHNHWAGLYGRLEWDGFFSTTVTNPEPMGKQGRVLHPEQHRVVSVRECARSQGFPDTYRLFGNILDKHRQVGNAVPPPLAKAIGLEIKLCMLAKARESASAKIKEEEAAKD

SEQ ID NO: 25044 - protein, 40 aa, Homo sapiens
  Payload ID: 4953
  Gene Symbol: DNMT1
  Gene Name: DNA (cytosine-5-)-methyltransferase 1
  ENSP ID: ENSP00000464958
MPARTAPARVPTLAVPAISLPDDVRRRLKDLERDSLTEKK

SEQ ID NO: 25045 - protein, 255 aa, Homo sapiens
  Payload ID: 4953
  Gene Symbol: DNMT1
  Gene Name: DNA (cytosine-5-)-methyltransferase 1
  ENSP ID: ENSP00000465223
MILGYRLSPFGTSPPPPRPDWGGRRRLRSSPLPIGFRAKSRGACAAAAASAEASEMPARTAPARVPTLAVPAISLPDDVRRRLKDLERDSLTEKECVKEKLNLLHEFLQTEIKNQLCDLETKLRKEELSEEGYLAKVKSLLNKDLSLENGAHAYNREVNGRLENGNQARSEARRVGMADANSPPKPLSKPRTPRRSKSDGEAKPEPSPSPRITRKSTRQTTITSHFAKGPAKRKPQEESERAKSDESIKEEDKDQ

SEQ ID NO: 25046 - protein, 25 aa, Homo sapiens
  Payload ID: 4953
  Gene Symbol: DNMT1
  Gene Name: DNA (cytosine-5-)-methyltransferase 1
  ENSP ID: ENSP00000465555
MADANSPPKPLSKPRTPRRSKSDGE

SEQ ID NO: 25047 - protein, 94 aa, Homo sapiens
  Payload ID: 4953
  Gene Symbol: DNMT1
  Gene Name: DNA (cytosine-5-)-methyltransferase 1
  ENSP ID: ENSP00000465993
MADANSPPKPLSKPRTPRRSKSDGEAKRSRDPPASASQVTGIRAEPSPSPRITRKSTRQTTITSHFAKGPAKRKPQEESERAKSDESIKEEDKD

SEQ ID NO: 25048 - protein, 89 aa, Homo sapiens
  Payload ID: 4953
  Gene Symbol: DNMT1
  Gene Name: DNA (cytosine-5-)-methyltransferase 1
  ENSP ID: ENSP00000466657
MPARTAPARVPTLAVPAISLPDDVRRRLKDLERDSLTEKECVKEKLNLLHEFLQTEIKNQLCDLETKLRKEELSEICPWRTVLMLTTGK

SEQ ID NO: 25049 - protein, 119 aa, Homo sapiens
  Payload ID: 4953
  Gene Symbol: DNMT1
  Gene Name: DNA (cytosine-5-)-methyltransferase 1
  ENSP ID: ENSP00000467050
MADANSPPKPLSKPRTPRRSKSDGEAKPEPSPSPRITRKSTRQTTITSHFAKGPAKRKPQEESERAKSDESIKEEDKDQDEKRRRVTSRERVARPLPAEEPERAKSGTRTEKEEERDEK

SEQ ID NO: 25050 - protein, 389 aa, Homo sapiens
  Payload ID: 4953
  Gene Symbol: DNMT1
  Gene Name: DNA (cytosine-5-)-methyltransferase 1
  ENSP ID: ENSP00000467125
  MOD_RES (1)..(1): Any amino acid
XCQGFSGMNRFNSRTYSKFKNSLVVSFLSYCDYYRPRFFLLENVRNFVSFKRSMVLKLTLRCLVRMGYQCTFGVLQAGQYGVAQTRRRAIILAAAPGEKLPLFPEPLHVFAPRACQLSVVVDDKKFVSNITRLSSGPFRTITVRDTMSDLPEVRNGASALEISYNGEPQSWFQRQLRGAQYQPILRDHICKDMSALVAARMRHIPLAPGSDWRDLPNIEVRLSDGTMARKLRYTHHDRKNGRSSSGALRGVCSCVEAGKACDPAARQFNTLIPWCLPHTGNRHNHWAGLYGRLEWDGFFSTTVTNPEPMGKQGRVLHPEQHRVVSVRECARSQGFPDTYRLFGNILDKHRQVSGAAPAGSGQEGGFCACHQVGLGPAQSLPGGRLLAAG

SEQ ID NO: 25051 - protein, 55 aa, Homo sapiens
  Payload ID: 4953
  Gene Symbol: DNMT1
  Gene Name: DNA (cytosine-5-)-methyltransferase 1
  ENSP ID: ENSP00000467260
  MOD_RES (1)..(1): Any amino acid
XSKIVVEFLQSNSDSTYEDLINKIERTPSCDTRSLWWSRWRVMTRPGTVMSSPSS

SEQ ID NO: 25052 - protein, 77 aa, Homo sapiens
  Payload ID: 4953
  Gene Symbol: DNMT1
  Gene Name: DNA (cytosine-5-)-methyltransferase 1
  ENSP ID: ENSP00000468062
  MOD_RES (1)..(1): Any amino acid
XRRSKSDGEAKRSRDPPASASQVTGIRESCSIAQDRVQWRDLGSLQPPPPSFKRFSCLSLPTEPSPSPRITRKSTRQ

SEQ ID NO: 25053 - protein, 71 aa, Homo sapiens
  Payload ID: 4953
  Gene Symbol: DNMT1
  Gene Name: DNA (cytosine-5-)-methyltransferase 1
  ENSP ID: ENSP00000468359
MADANSPPKPLSKPRTPRRSKSDGEAKPEPSPSPRITRKSTRQTTITSHFAKGPAKRKPQEESERAKSDES

SEQ ID NO: 25054 - protein, 912 aa, Homo sapiens
  Payload ID: 4954
  Gene Symbol: DNMT3A
  Gene Name: DNA (cytosine-5-)-methyltransferase 3 alpha
  Uniprot ID: Q9Y6K1
  ENSP ID: ENSP00000264709
MPAMPSSGPGDTSSSAAEREEDRKDGEEQEEPRGKEERQEPSTTARKVGRPGRKRKHPPVESGDTPKDPAVISKSPSMAQDSGASELLPNGDLEKRSEPQPEEGSPAGGQKGGAPAEGEGAAETLPEASRAVENGCCTPKEGRGAPAEAGKEQKETNIESMKMEGSRGRLRGGLGWESSLRQRPMPRLTFQAGDPYYISKRKRDEWLARWKREAEKKAKVIAGMNAVEENQGPGESQKVEEASPPAVQQPTDPASPTVATTPEPVGSDAGDKNATKAGDDEPEYEDGRGFGIGELVWGKLRGFSWWPGRIVSWWMTGRSRAAEGTRWVMWFGDGKFSVVCVEKLMPLSSFCSAFHQATYNKQPMYRKAIYEVLQVASSRAGKLFPVCHDSDESDTAKAVEVQNKPMIEWALGGFQPSGPKGLEPPEEEKNPYKEVYTDMWVEPEAAAYAPPPPAKKPRKSTAEKPKVKEIIDERTRERLVYEVRQKCRNIEDICISCGSLNVTLEHPLFVGGMCQNCKNCFLECAYQYDDDGYQSYCTICCGGREVLMCGNNNCCRCFCVECVDLLVGPGAAQAAIKEDPWNCYMCGHKGTYGLLRRREDWPSRLQMFFANNHDQEFDPPKVYPPVPAEKRKPIRVLSLFDGIATGLLVLKDLGIQVDRYIASEVCEDSITVGMVRHQGKIMYVGDVRSVTQKHIQEWGPFDLVIGGSPCNDLSIVNPARKGLYEGTGRLFFEFYRLLHDARPKEGDDRPFFWLFENVVAMGVSDKRDISRFLESNPVMIDAKEVSAAHRARYFWGNLPGMNRPLASTVNDKLELQECLEHGRIAKFSKVRTITTRSNSIKQGKDQHFPVFMNEKEDILWCTEMERVFGFPVHYTDVSNMSRLARQRLLGRSWSVPVIRHLFAPLKEYFACV

SEQ ID NO: 25055 - protein, 912 aa, Homo sapiens; identical to SEQ ID NO: 25054
  Payload ID: 4954
  Gene Symbol: DNMT3A
  Gene Name: DNA (cytosine-5-)-methyltransferase 3 alpha
  Uniprot ID: Q9Y6K1
  ENSP ID: ENSP00000324375

SEQ ID NO: 25056 - protein, 723 aa, Homo sapiens
  Payload ID: 4954
  Gene Symbol: DNMT3A
  Gene Name: DNA (cytosine-5-)-methyltransferase 3 alpha
  Uniprot ID: Q9Y6K1
  ENSP ID: ENSP00000370122
MGILERVVRRNGRVDRSLKDECDTAEKKAKVIAGMNAVEENQGPGESQKVEEASPPAVQQPTDPASPTVATTPEPVGSDAGDKNATKAGDDEPEYEDGRGFGIGELVWGKLRGFSWWPGRIVSWWMTGRSRAAEGTRWVMWFGDGKFSVVCVEKLMPLSSFCSAFHQATYNKQPMYRKAIYEVLQVASSRAGKLFPVCHDSDESDTAKAVEVQNKPMIEWALGGFQPSGPKGLEPPEEEKNPYKEVYTDMWVEPEAAAYAPPPPAKKPRKSTAEKPKVKEIIDERTRERLVYEVRQKCRNIEDICISCGSLNVTLEHPLFVGGMCQNCKNCFLECAYQYDDDGYQSYCTICCGGREVLMCGNNNCCRCFCVECVDLLVGPGAAQAAIKEDPWNCYMCGHKGTYGLLRRREDWPSRLQMFFANNHDQEFDPPKVYPPVPAEKRKPIRVLSLFDGIATGLLVLKDLGIQVDRYIASEVCEDSITVGMVRHQGKIMYVGDVRSVTQKHIQEWGPFDLVIGGSPCNDLSIVNPARKGLYEGTGRLFFEFYRLLHDARPKEGDDRPFFWLFENVVAMGVSDKRDISRFLESNPVMIDAKEVSAAHRARYFWGNLPGMNRPLASTVNDKLELQECLEHGRIAKFSKVRTITTRSNSIKQGKDQHFPVFMNEKEDILWCTEMERVFGFPVHYTDVSNMSRLARQRLLGRSWSVPVIRHLFAPLKEYFACV

SEQ ID NO: 25057 - protein, 781 aa, Homo sapiens
  Payload ID: 4954
  Gene Symbol: DNMT3A
  Gene Name: DNA (cytosine-5-)-methyltransferase 3 alpha
  ENSP ID: ENSP00000370132
MPAMPSSGPGDTSSSAAEREEDRKDGEEQEEPRGKEERQEPSTTARKVGRPGRKRKHPPVESGDTPKDPAVISKSPSMAQDSGASELLPNGDLEKRSEPQPEEGSPAGGQKGGAPAEGEGAAETLPEASRAVENGCCTPKEGRGAPAEAGKEQKETNIESMKMEGSRGRLRGGLGWESSLRQRPMPRLTFQAGDPYYISKRKRDEWLARWKREAEKKAKVIAGMNAVEENQGPGESQKVEEASPPAVQQPTDPASPTVATTPEPVGSDAGDKNATKAGDDEPEYEDGRGFGIGELVWGKLRGFSWWPGRIVSWWMTGRSRAAEGTRWVMWFGDGKFSVVCVEKLMPLSSFCSAFHQATYNKQPMYRKAIYEVLQVASSRAGKLFPVCHDSDESDTAKAVEVQNKPMIEWALGGFQPSGPKGLEPPEEEKNPYKEVYTDMWVEPEAAAYAPPPPAKKPRKSTAEKPKVKEIIDERTRERLVYEVRQKCRNIEDICISCGSLNVTLEHPLFVGGMCQNCKNCFLECAYQYDDDGYQSYCTICCGGREVLMCGNNNCCRCFCVECVDLLVGPGAAQAAIKEDPWNCYMCGHKGTYGLLRRREDWPSRLQMFFANNHDQEFDPPKVYPPVPAEKRKPIRVLSLFDGIATGLLVLKDLGIQVDRYIASEVCEDSITVGMVRHQGKIMYVGDVRSVTQKHIQEWGPFDLVIGGSPCNDLSIVNPARKGLYEGTGRLFFEFYRLLHDARPKEGDDRPFFWLFENVVAMGVSDKRDISRFLEVQNSHLY

SEQ ID NO: 25058 - protein, 689 aa, Homo sapiens
  Payload ID: 4954
  Gene Symbol: DNMT3A
  Gene Name: DNA (cytosine-5-)-methyltransferase 3 alpha
  ENSP ID: ENSP00000384237
MNAVEENQGPGESQKVEEASPPAVQQPTDPASPTVATTPEPVGSDAGDKNATKAGDDEPEYEDGRGFGIGELVWGKLRGFSWWPGRIVSWWMTGRSRAAEGTRWVMWFGDGKFSVVCVEKLMPLSSFCSAFHQATYNKQPMYRKAIYEVLQVASSRAGKLFPVCHDSDESDTAKAVEVQNKPMIEWALGGFQPSGPKGLEPPEEEKNPYKEVYTDMWVEPEAAAYAPPPPAKKPRKSTAEKPKVKEIIDERTRERLVYEVRQKCRNIEDICISCGSLNVTLEHPLFVGGMCQNCKNCFLECAYQYDDDGYQSYCTICCGGREVLMCGNNNCCRCFCVECVDLLVGPGAAQAAIKEDPWNCYMCGHKGTYGLLRRREDWPSRLQMFFANNHDQEFDPPKVYPPVPAEKRKPIRVLSLFDGIATGLLVLKDLGIQVDRYIASEVCEDSITVGMVRHQGKIMYVGDVRSVTQKHIQEWGPFDLVIGGSPCNDLSIVNPARKGLYEGTGRLFFEFYRLLHDARPKEGDDRPFFWLFENVVAMGVSDKRDISRFLESNPVMIDAKEVSAAHRARYFWGNLPGMNRPLASTVNDKLELQECLEHGRIAKFSKVRTITTRSNSIKQGKDQHFPVFMNEKEDILWCTEMERVFGFPVHYTDVSNMSRLARQRLLGRSWSVPVIRHLFAPLKEYFACV

SEQ ID NO: 25059 - protein, 166 aa, Homo sapiens
  Payload ID: 4954
  Gene Symbol: DNMT3A
  Gene Name: DNA (cytosine-5-)-methyltransferase 3 alpha
  Uniprot ID: Q9Y6K1
  ENSP ID: ENSP00000384852
MPAMPSSGPGDTSSSAAEREEDRKDGEEQEEPRGKEERQEPSTTARKVGRPGRKRKHPPVESGDTPKDPAVISKSPSMAQDSGASELLPNGDLEKRSEPQPEEGSPAGGQKGGAPAEGEGAAETLPEASRAVENGCCTPKEGRGAPAEAGESSAPGAASSGPTSIP

SEQ ID NO: 25060 - protein, 845 aa, Homo sapiens
  Payload ID: 4955
  Gene Symbol: DNMT3B
  Gene Name: DNA (cytosine-5-)-methyltransferase 3 beta
  Uniprot ID: Q9UBC3
  ENSP ID: ENSP00000201963
MEPSPEPPSLESMKGDTRHLNGEEDAGGREDSILVNGACSDQSSDSPPILEAIRTPEIRGRRSSSRLSKREVSSLLSYTQDLTGDGDGEDGDGSDTPVMPKLFRETRTRSESPAVRTRNNNSVSSRERHRPSPRSTRGRQGRNHVDESPVEFPATRSLRRRATASAGTPWPSPPSSYLTIDLTDDTEDTHGTPQSSSTPYARLAQDSQQGGMESPQVEADSGDGDSSEYQDGKEFGIGDLVWGKIKGFSWWPAMVVSWKATSKRQAMSGMRWVQWFGDGKFSEVSADKLVALGLFSQHFNLATFNKLVSYRKAMYHALEKARVRAGKTFPSSPGDSLEDQLKPMLEWAHGGFKPTGIEGLKPNNTQPENKTRRRTADDSATSDYCPAPKRLKTNCYNNGKDRGDEDQSREQMASDVANNKSSLEDGCLSCGRKNPVSFHPLFEGGLCQTCRDRFLELFYMYDDDGYQSYCTVCCEGRELLLCSNTSCCRCFCVECLEVLVGTGTAAEAKLQEPWSCYMCLPQRCHGVLRRRKDWNVRLQAFFTSDTGLEYEAPKLYPAIPAARRRPIRVLSLFDGIATGYLVLKELGIKVGKYVASEVCEESIAVGTVKHEGNIKYVNDVRNITKKNIEEWGPFDLVIGGSPCNDLSNVNPARKGLYEGTGRLFFEFYHLLNYSRPKEGDDRPFFWMFENVVAMKVGDKRDISRFLECNPVMIDAIKVSAAHRARYFWGNLPGMNRPVIASKNDKLELQDCLEYNRIAKLKKVQTITTKSNSIKQGKNQLFPVVMNGKEDVLWCTELERIFGFPVHYTDVSNMGRGARQKLLGRSWSVPVIRHLFAPLKDYFACE

SEQ ID NO: 25061 - protein, 833 aa, Homo sapiens
  Payload ID: 4955
  Gene Symbol: DNMT3B
  Gene Name: DNA (cytosine-5-)-methyltransferase 3 beta
  Uniprot ID: Q9UBC3
  ENSP ID: ENSP00000313397
MKGDTRHLNGEEDAGGREDSILVNGACSDQSSDSPPILEAIRTPEIRGRRSSSRLSKREVSSLLSYTQDLTGDGDGEDGDGSDTPVMPKLFRETRTRSESPAVRTRNNNSVSSRERHRPSPRSTRGRQGRNHVDESPVEFPATRSLRRRATASAGTPWPSPPSSYLTIDLTDDTEDTHGTPQSSSTPYARLAQDSQQGGMESPQVEADSGDGDSSEYQDGKEFGIGDLVWGKIKGFSWWPAMVVSWKATSKRQAMSGMRWVQWFGDGKFSEVSADKLVALGLFSQHFNLATFNKLVSYRKAMYHALEKARVRAGKTFPSSPGDSLEDQLKPMLEWAHGGFKPTGIEGLKPNNTQPENKTRRRTADDSATSDYCPAPKRLKTNCYNNGKDRGDEDQSREQMASDVANNKSSLEDGCLSCGRKNPVSFHPLFEGGLCQTCRDRFLELFYMYDDDGYQSYCTVCCEGRELLLCSNTSCCRCFCVECLEVLVGTGTAAEAKLQEPWSCYMCLPQRCHGVLRRRKDWNVRLQAFFTSDTGLEYEAPKLYPAIPAARRRPIRVLSLFDGIATGYLVLKELGIKVGKYVASEVCEESIAVGTVKHEGNIKYVNDVRNITKKNIEEWGPFDLVIGGSPCNDLSNVNPARKGLYEGTGRLFFEFYHLLNYSRPKEGDDRPFFWMFENVVAMKVGDKRDISRFLECNPVMIDAIKVSAAHRARYFWGNLPGMNRPVIASKNDKLELQDCLEYNRIAKLKKVQTITTKSNSIKQGKNQLFPVVMNGKEDVLWCTELERIFGFPVHYTDVSNMGRGARQKLLGRSWSVPVIRHLFAPLKDYFACE

SEQ ID NO: 25062 - protein, 853 aa, Homo sapiens
  Payload ID: 4955
  Gene Symbol: DNMT3B
  Gene Name: DNA (cytosine-5-)-methyltransferase 3 beta
  Uniprot ID: Q9UBC3
  ENSP ID: ENSP00000328547
MKGDTRHLNGEEDAGGREDSILVNGACSDQSSDSPPILEAIRTPEIRGRRSSSRLSKREVSSLLSYTQDLTGDGDGEDGDGSDTPVMPKLFRETRTRSESPAVRTRNNNSVSSRERHRPSPRSTRGRQGRNHVDESPVEFPATRSLRRRATASAGTPWPSPPSSYLTIDLTDDTEDTHGTPQSSSTPYARLAQDSQQGGMESPQVEADSGDGDSSEYQDGKEFGIGDLVWGKIKGFSWWPAMVVSWKATSKRQAMSGMRWVQWFGDGKFSEVSADKLVALGLFSQHFNLATFNKLVSYRKAMYHALEKARVRAGKTFPSSPGDSLEDQLKPMLEWAHGGFKPTGIEGLKPNNTQPVVNKSKVRRAGSRKLESRKYENKTRRRTADDSATSDYCPAPKRLKTNCYNNGKDRGDEDQSREQMASDVANNKSSLEDGCLSCGRKNPVSFHPLFEGGLCQTCRDRFLELFYMYDDDGYQSYCTVCCEGRELLLCSNTSCCRCFCVECLEVLVGTGTAAEAKLQEPWSCYMCLPQRCHGVLRRRKDWNVRLQAFFTSDTGLEYEAPKLYPAIPAARRRPIRVLSLFDGIATGYLVLKELGIKVGKYVASEVCEESIAVGTVKHEGNIKYVNDVRNITKKNIEEWGPFDLVIGGSPCNDLSNVNPARKGLYEGTGRLFFEFYHLLNYSRPKEGDDRPFFWMFENVVAMKVGDKRDISRFLECNPVMIDAIKVSAAHRARYFWGNLPGMNRPVIASKNDKLELQDCLEYNRIAKLKKVQTITTKSNSIKQGKNQLFPVVMNGKEDVLWCTELERIFGFPVHYTDVSNMGRGARQKLLGRSWSVPVIRHLFAPLKDYFACE

SEQ ID NO: 25063 - protein, 770 aa, Homo sapiens
  Payload ID: 4955
  Gene Symbol: DNMT3B
  Gene Name: DNA (cytosine-5-)-methyltransferase 3 beta
  Uniprot ID: Q9UBC3
  ENSP ID: ENSP00000337764
MKGDTRHLNGEEDAGGREDSILVNGACSDQSSDSPPILEAIRTPEIRGRRSSSRLSKREVSSLLSYTQDLTGDGDGEDGDGSDTPVMPKLFRETRTRSESPAVRTRNNNSVSSRERHRPSPRSTRGRQGRNHVDESPVEFPATRSLRRRATASAGTPWPSPPSSYLTIDLTDDTEDTHGTPQSSSTPYARLAQDSQQGGMESPQVEADSGDGDSSEYQDGKEFGIGDLVWGKIKGFSWWPAMVVSWKATSKRQAMSGMRWVQWFGDGKFSEVSADKLVALGLFSQHFNLATFNKLVSYRKAMYHALEKARVRAGKTFPSSPGDSLEDQLKPMLEWAHGGFKPTGIEGLKPNNTQPENKTRRRTADDSATSDYCPAPKRLKTNCYNNGKDRGDEDQSREQMASDVANNKSSLEDGCLSCGRKNPVSFHPLFEGGLCQTCRDRFLELFYMYDDDGYQSYCTVCCEGRELLLCSNTSCCRCFCVECLEVLVGTGTAAEAKLQEPWSCYMCLPQRCHGVLRRRKDWNVRLQAFFTSDTGLEYEAPKLYPAIPAARRRPIRVLSLFDGIATGYLVLKELGIKVGKYVASEVCEESIAVGTVKHEGNIKYVNDVRNITKKNIEEWGPFDLVIGGSPCNDLSNVNPARKGLYEGTGRLFFEFYHLLNYSRPKEGDDRPFFWMFENVVAMKVGDKRDISRFLECNPVMIDAIKVSAAHRARYFWGNLPGMNRIFGFPVHYTDVSNMGRGARQKLLGRSWSVPVIRHLFAPLKDYFACE

SEQ ID NO: 25064 - protein, 728 aa, Homo sapiens
  Payload ID: 4955
  Gene Symbol: DNMT3B
  Gene Name: DNA (cytosine-5-)-methyltransferase 3 beta
  Uniprot ID: Q9UBC3
  ENSP ID: ENSP00000403169
MKGDTRHLNGEEDAGGREDSILVNGACSDQSSDSPPILEAIRTPEIRGRRSSSRLSKREVSSLLSYTQDLTGDGDGEDGDGSDTPVMPKLFRETRTRSESPASLRRRATASAGTPWPSPPSSYLTIDLTDDTEDTHGTPQSSSTPYARLAQDSQQGGMESPQVEADSGDGDSSEYQDGKEFGIGDLVWGKIKGFSWWPAMVVSWKATSKRQAMSGMRWVQWFGDGKFSEVSADKLVALGLFSQHFNLATFNKLVSYRKAMYHALEKARVRAGKTFPSSPGDSLEDQLKPMLEWAHGGFKPTGIEGLKPNNTQPENKTRRRTADDSATSDYCPAPKRLKTNCYNNGKDRGDEDQSREQMASDVANNKSSLEDGCLSCGRKNPVSFHPLFEGGLCQTCRDRFLELFYMYDDDGYQSYCTVCCEGRELLLCSNTSCCRCFCVECLEVLVGTGTAAEAKLQEPWSCYMCLPQRCHGVLRRRKDWNVRLQAFFTSDTGLEYEAPKLYPAIPAARRRPIRVLSLFDGIATGYLVLKELGIKVGKYVASEVCEESIAVGTVKHEGNIKYVNDVRNITKKNIEEWGPFDLVIGGSPCNDLSNVNPARKGLYEGTGRLFFEFYHLLNYSRPKEGDDRPFFWMFENVVAMKVGDKRDISRFLECNPVMIDAIKVSAAHRARYFWGNLPGMNRIFGFPVHYTDVSNMGRGARQKLLGRSWSVPVIRHLFAPLKDYFACE

SEQ ID NO: 25065 - protein, 694 aa, Homo sapiens
  Payload ID: 4955
  Gene Symbol: DNMT3B
  Gene Name: DNA (cytosine-5-)-methyltransferase 3 beta
  Uniprot ID: Q9UBC3
  ENSP ID: ENSP00000412305
MKGDTRHLNGEEDAGGREDSILVNGACSDQSSDSPPILEAIRTPEIRGRRSSSRLSKREVSSLLSYTQSLRRRATASAGTPWPSPPSSYLTIDLTDDTEDTHGTPQSSSTPYARLAQDSQQGGMESPQVEADSGDGDSSEYQDGKEFGIGDLVWGKIKGFSWWPAMVVSWKATSKRQAMSGMRWVQWFGDGKFSEVSADKLVALGLFSQHFNLATFNKLVSYRKAMYHALEKARVRAGKTFPSSPGDSLEDQLKPMLEWAHGGFKPTGIEGLKPNNTQPENKTRRRTADDSATSDYCPAPKRLKTNCYNNGKDRGDEDQSREQMASDVANNKSSLEDGCLSCGRKNPVSFHPLFEGGLCQTCRDRFLELFYMYDDDGYQSYCTVCCEGRELLLCSNTSCCRCFCVECLEVLVGTGTAAEAKLQEPWSCYMCLPQRCHGVLRRRKDWNVRLQAFFTSDTGLEYEAPKLYPAIPAARRRPIRVLSLFDGIATGYLVLKELGIKVGKYVASEVCEESIAVGTVKHEGNIKYVNDVRNITKKNIEEWGPFDLVIGGSPCNDLSNVNPARKGLYEGTGRLFFEFYHLLNYSRPKEGDDRPFFWMFENVVAMKVGDKRDISRFLECNPVMIDAIKVSAAHRARYFWGNLPGMNRIFGFPVHYTDVSNMGRGARQKLLGRSWSVPVIRHLFAPLKDYFACE

SEQ ID NO: 25066 - protein, 387 aa, Homo sapiens
  Payload ID: 4956
  Gene Symbol: DNMT3L
  Gene Name: DNA (cytosine-5-)-methyltransferase 3-like
  Uniprot ID: Q9UJW3
  ENSP ID: ENSP00000270172
MAAIPALDPEAEPSMDVILVGSSELSSSVSPGTGRDLIAYEVKANQRNIEDICICCGSLQVHTQHPLFEGGICAPCKDKFLDALFLYDDDGYQSYCSICCSGETLLICGNPDCTRCYCFECVDSLVGPGTSGKVHAMSNWVCYLCLPSSRSGLLQRRRKWRSQLKAFYDRESENPLEMFETVPVWRRQPVRVLSLFEDIKKELTSLGFLESGSDPGQLKHVVDVTDTVRKDVEEWGPFDLVYGATPPLGHTCDRPPSWYLFQFHRLLQYARPKPGSPRPFFWMFVDNLVLNKEDLDVASRFLEMEPVTIPDVHGGSLQNAVRVWSNIPAIRSSRHWALVSEEELSLLAQNKQSSKLAAKWPTKLVKNCFLPLREYFKYFSTELTSSL

SEQ ID NO: 25067 - protein, 288 aa, Homo sapiens
  Payload ID: 4956
  Gene Symbol: DNMT3L
  Gene Name: DNA (cytosine-5-)-methyltransferase 3-like
  ENSP ID: ENSP00000400242
MAAIPALDPEAEPSMDVILVGSSELSSSVSPGTGRDICICCGSLQVHTQHPLFEGGICAPCKDKFLDALFLYDDDGYQSYCSICCSGETLLICGNPDCTRCYCFECVDSLVGPGTSGKVHAMSNWVCYLCLPSSRSGLLQRRRKWRSQLKAFYDRESENPLEMFETVPVWRRQPVRVLSLFEDIKKELTSLGFLESGSDPGQLKHVVDVTDTVRKDVEEWGPFDLVYGATPPLGHTCDRPPSWYLFQFHRLLQYARPKPGSPRPFFWMFVDNLVLNKEDLDVASRFLE

SEQ ID NO: 25068 - protein, 181 aa, Homo sapiens
  Payload ID: 4956
  Gene Symbol: DNMT3L
  Gene Name: DNA (cytosine-5-)-methyltransferase 3-like
  ENSP ID: ENSP00000411608
  MOD_RES (1)..(1): Any amino acid
XAPPSGLPVCLFPTLGLPGGGGVHAPLWPQHWAGLHCCWRDRGRGIPQTQAGWYLFQFHRLLQYARPKPGSPRPFFWMFVDNLVLNKEDLDVASRFLEMEPVTIPDVHGGSLQNAVRVWSNIPAIRSRHWALVSEEELSLLAQNKQSSKLAAKWPTKLVKNCFLPLREYFKYFSTELTSSL

SEQ ID NO: 25069 - protein, 386 aa, Homo sapiens
  Payload ID: 4956
  Gene Symbol: DNMT3L
  Gene Name: DNA (cytosine-5-)-methyltransferase 3-like
  Uniprot ID: Q9UJW3
  ENSP ID: ENSP00000486001
MAAIPALDPEAEPSMDVILVGSSELSSSVSPGTGRDLIAYEVKANQRNIEDICICCGSLQVHTQHPLFEGGICAPCKDKFLDALFLYDDDGYQSYCSICCSGETLLICGNPDCTRCYCFECVDSLVGPGTSGKVHAMSNWVCYLCLPSSRSGLLQRRRKWRSQLKAFYDRESENPLEMFETVPVWRRQPVRVLSLFEDIKKELTSLGFLESGSDPGQLKHVVDVTDTVRKDVEEWGPFDLVYGATPPLGHTCDRPPSWYLFQFHRLLQYARPKPGSPRPFFWMFVDNLVLNKEDLDVASRFLEMEPVTIPDVHGGSLQNAVRVWSNIPAIRSRHWALVSEEELSLLAQNKQSSKLAAKWPTKLVKNCFLPLREYFKYFSTELTSSL

SEQ ID NO: 25070 - protein, 1040 aa, Homo sapiens
  Payload ID: 4957
  Gene Symbol: DCLRE1A
  Gene Name: DNA cross-link repair 1A
  Uniprot ID: Q6PJP8
  ENSP ID: ENSP00000355185
MLEDISEEDIWEYKSKRKPKRVDPNNGSKNILKSVEKATDGKYQSKRSRNRKRAAEAKEVKDHEVPLGNAGCQTSVASSQNSSCGDGIQQTQDKETTPGKLCRTQKSQHVSPKIRPVYDGYCPNCQMPFSSLIGQTPRWHVFECLDSPPRSETECPDGLLCTSTIPFHYKRYTHFLLAQSRAGDHPFSSPSPASGGSFSETKSGVLCSLEERWSSYQNQTDNSVSNDPLLMTQYFKKSPSLTEASEKISTHIQTSQQALQFTDFVENDKLVGVALRLANNSEHINLPLPENDFSDCEISYSPLQSDEDTHDIDEKPDDSQEQLFFTESSKDGSLEEDDDSCGFFKKRHGPLLKDQDESCPKVNSFLTRDKYDEGLYRFNSLNDLSQPISQNNESTLPYDLACTGGDFVLFPPALAGKLAASVHQATKAKPDEPEFHSAQSNKQKQVIEESSVYNQVSLPLVKSLMLKPFESQVEGYLSSQPTQNTIRKLSSENLNAKNNTNSACFCRKALEGVPVGKATILNTENLSSTPAPKYLKILPSGLKYNARHPSTKVMKQMDIGVYFGLPPKRKEEKLLGESALEGINLNPVPSPNQKRSSQCKRKAEKSLSDLEFDASTLHESQLSVELSSERSQRQKKRCRKSNSLQEGACQKRSDHLINTESEAVNLSKVKVFTKSAHGGLQRGNKKIPESSNVGGSRKKTCPFYKKIPGTGFTVDAFQYGVVEGCTAYFLTHFHSDHYAGLSKHFTFPVYCSEITGNLLKNKLHVQEQYIHPLPLDTECIVNGVKVVLLDANHCPGAVMILFYLPNGTVILHTGDFRADPSMERSLLADQKVHMLYLDTTYCSPEYTFPSQQEVIRFAINTAFEAVTLNPHALVVCGTYSIGKEKVFLAIADVLGSKVGMSQEKYKTLQCLNIPEINSLITTDMCSSLVHLLPMMQINFKGLQSHLKKCGGKYNQILAFRPTGWTHSNKFTRIADVIPQTKGNISIYGIPYSEHSSYLEMKRFVQWLKPQKIIPTVNVGTWKSRSTMEKYFREWKLEAGY

SEQ ID NO: 25071 - protein, 1040 aa, Homo sapiens; identical to SEQ ID NO: 25070
  Payload ID: 4957
  Gene Symbol: DCLRE1A
  Gene Name: DNA cross-link repair 1A
  Uniprot ID: Q6PJP8
  ENSP ID: ENSP00000358311

SEQ ID NO: 25072 - protein, 532 aa, Homo sapiens
  Payload ID: 4958
  Gene Symbol: DCLRE1B
  Gene Name: DNA cross-link repair 1B
  Uniprot ID: Q9H816
  ENSP ID: ENSP00000358576
MNGVLIPHTPIAVDFWSLRRAGTARLFFLSHMHSDHTVGLSSTWARPLYCSPITAHLLHRHLQVSKQWIQALEVGESHVLPLDEIGQETMTVTLLDANHCPGSVMFLFEGYFGTILYTGDFRYTPSMLKEPALTLGKQIHTLYLDNTNCNPALVLPSRQEAAHQIVQLIRKHPQHNIKIGLYSLGKESLLEQLALEFQTWVVLSPRRLELVQLLGLADVFTVEEKAGRIHAVDHMEICHSNMLRWNQTHPTIAILPTSRKIHSSHPDIHVIPYSDHSSYSELRAFVAALKPCQVVPIVSRRPCGGFQDSLSPRISVPLIPDSVQQYMSSSSRKPSLLWLLERRLKRPRTQGVVFESPEESADQSQADRDSKKAKKEKLSPWPADLEKQPSHHPLRIKKQLFPDLYSKEWNKAVPFCESQKRVTMLTAPLGFSVHLRSTDEEFISQKTREEIGLGSPLVPMGDDDGGPEATGNQSAWMGHGSPLSHSSKGTPLLATEFRGLALKYLLTPVNFFQAGYSSRRFDQQVEKYHKPC

SEQ ID NO: 25073 - protein, 577 aa, Homo sapiens
  Payload ID: 4959
  Gene Symbol: DCLRE1C
  Gene Name: DNA cross-link repair 1C
  Uniprot ID: Q96SD1
  ENSP ID: ENSP00000350349
MKHQERFLFQGNNGTVLYTGDFRLAQGEAARMELLHSGGRVKDIQSVYLDTTFCDPRFYQIPSREECLSGVLELVRSWITRSPYHVVWLNCKAAYGYEYLFTNLSEELGVQVHVNKLDMFRNMPEILHHLTTDRNTQIHACRHPKAEEYFQWSKLPCGITSRNRIPLHIISIKPSTMWFGERSRKTNVIVRTGESSYRACFSFHSSYSEIKDFLSYLCPVNAYPNVIPVGTTMDKVVEILKPLCRSSQSTEPKYKPLGKLKRARTVHRDSEEEDDYLFDDPLPIPLRHKVPYPETFHPEVFSMTAVSEKQPEKLRQTPGCCRAECMQSSRFTNFVDCEESNSESEEEVGIPASLQGDLGSVLHLQKADGDVPQWEVFFKRNDEITDESLENFPSSTVAGGSQSPKLFSDSDGESTHISSQNSSQSTHITEQGSQGWDSQSDTVLLSSQERNSGDITSLDKADYRPTIKENIPASLMEQNVICPKDTYSDLKSRDKDVTIVPSTGEPTTLSSETHIPEEKSLLNLSTNADSQSSSDFEVPSTPEAELPKREHLQYLYEKLATGESIAVKKRKCSLLDT

SEQ ID NO: 25074 - protein, 84 aa, Homo sapiens
  Payload ID: 4959
  Gene Symbol: DCLRE1C
  Gene Name: DNA cross-link repair 1C
  ENSP ID: ENSP00000367487
MFLFQGNNGTVLYTGDFRLAQGEAARMELLHSGGRVKDIQSVYLDTTFCDPRFYQIPSREECLSGVLELVRSWITRSPYHVVWL

SEQ ID NO: 25075 - protein, 345 aa, Homo sapiens
  Payload ID: 4959
  Gene Symbol: DCLRE1C
  Gene Name: DNA cross-link repair 1C
  ENSP ID: ENSP00000367488
MDKVVEILKPLCRSSQSTEPKYKPLGKLKRARTVHRDSEEEDDYLFDDPLPIPLRHKVPYPETFHPEVFSMTAVSEKQPEKLRQTPGCCRAECMQSSRFTNFVDCEESNSESEEEVGIPASLQGDLGSVLHLQKADGDVPQWEVFFKRNDEITDESLENFPSSTVAGGSQSPKLFSDSDGESTHISSQNSSQSTHITEQGSQGWDSQSDTVLLSSQERNSGDITSLDKADYRPTIKENIPASLMEQNVICPKDTYSDLKSRDKDVTIVPSTGEPTTLSSETHIPEEKSLLNLSTNADSQSSSDFEVPSTPEAELPKREHLQYLYEKLATGESIAVKKRKCSLLDT

SEQ ID NO: 25076 - protein, 577 aa, Homo sapiens; identical to SEQ ID NO: 25073
  Payload ID: 4959
  Gene Symbol: DCLRE1C
  Gene Name: DNA cross-link repair 1C
  Uniprot ID: Q96SD1
  ENSP ID: ENSP00000367492

SEQ ID NO: 25077 - protein, 577 aa, Homo sapiens; identical to SEQ ID NO: 25073
  Payload ID: 4959
  Gene Symbol: DCLRE1C
  Gene Name: DNA cross-link repair 1C
  Uniprot ID: Q96SD1
  ENSP ID: ENSP00000367496

SEQ ID NO: 25078 - protein, 572 aa, Homo sapiens
  Payload ID: 4959
  Gene Symbol: DCLRE1C
  Gene Name: DNA cross-link repair 1C
  Uniprot ID: Q96SD1
  ENSP ID: ENSP00000367502
MFLFQGNNGTVLYTGDFRLAQGEAARMELLHSGGRVKDIQSVYLDTTFCDPRFYQIPSREECLSGVLELVRSWITRSPYHVVWLNCKAAYGYEYLFTNLSEELGVQVHVNKLDMFRNMPEILHHLTTDRNTQIHACRHPKAEEYFQWSKLPCGITSRNRIPLHIISIKPSTMWFGERSRKTNVIVRTGESSYRACFSFHSSYSEIKDFLSYLCPVNAYPNVIPVGTTMDKVVEILKPLCRSSQSTEPKYKPLGKLKRARTVHRDSEEEDDYLFDDPLPIPLRHKVPYPETFHPEVFSMTAVSEKQPEKLRQTPGCCRAECMQSSRFTNFVDCEESNSESEEEVGIPASLQGDLGSVLHLQKADGDVPQWEVFFKRNDEITDESLENFPSSTVAGGSQSPKLFSDSDGESTHISSQNSSQSTHITEQGSQGWDSQSDTVLLSSQERNSGDITSLDKADYRPTIKENIPASLMEQNVICPKDTYSDLKSRDKDVTIVPSTGEPTTLSSETHIPEEKSLLNLSTNADSQSSSDFEVPSTPEAELPKREHLQYLYEKLATGESIAVKKRKCSLLDT

SEQ ID NO: 25079 - protein, 572 aa, Homo sapiens; identical to SEQ ID NO: 25078
  Payload ID: 4959
  Gene Symbol: DCLRE1C
  Gene Name: DNA cross-link repair 1C
  Uniprot ID: Q96SD1
  ENSP ID: ENSP00000367503

SEQ ID NO: 25080 - protein, 572 aa, Homo sapiens; identical to SEQ ID NO: 25078
  Payload ID: 4959
  Gene Symbol: DCLRE1C
  Gene Name: DNA cross-link repair 1C
  Uniprot ID: Q96SD1
  ENSP ID: ENSP00000367506

SEQ ID NO: 25081 - protein, 692 aa, Homo sapiens
  Payload ID: 4959
  Gene Symbol: DCLRE1C
  Gene Name: DNA cross-link repair 1C
  Uniprot ID: Q96SD1
  ENSP ID: ENSP00000367527
MSSFEGQMAEYPTISIDRFDRENLRARAYFLSHCHKDHMKGLRAPTLKRRLECSLKVYLYCSPVTKELLLTSPKYRFWKKRIISIEIETPTQISLVDEASGEKEEIVVTLLPAGHCPGSVMFLFQGNNGTVLYTGDFRLAQGEAARMELLHSGGRVKDIQSVYLDTTFCDPRFYQIPSREECLSGVLELVRSWITRSPYHVVWLNCKAAYGYEYLFTNLSEELGVQVHVNKLDMFRNMPEILHHLTTDRNTQIHACRHPKAEEYFQWSKLPCGITSRNRIPLHIISIKPSTMWFGERSRKTNVIVRTGESSYRACFSFHSSYSEIKDFLSYLCPVNAYPNVIPVGTTMDKVVEILKPLCRSSQSTEPKYKPLGKLKRARTVHRDSEEEDDYLFDDPLPIPLRHKVPYPETFHPEVFSMTAVSEKQPEKLRQTPGCCRAECMQSSRFTNFVDCEESNSESEEEVGIPASLQGDLGSVLHLQKADGDVPQWEVFFKRNDEITDESLENFPSSTVAGGSQSPKLFSDSDGESTHISSQNSSQSTHITEQGSQGWDSQSDTVLLSSQERNSGDITSLDKADYRPTIKENIPASLMEQNVICPKDTYSDLKSRDKDVTIVPSTGEPTTLSSETHIPEEKSLLNLSTNADSQSSSDFEVPSTPEAELPKREHLQYLYEKLATGESIAVKKRKCSLLDT

SEQ ID NO: 25082 - protein, 434 aa, Homo sapiens
  Payload ID: 4959
  Gene Symbol: DCLRE1C
  Gene Name: DNA cross-link repair 1C
  Uniprot ID: Q96SD1
  ENSP ID: ENSP00000367538
MSSFEGQMAEYPTISIDRFDRENLRARAYFLSHCHKDHMKGLRAPTLKRRLECSLKVYLYCSPVTKELLLTSPKYRFWKKRIISIEIETPTQISLVDEASGEKEEIVVTLLPAGHCPGSVMFLFQGNNGTVLYTGDFRLAQGEAARMELLHSGGRVKDIQSVYLDTTFCDPRFYQIPSREECLSGVLELVRSWITRSPYHVVWLNCKAAYGYEYLFTNLSEELGVQVHVNKLDMFRNMPEILHHLTTDRNTQIHACRHPKAEEYFQWSKLPCGITSRNRIPLHIISIKPSTMWFGERSRKTNVIVRTGESSYRACFSFHSSYSEIKDFLSYLCPVNAYPNVIPVGTTMDKVVEILKPLCRSSQSTEPKYKPLGKLKRARTVHRDSGSHSVTQARMRWCHHDSLYPLTPGIKRSSCLSLLTSWITGAYRHAQLMI

SEQ ID NO: 25083 - protein, 572 aa, Homo sapiens; identical to SEQ ID NO: 25078
  Payload ID: 4959
  Gene Symbol: DCLRE1C
  Gene Name: DNA cross-link repair 1C
  Uniprot ID: Q96SD1
  ENSP ID: ENSP00000380030

SEQ ID NO: 25084 - protein, 117 aa, Homo sapiens
  Payload ID: 4959
  Gene Symbol: DCLRE1C
  Gene Name: DNA cross-link repair 1C
  ENSP ID: ENSP00000391428
MELLHSGGRVKDIQSVYLDTTFCDPRFYQIPSREECLSGVLELVRSWITRSPYHVVWLNCKAAYGYEYLFTNLSEELGVQVHVNKLDMFRNMPEILHHLTTDRNTQIHACRHPKAEE

SEQ ID NO: 25085 - protein, 57 aa, Homo sapiens
  Payload ID: 4959
  Gene Symbol: DCLRE1C
  Gene Name: DNA cross-link repair 1C
  ENSP ID: ENSP00000413180
MKHQERFLFQGNNGTVLYTGDFRLAQGEAARMELLHSGGRVKDIQSVYLDTTFCDPR

SEQ ID NO: 25086 - protein, 998 aa, Homo sapiens
  Payload ID: 4960
  Gene Symbol: DDIAS
  Gene Name: DNA damage-induced apoptosis suppressor
  Uniprot ID: Q8IXT1
  ENSP ID: ENSP00000329930
MNRRRKFLLASVLALQNSSFIYPSCQKCFSRIILVSKRSNCPKCGSTGESGNANYRYKLSLKVAESNKLFVITVFGSCLDTFFGLTATGLHRYIQDPNKIPETLDNDTTQNLLTKAVETCFVGQSFIFGVTNFENQPGQGSDASNFLQQCSDHKRKAKALVACQIVLPDPGIAGFTVIDYFHQLLQTFNFRKLQCDSQAPNNHLLALDHSNSDLSSIYTSDSTSDFFKSCSKDTFSKFWQPSLEFTCIVSQLTDNDDFSASEQSKAFGTLQQNRKSISIAEATGSSSCHDPIQDSWSLVSYMDKKSTAEKLGKELGLQAKELSAVHSSHHEIGVNDSNLFSLEMREPLESSNTKSFHSAVEIKNRSQHELPCFQHHGIDTPTSLQKRSACCPPSLLRLEETASSSQDGDPQIWDDLPFSESLNKFLAVLESEIAVTQADVSSRKHHVDNDIDKFHADHSRLSVTPQRTTGALHTPPIALRSSQVIVKANCSKDDFLFNCKGNLSPSVEKESQPDNKVEAVSVNHNGRDMSEYFLPNPYLSALSSSSKDLETIVTLKKTIRISPHRESDHSSLNNKYLNGCGEISVSEMNEKLTTLCYRKYNDVSDLCKLENKQYCRWSKNQDDSFTICRKLTYPLETLCNSPNRSTNTLKEMPWGHINNNVTQSYSIGYEGSYDASADLFDDIAKEMDIATEITKKSQDILLKWGTSLAESHPSESDFSLRSLSEDFIQPSQKLSLQSLSDSRHSRTCSPTPHFQSDSEYNFENSQDFVPCSQSTPISGFHQTRIHGINRAFKKPVFYSDLDGNYEKIRIFPENDKQQASPSCPKNIKTPSQKIRSPIVSGVSQPDVFNHYPFAECHETDSDEWVPPTTQKIFPSDMLGFQGIGLGKCLAAYHFPDQQELPRKKLKHIRQGTNKGLIKKKLKNMLAAVVTKKKTHKYNCKSSGWISKCPDIQVLAAPQLHPILGPDSCSEVKCCLPFSEKGPPSVCETRSAWSPELFS

SEQ ID NO: 25087 - protein, 225 aa, Homo sapiens
  Payload ID: 4960
  Gene Symbol: DDIAS
  Gene Name: DNA damage-induced apoptosis suppressor
  ENSP ID: ENSP00000431206
MYQMSTLKSNKVIFQLKKNNFHQFRFFKRFIWSFALVAQAEVPWCNLGSLQPPHPRPRCEHMNRRRKFLLASVLALQNSSFIYPSCQKCFSRIILVSKRSNCPKCGSTGESGNANYRYKLSLKVAESNKLFVITVFGSCLDTFFGLTATGLHRYIQDPNKIPETLDNDTTQNLLTKAVETCFVGQSFIFGVTNFENQPGQGSDASNFLQQCSDHKRKAKALVACQ

SEQ ID NO: 25088 - protein, 66 aa, Homo sapiens
  Payload ID: 4960
  Gene Symbol: DDIAS
  Gene Name: DNA damage-induced apoptosis suppressor
  ENSP ID: ENSP00000431234
MNRRRKFLLASVLALQNSSFIYPSCQKCFSRIILVSKRILKTNLDKVQMPVTSYSNALTTKEKPKH

SEQ ID NO: 25089 - protein, 123 aa, Homo sapiens
  Payload ID: 4960
  Gene Symbol: DDIAS
  Gene Name: DNA damage-induced apoptosis suppressor
  ENSP ID: ENSP00000432871
MNRRRKFLLASVLALQNSSFIYPSCQKCFSRIILVSKRSNCPKCGSTGESGNANYRYKLSLKVAESNKLFVITVFGSCLDTFFGLTATGLHRYIQDPNKIPETLDNDTTQNLLTKAVETCFVG

SEQ ID NO: 25090 - protein, 75 aa, Homo sapiens
  Payload ID: 4960
  Gene Symbol: DDIAS
  Gene Name: DNA damage-induced apoptosis suppressor
  ENSP ID: ENSP00000433306
MNRRRKFLLASVLALQNSSFIYPSCQKCFSRIILVSKRSNCPKCGSTGESGNANYRYKLSLKVAESNKLFVITVF

SEQ ID NO: 25091 - protein, 76 aa, Homo sapiens
  Payload ID: 4960
  Gene Symbol: DDIAS
  Gene Name: DNA damage-induced apoptosis suppressor
  ENSP ID: ENSP00000434427
MNRRRKFLLASVLALQNSSFIYPSCQKCFSRIILVSKRSNCPKCGSTGESGNANYRYKLSLKVAESNKLFVITVFG

SEQ ID NO: 25092 - protein, 998 aa, Homo sapiens; identical to SEQ ID NO: 25086
  Payload ID: 4960
  Gene Symbol: DDIAS
  Gene Name: DNA damage-induced apoptosis suppressor
  Uniprot ID: Q8IXT1
  ENSP ID: ENSP00000435421

SEQ ID NO: 25093 - protein, 178 aa, Homo sapiens
  Payload ID: 4960
  Gene Symbol: DDIAS
  Gene Name: DNA damage-induced apoptosis suppressor
  Uniprot ID: Q8IXT1
  ENSP ID: ENSP00000435424
MNRRRKFLLASVLALQNSSFIYPSCQKCFSRIILVSKRSNCPKCGSTGESGNANYRYKLSLKVAESNKLFVITVFGSCLDTFFGLTATGLHRYIQDPNKIPETLDNDTTQNLLTKAVETCFVGQSFIFGVTNFENQPGQGSDASNFLQQCSDHKRKAKALVACQIVLPDPATQDAKTK

SEQ ID NO: 25094 - protein, 120 aa, Homo sapiens
  Payload ID: 4960
  Gene Symbol: DDIAS
  Gene Name: DNA damage-induced apoptosis suppressor
  ENSP ID: ENSP00000436241
MNRRRKFLLASVLALQNSSFIYPSCQKCFSRIILVSKRSNCPKCGSTGESGNANYRYKLSLKVAESNKLFVITVFGSCLDTFFGLTATGLHRILKTNLDKVQMPVTSYSNALTTKEKPKH

SEQ ID NO: 25095 - protein, 120 aa, Homo sapiens; identical to SEQ ID NO: 25094
  Payload ID: 4960
  Gene Symbol: DDIAS
  Gene Name: DNA damage-induced apoptosis suppressor
  ENSP ID: ENSP00000436611

SEQ ID NO: 25096 - protein, 362 aa, Homo sapiens
  Payload ID: 4961
  Gene Symbol: DFFB
  Gene Name: DNA fragmentation factor, 40kDa, beta polypeptide (caspase-activated DNase)
  ENSP ID: ENSP00000339524
MLQKPKSVKLRALRSPRKFGVAGRSCQEVLRKGCLRFQLPERGSRLCLYEDGTELTEDYFPSVPDNAELVLLTLGQAWQGCEWQGLWRMCLLLDRHLLFVPLVADVSDIRRFLSAFHEPQVGLIQAAQQLLCDEQAPQRQRLLADLLHNVSQNIAAETRAEDPPWFEGLESRFQSKSGYLRYSCESRIRSYLREVSSYPSTVGAEAQEEFLRVLGSMCQRLRSMQYNGSYFDRGAKGGSRLCTPEGWFSCQGPFDMDSCLSRHSINPYSNRESRILFSTWNLDHIIEKKRTIIPTLVEAIKEQDGREVDWEYFYGLLFTSENLKLVHIVCHKKTTHKLNCDPSRIYKPQTRLKRKQPVRKRQ

SEQ ID NO: 25097 - protein, 116 aa, Homo sapiens
  Payload ID: 4961
  Gene Symbol: DFFB
  Gene Name: DNA fragmentation factor, 40kDa, beta polypeptide (caspase-activated DNase)
  Uniprot ID: O76075
  ENSP ID: ENSP00000343218
MLQKPKSVKLRALRSPRKFGVAGRSCQEVLRKGCLRFQLPERGSRLCLYEDGTELTEDYFPSVPDNAELVLLTLGQAWQGSVGVRARTKTRDTSSLSPGDCQALGNGGRCGQRLFL

SEQ ID NO: 25098 - protein, 82 aa, Homo sapiens
  Payload ID: 4961
  Gene Symbol: DFFB
  Gene Name: DNA fragmentation factor, 40kDa, beta polypeptide (caspase-activated DNase)
  ENSP ID: ENSP00000345906
MLQKPKSVKLRALRSPRKFGVAGRSCQEVLRKGCLRFQLPERGSRLCLYEDGTELTEDYFPSVPDNAELVLLTLGQAWQGCE

SEQ ID NO: 25099 - protein, 80 aa, Homo sapiens
  Payload ID: 4961
  Gene Symbol: DFFB
  Gene Name: DNA fragmentation factor, 40kDa, beta polypeptide (caspase-activated DNase)
  ENSP ID: ENSP00000367448
MLQKPKSVKLRALRSPRKFGVAGRSCQEVLRKGCLRFQLPERGSRLCLYEDGTELTEDYFPSVPDNAELVLLTLGQAWQG

SEQ ID NO: 25100 - protein, 338 aa, Homo sapiens
  Payload ID: 4961
  Gene Symbol: DFFB
  Gene Name: DNA fragmentation factor, 40kDa, beta polypeptide (caspase-activated DNase)
  Uniprot ID: O76075
  ENSP ID: ENSP00000367454
MLQKPKSVKLRALRSPRKFGVAGRSCQEVLRKGCLRFQLPERGSRLCLYEDGTELTEDYFPSVPDNAELVLLTLGQAWQGYVSDIRRFLSAFHEPQVGLIQAAQQLLCDEQAPQRQRLLADLLHNVSQNIAAETRAEDPPWFEGLESRFQSKSGYLRYSCESRIRSYLREVSSYPSTVGAEAQEEFLRVLGSMCQRLRSMQYNGSYFDRGAKGGSRLCTPEGWFSCQGPFDMDSCLSRHSINPYSNRESRILFSTWNLDHIIEKKRTIIPTLVEAIKEQDGREVDWEYFYGLLFTSENLKLVHIVCHKKTTHKLNCDPSRIYKPQTRLKRKQPVRKRQ

SEQ ID NO: 25101 - protein, 270 aa, Homo sapiens
  Payload ID: 4961
  Gene Symbol: DFFB
  Gene Name: DNA fragmentation factor, 40kDa, beta polypeptide (caspase-activated DNase)
  Uniprot ID: O76075
  ENSP ID: ENSP00000436775
MLQKPKSVKLRALRSPRKFGVAGRSCQEVLRKGCLRFQLPERGSRLCLYEDGTELTEDYFPSVPDNAELVLLTLGQAWQGYVSDIRRFLSAFHEPQVGLIQAAQQLLCDEQAPQRQRLLADLLHNVSQNIAAETRAEDPPWFEGLESRFQSKSGYLRYSCESRIRSYLREVSSYPSTVGAEAQEEFLRVLGSMCQRLRSMQYNGSYFDRGAKGGSRLCTPEGWFSCQGPFDMDSCLSRHSINPYSNRESRILFSTWNLDHIDGVLLCGPG

SEQ ID NO: 25102 - protein, 103 aa, Homo sapiens
  Payload ID: 4961
  Gene Symbol: DFFB
  Gene Name: DNA fragmentation factor, 40kDa, beta polypeptide (caspase-activated DNase)
  ENSP ID: ENSP00000462175
MLQKPKSVKLRALRSPRKFGVAGRSCQEVLRKGCLRFQLPERGSRLCLYEDGTELTEDYFPSVPDNAELVLLTLGQAWQGWFRHVSQDSLTLLGSSCPPALVS

SEQ ID NO: 25103 - protein, 78 aa, Homo sapiens
  Payload ID: 4961
  Gene Symbol: DFFB
  Gene Name: DNA fragmentation factor, 40kDa, beta polypeptide (caspase-activated DNase)
  ENSP ID: ENSP00000462770
  MOD_RES (1)..(1): Any amino acid
XIEKKRTIIPTLVEAIKEQDGREVDWEYFYGLLFTSENLKLVHIVCHKKTTHKLNCDPSRIYKPQTRLKRKQPVRKRQ

SEQ ID NO: 25104 - protein, 115 aa, Homo sapiens
  Payload ID: 4961
  Gene Symbol: DFFB
  Gene Name: DNA fragmentation factor, 40kDa, beta polypeptide (caspase-activated DNase)
  ENSP ID: ENSP00000463688
MLQKPKSVKLRALRSPRKFGVAGRSCQEVLRKGCLRFQLPERGSRLCLYEDGTELTEDYFPSVPDNAELVLLTLGQAWQGCEWQGLWRCERHQALPQCISRATGGAHPGRPAAAV

SEQ ID NO: 25105 - protein, 115 aa, Homo sapiens; identical to SEQ ID NO: 25104
  Payload ID: 4961
  Gene Symbol: DFFB
  Gene Name: DNA fragmentation factor, 40kDa, beta polypeptide (caspase-activated DNase)
  ENSP ID: ENSP00000463704

SEQ ID NO: 25106 - protein, 103 aa, Homo sapiens; identical to SEQ ID NO: 25102
  Payload ID: 4961
  Gene Symbol: DFFB
  Gene Name: DNA fragmentation factor, 40kDa, beta polypeptide (caspase-activated DNase)
  ENSP ID: ENSP00000486916

SEQ ID NO: 25107 - protein, 268 aa, Homo sapiens
  Payload ID: 4962
  Gene Symbol: DFFA
  Gene Name: DNA fragmentation factor, 45kDa, alpha polypeptide
  Uniprot ID: O00273
  ENSP ID: ENSP00000366235
MEVTGDAGVPESGEIRTLKPCLLRRNYSREQHGVAASCLEDLRSKACDILAIDKSLTPVTLVLAEDGTIVDDDDYFLCLPSNTKFVALASNEKWAYNNSDGGTAWISQESFDVDETDSGAGLKWKNVARQLKEDLSSIILLSEEDLQMLVDAPCSDLAQELRQSCATVQRLQHTLQQVLDQREEVRQSKQLLQLYLQALEKEGSLLSKQEESKAAFGEEVDAVDTGISRETSSDVALASHILTALREKQAPELSLSSQDLEVGGNQGH

SEQ ID NO: 25108 - protein, 331 aa, Homo sapiens
  Payload ID: 4962
  Gene Symbol: DFFA
  Gene Name: DNA fragmentation factor, 45kDa, alpha polypeptide
  Uniprot ID: O00273
  ENSP ID: ENSP00000366237
MEVTGDAGVPESGEIRTLKPCLLRRNYSREQHGVAASCLEDLRSKACDILAIDKSLTPVTLVLAEDGTIVDDDDYFLCLPSNTKFVALASNEKWAYNNSDGGTAWISQESFDVDETDSGAGLKWKNVARQLKEDLSSIILLSEEDLQMLVDAPCSDLAQELRQSCATVQRLQHTLQQVLDQREEVRQSKQLLQLYLQALEKEGSLLSKQEESKAAFGEEVDAVDTGISRETSSDVALASHILTALREKQAPELSLSSQDLELVTKEDPKALAVALNWDIKKTETVQEACERELALRLQQTQSLHSLRSISASKASPPGDLQNPKRARQDPT

SEQ ID NO: 25109 - protein, 159 aa, Homo sapiens
  Payload ID: 4962
  Gene Symbol: DFFA
  Gene Name: DNA fragmentation factor, 45kDa, alpha polypeptide
  ENSP ID: ENSP00000468395
MEVTGDAGVPESGEIRTLKPCLLRRNYSREQHGVAASCLEDLRSKACDILAIDKSLTPVTLVLAEDGTIVDDDDYFLCLPSNTKFVALASNEKWAYNNSDGGTAWISQESFDVDETDSGAGLKWKNVARQLKEDLSSIILLSEEDLQSPKLPLVRRWMQ

SEQ ID NO: 25110 - protein, 340 aa, Homo sapiens
  Payload ID: 4963
  Gene Symbol: DMC1
  Gene Name: DNA meiotic recombinase 1
  Uniprot ID: Q14565
  ENSP ID: ENSP00000216024
MKEDQVVAEEPGFQDEEESLFQDIDLLQKHGINVADIKKLKSVGICTIKGIQMTTRRALCNVKGLSEAKVDKIKEAANKLIEPGFLTAFEYSEKRKMVFHITTGSQEFDKLLGGGIESMAITEAFGEFRTGKTQLSHTLCVTAQLPGAGGYPGGKIIFIDTENTFRPDRLRDIADRFNVDHDAVLDNVLYARAYTSEHQMELLDYVAAKFHEEAGIFKLLIIDSIMALFRVDFSGRGELAERQQKLAQMLSRLQKISEEYNVAVFVTNQMTADPGATMTFQADPKKPIGGHILAHASTTRISLRKGRGELRIAKIYDSPEMPENEATFAITAGGIGDAKE

SEQ ID NO: 25111 - protein, 203 aa, Homo sapiens
  Payload ID: 4963
  Gene Symbol: DMC1
  Gene Name: DNA meiotic recombinase 1
  ENSP ID: ENSP00000391385
MKEDQVVAEEPGFQDEEESLFQDIDLLQKHGINVADIKKLKSVGICTIKGIQMTTRRALCNVKGLSEAKVDKIKEAANKLIEPGFLTAFEYSEKRKMVFHITTGSQEFDKLLGGGIESMAITEAFGEFRTGKTQLSHTLCGEHQMELLDYVAAKFHEEAGIFKLLIIDSIMALFRVDFSGRGELAERQQKLAQMLSRLQKISE

SEQ ID NO: 25112 - protein, 138 aa, Homo sapiens
  Payload ID: 4963
  Gene Symbol: DMC1
  Gene Name: DNA meiotic recombinase 1
  ENSP ID: ENSP00000410808
MKEDQVVAEEPGFQDEEESLFQDIDLLQKHGINVADIKKLKSVGICTIKGIQMTTRRALCNVKGLSEAKVDKIKEAANKLIEPGFLTAFEYSEKRKMVFHITTGSQEFDKLLGGGIESMAITEAFGEFRTGKTQLSHT

SEQ ID NO: 25113 - protein, 285 aa, Homo sapiens
  Payload ID: 4963
  Gene Symbol: DMC1
  Gene Name: DNA meiotic recombinase 1
  Uniprot ID: Q14565
  ENSP ID: ENSP00000412703
MKEDQVVAEEPGFQDEEESLFQDIDLLQKHGINVADIKKLKSVGICTIKGIQMTTRRALCNVKGLSEAKVDKIKEAANKLIEPGFLTAFEYSEKRKMVFHITTGSQEFDKLLGGGIESMAITEAFGEFRTGKTQLSHTLCGEHQMELLDYVAAKFHEEAGIFKLLIIDSIMALFRVDFSGRGELAERQQKLAQMLSRLQKISEEYNVAVFVTNQMTADPGATMTFQADPKKPIGGHILAHASTTRISLRKGRGELRIAKIYDSPEMPENEATFAITAGGIGDAKE

SEQ ID NO: 25114 - protein, 165 aa, Homo sapiens
  Payload ID: 4963
  Gene Symbol: DMC1
  Gene Name: DNA meiotic recombinase 1
  ENSP ID: ENSP00000477737
MKEDQVVAEEPGFQDEEESLFQDIDLLQKHGINVADIKKLKSVGICTIKGIQMTTRRALCNVKGLSEAKVDKIKEAANKLIEPGFLTAFEYSEKRKMVFHITTGSQEFDKLLGGGIESMAITEAFGEFRTGKTQLSHTLCVTAQLPGAGGYPGGKIIFIDTENTL

SEQ ID NO: 25115 - protein, 467 aa, Homo sapiens
  Payload ID: 4964
  Gene Symbol: DMAP1
  Gene Name: DNA methyltransferase 1 associated protein 1
  Uniprot ID: Q9NPF5
  ENSP ID: ENSP00000312697
MATGADVRDILELGGPEGDAASGTISKKDIINPDKKKSKKSSETLTFKRPEGMHREVYALLYSDKKDAPPLLPSDTGQGYRTVKAKLGSKKVRPWKWMPFTNPARKDGAMFFHWRRAAEEGKDYPFARFNKTVQVPVYSEQEYQLYLHDDAWTKAETDHLFDLSRRFDLRFVVIHDRYDHQQFKKRSVEDLKERYYHICAKLANVRAVPGTDLKIPVFDAGHERRRKEQLERLYNRTPEQVAEEEYLLQELRKIEARKKEREKRSQDLQKLITAADTTAEQRRTERKAPKKKLPQKKEAEKPAVPETAGIKFPDFKSAGVTLRSQRMKLPSSVGQKKIKALEQMLLELGVELSPTPTEELVHMFNELRSDLVLLYELKQACANCEYELQMLRHRHEALARAGVLGGPATPASGPGPASAEPAVTEPGLGPDPKDTIIDVVGAPLTPNSRKRRESASSSSSVKKAKKP

SEQ ID NO: 25116 - protein, 467 aa, Homo sapiens; identical to SEQ ID NO: 25115
  Payload ID: 4964
  Gene Symbol: DMAP1
  Gene Name: DNA methyltransferase 1 associated protein 1
  Uniprot ID: Q9NPF5
  ENSP ID: ENSP00000354697

SEQ ID NO: 25117 - protein, 467 aa, Homo sapiens; identical to SEQ ID NO: 25115
  Payload ID: 4964
  Gene Symbol: DMAP1
  Gene Name: DNA methyltransferase 1 associated protein 1
  Uniprot ID: Q9NPF5
  ENSP ID: ENSP00000361363

SEQ ID NO: 25118 - protein, 132 aa, Homo sapiens
  Payload ID: 4964
  Gene Symbol: DMAP1
  Gene Name: DNA methyltransferase 1 associated protein 1
  ENSP ID: ENSP00000361364
IINPDKKKSKKSSETLTFKRPEGMHREVYALLYSDKKDAPPLLPSDTGQGYRTVKAKLGSKKVRPWKWMPFTNPARKDGAMFFHWRRAAEEGKDYPFARFNKEYQLYLHDDAWTKAETDHLFDLSRRFDLRF

SEQ ID NO: 25119 - protein, 151 aa, Homo sapiens
  Payload ID: 4964
  Gene Symbol: DMAP1
  Gene Name: DNA methyltransferase 1 associated protein 1
  ENSP ID: ENSP00000400269
MATGADVRDILELGGPEGDAASGTISKKDIINPDKKKSKKSSETLTFKRPEGMHREVYALLYSDKNKGSCLLSRMQEDLKSFAPGHDFLAIGDAPPLLPSDTGQGYRTVKAKLGSKKVRPWKWMPFTNPARKDGAMFFHWRRAAEEGKDYP

SEQ ID NO: 25120 - protein, 237 aa, Homo sapiens
  Payload ID: 4964
  Gene Symbol: DMAP1
  Gene Name: DNA methyltransferase 1 associated protein 1
  ENSP ID: ENSP00000401099
MATGADVRDILELGGPEGDAASGTISKKDIINPDKKKSKKSSETLTFKRPEGMHREVYALLYSDKKDAPPLLPSDTGQGYRTVKAKLGSKKVRPWKWMPFTNPARKDGAMFFHWRRAAEEGKDYPFARFNKTVQVPVYSEQEYQLYLHDDAWTKAETDHLFDLSRRFDLRFVVIHDRYDHQQFKKRSVEDLKERYYHICAKLANVRAVPGTDLKIPVFDAGHERRRKEQLERLYNRT

SEQ ID NO: 25121 - protein, 285 aa, Homo sapiens
  Payload ID: 4964
  Gene Symbol: DMAP1
  Gene Name: DNA methyltransferase 1 associated protein 1
  ENSP ID: ENSP00000402494
MATGADVRDILELGGPEGDAASGTISKKDIINPDKKKSKKSSETLTFKRPEGMHREVYALLYSDKNKGSCLLSRMQEDLKSFAPGHDFLAIGDAPPLLPSDTGQGYRTVKAKLGSKKVRPWKWMPFTNPARKDGAMFFHWRRAAEEGKDYPFARFNKTVQVPVYSEQEYQLYLHDDAWTKAETDHLFDLSRRFDLRFVVIHDRYDHQQFKKRSVEDLKERYYHICAKLANVRAVPGTDLKIPVFDAGHERRRKEQLERLYNRTPEQVAEEEYLLQELRKIEARKK

SEQ ID NO: 25122 - protein, 302 aa, Homo sapiens
  Payload ID: 4964
  Gene Symbol: DMAP1
  Gene Name: DNA methyltransferase 1 associated protein 1
  ENSP ID: ENSP00000409200
MATGADVRDILELGGPEGDAASGTISKKDIINPDKKKSKKSSETLTFKRPEGMHREVYALLYSDKKDAPPLLPSDTGQGYRTVKAKLGSKKVRPWKWMPFTNPARKDGAMFFHWRRAAEEGKDYPFARFNKTVQVPVYSEQEYQLYLHDDAWTKAETDHLFDLSRRFDLRFVVIHDRYDHQQFKKRSVEDLKERYYHICAKLANVRAVPGTDLKIPVFDAGHERRRKEQLERLYNRTPEQVAEEEYLLQELRKIEARKKEREKRSQDLQKLITAADTTAEQRRTERKAPKKKLPQKKEAEKP

SEQ ID NO: 25123 - protein, 509 aa, Homo sapiens
  Payload ID: 4965
  Gene Symbol: DNTT
  Gene Name: DNA nucleotidylexotransferase
  Uniprot ID: P04053
  ENSP ID: ENSP00000360216
MDPPRASHLSPRKKRPRQTGALMASSPQDIKFQDLVVFILEKKMGTTRRAFLMELARRKGFRVENELSDSVTHIVAENNSGSDVLEWLQAQKVQVSSQPELLDVSWLIECIRAGKPVEMTGKHQLVVRRDYSDSTNPGPPKTPPIAVQKISQYACQRRTTLNNCNQIFTDAFDILAENCEFRENEDSCVTFMRAASVLKSLPFTIISMKDTEGIPCLGSKVKGIIEEIIEDGESSEVKAVLNDERYQSFKLFTSVFGVGLKTSEKWFRMGFRTLSKVRSDKSLKFTRMQKAGFLYYEDLVSCVTRAEAEAVSVLVKEAVWAFLPDAFVTMTGGFRRGKKMGHDVDFLITSPGSTEDEEQLLQKVMNLWEKKGLLLYYDLVESTFEKLRLPSRKVDALDHFQKCFLIFKLPRQRVDSDQSSWQEGKTWKAIRVDLVLCPYERRAFALLGWTGSRQFERDLRRYATHERKMILDNHALYDKTKRIFLKAESEEEIFAHLGLDYIEPWERNA

SEQ ID NO: 25124 - protein, 508 aa, Homo sapiens
  Payload ID: 4965
  Gene Symbol: DNTT
  Gene Name: DNA nucleotidylexotransferase
  Uniprot ID: P04053
  ENSP ID: ENSP00000486733
MDPPRASHLSPRKKRPRQTGALMASSPQDIKFQDLVVFILEKKMGTTRRAFLMELARRKGFRVENELSDSVTHIVAENNSGSDVLEWLQAQKVQVSSQPELLDVSWLIECIRAGKPVEMTGKHQLVVRRDYSDSTNPGPPKTPPIAVQKISQYACQRRTTLNNCNQIFTDAFDILAENCEFRENEDSCVTFMRAASVLKSLPFTIISMKDTEGIPCLGSKVKGIIEEIIEDGESSEVKAVLNDERYQSFKLFTSVFGVGLKTSEKWFRMGFRTLSKVRSDKSLKFTRMQKAGFLYYEDLVSCVTRAEAEAVSVLVKEAVWAFLPDAFVTMTGGFRRGKKMGHDVDFLITSPGSTEDEEQLLQKVMNLWEKKGLLLYYDLVESTFEKLRLPSRKVDALDHFQKCFLIFKLPRQRVDSDQSSWQEGKTWKAIRVDLVLCPYERRAFALLGWTGSRFERDLRRYATHERKMILDNHALYDKTKRIFLKAESEEEIFAHLGLDYIEPWERNA

SEQ ID NO: 25125 - protein, 393 aa, Homo sapiens
  Payload ID: 4966
  Gene Symbol: DSCC1
  Gene Name: DNA replication and sister chromatid cohesion 1
  Uniprot ID: Q9BVC3
  ENSP ID: ENSP00000322180
MKRTRDEVDATLQIAKLNAAELLPAVHCLGFGPGASGAAAGDFCLLELEPTLCQQLEDGHSLVIRGDKDEQAVLCSKDKTYDLKIADTSNMLLFIPGCKTPDQLKKEDSHCNIIHTEIFGFSNNYWELRRRRPKLKKLKKLLMENPYEGPDSQKEKDSNSSKYTTEDLLDQIQASEEEIMTQLQVLNACKIGGYWRILEFDYEMKLLNHVTQLVDSESWSFGKVPLNTCLQELGPLEPEEMIEHCLKCYGKKYVDEGEVYFELDADKICRAAARMLLQNAVKFNLAEFQEVWQQSVPEGMVTSLDQLKGLALVDRHSRPEIIFLLKVDDLPEDNQERFNSLFSLREKWTEEDIAPYIQDLCGEKQTIGALLTKYSHSSMQNGVKVYNSRRPIS

SEQ ID NO: 25126 - protein, 1060 aa, Homo sapiens
  Payload ID: 4967
  Gene Symbol: DNA2
  Gene Name: DNA replication helicase/nuclease 2
  Uniprot ID: P51530
  ENSP ID: ENSP00000351185
MEQLNELELLMEKSFWEEAELPAELFQKKVVASFPRTVLSTGMDNRYLVLAVNTVQNKEGNCEKRLVITASQSLENKELCILRNDWCSVPVEPGDIIHLEGDCTSDTWIIDKDFGYLILYPDMLISGTSIASSIRCMRRAVLSETFRSSDPATRQMLIGTVLHEVFQKAINNSFAPEKLQELAFQTIQEIRHLKEMYRLNLSQDEIKQEVEDYLPSFCKWAGDFMHKNTSTDFPQMQLSLPSDNSKDNSTCNIEVVKPMDIEESIWSPRFGLKGKIDVTVGVKIHRGYKTKYKIMPLELKTGKESNSIEHRSQVVLYTLLSQERRADPEAGLLLYLKTGQMYPVPANHLDKRELLKLRNQMAFSLFHRISKSATRQKTQLASLPQIIEEEKTCKYCSQIGNCALYSRAVEQQMDCSSVPIVMLPKIEEETQHLKQTHLEYFSLWCLMLTLESQSKDNKKNHQNIWLMPASEMEKSGSCIGNLIRMEHVKIVCDGQYLHNFQCKHGAIPVTNLMAGDRVIVSGEERSLFALSRGYVKEINMTTVTCLLDRNLSVLPESTLFRLDQEEKNCDIDTPLGNLSKLMENTFVSKKLRDLIIDFREPQFISYLSSVLPHDAKDTVACILKGLNKPQRQAMKKVLLSKDYTLIVGMPGTGKTTTICTLVRILYACGFSVLLTSYTHSAVDNILLKLAKFKIGFLRLGQIQKVHPAIQQFTEQEICRSKSIKSLALLEELYNSQLIVATTCMGINHPIFSRKIFDFCIVDEASQISQPICLGPLFFSRRFVLVGDHQQLPPLVLNREARALGMSESLFKRLEQNKSAVVQLTVQYRMNSKIMSLSNKLTYEGKLECGSDKVANAVINLRHFKDVKLELEFYADYSDNPWLMGVFEPNNPVCFLNTDKVPAPEQVEKGGVSNVTEAKLIVFLTSIFVKAGCSPSDIGIIAPYRQQLKIINDLLARSIGMVEVNTVDKYQGRDKSIVLVSFVRSNKDGTVGELLKDWRRLNVAITRAKHKLILLGCVPSLNCYPPLEKLLNHLNSEKLIIDLPSREHESLCHILGDFQRE

SEQ ID NO: 25127 - protein, 687 aa, Homo sapiens
  Payload ID: 4967
  Gene Symbol: DNA2
  Gene Name: DNA replication helicase/nuclease 2
  Uniprot ID: P51530
  ENSP ID: ENSP00000382132
MEQLNELELLMEKSFWEEAELPAELFQKKVVASFPRTVLSTGMDNRYLVLAVNTVQNKEGNCEKRLVITASQSLENKELCILRNDWCSVPVEPGDIIHLEGDCTSDTWIIDKDFGYLILYPDMLISGTSIASSIRCMRRAVLSETFRSSDPATRQMLIGTVLHEVFQKAINNSFAPEKLQELAFQTIQEIRHLKEMYRLNLSQDEIKQEVEDYLPSFCKWAGDFMHKNTSTDFPQMQLSLPSDNSKDNSTCNIEVVKPMDIEESIWSPRFGLKGKIDVTVGVKIHRGYKTKYKIMPLELKTGKESNSIEHRSQVVLYTLLSQERRADPEAGLLLYLKTGQMYPVPANHLDKRELLKLRNQMAFSLFHRISKSATRQKTQLASLPQIIEEEKTCKYCSQIGNCALYSRAVEQQMDCSSVPIVMLPKIEEETQHLKQTHLEYFSLWCLMLTLESQSKDNKKNHQNIWLMPASEMEKSGSCIGNLIRMEHVKIVCDGQYLHNFQCKHGAIPVTNLMAGDRVIVSGEERSLFALSRGYVKEINMTTVTCLLDRNLSVLPESTLFRLDQEEKNCDIDTPLGNLSKLMENTFVSKKLRDLIIDFREPQFISYLSSVLPHDAKDTVACILKGLNKPQRQAMKKVLLSKDYTLIVGMPGTGKTTTICTLVRFRRFIQLSSNLQSKKFADQSPLNP

SEQ ID NO: 25128 - protein, 687 aa, Homo sapiens; identical to SEQ ID NO: 25127
  Payload ID: 4967
  Gene Symbol: DNA2
  Gene Name: DNA replication helicase/nuclease 2
  Uniprot ID: P51530
  ENSP ID: ENSP00000382133

SEQ ID NO: 25129 - protein, 375 aa, Homo sapiens
  Payload ID: 4967
  Gene Symbol: DNA2
  Gene Name: DNA replication helicase/nuclease 2
  ENSP ID: ENSP00000389713
  MOD_RES (1)..(1): Any amino acid
XSAVDNILLKLAKFKIGFLRLGQIQKVHPAIQQFTEQEICRSKSIKSLALLEELYNSQLIVATTCMGINHPIFSRKIFDFCIVDEASQISQPICLGPLFFSRRFVLVGDHQQLPPLVLNREARALGMSESLFKRLEQNKSAVVQLTVQYRMNSKIMSLSNKLTYEGKLECGSDKVANAVINLRHFKDVKLELEFYADYSDNPWLMGVFEPNNPVCFLNTDKVPAPEQVEKGGVSNVTEAKLIVFLTSIFVKAGCSPSDIGIIAPYRQQLKIINDLLARSIGMVEVNTVDKYQGRDKSIVLVSFVRSNKDGTVGELLKDWRRLNVAITRAKHKLILLGCVPSLNCYPPLEKLLNHLNSEKLISFFFCIWSHLIALL

SEQ ID NO: 25130 - protein, 39 aa, Homo sapiens
  Payload ID: 4967
  Gene Symbol: DNA2
  Gene Name: DNA replication helicase/nuclease 2
  ENSP ID: ENSP00000450014
MEQLNELELLMEKSFWEEAELPAELTGVFFCRSGRGAVA

SEQ ID NO: 25131 - protein, 867 aa, Homo sapiens
  Payload ID: 4967
  Gene Symbol: DNA2
  Gene Name: DNA replication helicase/nuclease 2
  ENSP ID: ENSP00000450393
MEQLNELELLMEKSFWEEAELPAELFQKKVVASFPRTVLSTGMDNRYLVLAVNTVQNKEGNCEKRLVITASQSLENKELCILRNDWCSVPVEPGDIIHLEGDCTSDTWIIDKDFGYLILYPDMLISGTSIASSIRCMRRAVLSETFRSSDPATRQMLIGTVLHEVFQKAINNSFAPEKLQELAFQTIQEIRHLKEMYRLNLSQDEIKQEVEDYLPSFCKWAGDFMHKNTSTDFPQMQLSLPSDNSKDNSTCNIEVVKPMDIEESIWSPRFGLKGKIDVTVGVKIHRGYKTKYKIMPLELKTGKESNSIEHRSQVVLYTLLSQERRADPEAGLLLYLKTGQMYPVPANHLDKRELLKLRNQMAFSLFHRISKSATRQKTQLASLPQIIEEEKTCKYCSQIGNCALYSRAVEQQMDCSSVPIVMLPKIEEETQHLKQTHLEYFSLWCLMLTLESQSKDNKKNHQNIWLMPASEMEKSGSCIGNLIRMEHVKIVCDGQYLHNFQCKHGAIPVTNLMAGDRVIVSGEERSLFALSRGYVKEINMTTVTCLLDRNLSVLPESTLFRLDQEEKNCDIDTPLGNLSKLMENTFVSKKLRDLIIDFREPQFISYLSSVLPHDAKDTVACILKGLNKPQRQAMKKVLLSKDYTLIVGMPGTGKTTTICTLVPAPEQVEKGGVSNVTEAKLIVFLTSIFVKAGCSPSDIGIIAPYRQQLKIINDLLARSIGMVEVNTVDKYQGRDKSIVLVSFVRSNKDGTVGELLKDWRRLNVAITRAKHKLILLGCVPSLNCYPPLEKLLNHLNSEKLISLIFHQENMKVFATYWVTFKENKTLFPLPFHTRAVSPLASAHTENSITIQNLMQYLCFKAQVYRKL

SEQ ID NO: 25132 - protein, 396 aa, Homo sapiens
  Payload ID: 4968
  Gene Symbol: DDI1
  Gene Name: DNA-damage inducible 1 homolog 1
  Uniprot ID: Q8WTU0
  ENSP ID: ENSP00000302805
MLITVYCVRRDLSEVTFSLQVSPDFELRNFKVLCEAESRVPVEEIQIIHMERLLIEDHCSLGSYGLKDGDIVVLLQKDNVGPRAPGRAPNQPRVDFSGIAVPGTSSSRPQHPGQQQQRTPAAQRSQGLASGEKVAGLQGLGSPALIRSMLLSNPHDLSLLKERNPPLAEALLSGSLETFSQVLMEQQREKALREQERLRLYTADPLDREAQAKIEEEIRQQNIEENMNIAIEEAPESFGQVTMLYINCKVNGHPLKAFVDSGAQMTIMSQACAERCNIMRLVDRRWAGVAKGVGTQRIIGRVHLAQIQIEGDFLQCSFSILEDQPMDMLLGLDMLRRHQCSIDLKKNVLVIGTTGTQTYFLPEGELPLCSRMVSGQDESSDKEITHSVMDSGRKEH

SEQ ID NO: 25133 - protein, 399 aa, Homo sapiens
  Payload ID: 4969
  Gene Symbol: DDI2
  Gene Name: DNA-damage inducible 1 homolog 2
  Uniprot ID: Q5TDH0
  ENSP ID: ENSP00000417748
MLLTVYCVRRDLSEVTFSLQVDADFELHNFRALCELESGIPAAESQIVYAERPLTDNHRSLASYGLKDGDVVILRQKENADPRPPVQFPNLPRIDFSSIAVPGTSSPRQRQPPGTQQSHSSPGEITSSPQGLDNPALLRDMLLANPHELSLLKERNPPLAEALLSGDLEKFSRVLVEQQQDRARREQERIRLFSADPFDLEAQAKIEEDIRQQNIEENMTIAMEEAPESFGQVVMLYINCKVNGHPVKAFVDSGAQMTIMSQACAERCNIMRLVDRRWAGIAKGVGTQKIIGRVHLAQVQIEGDFLPCSFSILEEQPMDMLLGLDMLKRHQCSIDLKKNVLVIGTTGSQTTFLPEGELPECARLAYGAGREDVRPEEIADQELAEALQKSAEDAERQKP

SEQ ID NO: 25134 - protein, 103 aa, Homo sapiens
  Payload ID: 4969
  Gene Symbol: DDI2
  Gene Name: DNA-damage inducible 1 homolog 2
  ENSP ID: ENSP00000448878
  MOD_RES (1)..(1): Any amino acid
XEITSSPQGLDNPALLRDMLLANPHELSLLKERNPPLAEALLSGDLEKFSRVLVEQQQDRARREQERIRLFSADPFDLEAQAKIEEDIRCPDDYHEPSLCRKV

SEQ ID NO: 25135 - protein, 99 aa, Homo sapiens
  Payload ID: 4969
  Gene Symbol: DDI2
  Gene Name: DNA-damage inducible 1 homolog 2
  ENSP ID: ENSP00000449475
QQSHSSPGEITSSPQGLDNPALLRDMLLANPHELSLLKERNPPLAEALLSGDLEKFSRVLVEQQQDRARREQERIRLFSADPFDLEAQAKIEEDIRRTP

SEQ ID NO: 25136 - protein, 238 aa, Homo sapiens
  Payload ID: 4970
  Gene Symbol: DRAM1
  Gene Name: DNA-damage regulated autophagy modulator 1
  Uniprot ID: Q8N682
  ENSP ID: ENSP00000258534
MLCFLRGMAFVPFLLVTWSSAAFIISYVVAVLSGHVNPFLPYISDTGTTPPESGIFGFMINFSAFLGAATMYTRYKIVQKQNQTCYFSTPVFNLVSLVLGLVGCFGMGIVANFQELAVPVVHDGGALLAFVCGVVYTLLQSIISYKSCPQWNSLSTCHIRMVISAVSCAAVIPMIVCASLISITKLEWNPREKDYVYHVVSAICEWTVAFGFIFYFLTFIQDFQSVTLRISTEINGDI

SEQ ID NO: 25137 - protein, 128 aa, Homo sapiens
  Payload ID: 4970
  Gene Symbol: DRAM1
  Gene Name: DNA-damage regulated autophagy modulator 1
  Uniprot ID: Q8N682
  ENSP ID: ENSP00000445827
MLCFLRGMAFVPFLLVTWSSAAFIISYVVAVLSGHVNPFLPYISDTGTTPPESGIFGFMINFSAFLGAATMYTRYKIVQKQNQTCYFSTPVFNLVSLVLGLVGCFGMGIVANFQSVTLRISTEINGDI

SEQ ID NO: 25138 - protein, 46 aa, Homo sapiens
  Payload ID: 4970
  Gene Symbol: DRAM1
  Gene Name: DNA-damage regulated autophagy modulator 1
  ENSP ID: ENSP00000447171
  MOD_RES (1)..(1): Any amino acid
XFLRGMAFVPFLLVTWSSAAFIISYVVAVLSGHVNPFLPYISYFLR

SEQ ID NO: 25139 - protein, 53 aa, Homo sapiens
  Payload ID: 4970
  Gene Symbol: DRAM1
  Gene Name: DNA-damage regulated autophagy modulator 1
  ENSP ID: ENSP00000447906
  MOD_RES (1)..(1): Any amino acid
XHIRMVISAVSCAAVIPMIVCASLISITKLEWNPREKVIQELMATMVTHYEPH

SEQ ID NO: 25140 - protein, 114 aa, Homo sapiens
  Payload ID: 4970
  Gene Symbol: DRAM1
  Gene Name: DNA-damage regulated autophagy modulator 1
  ENSP ID: ENSP00000448075
MLCFLRGMAFVPFLLVTWSSAAFIISYVVAVLSGHVNPFLPYISDTGTTPPESGIFGFMINFSAFLGAATMYTRYKIVQKQNQTCYFSTPVFNLVSLVLGLVGCFGMGIVANFQ

SEQ ID NO: 25141 - protein, 266 aa, Homo sapiens
  Payload ID: 4971
  Gene Symbol: DRAM2
  Gene Name: DNA-damage regulated autophagy modulator 2
  Uniprot ID: Q6UX65
  ENSP ID: ENSP00000286692
MWWFQQGLSFLPSALVIWTSAAFIFSYITAVTLHHIDPALPYISDTGTVAPEKCLFGAMLNIAAVLCIATIYVRYKQVHALSPEENVIIKLNKAGLVLGILSCLGLSIVANFQKTTLFAAHVSGAVLTFGMGSLYMFVQTILSYQMQPKIHGKQVFWIRLLLVIWCGVSALSMLTCSSVLHSGNFGTDLEQKLHWNPEDKGYVLHMITTAAEWSMSFSFFGFFLTYIRDFQKISLRVEANLHGLTLYDTAPCPINNERTRLLSRDI

SEQ ID NO: 25142 - protein, 266 aa, Homo sapiens; identical to SEQ ID NO: 25141
  Payload ID: 4971
  Gene Symbol: DRAM2
  Gene Name: DNA-damage regulated autophagy modulator 2
  Uniprot ID: Q6UX65
  ENSP ID: ENSP00000437718

SEQ ID NO: 25143 - protein, 66 aa, Homo sapiens
  Payload ID: 4971
  Gene Symbol: DRAM2
  Gene Name: DNA-damage regulated autophagy modulator 2
  ENSP ID: ENSP00000473779
MWWFQQGLSFLPSALVIWTSAAFIFSYITAVTLHHIDPALPYISDTGTVAPEKCLFGAMLNIAAVL

SEQ ID NO: 25144 - protein, 169 aa, Homo sapiens
  Payload ID: 4972
  Gene Symbol: DDIT3
  Gene Name: DNA-damage-inducible transcript 3
  Uniprot ID: P35638
  ENSP ID: ENSP00000340671
MAAESLPFSFGTLSSWELEAWYEDLQEVLSSDENGGTYVSPPGNEEEESKIFTTLDPASLAWLTEEEPEPAEVTSTSQSPHSPDSSQSSLAQEEEEEDQGRTRKRKQSGHSPARAGKQRMKEKEQENERKVAQLAEENERLKQEIERLTREVEATRRALIDRMVNLHQA

SEQ ID NO: 25145 - protein, 169 aa, Homo sapiens; identical to SEQ ID NO: 25144
  Payload ID: 4972
  Gene Symbol: DDIT3
  Gene Name: DNA-damage-inducible transcript 3
  Uniprot ID: P35638
  ENSP ID: ENSP00000447188

SEQ ID NO: 25146 - protein, 145 aa, Homo sapiens
  Payload ID: 4972
  Gene Symbol: DDIT3
  Gene Name: DNA-damage-inducible transcript 3
  ENSP ID: ENSP00000447503
MELVPATPHYPADVLFQTDPTAEMAAESLPFSFGTLSSWELEAWYEDLQEVLSSDENGGTYVSPPGNEEEESKIFTTLDPASLAWLTEEEPEPAEVTSTSQSPHSPDSSQSSLAQEEEEEDQGRTRKRKQSGHSPARAGKQRMKE

SEQ ID NO: 25147 - protein, 192 aa, Homo sapiens
  Payload ID: 4972
  Gene Symbol: DDIT3
  Gene Name: DNA-damage-inducible transcript 3
  Uniprot ID: P35638
  ENSP ID: ENSP00000447803
MELVPATPHYPADVLFQTDPTAEMAAESLPFSFGTLSSWELEAWYEDLQEVLSSDENGGTYVSPPGNEEEESKIFTTLDPASLAWLTEEEPEPAEVTSTSQSPHSPDSSQSSLAQEEEEEDQGRTRKRKQSGHSPARAGKQRMKEKEQENERKVAQLAEENERLKQEIERLTREVEATRRALIDRMVNLHQA

SEQ ID NO: 25148 - protein, 192 aa, Homo sapiens; identical to SEQ ID NO: 25147
  Payload ID: 4972
  Gene Symbol: DDIT3
  Gene Name: DNA-damage-inducible transcript 3
  Uniprot ID: P35638
  ENSP ID: ENSP00000448665

SEQ ID NO: 25149 - protein, 168 aa, Homo sapiens
  Payload ID: 4972
  Gene Symbol: DDIT3
  Gene Name: DNA-damage-inducible transcript 3
  ENSP ID: ENSP00000481270
MAAESLPFSSDTVSWELEAWYEDLQEVLSSDENGGTYVSPPGNEEEESKIFTTLDPASLAWLTEEEPEPAEVTSTSQSPHSPDSSQSSLAQEEEEEDQGRTRKRKQSGHSPARAGKQRMKEKEQENERKVAQLAEENERLKQEIERLTREVEATRRALIDRMVNLHQA

SEQ ID NO: 25150 - protein, 232 aa, Homo sapiens
  Payload ID: 4973
  Gene Symbol: DDIT4
  Gene Name: DNA-damage-inducible transcript 4
  Uniprot ID: Q9NX09
  ENSP ID: ENSP00000307305
MPSLWDRFSSSSTSSSPSSLPRTPTPDRPPRSAWGSATREEGFDRSTSLESSDCESLDSSNSGFGPEEDTAYLDGVSLPDFELLSDPEDEHLCANLMQLLQESLAQARLGSRRPARLLMPSQLVSQVGKELLRLAYSEPCGLRGALLDVCVEQGKSCHSVGQLALDPSLVPTFQLTLVLRLDSRLWPKIQGLFSSANSPFLPGFSQSLTLSTGFRVIKKKLYSSEQLLIEEC

SEQ ID NO: 25151 - protein, 193 aa, Homo sapiens
  Payload ID: 4974
  Gene Symbol: DDIT4L
  Gene Name: DNA-damage-inducible transcript 4-like
  Uniprot ID: Q96D03
  ENSP ID: ENSP00000354830
MVATGSLSSKNPASISELLDCGYHPESLLSDFDYWDYVVPEPNLNEVIFEESTCQNLVKMLENCLSKSKQTKLGCSKVLVPEKLTQRIAQDVLRLSSTEPCGLRGCVMHVNLEIENVCKKLDRIVCDSSVVPTFELTLVFKQENCSWTSFRDFFFSRGRFSSGFRRTLILSSGFRLVKKKLYSLIGTTVIEGS

SEQ ID NO: 25152 - protein, 128 aa, Homo sapiens
  Payload ID: 4974
  Gene Symbol: DDIT4L
  Gene Name: DNA-damage-inducible transcript 4-like
  ENSP ID: ENSP00000427040
MVATGSLSSKNPASISELLDCGYHPESLLSDFDYWDYVVPEPNLNEVIFEESTCQNLVKMLENCLSKSKQTKLGCSKVLVPEKLTQRIAQDVLRLSSTEPCGLRGCVMHVNLEIENVCKKLDRIVCDS

SEQ ID NO: 25153 - protein, 177 aa, Homo sapiens
  Payload ID: 4974
  Gene Symbol: DDIT4L
  Gene Name: DNA-damage-inducible transcript 4-like
  ENSP ID: ENSP00000427301
MVATGSLSSKNPASISELLDCGYHPESLLSDFDYWDYVVPEPNLNEVIFEESTCQNLVKMLENCLSKSKQTKLGCSKVLVPEKLTQRIAQDVLRLSSTEPCGLRGCVMHVNLEIENVCKKLDRIVCDSSVVPTFELTLVFKQENCSWTSFRDFFFSRGRFSSGFRRTLILSSGFRLV

SEQ ID NO: 25154 - protein, 115 aa, Homo sapiens
  Payload ID: 4975
  Gene Symbol:
  Gene Name: DNA-directed RNA polymerase II subunit RPB11-b1 [Source:UniProtKB/Swiss-Prot Acc:Q9GZM3]
  Uniprot ID: Q9GZM3
  ENSP ID: ENSP00000418603
MNAPPAFESFLLFEGEKITINKDTKVPKACLFTINKEDHTLGNIIKSQLLKDPQVLFAGYKVPHPLEHKIIIRVQTTPDYSPQEAFTNAITDLISELSLLEERFRTCLLPLRLLP

SEQ ID NO: 25155 - protein, 397 aa, Homo sapiens
  Payload ID: 4976
  Gene Symbol: DNAJA1
  Gene Name: DnaJ (Hsp40) homolog, subfamily A, member 1
  Uniprot ID: P31689
  ENSP ID: ENSP00000369127
MVKETTYYDVLGVKPNATQEELKKAYRKLALKYHPDKNPNEGEKFKQISQAYEVLSDAKKRELYDKGGEQAIKEGGAGGGFGSPMDIFDMFFGGGGRMQRERRGKNVVHQLSVTLEDLYNGATRKLALQKNVICDKCEGRGGKKGAVECCPNCRGTGMQIRIHQIGPGMVQQIQSVCMECQGHGERISPKDRCKSCNGRKIVREKKILEVHIDKGMKDGQKITFHGEGDQEPGLEPGDIIIVLDQKDHAVFTRRGEDLFMCMDIQLVEALCGFQKPISTLDNRTIVITSHPGQIVKHGDIKCVLNEGMPIYRRPYEKGRLIIEFKVNFPENGFLSPDKLSLLEKLLPERKEVEETDEMDQVELVDFDPNQERRRHYNGEAYEDDEHHPRGGVQCQTS

SEQ ID NO: 25156 - protein, 412 aa, Homo sapiens
  Payload ID: 4977
  Gene Symbol: DNAJA2
  Gene Name: DnaJ (Hsp40) homolog, subfamily A, member 2
  Uniprot ID: O60884
  ENSP ID: ENSP00000314030
MANVADTKLYDILGVPPGASENELKKAYRKLAKEYHPDKNPNAGDKFKEISFAYEVLSNPEKRELYDRYGEQGLREGSGGGGGMDDIFSHIFGGGLFGFMGNQSRSRNGRRRGEDMMHPLKVSLEDLYNGKTTKLQLSKNVLCSACSGQGGKSGAVQKCSACRGRGVRIMIRQLAPGMVQQMQSVCSDCNGEGEVINEKDRCKKCEGKKVIKEVKILEVHVDKGMKHGQRITFTGEADQAPGVEPGDIVLLLQEKEHEVFQRDGNDLHMTYKIGLVEALCGFQFTFKHLDGRQIVVKYPPGKVIEPGCVRVVRGEGMPQYRNPFEKGDLYIKFDVQFPENNWINPDKLSELEDLLPSRPEVPNIIGETEEVELQEFDSTRGSGGGQRREAYNDSSDEESSSHHGPGVQCAHQ

SEQ ID NO: 25157 - protein, 47 aa, Homo sapiens
  Payload ID: 4977
  Gene Symbol: DNAJA2
  Gene Name: DnaJ (Hsp40) homolog, subfamily A, member 2
  ENSP ID: ENSP00000460104
MANVADTKLYDILGVPPGASENELKKAYRKLAKEYHPDKNPNAGDKN

SEQ ID NO: 25158 - protein, 134 aa, Homo sapiens
  Payload ID: 4977
  Gene Symbol: DNAJA2
  Gene Name: DnaJ (Hsp40) homolog, subfamily A, member 2
  ENSP ID: ENSP00000477579
MDDIFSHIFGGGLFGFMGNQSRSRNGRRRGEDMMHPLKVSLEDLYNGKTTKLQLSKNVLCSACSGQGGKSGAVQKCSACRGRGVRIMIRQLAPGMVQQMQSVCSDCNGEGEVINEKDRCKKCEGKKVIKEVKIL

SEQ ID NO: 25159 - protein, 480 aa, Homo sapiens
  Payload ID: 4978
  Gene Symbol: DNAJA3
  Gene Name: DnaJ (Hsp40) homolog, subfamily A, member 3
  Uniprot ID: Q96EY1
  ENSP ID: ENSP00000262375
MAARCSTRWLLVVVGTPRLPAISGRGARPPREGVVGAWLSRKLSVPAFASSLTSCGPRALLTLRPGVSLTGTKHNPFICTASFHTSAPLAKEDYYQILGVPRNASQKEIKKAYYQLAKKYHPDTNKDDPKAKEKFSQLAEAYEVLSDEVKRKQYDAYGSAGFDPGASGSQHSYWKGGPTVDPEELFRKIFGEFSSSSFGDFQTVFDQPQEYFMELTFNQAAKGVNKEFTVNIMDTCERCNGKGNEPGTKVQHCHYCGGSGMETINTGPFVMRSTCRRCGGRGSIIISPCVVCRGAGQAKQKKRVMIPVPAGVEDGQTVRMPVGKREIFITFRVQKSPVFRRDGADIHSDLFISIAQALLGGTARAQGLYETINVTIPPGTQTDQKIRMGGKGIPRINSYGYGDHYIHIKIRVPKRLTSRQQSLILSYAEDETDVEGTVNGVTLTSSGGSTMDSSAGSKARREAGEDEEGFLSKLKKMFTS

SEQ ID NO: 25160 - protein, 453 aa, Homo sapiens
  Payload ID: 4978
  Gene Symbol: DNAJA3
  Gene Name: DnaJ (Hsp40) homolog, subfamily A, member 3
  Uniprot ID: Q96EY1
  ENSP ID: ENSP00000347445
MAARCSTRWLLVVVGTPRLPAISGRGARPPREGVVGAWLSRKLSVPAFASSLTSCGPRALLTLRPGVSLTGTKHNPFICTASFHTSAPLAKEDYYQILGVPRNASQKEIKKAYYQLAKKYHPDTNKDDPKAKEKFSQLAEAYEVLSDEVKRKQYDAYGSAGFDPGASGSQHSYWKGGPTVDPEELFRKIFGEFSSSSFGDFQTVFDQPQEYFMELTFNQAAKGVNKEFTVNIMDTCERCNGKGNEPGTKVQHCHYCGGSGMETINTGPFVMRSTCRRCGGRGSIIISPCVVCRGAGQAKQKKRVMIPVPAGVEDGQTVRMPVGKREIFITFRVQKSPVFRRDGADIHSDLFISIAQALLGGTARAQGLYETINVTIPPGTQTDQKIRMGGKGIPRINSYGYGDHYIHIKIRVPKRLTSRQQSLILSYAEDETDVEGTVNGVTLTSSGKRSTGN

SEQ ID NO: 25161 - protein, 300 aa, Homo sapiens
  Payload ID: 4978
  Gene Symbol: DNAJA3
  Gene Name: DnaJ (Hsp40) homolog, subfamily A, member 3
  Uniprot ID: Q96EY1
  ENSP ID: ENSP00000393970
MAEPQAERPRLCVFPDLLRPPSAADIETWCQPYRKIFGEFSSSSFGDFQTVFDQPQEYFMELTFNQAAKGVNKEFTVNIMDTCERCNGKGNEPGTKVQHCHYCGGSGMETINTGPFVMRSTCRRCGGRGSIIISPCVVCRGAGQAKQKKRVMIPVPAGVEDGQTVRMPVGKREIFITFRVQKSPVFRRDGADIHSDLFISIAQALLGGTARAQGLYETINVTIPPGTQTDQKIRMGGKGIPRINSYGYGDHYIHIKIRVPKRLTSRQQSLILSYAEDETDVEGTVNGVTLTSSGKRSTGN

SEQ ID NO: 25162 - protein, 122 aa, Homo sapiens
  Payload ID: 4978
  Gene Symbol: DNAJA3
  Gene Name: DnaJ (Hsp40) homolog, subfamily A, member 3
  ENSP ID: ENSP00000458868
MAARCSTRWLLVVVGTPRLPAISGRGARPPREGVVGAWLSRKLSVPAFASSLTSCGPRALLTLRPGVSLTGGVLLCRPGWSAMARSWLTATSASQEQNITLSFVLPPSTRVPLWPKKIIIRY

SEQ ID NO: 25163 - protein, 185 aa, Homo sapiens
  Payload ID: 4978
  Gene Symbol: DNAJA3
  Gene Name: DnaJ (Hsp40) homolog, subfamily A, member 3
  ENSP ID: ENSP00000459088
MAARCSTRWLLVVVGTPRLPAISGRGARPPREGVVGAWLSRKLSVPAFASSLTSCGPRALLTLRPGVSLTGTKHNPFICTASFHTSAPLAKEDYYQILGVPRNASQKEIKKAYYQLAKKYHPDTNKDDPKAKEKFSQLAEAYEYFMELTFNQAAKGVNKEFTVNIMDTCERCNGKGNEPGTKVQH

SEQ ID NO: 25164 - protein, 98 aa, Homo sapiens
  Payload ID: 4978
  Gene Symbol: DNAJA3
  Gene Name: DnaJ (Hsp40) homolog, subfamily A, member 3
  ENSP ID: ENSP00000459098
MAARCSTRWLLVVVGTPRLPAISGRGARPPREGVVGAWLSRKLSVPAFASSLTSCGPRALLTLRPGVSLTGRSLASSHPLHLEISRPCLISLRNTSWS

SEQ ID NO: 25165 - protein, 77 aa, Homo sapiens
  Payload ID: 4978
  Gene Symbol: DNAJA3
  Gene Name: DnaJ (Hsp40) homolog, subfamily A, member 3
  ENSP ID: ENSP00000460358
MAARCSTRWLLVVVGTPRLPAISGRGARPPREGVVGAWLSRKLSVPAFASSLTSCGPRALLTLRPGVSLTACQEVSP

SEQ ID NO: 25166 - protein, 480 aa, Homo sapiens; identical to SEQ ID NO: 25159
  Payload ID: 4978
  Gene Symbol: DNAJA3
  Gene Name: DnaJ (Hsp40) homolog, subfamily A, member 3
  Uniprot ID: Q96EY1
  ENSP ID: ENSP00000477570

SEQ ID NO: 25167 - protein, 453 aa, Homo sapiens; identical to SEQ ID NO: 25160
  Payload ID: 4978
  Gene Symbol: DNAJA3
  Gene Name: DnaJ (Hsp40) homolog, subfamily A, member 3
  Uniprot ID: Q96EY1
  ENSP ID: ENSP00000479815

SEQ ID NO: 25168 - protein, 98 aa, Homo sapiens; identical to SEQ ID NO: 25164
  Payload ID: 4978
  Gene Symbol: DNAJA3
  Gene Name: DnaJ (Hsp40) homolog, subfamily A, member 3
  ENSP ID: ENSP00000480419

SEQ ID NO: 25169 - protein, 185 aa, Homo sapiens; identical to SEQ ID NO: 25163
  Payload ID: 4978
  Gene Symbol: DNAJA3
  Gene Name: DnaJ (Hsp40) homolog, subfamily A, member 3
  ENSP ID: ENSP00000487896

SEQ ID NO: 25170 - protein, 77 aa, Homo sapiens; identical to SEQ ID NO: 25165
  Payload ID: 4978
  Gene Symbol: DNAJA3
  Gene Name: DnaJ (Hsp40) homolog, subfamily A, member 3
  ENSP ID: ENSP00000488175

SEQ ID NO: 25171 - protein, 122 aa, Homo sapiens; identical to SEQ ID NO: 25162
  Payload ID: 4978
  Gene Symbol: DNAJA3
  Gene Name: DnaJ (Hsp40) homolog, subfamily A, member 3
  ENSP ID: ENSP00000488665

SEQ ID NO: 25172 - protein, 397 aa, Homo sapiens
  Payload ID: 4979
  Gene Symbol: DNAJA4
  Gene Name: DnaJ (Hsp40) homolog, subfamily A, member 4
  Uniprot ID: Q8WW22
  ENSP ID: ENSP00000339581
MVKETQYYDILGVKPSASPEEIKKAYRKLALKYHPDKNPDEGEKFKLISQAYEVLSDPKKRDVYDQGGEQAIKEGGSGSPSFSSPMDIFDMFFGGGGRMARERRGKNVVHQLSVTLEDLYNGVTKKLALQKNVICEKCEGVGGKKGSVEKCPLCKGRGMQIHIQQIGPGMVQQIQTVCIECKGQGERINPKDRCESCSGAKVIREKKIIEVHVEKGMKDGQKILFHGEGDQEPELEPGDVIIVLDQKDHSVFQRRGHDLIMKMKIQLSEALCGFKKTIKTLDNRILVITSKAGEVIKHGDLRCVRDEGMPIYKAPLEKGILIIQFLVIFPEKHWLSLEKLPQLEALLPPRQKVRITDDMDQVELKEFCPNEQNWRQHREAYEEDEDGPQAGVQCQTA

SEQ ID NO: 25173 - protein, 397 aa, Homo sapiens; identical to SEQ ID NO: 25172
  Payload ID: 4979
  Gene Symbol: DNAJA4
  Gene Name: DnaJ (Hsp40) homolog, subfamily A, member 4
  Uniprot ID: Q8WW22
  ENSP ID: ENSP00000378321

SEQ ID NO: 25174 - protein, 426 aa, Homo sapiens
  Payload ID: 4979
  Gene Symbol: DNAJA4
  Gene Name: DnaJ (Hsp40) homolog, subfamily A, member 4
  Uniprot ID: Q8WW22
  ENSP ID: ENSP00000378324
MARGGSQSWSSGESDGQPKEQTPEKPRHKMVKETQYYDILGVKPSASPEEIKKAYRKLALKYHPDKNPDEGEKFKLISQAYEVLSDPKKRDVYDQGGEQAIKEGGSGSPSFSSPMDIFDMFFGGGGRMARERRGKNVVHQLSVTLEDLYNGVTKKLALQKNVICEKCEGVGGKKGSVEKCPLCKGRGMQIHIQQIGPGMVQQIQTVCIECKGQGERINPKDRCESCSGAKVIREKKIIEVHVEKGMKDGQKILFHGEGDQEPELEPGDVIIVLDQKDHSVFQRRGHDLIMKMKIQLSEALCGFKKTIKTLDNRILVITSKAGEVIKHGDLRCVRDEGMPIYKAPLEKGILIIQFLVIFPEKHWLSLEKLPQLEALLPPRQKVRITDDMDQVELKEFCPNEQNWRQHREAYEEDEDGPQAGVQCQTA

SEQ ID NO: 25175 - protein, 211 aa, Homo sapiens
  Payload ID: 4979
  Gene Symbol: DNAJA4
  Gene Name: DnaJ (Hsp40) homolog, subfamily A, member 4
  ENSP ID: ENSP00000395191
MVKETQYYDILGVKPSASPEEIKKAYRKLALKYHPDKNPDEGEKFKLISQAYEVLSDPKKRDVYDQGGEQAIKEGGSGSPSFSSPMDIFDMFFGGGGRMARERRGKNVVHQLSVTLEDLYNGVTKKLALQKNVICEKCEGVGGKKGSVEKCPLCKGRGMQIHIQQIGPGMVQQIQTVCIECKGQGERINPKDRCESCSGAKVIREKKIIEV

SEQ ID NO: 25176 - protein, 114 aa, Homo sapiens
  Payload ID: 4979
  Gene Symbol: DNAJA4
  Gene Name: DnaJ (Hsp40) homolog, subfamily A, member 4
  ENSP ID: ENSP00000407136
MVKETQYYDILGVKPSASPEEIKKAYRKLALKYHPDKNPDEGEKFKLISQAYEVLSDPKKRDVYDQGGEQAIKEGGSGSPSFSSPMDIFDMFFGGGGRMARERRECCTPVICNS

SEQ ID NO: 25177 - protein, 370 aa, Homo sapiens
  Payload ID: 4979
  Gene Symbol: DNAJA4
  Gene Name: DnaJ (Hsp40) homolog, subfamily A, member 4
  Uniprot ID: Q8WW22
  ENSP ID: ENSP00000413499
MWESLTLDSGQISALTRFKLISQAYEVLSDPKKRDVYDQGGEQAIKEGGSGSPSFSSPMDIFDMFFGGGGRMARERRGKNVVHQLSVTLEDLYNGVTKKLALQKNVICEKCEGVGGKKGSVEKCPLCKGRGMQIHIQQIGPGMVQQIQTVCIECKGQGERINPKDRCESCSGAKVIREKKIIEVHVEKGMKDGQKILFHGEGDQEPELEPGDVIIVLDQKDHSVFQRRGHDLIMKMKIQLSEALCGFKKTIKTLDNRILVITSKAGEVIKHGDLRCVRDEGMPIYKAPLEKGILIIQFLVIFPEKHWLSLEKLPQLEALLPPRQKVRITDDMDQVELKEFCPNEQNWRQHREAYEEDEDGPQAGVQCQTA

SEQ ID NO: 25178 - protein, 139 aa, Homo sapiens
  Payload ID: 4979
  Gene Symbol: DNAJA4
  Gene Name: DnaJ (Hsp40) homolog, subfamily A, member 4
  ENSP ID: ENSP00000438263
MARGGSQSWSSGESDGQPKEQTPEKPRHKMVKETQYYDILGVKPSASPEEIKKAYRKLALKYHPDKNPDEGEKGHGHLQPDISLYSYSGFSVTSDTQLIISTNHRLKMLCILETEVKSFSILFTESLLFISKEAHDPPE

SEQ ID NO: 25179 - protein, 53 aa, Homo sapiens
  Payload ID: 4979
  Gene Symbol: DNAJA4
  Gene Name: DnaJ (Hsp40) homolog, subfamily A, member 4
  ENSP ID: ENSP00000441946
MVKETQYYDILGVKPSASPEEIKKAYRKLALKYHPDKNPDEGEKARMLYTSYL

SEQ ID NO: 25180 - protein, 219 aa, Homo sapiens
  Payload ID: 4979
  Gene Symbol: DNAJA4
  Gene Name: DnaJ (Hsp40) homolog, subfamily A, member 4
  ENSP ID: ENSP00000443962
MVKETQYYDILGVKPSASPEEIKKAYRKLALKYHPDKNPDEGEKFKLISQAYEVLSDPKKRDVYDQGGEQAIKEGGSGSPSFSSPMDIFDMFFGGGGRMARERRGKNVVHQLSVTLEDLYNGVTKKLALQKNVICEKCEGVGGKKGSVEKCPLCKGRGMQIHIQQIGPGMVQQIQTVCIECKGQGERINPKDRCESCSGAKVIREKKIIEVHVEKETRP

SEQ ID NO: 25181 - protein, 340 aa, Homo sapiens
  Payload ID: 4980
  Gene Symbol: DNAJB1
  Gene Name: DnaJ (Hsp40) homolog, subfamily B, member 1
  Uniprot ID: P25685
  ENSP ID: ENSP00000254322
MGKDYYQTLGLARGASDEEIKRAYRRQALRYHPDKNKEPGAEEKFKEIAEAYDVLSDPRKREIFDRYGEEGLKGSGPSGGSGGGANGTSFSYTFHGDPHAMFAEFFGGRNPFDTFFGQRNGEEGMDIDDPFSGFPMGMGGFTNVNFGRSRSAQEPARKKQDPPVTHDLRVSLEEIYSGCTKKMKISHKRLNPDGKSIRNEDKILTIEVKKGWKEGTKITFPKEGDQTSNNIPADIVFVLKDKPHNIFKRDGSDVIYPARISLREALCGCTVNVPTLDGRTIPVVFKDVIRPGMRRKVPGEGLPLPKTPEKRGDLIIEFEVIFPERIPQTSRTVLEQVLPI

SEQ ID NO: 25182 - protein, 240 aa, Homo sapiens
  Payload ID: 4980
  Gene Symbol: DNAJB1
  Gene Name: DnaJ (Hsp40) homolog, subfamily B, member 1
  Uniprot ID: P25685
  ENSP ID: ENSP00000444212
MFAEFFGGRNPFDTFFGQRNGEEGMDIDDPFSGFPMGMGGFTNVNFGRSRSAQEPARKKQDPPVTHDLRVSLEEIYSGCTKKMKISHKRLNPDGKSIRNEDKILTIEVKKGWKEGTKITFPKEGDQTSNNIPADIVFVLKDKPHNIFKRDGSDVIYPARISLREALCGCTVNVPTLDGRTIPVVFKDVIRPGMRRKVPGEGLPLPKTPEKRGDLIIEFEVIFPERIPQTSRTVLEQVLPI

SEQ ID NO: 25183 - protein, 162 aa, Homo sapiens
  Payload ID: 4980
  Gene Symbol: DNAJB1
  Gene Name: DnaJ (Hsp40) homolog, subfamily B, member 1
  ENSP ID: ENSP00000469221
MLMCLKGSGPSGGSGGGANGTSFSYTFHGDPHAMFAEFFGGRNPFDTFFGQRNGEEGMDIDDPFSGFPMGMGGFTNVNFGRSRSAQEPARKKQDPPVTHDLRVSLEEIYSGCTKKMKISHKRLNPDGKSIRNEDKILTIEVKKGWKEGTKITFPKEGDQTSN

SEQ ID NO: 25184 - protein, 116 aa, Homo sapiens
  Payload ID: 4980
  Gene Symbol: DNAJB1
  Gene Name: DnaJ (Hsp40) homolog, subfamily B, member 1
  ENSP ID: ENSP00000470063
MFAEFFGGRNPFDTFFGQRNGEEGMDIDDPFSGFPMGMGGFTNVNFGRSRSAQEPARKKQDPPVTHDLRVSLEEIYSGCTKKMKISHKRLNPDGKSIRNEDKILTIEVKKGWKEGT

SEQ ID NO: 25185 - protein, 107 aa, Homo sapiens
  Payload ID: 4980
  Gene Symbol: DNAJB1
  Gene Name: DnaJ (Hsp40) homolog, subfamily B, member 1
  ENSP ID: ENSP00000470460
MFAEFFGGRNPFDTFFGQRNGEEGMDIDDPFSGFPMGMGGFTNVNFGRSRSAQEPARKKQDPPVTHDLRVSLEEIYSGCTKKMKISHKRLNPDGKSIRNEDKILTIE

SEQ ID NO: 25186 - protein, 116 aa, Homo sapiens; identical to SEQ ID NO: 25184
  Payload ID: 4980
  Gene Symbol: DNAJB1
  Gene Name: DnaJ (Hsp40) homolog, subfamily B, member 1
  ENSP ID: ENSP00000470596

SEQ ID NO: 25187 - protein, 183 aa, Homo sapiens
  Payload ID: 4980
  Gene Symbol: DNAJB1
  Gene Name: DnaJ (Hsp40) homolog, subfamily B, member 1
  ENSP ID: ENSP00000471073
MFAEFFGGRNPFDTFFGQRNGEEGMDIDDPFSGFPMGMGGFTNVNFGRSRSAQEPARKKQDPPVTHDLRVSLEEIYSGCTKKMKISHKRLNPDGKSIRNEDKILTIEVKKGWKEGTKITFPKEGDQTSNNIPADIVFVLKDKPHNIFKRDGSDVIYPARISLREALCGCTVNVPTLDGRTIPV

SEQ ID NO: 25188 - protein, 79 aa, Homo sapiens
  Payload ID: 4980
  Gene Symbol: DNAJB1
  Gene Name: DnaJ (Hsp40) homolog, subfamily B, member 1
  ENSP ID: ENSP00000471603
MFAEFFGGRNPFDTFFGQRNGEEGMDIDDPFSGFPMGMGGFTNVNFGRSRSAQEPARKKQDPPVTHDLRVSLEEIYSGC

SEQ ID NO: 25189 - protein, 91 aa, Homo sapiens
  Payload ID: 4980
  Gene Symbol: DNAJB1
  Gene Name: DnaJ (Hsp40) homolog, subfamily B, member 1
  ENSP ID: ENSP00000471798
MFAEFFGGRNPFDTFFGQRNGEEGMDIDDPFSGFPMGMGGFTNVNFGRSRSAQEPARKKQDPPVTHDLRVSLEEIYSGCTKKMKISHKRLN

SEQ ID NO: 25190 - protein, 80 aa, Homo sapiens
  Payload ID: 4980
  Gene Symbol: DNAJB1
  Gene Name: DnaJ (Hsp40) homolog, subfamily B, member 1
  ENSP ID: ENSP00000472886
MFAEFFGGRNPFDTFFGQRNGEEGMDIDDPFSGFPMGMGGFTNVNFGRSRSAQEPARKKQDPPVTHDLRVSLEEIYSGCT

SEQ ID NO: 25191 - protein, 358 aa, Homo sapiens
  Payload ID: 4981
  Gene Symbol: DNAJB11
  Gene Name: DnaJ (Hsp40) homolog, subfamily B, member 11
  Uniprot ID: Q9UBS4
  ENSP ID: ENSP00000265028
MAPQNLSTFCLLLLYLIGAVIAGRDFYKILGVPRSASIKDIKKAYRKLALQLHPDRNPDDPQAQEKFQDLGAAYEVLSDSEKRKQYDTYGEEGLKDGHQSSHGDIFSHFFGDFGFMFGGTPRQQDRNIPRGSDIIVDLEVTLEEVYAGNFVEVVRNKPVARQAPGKRKCNCRQEMRTTQLGPGRFQMTQEVVCDECPNVKLVNEERTLEVEIEPGVRDGMEYPFIGEGEPHVDGEPGDLRFRIKVVKHPIFERRGDDLYTNVTISLVESLVGFEMDITHLDGHKVHISRDKITRPGAKLWKKGEGLPNFDNNNIKGSLIITFDVDFPKEQLTEEAREGIKQLLKQGSVQKVYNGLQGY

SEQ ID NO: 25192 - protein, 167 aa, Homo sapiens
  Payload ID: 4981
  Gene Symbol: DNAJB11
  Gene Name: DnaJ (Hsp40) homolog, subfamily B, member 11
  ENSP ID: ENSP00000408410
  MOD_RES (1)..(1): Any amino acid
XLVNEERTLEVEIEPGVRDGMEYPFIGEGEPHVDGEPGDLRFRIKVVKHPIFERRGDDLYTNVTISLVESLVGFEMDITHLDGHKVHISRDKITRPGAKLWKKGEGLPNFDNNNIKGSLIITFDVDFPKEQLTEEAREGIKQLLKQGSVQKAEWFEDDVIQRKRELW

SEQ ID NO: 25193 - protein, 358 aa, Homo sapiens; identical to SEQ ID NO: 25191
  Payload ID: 4981
  Gene Symbol: DNAJB11
  Gene Name: DnaJ (Hsp40) homolog, subfamily B, member 11
  Uniprot ID: Q9UBS4
  ENSP ID: ENSP00000414398

SEQ ID NO: 25194 - protein, 75 aa, Homo sapiens
  Payload ID: 4981
  Gene Symbol: DNAJB11
  Gene Name: DnaJ (Hsp40) homolog, subfamily B, member 11
  ENSP ID: ENSP00000440189
MGVKLEIFRMIIYLTFPVAMFWVSNQAEWFEDDVIQRKRELWPPEKLQELEEFKERLRKRKRREEKLLRDAQQNS

SEQ ID NO: 25195 - protein, 409 aa, Homo sapiens
  Payload ID: 4982
  Gene Symbol: DNAJB12
  Gene Name: DnaJ (Hsp40) homolog, subfamily B, member 12
  ENSP ID: ENSP00000345575
MSSLRARLPATRRRVAQPFARPASPSLVPRSGSAMESNKDEAERCISIALKAIQSNQPDRALRFLEKAQRLYPTPRVRALIESLNQKPQTAGDQPPPTDTTHATHRKAGGTDAPSANGEAGGESTKGYTAEQVAAVKRVKQCKDYYEILGVSRGASDEDLKKAYRRLALKFHPDKNHAPGATEAFKAIGTAYAVLSNPEKRKQYDQFGDDKSQAARHGHGHGDFHRGFEADISPEDLFNMFFGGGFPSSNVHVYSNGRMRYTYQQRQDRRDNQGDGGLGVFVQLMPILILILVSALSQLMVSSPPYSLSPRPSVGHIHRRVTDHLGVVYYVGDTFSEEYTGSSLKTVERNVEDDYIANLRNNCWKEKQQKEGLLYRARYFGDTDMYHRAQKMGTPSCSRLSEVQASLHG

SEQ ID NO: 25196 - protein, 409 aa, Homo sapiens; identical to SEQ ID NO: 25195
  Payload ID: 4982
  Gene Symbol: DNAJB12
  Gene Name: DnaJ (Hsp40) homolog, subfamily B, member 12
  ENSP ID: ENSP00000378363

SEQ ID NO: 25197 - protein, 375 aa, Homo sapiens
  Payload ID: 4982
  Gene Symbol: DNAJB12
  Gene Name: DnaJ (Hsp40) homolog, subfamily B, member 12
  Uniprot ID: Q9NXW2
  ENSP ID: ENSP00000403313
MESNKDEAERCISIALKAIQSNQPDRALRFLEKAQRLYPTPRVRALIESLNQKPQTAGDQPPPTDTTHATHRKAGGTDAPSANGEAGGESTKGYTAEQVAAVKRVKQCKDYYEILGVSRGASDEDLKKAYRRLALKFHPDKNHAPGATEAFKAIGTAYAVLSNPEKRKQYDQFGDDKSQAARHGHGHGDFHRGFEADISPEDLFNMFFGGGFPSSNVHVYSNGRMRYTYQQRQDRRDNQGDGGLGVFVQLMPILILILVSALSQLMVSSPPYSLSPRPSVGHIHRRVTDHLGVVYYVGDTFSEEYTGSSLKTVERNVEDDYIANLRNNCWKEKQQKEGLLYRARYFGDTDMYHRAQKMGTPSCSRLSEVQASLHG

SEQ ID NO: 25198 - protein, 172 aa, Homo sapiens
  Payload ID: 4982
  Gene Symbol: DNAJB12
  Gene Name: DnaJ (Hsp40) homolog, subfamily B, member 12
  ENSP ID: ENSP00000476453
MFFGGGFPSSNVHVYSNGRMRYTYQQRQDRRDNQGDGGLGVFVQLMPILILILVSALSQLMVSSPPYSLSPRPSVGHIHRRVTDHLGVVYYVGDTFSEEYTGSSLKTVERNVEDDYIANLRNNCWKEKQQKEGLLYRARYFGDTDMYHRAQKMGTPSCSRLSETMKSLENFW

SEQ ID NO: 25199 - protein, 276 aa, Homo sapiens
  Payload ID: 4982
  Gene Symbol: DNAJB12
  Gene Name: DnaJ (Hsp40) homolog, subfamily B, member 12
  ENSP ID: ENSP00000476941
  MOD_RES (1)..(1): Any amino acid
XAVKRVKQCKDYYEILGVSRGASDEDLKKAYRRLALKFHPDKNHAPGATEAFKAIGTAYAVLSNPEKRKQYDQFGDDKSQAARHGHGHGDFHRGFEADISPEDLFNMFFGGGFPSSNVHVYSNGRMRYTYQQRQDRRDNQGDGGLGVFVQLMPILILILVSALSQLMVSSPPYSLSPRPSVGHIHRRVTDHLGVVYYVGDTFSEEYTGSSLKTVERNVEDDYIANLRNNCWKEKQQKEGLLYRARYFGDTDMYHRAQKMGTPSCSRLSEVQASLHG

SEQ ID NO: 25200 - protein, 316 aa, Homo sapiens
  Payload ID: 4983
  Gene Symbol: DNAJB13
  Gene Name: DnaJ (Hsp40) homolog, subfamily B, member 13
  Uniprot ID: P59910
  ENSP ID: ENSP00000344431
MGQDYYSVLGITRNSEDAQIKQAYRRLALKHHPLKSNEPSSAEIFRQIAEAYDVLSDPMKRGIYDKFGEEGLKGGIPLEFGSQTPWTTGYVFHGKPEKVFHEFFGGNNPFSEFFDAEGSEVDLNFGGLQGRGVKKQDPQVERDLYLSLEDLFFGCTKKIKISRRVLNEDGYSSTIKDKILTIDVKPGWRQGTRITFEKEGDQGPNIIPADIIFIVKEKLHPRFRRENDNLFFVNPIPLGKALTCCTVEVRTLDDRLLNIPINDIIHPKYFKKVPGEGMPLPEDPTKKGDLFIFFDIQFPTRLTPQKKQMLRQALLT

SEQ ID NO: 25201 - protein, 141 aa, Homo sapiens
  Payload ID: 4983
  Gene Symbol: DNAJB13
  Gene Name: DnaJ (Hsp40) homolog, subfamily B, member 13
  Uniprot ID: P59910
  ENSP ID: ENSP00000438576
METSRGRNLAKVTRPTSPCHLLASPAQGPNIIPADIIFIVKEKLHPRFRRENDNLFFVNPIPLGKALTCCTVEVRTLDDRLLNIPINDIIHPKYFKKVPGEGMPLPEDPTKKGDLFIFFDIQFPTRLTPQKKQMLRQALLT

SEQ ID NO: 25202 - protein, 141 aa, Homo sapiens; identical to SEQ ID NO: 25201
  Payload ID: 4983
  Gene Symbol: DNAJB13
  Gene Name: DnaJ (Hsp40) homolog, subfamily B, member 13
  Uniprot ID: P59910
  ENSP ID: ENSP00000439711

SEQ ID NO: 25203 - protein, 217 aa, Homo sapiens
  Payload ID: 4983
  Gene Symbol: DNAJB13
  Gene Name: DnaJ (Hsp40) homolog, subfamily B, member 13
  ENSP ID: ENSP00000440778
  MOD_RES (1)..(1): Any amino acid
XQFLLLLSLPPAEFFDAEGSEVDLNFGGLQGRGVKKQDPQVERDLYLSLEDLFFGCTKKIKISRRVLNEDGYSSTIKDKILTIDVKPGWRQGTRITFEKEGDQGPNIIPADIIFIVKEKLHPRFRRENDNLFFVNPIPLGKALTCCTVEVRTLDDRLLNIPINDIIHPKYFKKVPGEGMPLPEDPTKKGDLFIFFDIQFPTRLTPQKKQMLRQALLT

SEQ ID NO: 25204 - protein, 45 aa, Homo sapiens
  Payload ID: 4984
  Gene Symbol: DNAJB14
  Gene Name: DnaJ (Hsp40) homolog, subfamily B, member 14
  ENSP ID: ENSP00000335249
MEGNRDEAEKCVEIAREALNAGNREKAQRFLQKAEKLYPLPSARA

SEQ ID NO: 25205 - protein, 41 aa, Homo sapiens
  Payload ID: 4984
  Gene Symbol: DNAJB14
  Gene Name: DnaJ (Hsp40) homolog, subfamily B, member 14
  ENSP ID: ENSP00000389471
FSNGRAGYSQQHQHRHSGHEREEERGDQFNYMKWKGKWKEH

SEQ ID NO: 25206 - protein, 105 aa, Homo sapiens
  Payload ID: 4984
  Gene Symbol: DNAJB14
  Gene Name: DnaJ (Hsp40) homolog, subfamily B, member 14
  ENSP ID: ENSP00000390019
  MOD_RES (1)..(1): Any amino acid
XDEAEKCVEIAREALNAGNREKAQRFLQKAEKLYPLPSARALLEIIMKNGSTAGNSPHCRKPSGSGDQSKPNCTKDSTSGSGEGGKGYTKDQVDGVLRALWILEH

SEQ ID NO: 25207 - protein, 45 aa, Homo sapiens; identical to SEQ ID NO: 25204
  Payload ID: 4984
  Gene Symbol: DNAJB14
  Gene Name: DnaJ (Hsp40) homolog, subfamily B, member 14
  ENSP ID: ENSP00000390023

SEQ ID NO: 25208 - protein, 379 aa, Homo sapiens
  Payload ID: 4984
  Gene Symbol: DNAJB14
  Gene Name: DnaJ (Hsp40) homolog, subfamily B, member 14
  Uniprot ID: Q8TBM8
  ENSP ID: ENSP00000404381
MEGNRDEAEKCVEIAREALNAGNREKAQRFLQKAEKLYPLPSARALLEIIMKNGSTAGNSPHCRKPSGSGDQSKPNCTKDSTSGSGEGGKGYTKDQVDGVLSINKCKNYYEVLGVTKDAGDEDLKKAYRKLALKFHPDKNHAPGATDAFKKIGNAYAVLSNPEKRKQYDLTGNEEQACNHQNNGRFNFHRGCEADITPEDLFNIFFGGGFPSGSVHSFSNGRAGYSQQHQHRHSGHEREEERGDGGFSVFIQLMPIIVLILVSLLSQLMVSNPPYSLYPRSGTGQTIKMQTENLGVVYYVNKDFKNEYKGMLLQKVEKSVEEDYVTNIRNNCWKERQQKTDMQYAAKVYRDDRLRRKADALSMDNCKELERLTSLYKGG

SEQ ID NO: 25209 - protein, 48 aa, Homo sapiens
  Payload ID: 4984
  Gene Symbol: DNAJB14
  Gene Name: DnaJ (Hsp40) homolog, subfamily B, member 14
  ENSP ID: ENSP00000416179
  MOD_RES (1)..(1): Any amino acid
XPNCTKDSTSGSGEGGKGYTKDQVDGVLSLERKRRVVQGVVEIRKEEH

SEQ ID NO: 25210 - protein, 109 aa, Homo sapiens
  Payload ID: 4984
  Gene Symbol: DNAJB14
  Gene Name: DnaJ (Hsp40) homolog, subfamily B, member 14
  ENSP ID: ENSP00000480565
MEGNRDEAEKCVEIAREALNAGNREKAQRFLQKAEKLYPLPSARALLEIIMKNGSTAGNSPHCRKPSGSGDQSKPNCTKDSTSGSGEGGKGYTKDQVDGVLRALWILEH

SEQ ID NO: 25211 - protein, 324 aa, Homo sapiens
  Payload ID: 4985
  Gene Symbol: DNAJB2
  Gene Name: DnaJ (Hsp40) homolog, subfamily B, member 2
  Uniprot ID: P25686
  ENSP ID: ENSP00000338019
MASYYEILDVPRSASADDIKKAYRRKALQWHPDKNPDNKEFAEKKFKEVAEAYEVLSDKHKREIYDRYGREGLTGTGTGPSRAEAGSGGPGFTFTFRSPEEVFREFFGSGDPFAELFDDLGPFSELQNRGSRHSGPFFTFSSSFPGHSDFSSSSFSFSPGAGAFRSVSTSTTFVQGRRITTRRIMENGQERVEVEEDGQLKSVTINGVPDDLALGLELSRREQQPSVTSRSGGTQVQQTPASCPLDSDLSEDEDLQLAMAYSLSEMEAAGKKPAGGREAQHRRQGRPKAQHQDPGLGGTQEGARGEATKRSPSPEEKASRCLIL

SEQ ID NO: 25212 - protein, 277 aa, Homo sapiens
  Payload ID: 4985
  Gene Symbol: DNAJB2
  Gene Name: DnaJ (Hsp40) homolog, subfamily B, member 2
  Uniprot ID: P25686
  ENSP ID: ENSP00000375936
MASYYEILDVPRSASADDIKKAYRRKALQWHPDKNPDNKEFAEKKFKEVAEAYEVLSDKHKREIYDRYGREGLTGTGTGPSRAEAGSGGPGFTFTFRSPEEVFREFFGSGDPFAELFDDLGPFSELQNRGSRHSGPFFTFSSSFPGHSDFSSSSFSFSPGAGAFRSVSTSTTFVQGRRITTRRIMENGQERVEVEEDGQLKSVTINGVPDDLALGLELSRREQQPSVTSRSGGTQVQQTPASCPLDSDLSEDEDLQLAMAYSLSEMEAAGKKPADVF

SEQ ID NO: 25213 - protein, 244 aa, Homo sapiens
  Payload ID: 4985
  Gene Symbol: DNAJB2
  Gene Name: DnaJ (Hsp40) homolog, subfamily B, member 2
  ENSP ID: ENSP00000375937
MASYYEILDVPRSASADDIKKAYRRKALQWHPDKNPDNKEFAEKKFKEVAEAYEVLSDKHKREIYDRYGREGLTGTGTGPSRAEAGSGGPGFTFTFRSPEEVFREFFGSGDPFAELFDFSSSSFSFSPGAGAFRSVSTSTTFVQGRRITTRRIMENGQERVEVEEDGQLKSVTINGVPDDLALGLELSRREQQPSVTSRSGGTQVQQTPASCPLDSDLSEDEDLQLAMAYSLSEMEAAGKKPAG

SEQ ID NO: 25214 - protein, 148 aa, Homo sapiens
  Payload ID: 4985
  Gene Symbol: DNAJB2
  Gene Name: DnaJ (Hsp40) homolog, subfamily B, member 2
  ENSP ID: ENSP00000387951
MASYYEILDVPRSASADDIKKAYRRKALQWHPDKNPDNKEFAEKKFKEVAEAYEVLSDKHKREIYDRYGREGLTGTGTGPSRAEAGSGGPGFTFTFRSPEEVFREFFGSGDPFAELFDDLGPFSELQNRGSRHSGPFFTFSSSFPGHS

SEQ ID NO: 25215 - protein, 122 aa, Homo sapiens
  Payload ID: 4985
  Gene Symbol: DNAJB2
  Gene Name: DnaJ (Hsp40) homolog, subfamily B, member 2
  ENSP ID: ENSP00000392790
MASYYEILDVPRSASADDIKKAYRRKALQWHPDKNPDNKEFAEKKFKEVAEAYEVLSDKHKREIYDRYGREGLTGTGTGPSRAEAGSGGPGFTFTFRSPEEVFREFFGSGDPFAELFDDLGP

SEQ ID NO: 25216 - protein, 132 aa, Homo sapiens
  Payload ID: 4985
  Gene Symbol: DNAJB2
  Gene Name: DnaJ (Hsp40) homolog, subfamily B, member 2
  ENSP ID: ENSP00000395173
MASYYEILDVPRSASADDIKKAYRRKALQWHPDKNPDNKEFAEKKFKEVAEAYEVLSDKHKREIYDRYGREGLTGTGTGPSRAEAGSGGPGFTFTFRSPEEVFREFFGSGDPFAELFGEWTLEASEWLNFPL

SEQ ID NO: 25217 - protein, 228 aa, Homo sapiens
  Payload ID: 4985
  Gene Symbol: DNAJB2
  Gene Name: DnaJ (Hsp40) homolog, subfamily B, member 2
  ENSP ID: ENSP00000414796
MASYYEILDVPRSASADDIKKAYRRKALQWHPDKNPDNKEFAEKKFKEVAEAYEVLSDKHKREIYDRYGREGLTGTGTGPSRAEAGSGGPGFTFTFRSPEEVFREFFGSGDPFAELFDDLGPFSELQNRGSRHSGPFFTFSSSFPGHSDFSSSSFSFSPGAGAFRSVSTSTTFVQGRRITTRRIMENGQERVEVEEDGQLKSVTINGVPDDLALGLELSRREQQPSVT

SEQ ID NO: 25218 - protein, 337 aa, Homo sapiens
  Payload ID: 4986
  Gene Symbol: DNAJB4
  Gene Name: DnaJ (Hsp40) homolog, subfamily B, member 4
  Uniprot ID: Q9UDY4
  ENSP ID: ENSP00000359799
MGKDYYCILGIEKGASDEDIKKAYRKQALKFHPDKNKSPQAEEKFKEVAEAYEVLSDPKKREIYDQFGEEGLKGGAGGTDGQGGTFRYTFHGDPHATFAAFFGGSNPFEIFFGRRMGGGRDSEEMEIDGDPFSAFGFSMNGYPRDRNSVGPSRLKQDPPVIHELRVSLEEIYSGCTKRMKISRKRLNADGRSYRSEDKILTIEIKKGWKEGTKITFPREGDETPNSIPADIVFIIKDKDHPKFKRDGSNIIYTAKISLREALCGCSINVPTLDGRNIPMSVNDIVKPGMRRRIIGYGLPFPKNPDQRGDLLIEFEVSFPDTISSSSKEVLRKHLPAS

SEQ ID NO: 25219 - protein, 172 aa, Homo sapiens
  Payload ID: 4986
  Gene Symbol: DNAJB4
  Gene Name: DnaJ (Hsp40) homolog, subfamily B, member 4
  ENSP ID: ENSP00000399494
MGKDYYCILGIEKGASDEDIKKAYRKQALKFHPDKNKSPQAEEKFKEVAEAYEVLSDPKKREIYDQFGEEGLKGGAGGTDGQGGTFRYTFHGDPHATFAAFFGGSNPFEIFFGRRMGGGRDSEEMEIDGDPFSAFGFSMNGYPRDRNSVGPSRLKQDPPVIHELRVSLEEIY

SEQ ID NO: 25220 - protein, 348 aa, Homo sapiens
  Payload ID: 4987
  Gene Symbol: DNAJB5
  Gene Name: DnaJ (Hsp40) homolog, subfamily B, member 5
  Uniprot ID: O75953
  ENSP ID: ENSP00000312517
MGKDYYKILGIPSGANEDEIKKAYRKMALKYHPDKNKEPNAEEKFKEIAEAYDVLSDPKKRGLYDQYGEEGLKTGGGTSGGSSGSFHYTFHGDPHATFASFFGGSNPFDIFFASSRSTRPFSGFDPDDMDVDEDEDPFGAFGRFGFNGLSRGPRRAPEPLYPRRKVQDPPVVHELRVSLEEIYHGSTKRMKITRRRLNPDGRTVRTEDKILHIVIKRGWKEGTKITFPKEGDATPDNIPADIVFVLKDKPHAHFRRDGTNVLYSALISLKEALCGCTVNIPTIDGRVIPLPCNDVIKPGTVKRLRGEGLPFPKVPTQRGDLIVEFKVRFPDRLTPQTRQILKQHLPCS

SEQ ID NO: 25221 - protein, 33 aa, Homo sapiens
  Payload ID: 4987
  Gene Symbol: DNAJB5
  Gene Name: DnaJ (Hsp40) homolog, subfamily B, member 5
  ENSP ID: ENSP00000393749
MGKDYYKILGIPSGANEDEIKKAYRKMALKYHP

SEQ ID NO: 25222 - protein, 155 aa, Homo sapiens
  Payload ID: 4987
  Gene Symbol: DNAJB5
  Gene Name: DnaJ (Hsp40) homolog, subfamily B, member 5
  ENSP ID: ENSP00000396332
MGKDYYKILGIPSGANEDEIKKAYRKMALKYHPDKNKEPNAEEKFKEIAEAYDVLSDPKKRGLYDQYGEEGLKTGGGTSGGSSGSFHYTFHGDPHATFASFFGGSNPFDIFFASSRSTRPFSGFDPDDMDVDEDEDPFGAFGRFGFNGLSRGPRR

SEQ ID NO: 25223 - protein, 462 aa, Homo sapiens
  Payload ID: 4987
  Gene Symbol: DNAJB5
  Gene Name: DnaJ (Hsp40) homolog, subfamily B, member 5
  Uniprot ID: O75953
  ENSP ID: ENSP00000404079
MGGAEAEPWGRAPGPAIGGRRAGDSCPGWRRRSRSRGRGQRLSHGPRRRPQLLTAAPPLQARGAFRSFPHSWGEDFLASLMFKIQLEPLKLRAWTLNGFVKFRNKETSAGPVAVMGKDYYKILGIPSGANEDEIKKAYRKMALKYHPDKNKEPNAEEKFKEIAEAYDVLSDPKKRGLYDQYGEEGLKTGGGTSGGSSGSFHYTFHGDPHATFASFFGGSNPFDIFFASSRSTRPFSGFDPDDMDVDEDEDPFGAFGRFGFNGLSRGPRRAPEPLYPRRKVQDPPVVHELRVSLEEIYHGSTKRMKITRRRLNPDGRTVRTEDKILHIVIKRGWKEGTKITFPKEGDATPDNIPADIVFVLKDKPHAHFRRDGTNVLYSALISLKEALCGCTVNIPTIDGRVIPLPCNDVIKPGTVKRLRGEGLPFPKVPTQRGDLIVEFKVRFPDRLTPQTRQILKQHLPCS

SEQ ID NO: 25224 - protein, 420 aa, Homo sapiens
  Payload ID: 4987
  Gene Symbol: DNAJB5
  Gene Name: DnaJ (Hsp40) homolog, subfamily B, member 5
  Uniprot ID: O75953
  ENSP ID: ENSP00000413684
MFKRTVLSCPPPAAPPLQARGAFRSFPHSWGEDFLASLMFKIQLEPLKLRAWTLNGFVKFRNKETSAGPVAVMGKDYYKILGIPSGANEDEIKKAYRKMALKYHPDKNKEPNAEEKFKEIAEAYDVLSDPKKRGLYDQYGEEGLKTGGGTSGGSSGSFHYTFHGDPHATFASFFGGSNPFDIFFASSRSTRPFSGFDPDDMDVDEDEDPFGAFGRFGFNGLSRGPRRAPEPLYPRRKVQDPPVVHELRVSLEEIYHGSTKRMKITRRRLNPDGRTVRTEDKILHIVIKRGWKEGTKITFPKEGDATPDNIPADIVFVLKDKPHAHFRRDGTNVLYSALISLKEALCGCTVNIPTIDGRVIPLPCNDVIKPGTVKRLRGEGLPFPKVPTQRGDLIVEFKVRFPDRLTPQTRQILKQHLPCS

SEQ ID NO: 25225 - protein, 105 aa, Homo sapiens
  Payload ID: 4987
  Gene Symbol: DNAJB5
  Gene Name: DnaJ (Hsp40) homolog, subfamily B, member 5
  ENSP ID: ENSP00000433640
MGKDYYKILGIPSGANEDEIKKAYRKMALKYHPDKNKEPNAEEKFKEIAEAYDVLSDPKKRGLYDQYGEEAAAPLGPSVALTQMTWMWMKMRTHLALSAVLASMG

SEQ ID NO: 25226 - protein, 205 aa, Homo sapiens
  Payload ID: 4987
  Gene Symbol: DNAJB5
  Gene Name: DnaJ (Hsp40) homolog, subfamily B, member 5
  ENSP ID: ENSP00000439217
MGKDYYKILGIPSGANEDEIKKAYRKMALKYHPDKNKEPNAEEKFKEIAEAYDVLSDPKKRGLYDQYGEEGLKTGGGTSGGSSGSFHYTFHGDPHATFASFFGGSNPFDIFFASSRSTRPFSGFDPDDMDVDEDEDPFGAFGRFGFNGLSRGPRRAPEPLYPRRKVQDPPVVHELRVSLEEIYHGSTKRMKITRRRLNPDGRTVR

SEQ ID NO: 25227 - protein, 348 aa, Homo sapiens; identical to SEQ ID NO: 25220
  Payload ID: 4987
  Gene Symbol: DNAJB5
  Gene Name: DnaJ (Hsp40) homolog, subfamily B, member 5
  Uniprot ID: O75953
  ENSP ID: ENSP00000441999

SEQ ID NO: 25228 - protein, 211 aa, Homo sapiens
  Payload ID: 4987
  Gene Symbol: DNAJB5
  Gene Name: DnaJ (Hsp40) homolog, subfamily B, member 5
  ENSP ID: ENSP00000445536
MYGPRAASRNKETSAGPVAVMGKDYYKILGIPSGANEDEIKKAYRKMALKYHPDKNKEPNAEEKFKEIAEAYDVLSDPKKRGLYDQYGEEGLKTGGGTSGGSSGSFHYTFHGDPHATFASFFGGSNPFDIFFASSRSTRPFSGFDPDDMDVDEDEDPFGAFGRFGFNGLSRGPRRAPEPLYPRRKVQDPPVVHELRVSLEEIYHGSTKRMK

SEQ ID NO: 25229 - protein, 326 aa, Homo sapiens
  Payload ID: 4988
  Gene Symbol: DNAJB6
  Gene Name: DnaJ (Hsp40) homolog, subfamily B, member 6
  Uniprot ID: O75190
  ENSP ID: ENSP00000262177
MVDYYEVLGVQRHASPEDIKKAYRKLALKWHPDKNPENKEEAERKFKQVAEAYEVLSDAKKRDIYDKYGKEGLNGGGGGGSHFDSPFEFGFTFRNPDDVFREFFGGRDPFSFDFFEDPFEDFFGNRRGPRGSRSRGTGSFFSAFSGFPSFGSGFSSFDTGFTSFGSLGHGGLTSFSSTSFGGSGMGNFKSISTSTKMVNGRKITTKRIVENGQERVEVEEDGQLKSLTINGVADDDALAEERMRRGQNALPAQPAGLRPPKPPRPASLLRHAPHCLSEEEGEQDRPRAPGPWDPLASAAGLKEGGKRKKQKQREESKKKKSTKGNH

SEQ ID NO: 25230 - protein, 45 aa, Homo sapiens
  Payload ID: 4988
  Gene Symbol: DNAJB6
  Gene Name: DnaJ (Hsp40) homolog, subfamily B, member 6
  ENSP ID: ENSP00000389599
MVDYYEVLGVQRHASPEDIKKAYRKLALKWHPDKNPENKEEAERK

SEQ ID NO: 25231 - protein, 66 aa, Homo sapiens
  Payload ID: 4988
  Gene Symbol: DNAJB6
  Gene Name: DnaJ (Hsp40) homolog, subfamily B, member 6
  ENSP ID: ENSP00000391690
MVDYYEVLGVQRHASPEDIKKAYRKLALKWHPDKNPENKEEAERKFKQVAEAYEVLSDAKKRDIYD

SEQ ID NO: 25232 - protein, 98 aa, Homo sapiens
  Payload ID: 4988
  Gene Symbol: DNAJB6
  Gene Name: DnaJ (Hsp40) homolog, subfamily B, member 6
  ENSP ID: ENSP00000396240
MVDYYEVLGVQRHASPEDIKKAYRKLALKWHPDKNPENKEEAERKFKQVAEAYEVLSDAKKRDIYDKYGKEGLNGGGGGGSHFDSPFEFGFTFRNPDD

SEQ ID NO: 25233 - protein, 211 aa, Homo sapiens
  Payload ID: 4988
  Gene Symbol: DNAJB6
  Gene Name: DnaJ (Hsp40) homolog, subfamily B, member 6
  ENSP ID: ENSP00000396267
MVDYYEVLGVQRHASPEDIKKAYRKLALKWHPDKNPENKEEAERKFKQVAEAYEVLSDAKKRDIYDKYGKEGLNGGGGGGSHFDSPFEFGFTFRNPDDVFREFFGGRDPFSFDFFGVADDDALAEERMRRGQNALPAQPAGLRPPKPPRPASLLRHAPHCLSEEEGEQDRPRAPGPWDPLASAAGLKEGGKRKKQKQREESKKKKSTKGNH

SEQ ID NO: 25234 - protein, 241 aa, Homo sapiens
  Payload ID: 4988
  Gene Symbol: DNAJB6
  Gene Name: DnaJ (Hsp40) homolog, subfamily B, member 6
  Uniprot ID: O75190
  ENSP ID: ENSP00000397556
MVDYYEVLGVQRHASPEDIKKAYRKLALKWHPDKNPENKEEAERKFKQVAEAYEVLSDAKKRDIYDKYGKEGLNGGGGGGSHFDSPFEFGFTFRNPDDVFREFFGGRDPFSFDFFEDPFEDFFGNRRGPRGSRSRGTGSFFSAFSGFPSFGSGFSSFDTGFTSFGSLGHGGLTSFSSTSFGGSGMGNFKSISTSTKMVNGRKITTKRIVENGQERVEVEEDGQLKSLTINGKEQLLRLDNK

SEQ ID NO: 25235 - protein, 228 aa, Homo sapiens
  Payload ID: 4988
  Gene Symbol: DNAJB6
  Gene Name: DnaJ (Hsp40) homolog, subfamily B, member 6
  ENSP ID: ENSP00000400665
MVDYYEVLGVQRHASPEDIKKAYRKLALKWHPDKNPENKEEAERKFKQVAEAYEVLSDAKKRDIYDKYGKEGLNGGGGGGSHFDSPFEFGFTFRNPDDVFREFFGGRDPFSFDFFEDPFEDFFGNRRGPRGSRSRGTGSFFSAFSGFPSFGSGFSSFDTGFTSFGSLGHGGLTSFSSTSFGGSGMGNFKSISTSTKMVNGRKITTKRIVENGQERVEVEEDGQLKSLT

SEQ ID NO: 25236 - protein, 125 aa, Homo sapiens
  Payload ID: 4988
  Gene Symbol: DNAJB6
  Gene Name: DnaJ (Hsp40) homolog, subfamily B, member 6
  ENSP ID: ENSP00000403407
MVDYYEVLGVQRHASPEDIKKAYRKLALKWHPDKNPENKEEAERKFKQVAEAYEVLSDAKKRDIYDKYGKEGLNGGGGGGSHFDSPFEFGFTFRNPDDVFREFFGGRDPFSFDFFEDPFEDFFGN

SEQ ID NO: 25237 - protein, 145 aa, Homo sapiens
  Payload ID: 4988
  Gene Symbol: DNAJB6
  Gene Name: DnaJ (Hsp40) homolog, subfamily B, member 6
  ENSP ID: ENSP00000410643
MVDYYEVLGVQRHASPEDIKKAYRKLALKWHPDKNPENKEEAERKFKQVAEAYEVLSDAKKRDIYDKYGKEGLNGGGGGGSHFDSPFEFGFTFRNPDDVFREFFGGRDPFSFDFFEDPFEDFFGNRRGPRGSRSRGTGSFFSAFS

SEQ ID NO: 25238 - protein, 129 aa, Homo sapiens
  Payload ID: 4988
  Gene Symbol: DNAJB6
  Gene Name: DnaJ (Hsp40) homolog, subfamily B, member 6
  ENSP ID: ENSP00000415201
MVDYYEVLGVQRHASPEDIKKAYRKLALKWHPDKNPENKEEAERKFKQVAEAYEVLSDAKKRDIYDKYGKEGLNGGGGGGSHFDSPFEFGFTFRNPDDVFREFFGGRDPFSFDFFGQGSVWVEVLCSDR

SEQ ID NO: 25239 - protein, 334 aa, Homo sapiens
  Payload ID: 4988
  Gene Symbol: DNAJB6
  Gene Name: DnaJ (Hsp40) homolog, subfamily B, member 6
  ENSP ID: ENSP00000488263
MVDYYEVLGVQRHASPEDIKKAYRKLALKWHPDKNPENKEEAERKFKQVAEAYEVLSDAKKRDIYDKYGKEGLNGGGGGGSHFDSPFEFGFTFRNPDDVFREFFGGRDPFSFDFFEDPFEDFFGNRRGPRGSRSRGTGSFFSAFSGFPSFGSGFSSFDTGFTSFGSLGHGGLTSFSSTSFGGSGMGNFKSISTSTKMVNGRKITTKRIVENGQERVEVEEDGQLKSLTINGVADDDALAEERMRRGQNALPAQPAGLRPPKPPRPASLLRHAPHCLSEEEGEQDRPRAPGPWDPLASAAGVQREAAVEQAQSETSLGARGQRGHKPRLGCCVLT

SEQ ID NO: 25240 - protein, 334 aa, Homo sapiens; identical to SEQ ID NO: 25239
  Payload ID: 4988
  Gene Symbol: DNAJB6
  Gene Name: DnaJ (Hsp40) homolog, subfamily B, member 6
  ENSP ID: ENSP00000488740

SEQ ID NO: 25241 - protein, 309 aa, Homo sapiens
  Payload ID: 4989
  Gene Symbol: DNAJB7
  Gene Name: DnaJ (Hsp40) homolog, subfamily B, member 7
  Uniprot ID: Q7Z6W7
  ENSP ID: ENSP00000307197
MVDYYEVLGLQRYASPEDIKKAYHKVALKWHPDKNPENKEEAERKFKEVAEAYEVLSNDEKRDIYDKYGTEGLNGGGSHFDDECEYGFTFHKPDDVFKEIFHERDPFSFHFFEDSLEDLLNRPGSSYGNRNRDAGYFFSTASEYPIFEKFSSYDTGYTSQGSLGHEGLTSFSSLAFDNSGMDNYISVTTSDKIVNGRNINTKKIIESDQEREAEDNGELTFFLVNSVANEEGFAKECSWRTQSFNNYSPNSHSSKHVSQYTFVDNDEGGISWVTSNRDPPIFSAGVKEGGKRKKKKRKEVQKKSTKRNC

SEQ ID NO: 25242 - protein, 232 aa, Homo sapiens
  Payload ID: 4990
  Gene Symbol: DNAJB8
  Gene Name: DnaJ (Hsp40) homolog, subfamily B, member 8
  Uniprot ID: Q8NHS0
  ENSP ID: ENSP00000316053
MANYYEVLGVQASASPEDIKKAYRKLALRWHPDKNPDNKEEAEKKFKLVSEAYEVLSDSKKRSLYDRAGCDSWRAGGGASTPYHSPFDTGYTFRNPEDIFREFFGGLDPFSFEFWDSPFNSDRGGRGHGLRGAFSAGFGEFPAFMEAFSSFNMLGCSGGSHTTFSSTSFGGSSSGSSGFKSVMSSTEMINGHKVTTKRIVENGQERVEVEEDGQLKSVTVNGKEQLKWMDSK

SEQ ID NO: 25243 - protein, 232 aa, Homo sapiens; identical to SEQ ID NO: 25242
  Payload ID: 4990
  Gene Symbol: DNAJB8
  Gene Name: DnaJ (Hsp40) homolog, subfamily B, member 8
  Uniprot ID: Q8NHS0
  ENSP ID: ENSP00000417418

SEQ ID NO: 25244 - protein, 223 aa, Homo sapiens
  Payload ID: 4991
  Gene Symbol: DNAJB9
  Gene Name: DnaJ (Hsp40) homolog, subfamily B, member 9
  Uniprot ID: Q9UBS3
  ENSP ID: ENSP00000249356
MATPQSIFIFAICILMITELILASKSYYDILGVPKSASERQIKKAFHKLAMKYHPDKNKSPDAEAKFREIAEAYETLSDANRRKEYDTLGHSAFTSGKGQRGSGSSFEQSFNFNFDDLFKDFGFFGQNQNTGSKKRFENHFQTRQDGGSSRQRHHFQEFSFGGGLFDDMFEDMEKMFSFSGFDSTNQHTVQTENRFHGSSKHCRTVTQRRGNMVTTYTDCSGQ

SEQ ID NO: 25245 - protein, 360 aa, Homo sapiens
  Payload ID: 4992
  Gene Symbol: DNAJC25
  Gene Name: DnaJ (Hsp40) homolog, subfamily C , member 25
  Uniprot ID: Q9H1X3
  ENSP ID: ENSP00000320650
MGAPLLSPGWGAGAAGRRWWMLLAPLLPALLLVRPAGALVEGLYCGTRDCYEVLGVSRSAGKAEIARAYRQLARRYHPDRYRPQPGDEGPGRTPQSAEEAFLLVATAYETLKDEETRKDYDYMLDHPEEYYSHYYHYYSRRLAPKVDVRVVILVSVCAISVFQFFSWWNSYNKAISYLATVPKYRIQATEIAKQQGLLKKAKEKGKNKKSKEEIRDEEENIIKNIIKSKIDIKGGYQKPQICDLLLFQIILAPFHLCSYIVWYCRWIYNFNIKGKEYGEEERLYIIRKSMKMSKSQFDSLEDHQKETFLKRELWIKENYEVYKQEQEEELKKKLANDPRWKRYRRWMKNEGPGRLTFVDD

SEQ ID NO: 25246 - protein, 135 aa, Homo sapiens
  Payload ID: 4992
  Gene Symbol: DNAJC25
  Gene Name: DnaJ (Hsp40) homolog, subfamily C , member 25
  ENSP ID: ENSP00000399325
MGAPLLSPGWGAGAAGRRWWMLLAPLLPALLLVRPAGALVEGLYCGTRDCYEVLGVSRSAGKAEIARAYRQLARRYHPDRYRPQPGDEGPGRTPQSAEEAFLLVATAYETLKSSCICPRGLGVEWTPAEAPQLFL

SEQ ID NO: 25247 - protein, 141 aa, Homo sapiens
  Payload ID: 4992
  Gene Symbol: DNAJC25
  Gene Name: DnaJ (Hsp40) homolog, subfamily C , member 25
  ENSP ID: ENSP00000464086
MGAPLLSPGWGAGAAGRRWWMLLAPLLPALLLVRPAGALVEGLYCGTRDCYEVLGVSRSAGKAEIARAYRQLARRYHPDRYRPQPGDEGPGRTPQSAEEAFLLVATAYETLKILVMFQSSCICPRGLGVEWTPAEAPQLFL

SEQ ID NO: 25248 - protein, 554 aa, Homo sapiens
  Payload ID: 4993
  Gene Symbol: DNAJC1
  Gene Name: DnaJ (Hsp40) homolog, subfamily C, member 1
  Uniprot ID: Q96KC8
  ENSP ID: ENSP00000366179
MTAPCSQPAQLPGRRQLGLVPFPPPPPRTPLLWLLLLLLAAVAPARGWESGDLELFDLVEEVQLNFYQFLGVQQDASSADIRKAYRKLSLTLHPDKNKDENAETQFRQLVAIYEVLKDDERRQRYDDILINGLPDWRQPVFYYRRVRKMSNAELALLLFIILTVGHYAVVWSIYLEKQLDELLSRKKREKKKKTGSKSVDVSKLGASEKNERLLMKPQWHDLLPCKLGIWFCLTLKALPHLIQDAGQFYAKYKETRLKEKEDALTRTELETLQKQKKVKKPKPEFPVYTPLETTYIQSYDHGTSIEEIEEQMDDWLENRNRTQKKQAPEWTEEDLSQLTRSMVKFPGGTPGRWEKIAHELGRSVTDVTTKAKQLKDSVTCSPGMVRLSELKSTVQNSRPIKTATTLPDDMITQREDAEGVAAEEEQEGDSGEQETGATDARPRRRKPARLLEATAKPEPEEKSRAKRQKDFDIAEQNESSDEESLRKERARSAEEPWTQNQQKLLELALQQYPRGSSDRWDKIARCVPSKSKEDCIARYKLLVELVQKKKQAKS

SEQ ID NO: 25249 - protein, 109 aa, Homo sapiens
  Payload ID: 4993
  Gene Symbol: DNAJC1
  Gene Name: DnaJ (Hsp40) homolog, subfamily C, member 1
  ENSP ID: ENSP00000431248
MTAPCSQPAQLPGRRQLGLVPFPPPPPRTPLLWLLLLLLAAVAPARGWESGDLELFDLVEEVQLNFYQFLGVQQDASSADIRKAYRKLSLTLHPDKNKDENAETQFRQV

SEQ ID NO: 25250 - protein, 793 aa, Homo sapiens
  Payload ID: 4994
  Gene Symbol: DNAJC10
  Gene Name: DnaJ (Hsp40) homolog, subfamily C, member 10
  Uniprot ID: Q8IXB1
  ENSP ID: ENSP00000264065
MGVWLNKDDYIRDLKRIILCFLIVYMAILVGTDQDFYSLLGVSKTASSREIRQAFKKLALKLHPDKNPNNPNAHGDFLKINRAYEVLKDEDLRKKYDKYGEKGLEDNQGGQYESWNYYRYDFGIYDDDPEIITLERREFDAAVNSGELWFVNFYSPGCSHCHDLAPTWRDFAKEVDGLLRIGAVNCGDDRMLCRMKGVNSYPSLFIFRSGMAPVKYHGDRSKESLVSFAMQHVRSTVTELWTGNFVNSIQTAFAAGIGWLITFCSKGGDCLTSQTRLRLSGMLDGLVNVGWMDCATQDNLCKSLDITTSTTAYFPPGATLNNKEKNSILFLNSLDAKEIYLEVIHNLPDFELLSANTLEDRLAHHRWLLFFHFGKNENSNDPELKKLKTLLKNDHIQVGRFDCSSAPDICSNLYVFQPSLAVFKGQGTKEYEIHHGKKILYDILAFAKESVNSHVTTLGPQNFPANDKEPWLVDFFAPWCPPCRALLPELRRASNLLYGQLKFGTLDCTVHEGLCNMYNIQAYPTTVVFNQSNIHEYEGHHSAEQILEFIEDLMNPSVVSLTPTTFNELVTQRKHNEVWMVDFYSPWCHPCQVLMPEWKRMARTLTGLINVGSIDCQQYHSFCAQENVQRYPEIRFFPPKSNKAYHYHSYNGWNRDAYSLRIWGLGFLPQVSTDLTPQTFSEKVLQGKNHWVIDFYAPWCGPCQNFAPEFELLARMIKGKVKAGKVDCQAYAQTCQKAGIRAYPTVKFYFYERAKRNFQEEQINTRDAKAIAALISEKLETLRNQGKRNKDEL

SEQ ID NO: 25251 - protein, 275 aa, Homo sapiens
  Payload ID: 4994
  Gene Symbol: DNAJC10
  Gene Name: DnaJ (Hsp40) homolog, subfamily C, member 10
  ENSP ID: ENSP00000389483
MGVWLNKDDYIRDLKRIILCFLIVYMAILVGTDQDFYSLLGVSKTASSREIRQAFKKLALKLHPDKNPNNPNAHGDFLKINRAYEVLKDEDLRKKYDKYGEKGLEDNQGGQYESWNYYRYDFGIYDDDPEIITLERREFDAAVNSGELWFVNFYSPGCSHCHDLAPTWRDFAKEVDGLLRIGAVNCGDDRMLCRMKGVNSYPSLFIFRSGMAPVKYHGDRSKESLVSFAMQHVRSTVTELWTGNFVNSIQTAFAAGIGWLITFCSKGGVSQLIGC

SEQ ID NO: 25252 - protein, 121 aa, Homo sapiens
  Payload ID: 4994
  Gene Symbol: DNAJC10
  Gene Name: DnaJ (Hsp40) homolog, subfamily C, member 10
  ENSP ID: ENSP00000400096
APVKYHGDRSKESLVSFAMQHVRSTVTELWTGNFVNSIQTAFAAGIGWLITFCSKGGDCLTSQTRLRLSGMLDGLVNVGWMDCATQDNLCKSLDITTSTTAYFPPGATLNNKEKNSILLLH

SEQ ID NO: 25253 - protein, 332 aa, Homo sapiens
  Payload ID: 4994
  Gene Symbol: DNAJC10
  Gene Name: DnaJ (Hsp40) homolog, subfamily C, member 10
  Uniprot ID: Q8IXB1
  ENSP ID: ENSP00000441560
MGVWLNKDDYIRDLKRIILCFLIVYMAILVGTDQDFYSLLGVSKTASSREIRQAFKKLALKLHPDKNPNNPNAHGDFLKINRAYEVLKDEDLRKKYDKYGEKGLEDNQGGQYESWNYYRYDFGIYDDDPEIITLERREFDAAVNSGELWFVNFYSPGCSHCHDLAPTWRDFAKEVDGLLRIGAVNCGDDRMLCRMKGVNSYPSLFIFRSGMAPVKYHGDRSKESLVSFAMQHVRSTVTELWTGNFVNSIQTAFAAGIGWLITFCSKGGDCLTSQTRLRLSGMLDGLVNVGWMDCATQDNLCKSLDITTSTTAYFPPGATLNNKEKNSILLLH

SEQ ID NO: 25254 - protein, 747 aa, Homo sapiens
  Payload ID: 4994
  Gene Symbol: DNAJC10
  Gene Name: DnaJ (Hsp40) homolog, subfamily C, member 10
  Uniprot ID: Q8IXB1
  ENSP ID: ENSP00000479930
MGVWLNKDDYIRDLKRIILCFLIVYMAILVGTDQDFYSLLGVSKTASSREIRQAFKKLALKLHPDKNPNNPNAHGDFLKINRAYEVLKDEDLRKKYDKYGEKGLEDNQGGQYESWNYYRYDFGIYDDDPEIITLERREFDAAVNSGELWFVNFYSPGCSHCHDLAPTWRDFAKEVDGLLRIGAVNCGDDRMLCRMKGVNSYPSLFIFRSGMAPVKYHGDRSKESLVSFAMQHVRSTVTELWTGNFVNSIQTAFAAGIGWLITFCSKGGDCLTSQTRLRLSGMLFLNSLDAKEIYLEVIHNLPDFELLSANTLEDRLAHHRWLLFFHFGKNENSNDPELKKLKTLLKNDHIQVGRFDCSSAPDICSNLYVFQPSLAVFKGQGTKEYEIHHGKKILYDILAFAKESVNSHVTTLGPQNFPANDKEPWLVDFFAPWCPPCRALLPELRRASNLLYGQLKFGTLDCTVHEGLCNMYNIQAYPTTVVFNQSNIHEYEGHHSAEQILEFIEDLMNPSVVSLTPTTFNELVTQRKHNEVWMVDFYSPWCHPCQVLMPEWKRMARTLTGLINVGSIDCQQYHSFCAQENVQRYPEIRFFPPKSNKAYHYHSYNGWNRDAYSLRIWGLGFLPQVSTDLTPQTFSEKVLQGKNHWVIDFYAPWCGPCQNFAPEFELLARMIKGKVKAGKVDCQAYAQTCQKAGIRAYPTVKFYFYERAKRNFQEEQINTRDAKAIAALISEKLETLRNQGKRNKDEL

SEQ ID NO: 25255 - protein, 177 aa, Homo sapiens [sequence omitted]

SEQ ID NO: 25256 - protein, 507 aa, Homo sapiens
  Payload ID: 4995
  Gene Symbol: DNAJC11
  Gene Name: DnaJ (Hsp40) homolog, subfamily C, member 11
  Uniprot ID: Q9NVH1
  ENSP ID: ENSP00000294401
MATALSEEELDNEDYYSLLNVRREASSEELKAAYRRLCMLYHPDKHRDPELKSQAERLFNLVHQAYEVLSDPQTRAIYDIYGKRGLEMEGWEVVERRRTPAEIREEFERLQREREERRLQQRTNPKGTISVGVDATDLFDRYDEEYEDVSGSSFPQIEINKMHISQSIEAPLTATDTAILSGSLSTQNGNGGGSINFALRRVTSAKGWGELEFGAGDLQGPLFGLKLFRNLTPRCFVTTNCALQFSSRGIRPGLTTVLARNLDKNTVGYLQWRWGIQSAMNTSIVRDTKTSHFTVALQLGIPHSFALISYQHKFQDDDQTRVKGSLKAGFFGTVVEYGAERKISRHSVLGAAVSVGVPQGVSLKVKELEKQRESAATDVLQKKQEAESAVRLMQESVRRIIEAEESRMGLIIVNAWYGKFVNDKSRKSEKVKVIDVTVPLQCLVKDSKLILTEASKAGLPGFYDPCVGEEKNLKVLYQFRGVLHQVMVLDSEALRIPKQSHRIDTDG

SEQ ID NO: 25257 - protein, 559 aa, Homo sapiens
  Payload ID: 4995
  Gene Symbol: DNAJC11
  Gene Name: DnaJ (Hsp40) homolog, subfamily C, member 11
  Uniprot ID: Q9NVH1
  ENSP ID: ENSP00000366800
MATALSEEELDNEDYYSLLNVRREASSEELKAAYRRLCMLYHPDKHRDPELKSQAERLFNLVHQAYEVLSDPQTRAIYDIYGKRGLEMEGWEVVERRRTPAEIREEFERLQREREERRLQQRTNPKGTISVGVDATDLFDRYDEEYEDVSGSSFPQIEINKMHISQSIEAPLTATDTAILSGSLSTQNGNGGGSINFALRRVTSAKGWGELEFGAGDLQGPLFGLKLFRNLTPRCFVTTNCALQFSSRGIRPGLTTVLARNLDKNTVGYLQWRWGIQSAMNTSIVRDTKTSHFTVALQLGIPHSFALISYQHKFQDDDQTRVKGSLKAGFFGTVVEYGAERKISRHSVLGAAVSVGVPQGVSLKVKLNRASQTYFFPIHLTDQLLPSAMFYATVGPLVVYFAMHRLIIKPYLRAQKEKELEKQRESAATDVLQKKQEAESAVRLMQESVRRIIEAEESRMGLIIVNAWYGKFVNDKSRKSEKVKVIDVTVPLQCLVKDSKLILTEASKAGLPGFYDPCVGEEKNLKVLYQFRGVLHQVMVLDSEALRIPKQSHRIDTDG

SEQ ID NO: 25258 - protein, 324 aa, Homo sapiens
  Payload ID: 4995
  Gene Symbol: DNAJC11
  Gene Name: DnaJ (Hsp40) homolog, subfamily C, member 11
  ENSP ID: ENSP00000410194
MATALSEEELDNEDYYSLLNVRREASSEELKAAYRRLCMLYHPDKHRDPELKSQAERLFNLVHQAYEVLSDPQTRAIYDIYGKRGLEMEGWEVVERRRTPAEIREEFERLQREREERRLQQRTNPKGTISVGVDATDLFDRYDEEYEDVSGSSFPQIEINKMHISQSIEAPLTATDTAILSGSLSTQNGNGGGSINFALRRVTSAKGWGERMTDCLIIGLIDICQRCSPQPASASCRLCCCHVTLLELYIPVPSRTTAVSSFPICFVTTNCALQFSSRGIRPGLTTVLARNLDKNTVGYLQWRWGIQSAMNTSIVRDTKTSHFT

SEQ ID NO: 25259 - protein, 332 aa, Homo sapiens
  Payload ID: 4995
  Gene Symbol: DNAJC11
  Gene Name: DnaJ (Hsp40) homolog, subfamily C, member 11
  ENSP ID: ENSP00000415871
ASSEELKAAYRRLCMLYHPDKHRDPELKSQAERLFNLVHQAYEVLSDPQTRAIYDIYGKRGLEMEGWEVVERRRTPAEIREEFERLQREREERRLQQRTNPKGTISVGVDATDLFDRYDEEYEDVSGSSFPQIEINKMHISQSIEAPLTATDTAILSGSLSTQNGNGGGSINFALRRVTSAKGWGELEFGAGDLQGPLFGLKLFRNLTPRCFVTTNCALQFSSRGIRPGLTTVLARNLDKNTVGYLQWHCSSPLLQVQRPHRNTRACAPEPSFRPFLHVPTWDAECSGARTPSTAWTSAAVKLREACLSGPGSGSHQLLLLTPRSKRRTGGG

SEQ ID NO: 25260 - protein, 198 aa, Homo sapiens
  Payload ID: 4996
  Gene Symbol: DNAJC12
  Gene Name: DnaJ (Hsp40) homolog, subfamily C, member 12
  Uniprot ID: Q9UKB3
  ENSP ID: ENSP00000225171
MDAILNYRSEDTEDYYTLLGCDELSSVEQILAEFKVRALECHPDKHPENPKAVETFQKLQKAKEILTNEESRARYDHWRRSQMSMPFQQWEALNDSVKTSMHWVVRGKKDLMLEESDKTHTTKMENEECNEQRERKKEELASTAEKTEQKEPKPLEKSVSPQNSDSSGFADVNGWHLRFRWSKDAPSELLRKFRNYEI

SEQ ID NO: 25261 - protein, 107 aa, Homo sapiens
  Payload ID: 4996
  Gene Symbol: DNAJC12
  Gene Name: DnaJ (Hsp40) homolog, subfamily C, member 12
  Uniprot ID: Q9UKB3
  ENSP ID: ENSP00000343575
MDAILNYRSEDTEDYYTLLGCDELSSVEQILAEFKVRALECHPDKHPENPKAVETFQKLQKAKEILTNEESRARYDHWRRSQMSMPFQQWEALNDSVKTVGFSLGAT

SEQ ID NO: 25262 - protein, 57 aa, Homo sapiens
  Payload ID: 4996
  Gene Symbol: DNAJC12
  Gene Name: DnaJ (Hsp40) homolog, subfamily C, member 12
  ENSP ID: ENSP00000473979
MDAILNYRSEDTEDYYTLLGCDELSSVEQILAEFKVRALECHPDKHPENPKAGRPRS

SEQ ID NO: 25263 - protein, 228 aa, Homo sapiens
  Payload ID: 4996
  Gene Symbol: DNAJC12
  Gene Name: DnaJ (Hsp40) homolog, subfamily C, member 12
  ENSP ID: ENSP00000474215
MDAILNYRSEDTEDYYTLLGCDELSSVEQILAEFKVRALECHPDKHPENPKADPGVKSECLARLPASFAPISLQNEISLPRTVETFQKLQKAKEILTNEESRARYDHWRRSQMSMPFQQWEALNDSVKTSMHWVVRGKKDLMLEESDKTHTTKMENEECNEQRERKKEELASTAEKTEQKEPKPLEKSVSPQNSDSSGFADVNGWHLRFRWSKDAPSELLRKFRNYEI

SEQ ID NO: 25264 - protein, 40 aa, Homo sapiens
  Payload ID: 4996
  Gene Symbol: DNAJC12
  Gene Name: DnaJ (Hsp40) homolog, subfamily C, member 12
  ENSP ID: ENSP00000474804
MDAILNYRSEDTEDYYTLLGCDELSSMEFHSCCLGWSAMA

SEQ ID NO: 25265 - protein, 2243 aa, Homo sapiens
  Payload ID: 4997
  Gene Symbol: DNAJC13
  Gene Name: DnaJ (Hsp40) homolog, subfamily C, member 13
  Uniprot ID: O75165
  ENSP ID: ENSP00000260818
MNIIRENKDLACFYTTKHSWRGKYKRVFSVGTHAITTYNPNTLEVTNQWPYGDICSISPVGKGQGTEFNLTFRKGSGKKSETLKFSTEHRTELLTEALRFRTDFSEGKITGRRYNCYKHHWSDSRKPVILEVTPGGFDQINPATNRVLCSYDYRNIEGFVDLSDYQGGFCILYGGFSRLHLFASEQREEIIKSAIDHAGNYIGISLRIRKEPLEFEQYLNLRFGKYSTDESITSLAEFVVQKISPRHSEPVKRVLALTETCLVERDPATYNIATLKPLGEVFALVCDSENPQLFTIEFIKGQVRKYSSTERDSLLASLLDGVRASGNRDVCVKMTPTHKGQRWGLLSMPVDEEVESLHLRFLATPPNGNFADAVFRFNANISYSGVLHAVTQDGLFSENKEKLINNAITALLSQEGDVVASNAELESQFQAVRRLVASKAGFLAFTQLPKFRERLGVKVVKALKRSNNGIIHAAVDMLCALMCPMHDDYDLRQEQLNKASLLSSKKFLENLLEKFNSHVDHGTGALVISSLLDFLTFALCAPYSETTEGQQFDMLLEMVASNGRTLFKLFQHPSMAIIKGAGLVMKAIIEEGDKEIATKMQELALSEGALPRHLHTAMFTISSDQRMLTNRQLSRHLVGLWTADNATATNLLKRILPPGLLAYLESSDLVPEKDADRMHVRDNVKIAMDQYGKFNKVPEWQRLAGKAAKEVEKFAKEKVDLVLMHWRDRMGIAQKENINQKPVVLRKRRQRIKIEANWDLFYYRFGQDHARSNLIWNFKTREELKDTLESEMRAFNIDRELGSANVISWNHHEFEVKYECLAEEIKIGDYYLRLLLEEDENEESGSIKRSYEFFNELYHRFLLTPKVNMKCLCLQALAIVYGRCHEEIGPFTDTRYIIGMLERCTDKLERDRLILFLNKLILNKKNVKDLMDSNGIRILVDLLTLAHLHVSRATVPLQSNVIEAAPDMKRESEKEWYFGNADKERSGPYGFHEMQELWTKGMLNAKTRCWAQGMDGWRPLQSIPQLKWCLLASGQAVLNETDLATLILNMLITMCGYFPSRDQDNAIIRPLPKVKRLLSDSTCLPHIIQLLLTFDPILVEKVAILLYHIMQDNPQLPRLYLSGVFFFIMMYTGSNVLPVARFLKYTHTKQAFKSEETKGQDIFQRSILGHILPEAMVCYLENYEPEKFSEIFLGEFDTPEAIWSSEMRRLMIEKIAAHLADFTPRLQSNTRALYQYCPIPIINYPQLENELFCNIYYLKQLCDTLRFPDWPIKDPVKLLKDTLDAWKKEVEKKPPMMSIDDAYEVLNLPQGQGPHDESKIRKAYFRLAQKYHPDKNPEGRDMFEKVNKAYEFLCTKSAKIVDGPDPENIILILKTQSILFNRHKEDLQPYKYAGYPMLIRTITMETSDDLLFSKESPLLPAATELAFHTVNCSALNAEELRRENGLEVLQEAFSRCVAVLTRASKPSDMSVQVCGYISKCYSVAAQFEECREKITEMPSIIKDLCRVLYFGKSIPRVAALGVECVSSFAVDFWLQTHLFQAGILWYLLGFLFNYDYTLEESGIQKSEETNQQEVANSLAKLSVHALSRLGGYLAEEQATPENPTIRKSLAGMLTPYVARKLAVASVTEILKMLNSNTESPYLIWNNSTRAELLEFLESQQENMIKKGDCDKTYGSEFVYSDHAKELIVGEIFVRVYNEVPTFQLEVPKAFAASLLDYIGSQAQYLHTFMAITHAAKVESEQHGDRLPRVEMALEALRNVIKYNPGSESECIGHFKLIFSLLRVHGAGQVQQLALEVVNIVTSNQDCVNNIAESMVLSSLLALLHSLPSSRQLVLETLYALTSSTKIIKEAMAKGALIYLLDMFCNSTHPQVRAQTAELFAKMTADKLIGPKVRITLMKFLPSVFMDAMRDNPEAAVHIFEGTHENPELIWNDNSRDKVSTTVREMMLEHFKNQQDNPEANWKLPEDFAVVFGEAEGELAVGGVFLRIFIAQPAWVLRKPREFLIALLEKLTELLEKNNPHGETLETLTMATVCLFSAQPQLADQVPPLGHLPKVIQAMNHRNNAIPKSAIRVIHALSENELCVRAMASLETIGPLMNGMKKRADTVGLACEAINRMFQKEQSELVAQALKADLVPYLLKLLEGIGLENLDSPAATKAQIVKALKAMTRSLQYGEQVNEILCRSSVWSAFKDQKHDLFISESQTAGYLTGPGVAGYLTAGTSTSVMSNLPPPVDHEAGDLGYQT

SEQ ID NO: 25266 - protein, 173 aa, Homo sapiens
  Payload ID: 4997
  Gene Symbol: DNAJC13
  Gene Name: DnaJ (Hsp40) homolog, subfamily C, member 13
  ENSP ID: ENSP00000421735
CTDKLERDRLILFLNKLILNKKNVKDLMDSNGIRILVDLLTLAHLHVSRATVPLQSNVIEAAPDMKRESEKEWYFGNADKERSGPYGFHEMQELWTKGMLNAKTRCWAQGMDGWRPLQSIPQLKWCLLASGQAVLNETDLATLILNMLITMCGYFPSRVLFFKEILWKEMKSY

SEQ ID NO: 25267 - protein, 96 aa, Homo sapiens
  Payload ID: 4997
  Gene Symbol: DNAJC13
  Gene Name: DnaJ (Hsp40) homolog, subfamily C, member 13
  ENSP ID: ENSP00000426240
  MOD_RES (1)..(1): Any amino acid
XLVPYLLKLLEGIGLENLDSPAATKAQIVKALKAMTRSLQYGEQVNEILCRSSVWSAFKDQKHDLFISESQTAGYLTGVSPSLLTGSSPLHLRSGL

SEQ ID NO: 25268 - protein, 702 aa, Homo sapiens
  Payload ID: 4998
  Gene Symbol: DNAJC14
  Gene Name: DnaJ (Hsp40) homolog, subfamily C, member 14
  Uniprot ID: Q6Y2X3
  ENSP ID: ENSP00000316240
MAQKHPGERGLYGAHHSGGASLRTLGPSVDPEIPSFSGLRDSAGTAPNGTRCLTEHSGPKHTQHPNPAHWLDPSHGPPGGPGPPRDAEDPDQSETSSEEESGVDQELSKENETGNQKDGNSFLSIPSACNCQGTPGIPEGPYSEGGNGSSSNFCHHCTSPALGEDELEEEYDDEESLKFPSDFSRVSSGKKPPSRRQRHRFPTKEDTREGGRRDPRSPGRHRLGRKRSQADKRKGLGLWGAEELCQLGQAGFWWLIELLVLVGEYVETCGHLIYACRQLKSSDLDLFRVWMGVWTGRLGGWAQVMFQFLSQGFYCGVGLFTRFLKLLGALLLLALALFLGFLQLGWRFLVGLGDRLGWRDKATWLFSWLDSPALQRCLTLLRDSRPWQRLVRIVQWGWLELPWVKQNINRQGNAPVASGRYCQPEEEVARLLTMAGVPEDELNPFHVLGVEATASDVELKKAYRQLAVMVHPDKNHHPRAEEAFKVLRAAWDIVSNAEKRKEYEMKRMAENELSRSVNEFLSKLQDDLKEAMNTMMCSRCQGKHRRFEMDREPKSARYCAECNRLHPAEEGDFWAESSMLGLKITYFALMDGKVYDITEWAGCQRVGISPDTHRVPYHISFGSRIPGTRGRQRATPDAPPADLQDFLSRIFQVPPGQMPNGNFFAAPQPAPGAAAASKPNSTVPKGEAKPKRRKKVRRPFQR

SEQ ID NO: 25269 - protein, 702 aa, Homo sapiens; identical to SEQ ID NO: 25268
  Payload ID: 4998
  Gene Symbol: DNAJC14
  Gene Name: DnaJ (Hsp40) homolog, subfamily C, member 14
  Uniprot ID: Q6Y2X3
  ENSP ID: ENSP00000317500

SEQ ID NO: 25270 - protein, 702 aa, Homo sapiens; identical to SEQ ID NO: 25268
  Payload ID: 4998
  Gene Symbol: DNAJC14
  Gene Name: DnaJ (Hsp40) homolog, subfamily C, member 14
  Uniprot ID: Q6Y2X3
  ENSP ID: ENSP00000350223

SEQ ID NO: 25271 - protein, 79 aa, Homo sapiens
  Payload ID: 4998
  Gene Symbol: DNAJC14
  Gene Name: DnaJ (Hsp40) homolog, subfamily C, member 14
  ENSP ID: ENSP00000448876
MAQKHPGERGLYGAHHSGGASLRTLGPSVDPEIPSFSGLRDSAGTAPNGTRCLTEHSGPKHTQHPNPAHWLDPSHGPPG

SEQ ID NO: 25272 - protein, 151 aa, Homo sapiens
  Payload ID: 4998
  Gene Symbol: DNAJC14
  Gene Name: DnaJ (Hsp40) homolog, subfamily C, member 14
  ENSP ID: ENSP00000450196
MAQKHPGERGLYGAHHSGGASLRTLGPSVDPEIPSFSGLRDSAGTAPNGTRCLTEHSGPKHTQHPNPAHWLDPSHGPPGGPGPPRDAEDPDQSETSSEEESGVDQELSKENETGNQKDGNSFLSIPSACNCQGTPGIPEGPYSEGGNGSSS

SEQ ID NO: 25273 - protein, 150 aa, Homo sapiens
  Payload ID: 4999
  Gene Symbol: DNAJC15
  Gene Name: DnaJ (Hsp40) homolog, subfamily C, member 15
  Uniprot ID: Q9Y5T4
  ENSP ID: ENSP00000368523
MAARGVIAPVGESLRYAEYLQPSAKRPDADVDQQRLVRSLIAVGLGVAALAFAGRYAFRIWKPLEQVITETAKKISTPSFSSYYKGGFEQKMSRREAGLILGVSPSAGKAKIRTAHRRVMILNHPDKGGSPYVAAKINEAKDLLETTTKH

SEQ ID NO: 25274 - protein, 595 aa, Homo sapiens
  Payload ID: 5000
  Gene Symbol: DNAJC16
  Gene Name: DnaJ (Hsp40) homolog, subfamily C, member 16
  ENSP ID: ENSP00000364998
MEVRKLSISWQFLIVLVLILQILSALDFDPYRVLGVSRTASQADIKKAYKKLAREWHPDKNKDPGAEDKFIQISKAYEILSNEEKRSNYDQYGDAGENQGYQKQQQQREYRFRHFHENFYFDESFFHFPFNSERRDSIDEKYLLHFSHYVNEVVPDSFKKPYLIKITSDWCFSCIHIEPVWKEVIQELEELGVGIGVVHAGYERRLAHHLGAHSTPSILGIINGKISFFHNAVVRENLRQFVESLLPGNLVEKVTNKNYVRFLSGWQQENKPHVLLFDQTPIVPLLYKLTAFAYKDYLSFGYVYVGLRGTEEMTRRYNINIYAPTLLVFKEHINRPADVIQARGMKKQIIDDFITRNKYLLAARLTSQKLFHELCPVKRSHRQRKYCVVLLTAETTKLSKPFEAFLSFALANTQDTVRFVHVYSNRQQEFADTLLPDSEAFQGKSAVSILERRNTAGRVVYKTLEDPWIGSESDKFILLGYLDQLRKDPALLSSEAVLPDLTDELAPVFLLRWFYSASDYISDCWDSIFHNNWREMMPLLSLIFSALFILFGTVIVQAFSDSNDERESSPPEKEEAQEKTGKTEPSFTKENSRFL

SEQ ID NO: 25275 - protein, 782 aa, Homo sapiens
  Payload ID: 5000
  Gene Symbol: DNAJC16
  Gene Name: DnaJ (Hsp40) homolog, subfamily C, member 16
  Uniprot ID: Q9Y2G8
  ENSP ID: ENSP00000365007
MEVRKLSISWQFLIVLVLILQILSALDFDPYRVLGVSRTASQADIKKAYKKLAREWHPDKNKDPGAEDKFIQISKAYEILSNEEKRSNYDQYGDAGENQGYQKQQQQREYRFRHFHENFYFDESFFHFPFNSERRDSIDEKYLLHFSHYVNEVVPDSFKKPYLIKITSDWCFSCIHIEPVWKEVIQELEELGVGIGVVHAGYERRLAHHLGAHSTPSILGIINGKISFFHNAVVRENLRQFVESLLPGNLVEKVTNKNYVRFLSGWQQENKPHVLLFDQTPIVPLLYKLTAFAYKDYLSFGYVYVGLRGTEEMTRRYNINIYAPTLLVFKEHINRPADVIQARGMKKQIIDDFITRNKYLLAARLTSQKLFHELCPVKRSHRQRKYCVVLLTAETTKLSKPFEAFLSFALANTQDTVRFVHVYSNRQQEFADTLLPDSEAFQGKSAVSILERRNTAGRVVYKTLEDPWIGSESDKFILLGYLDQLRKDPALLSSEAVLPDLTDELAPVFLLRWFYSASDYISDCWDSIFHNNWREMMPLLSLIFSALFILFGTVIVQAFSDSNDERESSPPEKEEAQEKTGKTEPSFTKENSSKIPKKGFVEVTELTDVTYTSNLVRLRPGHMNVVLILSNSTKTSLLQKFALEVYTFTGSSCLHFSFLSLDKHREWLEYLLEFAQDAAPIPNQYDKHFMERDYTGYVLALNGHKKYFCLFKPQKTVEEEEAIGSCSDVDSSLYLGESRGKPSCGLGSRPIKGKLSKLSLWMERLLEGSLQRFYIPSWPELD

SEQ ID NO: 25276 - protein, 655 aa, Homo sapiens
  Payload ID: 5000
  Gene Symbol: DNAJC16
  Gene Name: DnaJ (Hsp40) homolog, subfamily C, member 16
  ENSP ID: ENSP00000365009
MEVRKLSISWQFLIVLVLILQILSALDFDPYRVLGVSRTASQADIKKAYKKLAREWHPDKNKDPGAEDKFIQISKAYEILSNEEKRSNYDQYGDAGENQGYQKQQQQREYRFRHFHENFYFDESFFHFPFNSERRDSIDEKYLLHFSHYVNEVVPDSFKKPYLIKITSDWCFSCIHIEPVWKEVIQELEELGVGIGVVHAGYERRLAHHLGAHSTPSILGIINGKISFFHNAVVRENLRQFVESLLPGNLVEKVTNKNYVRFLSGWQQENKPHVLLFDQTPIVPLLYKLTAFAYKDYLSFGYVYVGLRGTEEMTRRYNINIYAPTLLVFKEHINRPADVIQARGMKKQIIDDFITRNKYLLAARLTSQKLFHELCPVKRSHRQRKYCVVLLTAETTKLSKPFEAFLSFALANTQDTVRFVHVYSNRQQEFADTLLPDSEAFQGKSAVSILERRNTAGRVVYKTLEDPWIGSESDKFILLGYLDQLRKDPALLSSEAVLPDLTDELAPVFLLRWFYSASDYISDCWDSIFHNNWREMMPLLSLIFSALFILFGTVIVQAFSDSNDERESSPPEKEEAQEKTGKTEPSFTKENSSKIPKKGFVEVTELTDVTYTSNLVRLRPGHMNVVLILSNSTKTSLLQKFALEVYTFTGKIIRW

SEQ ID NO: 25277 - protein, 595 aa, Homo sapiens; identical to SEQ ID NO: 25274
  Payload ID: 5000
  Gene Symbol: DNAJC16
  Gene Name: DnaJ (Hsp40) homolog, subfamily C, member 16
  ENSP ID: ENSP00000431886

SEQ ID NO: 25278 - protein, 97 aa, Homo sapiens
  Payload ID: 5000
  Gene Symbol: DNAJC16
  Gene Name: DnaJ (Hsp40) homolog, subfamily C, member 16
  ENSP ID: ENSP00000431982
  MOD_RES (1)..(1): Any amino acid
XDLTDELAPVFLLRWFYSASDYISDCWDSIFHNNWREMMPLLSLIFSALFILFGTVIVQAFSDSNDERESSPPEKEEAQEKTGKTEPSFTKENSRFL

SEQ ID NO: 25279 - protein, 470 aa, Homo sapiens
  Payload ID: 5000
  Gene Symbol: DNAJC16
  Gene Name: DnaJ (Hsp40) homolog, subfamily C, member 16
  Uniprot ID: Q9Y2G8
  ENSP ID: ENSP00000480224
MTRRYNINIYAPTLLVFKEHINRPADVIQARGMKKQIIDDFITRNKYLLAARLTSQKLFHELCPVKRSHRQRKYCVVLLTAETTKLSKPFEAFLSFALANTQDTVRFVHVYSNRQQEFADTLLPDSEAFQGKSAVSILERRNTAGRVVYKTLEDPWIGSESDKFILLGYLDQLRKDPALLSSEAVLPDLTDELAPVFLLRWFYSASDYISDCWDSIFHNNWREMMPLLSLIFSALFILFGTVIVQAFSDSNDERESSPPEKEEAQEKTGKTEPSFTKENSSKIPKKGFVEVTELTDVTYTSNLVRLRPGHMNVVLILSNSTKTSLLQKFALEVYTFTGSSCLHFSFLSLDKHREWLEYLLEFAQDAAPIPNQYDKHFMERDYTGYVLALNGHKKYFCLFKPQKTVEEEEAIGSCSDVDSSLYLGESRGKPSCGLGSRPIKGKLSKLSLWMERLLEGSLQRFYIPSWPELD

SEQ ID NO: 25280 - protein, 304 aa, Homo sapiens
  Payload ID: 5001
  Gene Symbol: DNAJC17
  Gene Name: DnaJ (Hsp40) homolog, subfamily C, member 17
  Uniprot ID: Q9NVM6
  ENSP ID: ENSP00000220496
MAVTKELLQMDLYALLGIEEKAADKEVKKAYRQKALSCHPDKNPDNPRAAELFHQLSQALEVLTDAAARAAYDKVRKAKKQAAERTQKLDEKRKKVKLDLEARERQAQAQESEEEEESRSTRTLEQEIERLREEGSRQLEEQQRLIREQIRQERDQRLRGKAENTEGQGTPKLKLKWKCKKEDESKGGYSKDVLLRLLQKYGEVLNLVLSSKKPGTAVVEFATVKAAELAVQNEVGLVDNPLKISWLEGQPQDAVGRSHSGLSKGSVLSERDYESLVMMRMRQAAERQQLIARMQQEDQEGPPT

SEQ ID NO: 25281 - protein, 143 aa, Homo sapiens
  Payload ID: 5001
  Gene Symbol: DNAJC17
  Gene Name: DnaJ (Hsp40) homolog, subfamily C, member 17
  ENSP ID: ENSP00000452716
MAVTKELLQMDLYALLGIEEKAADKEVKKAYRQKALSCHPDKNPDNPRAAELFHQLSQALEVLTDAAARAAYDKVRKAKKQAAERTQKLDEKRKKVKLGRCHHSARWPVVSCGHFHSSPSPEASLPATHLKAFWLRLWAKRCS

SEQ ID NO: 25282 - protein, 131 aa, Homo sapiens
  Payload ID: 5001
  Gene Symbol: DNAJC17
  Gene Name: DnaJ (Hsp40) homolog, subfamily C, member 17
  ENSP ID: ENSP00000453298
MAVTKELLQMDLYALLGIEEKAADKEVKKAYRQKALSCHPDKNPDNPRAAELFHQLSQALEVLTDAAARAAYDKVRKAKKQAAERTQKLDEKRKKVKLDLEARERQAQAQESEEEEESRSTRTLEQEVAEP

SEQ ID NO: 25283 - protein, 102 aa, Homo sapiens
  Payload ID: 5001
  Gene Symbol: DNAJC17
  Gene Name: DnaJ (Hsp40) homolog, subfamily C, member 17
  ENSP ID: ENSP00000453354
MAVTKELLQMDLYALLGIEEKAADKEIGCPSLYAHQECVEYLSSSGCRESGVLCSCLLQQPLDICSGEVEHLAGGGPSSCAGRQWLTPSMALASSIASLPGG

SEQ ID NO: 25284 - protein, 131 aa, Homo sapiens; identical to SEQ ID NO: 25282
  Payload ID: 5001
  Gene Symbol: DNAJC17
  Gene Name: DnaJ (Hsp40) homolog, subfamily C, member 17
  ENSP ID: ENSP00000454082

SEQ ID NO: 25285 - protein, 125 aa, Homo sapiens
  Payload ID: 5001
  Gene Symbol: DNAJC17
  Gene Name: DnaJ (Hsp40) homolog, subfamily C, member 17
  ENSP ID: ENSP00000473912
MAVTKELLQMDLYALLGIEEKAADKEVKKAYRQKALSCHPDKNPDNPRAAELFHQLSQALEVLTDAAARAAYDKVRKAKKQAAERTQKLDEKRKKVKLDRTPERRGFPAAGGTAEAHPGADTPGA

SEQ ID NO: 25286 - protein, 131 aa, Homo sapiens; identical to SEQ ID NO: 25282
  Payload ID: 5001
  Gene Symbol: DNAJC17
  Gene Name: DnaJ (Hsp40) homolog, subfamily C, member 17
  ENSP ID: ENSP00000485700

SEQ ID NO: 25287 - protein, 358 aa, Homo sapiens
  Payload ID: 5002
  Gene Symbol: DNAJC18
  Gene Name: DnaJ (Hsp40) homolog, subfamily C, member 18
  Uniprot ID: Q9H819
  ENSP ID: ENSP00000302843
MAATLGSGERWTEAYIDAVRRNKYPEDTPPESHDPCGCCNCMKAQKEKKSENEWTQTRQGEGNSTYSEEQLLGVQRIKKCRNYYEILGVSRDASDEELKKAYRKLALKFHPDKNCAPGATDAFKAIGNAFAVLSNPDKRLRYDEYGDEQVTFTAPRARPYNYYRDFEADITPEELFNVFFGGHFPTGNIHMFSNVTDDTYYYRRRHRHERTQTQKEEEEEKPQTTYSAFIQLLPVLVIVIISVITQLLATNPPYSLFYKSTLGYTISRETQNLQVPYFVDKNFDKAYRGASLHDLEKTIEKDYIDYIQTSCWKEKQQKSELTNLAGLYRDERLKQKAESLKLENCEKLSKLIGLRRGG

SEQ ID NO: 25288 - protein, 44 aa, Homo sapiens
  Payload ID: 5002
  Gene Symbol: DNAJC18
  Gene Name: DnaJ (Hsp40) homolog, subfamily C, member 18
  ENSP ID: ENSP00000424438
MAATLGSGERWTEGSRNAEITMKFWEFLEMLVTKSLRKLTENSP

SEQ ID NO: 25289 - protein, 181 aa, Homo sapiens
  Payload ID: 5002
  Gene Symbol: DNAJC18
  Gene Name: DnaJ (Hsp40) homolog, subfamily C, member 18
  ENSP ID: ENSP00000424572
MAATLGSGERWTEAYIDAVRRNKYPEDTPPESHDPCGCCNCMKAQKEKKSENEWTQTRQGEGNSTYSEEQLLGVQRIKKCRNYYEILGVSRDASDEELKKAYRKLALKFHPDKNCAPGATDAFKAIGNAFAVLSNPDKRLRYDEYGDEQVTFTAPRARPYNYYRDFEADITPEELFNVFFG

SEQ ID NO: 25290 - protein, 121 aa, Homo sapiens
  Payload ID: 5002
  Gene Symbol: DNAJC18
  Gene Name: DnaJ (Hsp40) homolog, subfamily C, member 18
  ENSP ID: ENSP00000425192
  MOD_RES (1)..(1): Any amino acid
XRTQTQKEEEEEKPQTTYSAFIQLLPVLVIVIISVITQLLATNPPYSLFYKSTLGYTISRETQNLQVPYFVDKNFDKAYRGASLHDLEKTIEKDYIDYIQTSCWKEKQQRGTLLTEVLAHV

SEQ ID NO: 25291 - protein, 173 aa, Homo sapiens
  Payload ID: 5002
  Gene Symbol: DNAJC18
  Gene Name: DnaJ (Hsp40) homolog, subfamily C, member 18
  ENSP ID: ENSP00000425523
MAATLGSGERWTEAYIDAVRRNKYPEDTPPESHDPCGCCNCMKAQKEKKSENEWTQTRQGEGNSTYSEEQLLGVQRIKKCRNYYEILGVSRDASDEELKKAYRKLALKFHPDKNCAPGATDAFKAIGNAFAVLSNPDKRLRYDEYGDEQVTFTAPRARPYNYYRDFEADITPE

SEQ ID NO: 25292 - protein, 177 aa, Homo sapiens
  Payload ID: 5002
  Gene Symbol: DNAJC18
  Gene Name: DnaJ (Hsp40) homolog, subfamily C, member 18
  ENSP ID: ENSP00000426338
ADITPEELFNVFFGGHFPTGNIHMFSNVTDDTYYYRRRHRHERTQTQKEEEEEKPQTTYSAFIQLLPVLVIVIISVITQLLATNPPYSLFYKSTLGYTISRETQNLQVPYFVDKNFDKAYRGASLHDLEKTIEKDYIDYIQTSCWKEKQQRFWHSPCFRTSAQQMSFEERILRSRKQ

SEQ ID NO: 25293 - protein, 25 aa, Homo sapiens
  Payload ID: 5002
  Gene Symbol: DNAJC18
  Gene Name: DnaJ (Hsp40) homolog, subfamily C, member 18
  ENSP ID: ENSP00000426819
MAATLGSGERWTEAYIDAVRRNKYP

SEQ ID NO: 25294 - protein, 87 aa, Homo sapiens
  Payload ID: 5002
  Gene Symbol: DNAJC18
  Gene Name: DnaJ (Hsp40) homolog, subfamily C, member 18
  ENSP ID: ENSP00000427700
MAATLGSGERWTEAYIDAVRRNKYPEDTPPESHDPCGCCNCMKAQKEKKSENEWTQTRQGEGNSTYSEEQLLGVQSNRKCICSPEQS

SEQ ID NO: 25295 - protein, 30 aa, Homo sapiens
  Payload ID: 5002
  Gene Symbol: DNAJC18
  Gene Name: DnaJ (Hsp40) homolog, subfamily C, member 18
  ENSP ID: ENSP00000485339
  MOD_RES (1)..(1): Any amino acid
XDERLKQKAESLKLENCEKLSKLIGLRRGG

SEQ ID NO: 25296 - protein, 116 aa, Homo sapiens
  Payload ID: 5003
  Gene Symbol: DNAJC19
  Gene Name: DnaJ (Hsp40) homolog, subfamily C, member 19
  Uniprot ID: Q96DA6
  ENSP ID: ENSP00000372005
MASTVVAVGLTIAAAGFAGRYVLQAMKHMEPQVKQVFQSLPKSAFSGGYYRGGFEPKMTKREAALILGVSPTANKGKIRDAHRRIMLLNHPDKGGSPYIAAKINEAKDLLEGQAKK

SEQ ID NO: 25297 - protein, 47 aa, Homo sapiens
  Payload ID: 5003
  Gene Symbol: DNAJC19
  Gene Name: DnaJ (Hsp40) homolog, subfamily C, member 19
  ENSP ID: ENSP00000418058
MASTVVAVGLTIAAAGFAGRYVLQAMKHMEPQVKQVFQSLPKSPYCQ

SEQ ID NO: 25298 - protein, 91 aa, Homo sapiens
  Payload ID: 5003
  Gene Symbol: DNAJC19
  Gene Name: DnaJ (Hsp40) homolog, subfamily C, member 19
  Uniprot ID: Q96DA6
  ENSP ID: ENSP00000419191
MKHMEPQVKQVFQSLPKSAFSGGYYRGGFEPKMTKREAALILGVSPTANKGKIRDAHRRIMLLNHPDKGGSPYIAAKINEAKDLLEGQAKK

SEQ ID NO: 25299 - protein, 59 aa, Homo sapiens
  Payload ID: 5003
  Gene Symbol: DNAJC19
  Gene Name: DnaJ (Hsp40) homolog, subfamily C, member 19
  ENSP ID: ENSP00000419991
MASTVVAVGLTIAAAGFAGRYVLQAMKHMEPQVKQVFQSLPKSAFSGGYYRALLPIKGK

SEQ ID NO: 25300 - protein, 91 aa, Homo sapiens; identical to SEQ ID NO: 25298
  Payload ID: 5003
  Gene Symbol: DNAJC19
  Gene Name: DnaJ (Hsp40) homolog, subfamily C, member 19
  Uniprot ID: Q96DA6
  ENSP ID: ENSP00000420767

SEQ ID NO: 25301 - protein, 568 aa, Homo sapiens
  Payload ID: 5004
  Gene Symbol: DNAJC2
  Gene Name: DnaJ (Hsp40) homolog, subfamily C, member 2
  Uniprot ID: Q99543
  ENSP ID: ENSP00000249270
MLLLPSAADGRGTAITHALTSASTLCQVEPVGRWFEAFVKRRNRNASASFQELEDKKELSEESEDEELQLEEFPMLKTLDPKDWKNQDHYAVLGLGHVRYKATQRQIKAAHKAMVLKHHPDKRKAAGEPIKEGDNDYFTCITKAYEMLSDPVKRRAFNSVDPTFDNSVPSKSEAKDNFFEVFTPVFERNSRWSNKKNVPKLGDMNSSFEDVDIFYSFWYNFDSWREFSYLDEEEKEKAECRDERRWIEKQNRATRAQRKKEEMNRIRTLVDNAYSCDPRIKKFKEEEKAKKEAEKKAKAEAKRKEQEAKEKQRQAELEAARLAKEKEEEEVRQQALLAKKEKDIQKKAIKKERQKLRNSCKIEEINEQIRKEKEEAEARMRQASKNTEKSTGGGGNGSKNWSEDDLQLLIKAVNLFPAGTNSRWEVIANYMNIHSSSGVKRTAKDVIGKAKSLQKLDPHQKDDINKKAFDKFKKEHGVVPQADNATPSERFEGPYTDFTPWTTEEQKLLEQALKTYPVNTPERWEKIAEAVPGRTKKDCMKRYKELVEMVKAKKAAQEQVLNASRAKK

SEQ ID NO: 25302 - protein, 167 aa, Homo sapiens
  Payload ID: 5004
  Gene Symbol: DNAJC2
  Gene Name: DnaJ (Hsp40) homolog, subfamily C, member 2
  ENSP ID: ENSP00000368559
MLLLPSAADGRGTAITHALTSASTLCQVEPVGRWFEAFVKRRNRNASASFQELEDKKELSEESEDEELQLEEFPMLKTLDPKDWKNQDHYAVLGLGHVRYKATQRQIKAAHKAMVLKHHPDKRKAAGEPIKEGDNDYFTCITKGSPGDSYQKLILQLIHLMKCYLIQ

SEQ ID NO: 25303 - protein, 621 aa, Homo sapiens
  Payload ID: 5004
  Gene Symbol: DNAJC2
  Gene Name: DnaJ (Hsp40) homolog, subfamily C, member 2
  Uniprot ID: Q99543
  ENSP ID: ENSP00000368565
MLLLPSAADGRGTAITHALTSASTLCQVEPVGRWFEAFVKRRNRNASASFQELEDKKELSEESEDEELQLEEFPMLKTLDPKDWKNQDHYAVLGLGHVRYKATQRQIKAAHKAMVLKHHPDKRKAAGEPIKEGDNDYFTCITKAYEMLSDPVKRRAFNSVDPTFDNSVPSKSEAKDNFFEVFTPVFERNSRWSNKKNVPKLGDMNSSFEDVDIFYSFWYNFDSWREFSYLDEEEKEKAECRDERRWIEKQNRATRAQRKKEEMNRIRTLVDNAYSCDPRIKKFKEEEKAKKEAEKKAKAEAKRKEQEAKEKQRQAELEAARLAKEKEEEEVRQQALLAKKEKDIQKKAIKKERQKLRNSCKTWNHFSDNEAERVKMMEEVEKLCDRLELASLQCLNETLTSCTKEVGKAALEKQIEEINEQIRKEKEEAEARMRQASKNTEKSTGGGGNGSKNWSEDDLQLLIKAVNLFPAGTNSRWEVIANYMNIHSSSGVKRTAKDVIGKAKSLQKLDPHQKDDINKKAFDKFKKEHGVVPQADNATPSERFEGPYTDFTPWTTEEQKLLEQALKTYPVNTPERWEKIAEAVPGRTKKDCMKRYKELVEMVKAKKAAQEQVLNASRAKK

SEQ ID NO: 25304 - protein, 188 aa, Homo sapiens
  Payload ID: 5004
  Gene Symbol: DNAJC2
  Gene Name: DnaJ (Hsp40) homolog, subfamily C, member 2
  ENSP ID: ENSP00000399058
MLKTLDPKDWKNQDHYAVLGLGHVRYKATQRQIKAAHKAMVLKHHPDKRKAAGEPIKEGDNDYFTCITKAYEMLSDPVKRRAFNSVDPTFDNSVPSKSEAKDNFFEVFTPVFERNSRWSNKKNVPKLGDMNSSFEDVDIFYSFWYNFDSWREFSYLDEEEKEKAECRDERRWIEKQNRATRAQRKKEE

SEQ ID NO: 25305 - protein, 118 aa, Homo sapiens
  Payload ID: 5004
  Gene Symbol: DNAJC2
  Gene Name: DnaJ (Hsp40) homolog, subfamily C, member 2
  ENSP ID: ENSP00000406275
MLLLPSAADGRGTAITHALTSASTLCQVEPVGRWFEAFVKRRNRNASASFQELEDKKELSEESEDEELQLEEFPMLKTLDPKDWKNQDHYAVLGLGHVRYKATQRQIKAARKYLVILK

SEQ ID NO: 25306 - protein, 243 aa, Homo sapiens
  Payload ID: 5004
  Gene Symbol: DNAJC2
  Gene Name: DnaJ (Hsp40) homolog, subfamily C, member 2
  ENSP ID: ENSP00000412611
  MOD_RES (1)..(1): Any amino acid
XTAITHALTSASTLCQVEPVGRWFEAFVKRRNRNASASFQELEDKKELSEESEDEELQLEEFPMLKTLDPKDWKNQDHYAVLGLGHVRYKATQRQIKAAHKAMVLKHHPDKRKAAGEPIKEGDNDYFTCITKAYEMLSDPVKRRAFNSVDPTFDNSVPSKSEAKDNFFEVFTPVFERNSRYNFDSWREFSYLDEEEKEKAECRDERRWIEKQNRATRAQRKKEEMNRIRTLVDNAYSCDPRIK

SEQ ID NO: 25307 - protein, 531 aa, Homo sapiens
  Payload ID: 5005
  Gene Symbol: DNAJC21
  Gene Name: DnaJ (Hsp40) homolog, subfamily C, member 21
  Uniprot ID: Q5F1R6
  ENSP ID: ENSP00000343728
MKCHYEALGVRRDASEEELKKAYRKLALKWHPDKNLDNAAEAAEQFKLIQAAYDVLSDPQERAWYDNHREALLKGGFDGEYQDDSLDLLRYFTVTCYSGYGDDEKGFYTVYRNVFEMIAKEELESVLEEEVDDFPTFGDSQSDYDTVVHPFYAYWQSFCTQKNFAWKEEYDTRQASNRWEKRAMEKENKKIRDKARKEKNELVRQLVAFIRKRDKRVQAHRKLVEEQNAEKARKAEEMRRQQKLKQAKLVEQYREQSWMTMANLEKELQEMEARYEKEFGDGSDENEMEEHELKDEEDGKDSDEAEDAELYDDLYCPACDKSFKTEKAMKNHEKSKKHREMVALLKQQLEEEEENFSRPQIDENPLDDNSEEEMEDAPKQKLSKKQKKKKQKPAQNYDDNFNVNGPGEGVKVDPEDTNLNQDSAKELEDSPQENVSVTEIIKPCDDPKSEAKSVPKPKGKKTKDMKKPVRVPAEPQTMSVLISCTTCHSEFPSRNKLFDHLKATGHARAPSSSSLNSATSSQSKKEKRKNR

SEQ ID NO: 25308 - protein, 576 aa, Homo sapiens
  Payload ID: 5005
  Gene Symbol: DNAJC21
  Gene Name: DnaJ (Hsp40) homolog, subfamily C, member 21
  Uniprot ID: Q5F1R6
  ENSP ID: ENSP00000371451
MKCHYEALGVRRDASEEELKKAYRKLALKWHPDKNLDNAAEAAEQFKLIQAAYDVLSDPQERAWYDNHREALLKGGFDGEYQDDSLDLLRYFTVTCYSGYGDDEKGFYTVYRNVFEMIAKEELESVLEEEVDDFPTFGDSQSDYDTVVHPFYAYWQSFCTQKNFAWKEEYDTRQASNRWEKRAMEKENKKIRDKARKEKNELVRQLVAFIRKRDKRVQAHRKLVEEQNAEKARKAEEMRRQQKLKQAKLVEQYREQSWMTMANLEKELQEMEARYEKEFGDGSDENEMEEHELKDEEDGKDSDEAEDAELYDDLYCPACDKSFKTEKAMKNHEKSKKHREMVALLKQQLEEEEENFSRPQIDENPLDDNSEEEMEDAPKQKLSKKQKKKKQKPAQDVPGKDSYLPAAHFQMAWGKKCVLGERRDGESEHKCAKMLLENRQNYDDNFNVNGPGEGVKVDPEDTNLNQDSAKELEDSPQENVSVTEIIKPCDDPKSEAKSVPKPKGKKTKDMKKPVRVPAEPQTMSVLISCTTCHSEFPSRNKLFDHLKATGHARAPSSSSLNSATSSQSKKEKRKNR

SEQ ID NO: 25309 - protein, 341 aa, Homo sapiens
  Payload ID: 5006
  Gene Symbol: DNAJC22
  Gene Name: DnaJ (Hsp40) homolog, subfamily C, member 22
  Uniprot ID: Q8N4W6
  ENSP ID: ENSP00000378508
MAKGLLVTYALWAVGGPAGLHHLYLGRDSHALLWMLTLGGGGLGWLWEFWKLPSFVAQANRAQGQRQSPRGVTPPLSPIRFAAQVIVGIYFGLVALISLSSMVNFYIVALPLAVGLGVLLVAAVGNQTSDFKNTLGSAFLTSPIFYGRPIAILPISVAASITAQRHRRYKALVASEPLSVRLYRLGLAYLAFTGPLAYSALCNTAATLSYVAETFGSFLNWFSFFPLLGRLMEFVLLLPYRIWRLLMGETGFNSSCFQEWAKLYEFVHSFQDEKRQLAYQVLGLSEGATNEEIHRSYQELVKVWHPDHNLDQTEEAQRHFLEIQAAYEVLSQPRKPWGSRR

SEQ ID NO: 25310 - protein, 341 aa, Homo sapiens; identical to SEQ ID NO: 25309
  Payload ID: 5006
  Gene Symbol: DNAJC22
  Gene Name: DnaJ (Hsp40) homolog, subfamily C, member 22
  Uniprot ID: Q8N4W6
  ENSP ID: ENSP00000446830

SEQ ID NO: 25311 - protein, 29 aa, Homo sapiens
  Payload ID: 5007
  Gene Symbol: DNAJC24
  Gene Name: DnaJ (Hsp40) homolog, subfamily C, member 24
  ENSP ID: ENSP00000379279
  MOD_RES (1)..(1): Any amino acid
XDDLRNVGPVDAQVYLEEMSWNEVTSQRQ

SEQ ID NO: 25312 - protein, 149 aa, Homo sapiens
  Payload ID: 5007
  Gene Symbol: DNAJC24
  Gene Name: DnaJ (Hsp40) homolog, subfamily C, member 24
  ENSP ID: ENSP00000417548
MMAVEQMPKKDWYSILGADPSANISDLKQKYQKLILMYHPDKQSTDVPAGTVEECVQKFIEIDQAWKILGNEETKREYDLQRCEDDLRNVGPVDAQVYLEEMSWNEGDHSFYLSCRCGGKYSVSKDEAEEVSLISCDTCSLIIELLHYN

SEQ ID NO: 25313 - protein, 44 aa, Homo sapiens
  Payload ID: 5007
  Gene Symbol: DNAJC24
  Gene Name: DnaJ (Hsp40) homolog, subfamily C, member 24
  ENSP ID: ENSP00000432072
MMAVEQMPKKDWYSILGADPSANISDLKQKYQKLILMDLFLYVI

SEQ ID NO: 25314 - protein, 42 aa, Homo sapiens
  Payload ID: 5007
  Gene Symbol: DNAJC24
  Gene Name: DnaJ (Hsp40) homolog, subfamily C, member 24
  ENSP ID: ENSP00000432388
  MOD_RES (1)..(1): Any amino acid
XSANISDLKQKYQKLILMVIGFFPPLFGVHTWKDASVTGKFL

SEQ ID NO: 25315 - protein, 43 aa, Homo sapiens
  Payload ID: 5007
  Gene Symbol: DNAJC24
  Gene Name: DnaJ (Hsp40) homolog, subfamily C, member 24
  ENSP ID: ENSP00000434114
MAVEQMPKKDWYSILGADPSANISDLKQKYQKLILMALAGCFY

SEQ ID NO: 25316 - protein, 85 aa, Homo sapiens
  Payload ID: 5007
  Gene Symbol: DNAJC24
  Gene Name: DnaJ (Hsp40) homolog, subfamily C, member 24
  ENSP ID: ENSP00000435771
MMAVEQMPKKDWYSILGADPSANISDLKQKYQKLILMYHPDKQSTDVPAGTVEECVQKFIEIDQAWKILGNEETKREYDLQRCGS

SEQ ID NO: 25317 - protein, 273 aa, Homo sapiens
  Payload ID: 5008
  Gene Symbol: DNAJC27
  Gene Name: DnaJ (Hsp40) homolog, subfamily C, member 27
  Uniprot ID: Q9NZQ0
  ENSP ID: ENSP00000264711
MEANMPKRKEPGRSLRIKVISMGNAEVGKSCIIKRYCEKRFVSKYLATIGIDYGVTKVHVRDREIKVNIFDMAGHPFFYEVRNEFYKDTQGVILVYDVGQKDSFDALDAWLAEMKQELGPHGNMENIIFVVCANKIDCTKHRCVDESEGRLWAESKGFLYFETSAQTGEGINEMFQTFYISIVDLCENGGKRPTTNSSASFTKEQADAIRRIRNSKDSWDMLGVKPGASRDEVNKAYRKLAVLLHPDKCVAPGSEDAFKAVVNARTALLKNIK

SEQ ID NO: 25318 - protein, 90 aa, Homo sapiens
  Payload ID: 5008
  Gene Symbol: DNAJC27
  Gene Name: DnaJ (Hsp40) homolog, subfamily C, member 27
  Uniprot ID: Q9NZQ0
  ENSP ID: ENSP00000370187
MEANMPKRKEPGRSLRIKVISMGNAEVGKSCIIKRYCEKRFVSKYLATIGIDYGVTKVHVRDREIKVNIFDMAGHPFFYEMRKLRRREVK

SEQ ID NO: 25319 - protein, 177 aa, Homo sapiens
  Payload ID: 5008
  Gene Symbol: DNAJC27
  Gene Name: DnaJ (Hsp40) homolog, subfamily C, member 27
  Uniprot ID: Q9NZQ0
  ENSP ID: ENSP00000440086
MEANMPKRKEPGRSLRIKVISMGNAEVGKSCIIKRYCEKRFVSKYLATIGIDYGVTKVHVRDREIKVNIFDMAGHPFFYEVRNEFYKDTQGVILVYDVGQKDSFDALDAWLAEMKQELGPHGNMENIIFVVCANKIDCTKHRCVDESEGRLWAESKGFLYFETSAQTGEGINEMFQG

SEQ ID NO: 25320 - protein, 388 aa, Homo sapiens
  Payload ID: 5009
  Gene Symbol: DNAJC28
  Gene Name: DnaJ (Hsp40) homolog, subfamily C, member 28
  Uniprot ID: Q9NX36
  ENSP ID: ENSP00000320303
MNTMYVMMAQILRSHLIKATVIPNRVKMLPYFGIIRNRMMSTHKSKKKIREYYRLLNVEEGCSADEVRESFHKLAKQYHPDSGSNTADSATFIRIEKAYRKVLSHVIEQTNASQSKGEEEEDVEKFKYKTPQHRHYLSFEGIGFGTPTQREKHYRQFRADRAAEQVMEYQKQKLQSQYFPDSVIVKNIRQSKQQKITQAIERLVEDLIQESMAKGDFDNLSGKGKPLKKFSDCSYIDPMTHNLNRILIDNGYQPEWILKQKEISDTIEQLREAILVSRKKLGNPMTPTEKKQWNHVCEQFQENIRKLNKRINDFNLIVPILTRQKVHFDAQKEIVRAQKIYETLIKTKEVTDRNPNNLDQGEGEKTPEIKKGFLNWMNLWKFIKIRSF

SEQ ID NO: 25321 - protein, 388 aa, Homo sapiens; identical to SEQ ID NO: 25320
  Payload ID: 5009
  Gene Symbol: DNAJC28
  Gene Name: DnaJ (Hsp40) homolog, subfamily C, member 28
  Uniprot ID: Q9NX36
  ENSP ID: ENSP00000371373

SEQ ID NO: 25322 - protein, 388 aa, Homo sapiens; identical to SEQ ID NO: 25320
  Payload ID: 5009
  Gene Symbol: DNAJC28
  Gene Name: DnaJ (Hsp40) homolog, subfamily C, member 28
  Uniprot ID: Q9NX36
  ENSP ID: ENSP00000385777

SEQ ID NO: 25323 - protein, 388 aa, Homo sapiens; identical to SEQ ID NO: 25320
  Payload ID: 5009
  Gene Symbol: DNAJC28
  Gene Name: DnaJ (Hsp40) homolog, subfamily C, member 28
  Uniprot ID: Q9NX36
  ENSP ID: ENSP00000461084

SEQ ID NO: 25324 - protein, 388 aa, Homo sapiens; identical to SEQ ID NO: 25320
  Payload ID: 5009
  Gene Symbol: DNAJC28
  Gene Name: DnaJ (Hsp40) homolog, subfamily C, member 28
  Uniprot ID: Q9NX36
  ENSP ID: ENSP00000461665

SEQ ID NO: 25325 - protein, 388 aa, Homo sapiens; identical to SEQ ID NO: 25320
  Payload ID: 5009
  Gene Symbol: DNAJC28
  Gene Name: DnaJ (Hsp40) homolog, subfamily C, member 28
  Uniprot ID: Q9NX36
  ENSP ID: ENSP00000461737

SEQ ID NO: 25326 - protein, 388 aa, Homo sapiens; identical to SEQ ID NO: 25320
  Payload ID: 5009
  Gene Symbol: DNAJC28
  Gene Name: DnaJ (Hsp40) homolog, subfamily C, member 28
  Uniprot ID: Q9NX36
  ENSP ID: ENSP00000479716

SEQ ID NO: 25327 - protein, 388 aa, Homo sapiens; identical to SEQ ID NO: 25320
  Payload ID: 5009
  Gene Symbol: DNAJC28
  Gene Name: DnaJ (Hsp40) homolog, subfamily C, member 28
  Uniprot ID: Q9NX36
  ENSP ID: ENSP00000483670

SEQ ID NO: 25328 - protein, 453 aa, Homo sapiens
  Payload ID: 5010
  Gene Symbol: DNAJC3
  Gene Name: DnaJ (Hsp40) homolog, subfamily C, member 3
  ENSP ID: ENSP00000365991
MVAPGSVTSRLGSVFPFLLVLVDLQYEGAECGVNADVEKHLELGKKLLAAGQLADALSQFHAAVDGDPDNYIAYYRRATVFLAMGKSKAALPDLTKVIQLKMDFTAARLQRGHLLLKQGKLDEAEDDFKKVVCVWDAELRELRAECFIKEGEPRKAISDLKAASKLKNDNTEAFYKISTLYYQLGDHELSLSEVRECLKLDQDHKRCFAHYKQVKKLNKLIESAEELIRDGRYTDATSKYESVMKTEPSIAEYTVRSKERICHCFSKDEKPVEAIRVCSEVLQMEPDNVNALKDRAEAYLIEEMYDEAIQDYETAQEHNENDQQIREGLEKAQRLLKQSQKRDYYKILGVKRNAKKQEIIKAYRKLALQWHPDNFQNEEEKKKAEKKFIDIAAAKEVLSDPEMRKKFDDGEDPLDAESQQGGGGNPFHRSWNSWQGFNPFSSGGPFRFKFHFN

SEQ ID NO: 25329 - protein, 504 aa, Homo sapiens
  Payload ID: 5010
  Gene Symbol: DNAJC3
  Gene Name: DnaJ (Hsp40) homolog, subfamily C, member 3
  Uniprot ID: Q13217
  ENSP ID: ENSP00000473631
MVAPGSVTSRLGSVFPFLLVLVDLQYEGAECGVNADVEKHLELGKKLLAAGQLADALSQFHAAVDGDPDNYIAYYRRATVFLAMGKSKAALPDLTKVIQLKMDFTAARLQRGHLLLKQGKLDEAEDDFKKVLKSNPSENEEKEAQSQLIKSDEMQRLRSQALNAFGSGDYTAAIAFLDKILEVCVWDAELRELRAECFIKEGEPRKAISDLKAASKLKNDNTEAFYKISTLYYQLGDHELSLSEVRECLKLDQDHKRCFAHYKQVKKLNKLIESAEELIRDGRYTDATSKYESVMKTEPSIAEYTVRSKERICHCFSKDEKPVEAIRVCSEVLQMEPDNVNALKDRAEAYLIEEMYDEAIQDYETAQEHNENDQQIREGLEKAQRLLKQSQKRDYYKILGVKRNAKKQEIIKAYRKLALQWHPDNFQNEEEKKKAEKKFIDIAAAKEVLSDPEMRKKFDDGEDPLDAESQQGGGGNPFHRSWNSWQGFNPFSSGGPFRFKFHFN

SEQ ID NO: 25330 - protein, 226 aa, Homo sapiens
  Payload ID: 5011
  Gene Symbol: DNAJC30
  Gene Name: DnaJ (Hsp40) homolog, subfamily C, member 30
  Uniprot ID: Q96LL9
  ENSP ID: ENSP00000378605
MAAMRWRWWQRLLPWRLLQARGFPQNSAPSLGLGARTYSQGDCSYSRTALYDLLGVPSTATQAQIKAAYYRQCFLYHPDRNSGSAEAAERFTRISQAYVVLGSATLRRKYDRGLLSDEDLRGPGVRPSRTPAPDPGSPRTPPPTSRTHDGSRASPGANRTMFNFDAFYQAHYGEQLERERRLRARREALRKRQEYRSMKGLRWEDTRDTAAIFLIFSIFIIIGFYI

SEQ ID NO: 25331 - protein, 249 aa, Homo sapiens
  Payload ID: 5012
  Gene Symbol: DNAJC4
  Gene Name: DnaJ (Hsp40) homolog, subfamily C, member 4
  ENSP ID: ENSP00000320548
MPPLLPLRLCRLWPRNPPSRLLGAAAGQRSRPSTYYELLGVHPGASTEEVKRAFFSKSKELHPDRDPGNPSLHSRFVELSEAYRVLSREQSRRSYDDQLRSGSPPKSPRTTVHDKSAHQTHSSSWTPPNAQYWSQFHSVRPQGPQLRQQQHKQNKQVLGYCLLLMLAGMGLHYIAFRKVKQMHLNFMDEKDRIITAFYNEARARARSVPALFCSLLPVQEPHFGIPIPTTQVPSPPGPTEASFSRSDNG

SEQ ID NO: 25332 - protein, 67 aa, Homo sapiens
  Payload ID: 5012
  Gene Symbol: DNAJC4
  Gene Name: DnaJ (Hsp40) homolog, subfamily C, member 4
  ENSP ID: ENSP00000347145
MPPLLPLRLCRLWPRNPPSRLLGAAAGQRSRPSTYYELLGVHPGASTEEVKRAFFSKSKEEGEADAP

SEQ ID NO: 25333 - protein, 241 aa, Homo sapiens
  Payload ID: 5012
  Gene Symbol: DNAJC4
  Gene Name: DnaJ (Hsp40) homolog, subfamily C, member 4
  Uniprot ID: Q9NNZ3
  ENSP ID: ENSP00000396896
MPPLLPLRLCRLWPRNPPSRLLGAAAGQRSRPSTYYELLGVHPGASTEEVKRAFFSKSKELHPDRDPGNPSLHSRFVELSEAYRVLSREQSRRSYDDQLRSGSPPKSPRTTVHDKSAHQTHSSWTPPNAQYWSQFHSVRPQGPQLRQQQHKQNKQVLGYCLLLMLAGMGLHYIAFRKVKQMHLNFMDEKDRIITAFYNEARARARANRGILQQERQRLGQRQPPPSEPTQGPEIVPRGAGP

SEQ ID NO: 25334 - protein, 167 aa, Homo sapiens
  Payload ID: 5012
  Gene Symbol: DNAJC4
  Gene Name: DnaJ (Hsp40) homolog, subfamily C, member 4
  ENSP ID: ENSP00000444879
  MOD_RES (1)..(1): Any amino acid
XNCWGCILVPALRKLNELSSPSPKSREQSRRSYDDQLRSGSPPKSPRTTVHDKSAHQTHSSWTPPNAQYWSQFHSVRPQGPQLRQQQHKQNKQVLGYCLLLMLAGMGLHYIAFRKVKQMHLNFMDEKDRIITAFYNEARARARANRGILQQERQRLGQRQPPPSEPT

SEQ ID NO: 25335 - protein, 47 aa, Homo sapiens
  Payload ID: 5012
  Gene Symbol: DNAJC4
  Gene Name: DnaJ (Hsp40) homolog, subfamily C, member 4
  ENSP ID: ENSP00000445233
MPPLLPLRLCRLWPRNPPSRLLGAAAGQRRLPGLSQVTLAFPAEDQR

SEQ ID NO: 25336 - protein, 67 aa, Homo sapiens; identical to SEQ ID NO: 25332
  Payload ID: 5012
  Gene Symbol: DNAJC4
  Gene Name: DnaJ (Hsp40) homolog, subfamily C, member 4
  ENSP ID: ENSP00000486499

SEQ ID NO: 25337 - protein, 198 aa, Homo sapiens
  Payload ID: 5013
  Gene Symbol: DNAJC5
  Gene Name: DnaJ (Hsp40) homolog, subfamily C, member 5
  Uniprot ID: Q9H3Z4
  ENSP ID: ENSP00000354111
MADQRQRSLSTSGESLYHVLGLDKNATSDDIKKSYRKLALKYHPDKNPDNPEAADKFKEINNAHAILTDATKRNIYDKYGSLGLYVAEQFGEENVNTYFVLSSWWAKALFVFCGLLTCCYCCCCLCCCFNCCCGKCKPKAPEGEETEFYVSPEDLEAQLQSDEREATDTPIVIQPASATETTQLTADSHPSYHTDGFN

SEQ ID NO: 25338 - protein, 167 aa, Homo sapiens
  Payload ID: 5013
  Gene Symbol: DNAJC5
  Gene Name: DnaJ (Hsp40) homolog, subfamily C, member 5
  Uniprot ID: Q9H3Z4
  ENSP ID: ENSP00000434744
MADQRQRSLSTSGESLYHVLGLDKNATSDDIKKSYRKLALKYHPDKNPDNPEAADKFKEINNAHAILTDATKRNIYDKYGSLGLYVAEQFGEENVNTYFVLSSWWAKALFVFCGLLTCCYCCCCLCCCFNCCCGKCKPKAPEGEETEFYVSPEDLEAQLQSDERGGH

SEQ ID NO: 25339 - protein, 199 aa, Homo sapiens
  Payload ID: 5014
  Gene Symbol: DNAJC5B
  Gene Name: DnaJ (Hsp40) homolog, subfamily C, member 5 beta
  Uniprot ID: Q9UF47
  ENSP ID: ENSP00000276570
MACNIPNQRQRTLSTTGEALYEILGLHKGASNEEIKKTYRKLALKHHPDKNPDDPAATEKFKEINNAHAILTDISKRSIYDKYGSLGLYVAEQFGDENVNTYFMLSSWWAKALFVIVGLLTGCYFCCCLCCCCNCCCGHCRPESSVPEEDFYVSPEDLEEQIKSDMEKDVDFPVFLQPTNANEKTQLIKEGSRSYCTDS

SEQ ID NO: 25340 - protein, 96 aa, Homo sapiens
  Payload ID: 5014
  Gene Symbol: DNAJC5B
  Gene Name: DnaJ (Hsp40) homolog, subfamily C, member 5 beta
  ENSP ID: ENSP00000430196
MACNIPNQRQRTLSTTGEALYEILGLHKGASNEEIKKTYRKLALKHHPDKNPDDPAATEKFKEINNAHAILTDISKRSIYDKYGSLGLYVAEQFGD

SEQ ID NO: 25341 - protein, 189 aa, Homo sapiens
  Payload ID: 5015
  Gene Symbol: DNAJC5G
  Gene Name: DnaJ (Hsp40) homolog, subfamily C, member 5 gamma
  Uniprot ID: Q8N7S2
  ENSP ID: ENSP00000296097
MSTVKEAAHRLSKSEMSLYAVLDLKKGASPEDFKKSYSHSALLPHPPFEYHLGRKLALRYHPDKNPGNAQAAEIFKEINAAHAILSDSKKRKIYDQHGSLGIYLYDHFGEEGVRYYFILNSCWFKTLVILCTLLTCCCFCCCCCFCCGALKPPPEQDSGRKYQQNVQSQPPRSGAKCDFRSEENSEDDF

SEQ ID NO: 25342 - protein, 189 aa, Homo sapiens; identical to SEQ ID NO: 25341
  Payload ID: 5015
  Gene Symbol: DNAJC5G
  Gene Name: DnaJ (Hsp40) homolog, subfamily C, member 5 gamma
  Uniprot ID: Q8N7S2
  ENSP ID: ENSP00000384305

SEQ ID NO: 25343 - protein, 104 aa, Homo sapiens
  Payload ID: 5015
  Gene Symbol: DNAJC5G
  Gene Name: DnaJ (Hsp40) homolog, subfamily C, member 5 gamma
  Uniprot ID: Q8N7S2
  ENSP ID: ENSP00000385533
MSTVKEAAHRLSKSEMSLYAVLDLKKGASPEDFKKSYRHLSSCVLCSLVAVSVVAAVFAVEHLNHHLSRIVGENISRMSRVSLQGQEPNVILEARKIAKMIFKR

SEQ ID NO: 25344 - protein, 173 aa, Homo sapiens
  Payload ID: 5015
  Gene Symbol: DNAJC5G
  Gene Name: DnaJ (Hsp40) homolog, subfamily C, member 5 gamma
  ENSP ID: ENSP00000385829
MSTVKEAAHRLSKSEMSLYAVLDLKKGASPEDFKKSYRKLALRYHPDKNPGNAQAAEIFKEINAAHAILSDSKKRKIYDQHGSLGIYLYDHFGEEGVRYYFILNSCWFKTLVILCTLLTCCCFCCCCCFCCGALKPPPEQDSGRKYQQNVQSQPPRSGAKCDFRSEENSEDDF

SEQ ID NO: 25345 - protein, 62 aa, Homo sapiens
  Payload ID: 5015
  Gene Symbol: DNAJC5G
  Gene Name: DnaJ (Hsp40) homolog, subfamily C, member 5 gamma
  ENSP ID: ENSP00000400382
MSTVKEAAHRLSKSEMSLYAVLDLKKGASPEDFKKSYRHLSSCVLCSLVAVSVVAAVFAVEH

SEQ ID NO: 25346 - protein, 900 aa, Homo sapiens
  Payload ID: 5016
  Gene Symbol: DNAJC6
  Gene Name: DnaJ (Hsp40) homolog, subfamily C, member 6
  Uniprot ID: O75061
  ENSP ID: ENSP00000263441
MEPSYGGGLFDMVKGGAGRLFSNLKDNLKDTLKDTSSRVIQSVTSYTKGDLDFTYVTSRIIVMSFPLDNVDIGFRNQVDDIRSFLDSRHLDHYTVYNLSPKSYRTAKFHSRVSECSWPIRQAPSLHNLFAVCRNMYNWLLQNPKNVCVVHCLDGRAASSILVGAMFIFCNLYSTPGPAIRLLYAKRPGIGLSPSHRRYLGYMCDLLADKPYRPHFKPLTIKSITVSPIPFFNKQRNGCRPYCDVLIGETKIYSTCTDFERMKEYRVQDGKIFIPLNITVQGDVVVSMYHLRSTIGSRLQAKVTNTQIFQLQFHTGFIPLDTTVLKFTKPELDACDVPEKYPQLFQVTLDVELQPHDKVIDLTPPWEHYCTKDVNPSILFSSHQEHQDTLALGGQAPIDIPPDNPRHYGQSGFFASLCWQDQKSEKSFCEEDHAALVNQESEQSDDELLTLSSPHGNANGDKPHGVKKPSKKQQEPAAPPPPEDVDLLGLEGSAMSNSFSPPAAPPTNSELLSDLFGGGGAAGPTQAGQSGVEDVFHPSGPASTQSTPRRSATSTSASPTLRVGEGATFDPFGAPSKPSGQDLLGSFLNTSSASSDPFLQPTRSPSPTVHASSTPAVNIQPDVSGGWDWHAKPGGFGMGSKSAATSPTGSSHGTPTHQSKPQTLDPFADLGTLGSSSFASKPTTPTGLGGGFPPLSSPQKASPQPMGGGWQQGGAYNWQQPQPKPQPSMPHSSPQNRPNYNVSFSAMPGGQNERGKGSSNLEGKQKAADFEDLLSGQGFNAHKDKKGPRTIAEMRKEEMAKEMDPEKLKILEWIEGKERNIRALLSTMHTVLWAGETKWKPVGMADLVTPEQVKKVYRKAVLVVHPDKATGQPYEQYAKMIFMELNDAWSEFENQGQKPLY

SEQ ID NO: 25347 - protein, 970 aa, Homo sapiens
  Payload ID: 5016
  Gene Symbol: DNAJC6
  Gene Name: DnaJ (Hsp40) homolog, subfamily C, member 6
  Uniprot ID: O75061
  ENSP ID: ENSP00000360108
MSLLGSYRKKTSNDGYESLQLVDSNGDLSAGSGGVGGKQRVNAGAAARSPARQPPDRASTMDSSGASSPDMEPSYGGGLFDMVKGGAGRLFSNLKDNLKDTLKDTSSRVIQSVTSYTKGDLDFTYVTSRIIVMSFPLDNVDIGFRNQVDDIRSFLDSRHLDHYTVYNLSPKSYRTAKFHSRVSECSWPIRQAPSLHNLFAVCRNMYNWLLQNPKNVCVVHCLDGRAASSILVGAMFIFCNLYSTPGPAIRLLYAKRPGIGLSPSHRRYLGYMCDLLADKPYRPHFKPLTIKSITVSPIPFFNKQRNGCRPYCDVLIGETKIYSTCTDFERMKEYRVQDGKIFIPLNITVQGDVVVSMYHLRSTIGSRLQAKVTNTQIFQLQFHTGFIPLDTTVLKFTKPELDACDVPEKYPQLFQVTLDVELQPHDKVIDLTPPWEHYCTKDVNPSILFSSHQEHQDTLALGGQAPIDIPPDNPRHYGQSGFFASLCWQDQKSEKSFCEEDHAALVNQESEQSDDELLTLSSPHGNANGDKPHGVKKPSKKQQEPAAPPPPEDVDLLGLEGSAMSNSFSPPAAPPTNSELLSDLFGGGGAAGPTQAGQSGVEDVFHPSGPASTQSTPRRSATSTSASPTLRVGEGATFDPFGAPSKPSGQDLLGSFLNTSSASSDPFLQPTRSPSPTVHASSTPAVNIQPDVSGGWDWHAKPGGFGMGSKSAATSPTGSSHGTPTHQSKPQTLDPFADLGTLGSSSFASKPTTPTGLGGGFPPLSSPQKASPQPMGGGWQQGGAYNWQQPQPKPQPSMPHSSPQNRPNYNVSFSAMPGGQNERGKGSSNLEGKQKAADFEDLLSGQGFNAHKDKKGPRTIAEMRKEEMAKEMDPEKLKILEWIEGKERNIRALLSTMHTVLWAGETKWKPVGMADLVTPEQVKKVYRKAVLVVHPDKATGQPYEQYAKMIFMELNDAWSEFENQGQKPLY

SEQ ID NO: 25348 - protein, 913 aa, Homo sapiens
  Payload ID: 5016
  Gene Symbol: DNAJC6
  Gene Name: DnaJ (Hsp40) homolog, subfamily C, member 6
  Uniprot ID: O75061
  ENSP ID: ENSP00000378735
MKDSENKGASSPDMEPSYGGGLFDMVKGGAGRLFSNLKDNLKDTLKDTSSRVIQSVTSYTKGDLDFTYVTSRIIVMSFPLDNVDIGFRNQVDDIRSFLDSRHLDHYTVYNLSPKSYRTAKFHSRVSECSWPIRQAPSLHNLFAVCRNMYNWLLQNPKNVCVVHCLDGRAASSILVGAMFIFCNLYSTPGPAIRLLYAKRPGIGLSPSHRRYLGYMCDLLADKPYRPHFKPLTIKSITVSPIPFFNKQRNGCRPYCDVLIGETKIYSTCTDFERMKEYRVQDGKIFIPLNITVQGDVVVSMYHLRSTIGSRLQAKVTNTQIFQLQFHTGFIPLDTTVLKFTKPELDACDVPEKYPQLFQVTLDVELQPHDKVIDLTPPWEHYCTKDVNPSILFSSHQEHQDTLALGGQAPIDIPPDNPRHYGQSGFFASLCWQDQKSEKSFCEEDHAALVNQESEQSDDELLTLSSPHGNANGDKPHGVKKPSKKQQEPAAPPPPEDVDLLGLEGSAMSNSFSPPAAPPTNSELLSDLFGGGGAAGPTQAGQSGVEDVFHPSGPASTQSTPRRSATSTSASPTLRVGEGATFDPFGAPSKPSGQDLLGSFLNTSSASSDPFLQPTRSPSPTVHASSTPAVNIQPDVSGGWDWHAKPGGFGMGSKSAATSPTGSSHGTPTHQSKPQTLDPFADLGTLGSSSFASKPTTPTGLGGGFPPLSSPQKASPQPMGGGWQQGGAYNWQQPQPKPQPSMPHSSPQNRPNYNVSFSAMPGGQNERGKGSSNLEGKQKAADFEDLLSGQGFNAHKDKKGPRTIAEMRKEEMAKEMDPEKLKILEWIEGKERNIRALLSTMHTVLWAGETKWKPVGMADLVTPEQVKKVYRKAVLVVHPDKATGQPYEQYAKMIFMELNDAWSEFENQGQKPLY

SEQ ID NO: 25349 - protein, 516 aa, Homo sapiens
  Payload ID: 5016
  Gene Symbol: DNAJC6
  Gene Name: DnaJ (Hsp40) homolog, subfamily C, member 6
  ENSP ID: ENSP00000473821
MGATEKGGQKSRKLFSLRRPWKATRRLWRPRSARQAAQGASSPDMEPSYGGGLFDMVKGGAGRLFSNLKDNLKDTLKDTSSRVIQSVTSYTKGDLDFTYVTSRIIVMSFPLDNVDIGFRNQVDDIRSFLDSRHLDHYTVYNLSPKSYRTAKFHSRVSECSWPIRQAPSLHNLFAVCRNMYNWLLQNPKNVCVVHCLDGRAASSILVGAMFIFCNLYSTPGPAIRLLYAKRPGIGLSPSHRRYLGYMCDLLADKPYRPHFKPLTIKSITVSPIPFFNKQRNGCRPYCDVLIGETKIYSTCTDFERMKEYRVQDGKIFIPLNITVQGDVVVSMYHLRSTIGSRLQAKVTNTQIFQLQFHTGFIPLDTTVLKFTKPELDACDVPEKYPQLFQVTLDVELQPHDKVIDLTPPWEHYCTKDVNPSILFSSHQEHQDTLALGGQAPIDIPPDNPRHYGQSGFFASLCWQDQKSEKSFCEEDHAALVNQESEQSDDELLTLSSPHGNANGDKPHGVKKPSKKQ

SEQ ID NO: 25350 - protein, 438 aa, Homo sapiens
  Payload ID: 5017
  Gene Symbol: DNAJC7
  Gene Name: DnaJ (Hsp40) homolog, subfamily C, member 7
  Uniprot ID: Q99615
  ENSP ID: ENSP00000313311
MCPKNASYYGNRAATLMMLGRFREALGDAQQSVRLDDSFVRGHLREGKCHLSLGNAMAACRSFQRALELDHKNAQAQQEFKNANAVMEYEKIAETDFEKRDFRKVVFCMDRALEFAPACHRFKILKAECLAMLGRYPEAQSVASDILRMDSTNADALYVRGLCLYYEDCIEKAVQFFVQALRMAPDHEKACIACRNAKALKAKKEDGNKAFKEGNYKLAYELYTEALGIDPNNIKTNAKLYCNRGTVNSKLRKLDDAIEDCTNAVKLDDTYIKAYLRRAQCYMDTEQYEEAVRDYEKVYQTEKTKEHKQLLKNAQLELKKSKRKDYYKILGVDKNASEDEIKKAYRKRALMHHPDRHSGASAEVQKEEEKKFKEVGEAFTILSDPKKKTRYDSGQDLDEEGMNMGDFDPNNIFKAFFGGPGGFSFEASGPGNFFFQFG

SEQ ID NO: 25351 - protein, 438 aa, Homo sapiens; identical to SEQ ID NO: 25350
  Payload ID: 5017
  Gene Symbol: DNAJC7
  Gene Name: DnaJ (Hsp40) homolog, subfamily C, member 7
  Uniprot ID: Q99615
  ENSP ID: ENSP00000394327

SEQ ID NO: 25352 - protein, 494 aa, Homo sapiens
  Payload ID: 5017
  Gene Symbol: DNAJC7
  Gene Name: DnaJ (Hsp40) homolog, subfamily C, member 7
  Uniprot ID: Q99615
  ENSP ID: ENSP00000406463
MAAAAECDVVMAATEPELLDDQEAKREAETFKEQGNAYYAKKDYNEAYNYYTKAIDMCPKNASYYGNRAATLMMLGRFREALGDAQQSVRLDDSFVRGHLREGKCHLSLGNAMAACRSFQRALELDHKNAQAQQEFKNANAVMEYEKIAETDFEKRDFRKVVFCMDRALEFAPACHRFKILKAECLAMLGRYPEAQSVASDILRMDSTNADALYVRGLCLYYEDCIEKAVQFFVQALRMAPDHEKACIACRNAKALKAKKEDGNKAFKEGNYKLAYELYTEALGIDPNNIKTNAKLYCNRGTVNSKLRKLDDAIEDCTNAVKLDDTYIKAYLRRAQCYMDTEQYEEAVRDYEKVYQTEKTKEHKQLLKNAQLELKKSKRKDYYKILGVDKNASEDEIKKAYRKRALMHHPDRHSGASAEVQKEEEKKFKEVGEAFTILSDPKKKTRYDSGQDLDEEGMNMGDFDPNNIFKAFFGGPGGFSFEASGPGNFFFQFG

SEQ ID NO: 25353 - protein, 261 aa, Homo sapiens
  Payload ID: 5017
  Gene Symbol: DNAJC7
  Gene Name: DnaJ (Hsp40) homolog, subfamily C, member 7
  ENSP ID: ENSP00000464756
MSIGTCCFPGTNREAETFKEQGNAYYAKKDYNEAYNYYTKAIDMCPKNASYYGNRAATLMMLGRFREALGDAQQSVRLDDSFVRGHLREGKCHLSLGNAMAACRSFQRALELDHKNAQAQQEFKNANAVMEYEKIAETDFEKRDFRKVVFCMDRALEFAPACHRFKILKAECLAMLGRYPEAQSVASDILRMDSTNADALYVRGLCLYYEDCIEKAVQFFVQALRMAPDHEKACIACRNAKALKAKKEDGNKAFKEGNYKL

SEQ ID NO: 25354 - protein, 89 aa, Homo sapiens
  Payload ID: 5017
  Gene Symbol: DNAJC7
  Gene Name: DnaJ (Hsp40) homolog, subfamily C, member 7
  ENSP ID: ENSP00000464993
  MOD_RES (1)..(1): Any amino acid
XKEDGNKAFKEGNYKLAYELYTEALGIDPNNIKTNAKLYCNRGTVNSKLRKLDDAIEDCTNAVKLDDTYIKAYLRRAQWWDCSSPRLSL

SEQ ID NO: 25355 - protein, 74 aa, Homo sapiens
  Payload ID: 5017
  Gene Symbol: DNAJC7
  Gene Name: DnaJ (Hsp40) homolog, subfamily C, member 7
  ENSP ID: ENSP00000465140
MCPKNASYYGNRAATLMMLGRFREALGDAQQSVRLDDSFVRGHLREGKCHLSLGNAMAACRSFQRALELDHKNA

SEQ ID NO: 25356 - protein, 102 aa, Homo sapiens
  Payload ID: 5017
  Gene Symbol: DNAJC7
  Gene Name: DnaJ (Hsp40) homolog, subfamily C, member 7
  ENSP ID: ENSP00000465228
MCPKNASYYGNRAATLMMLGRFREALGDAQQSVRLDDSFVRGHLREGKCHLSLGNAMAACRSFQRALELDHKNAQAQQEFKNANAVMEYEKIAETDFEKRDF

SEQ ID NO: 25357 - protein, 113 aa, Homo sapiens
  Payload ID: 5017
  Gene Symbol: DNAJC7
  Gene Name: DnaJ (Hsp40) homolog, subfamily C, member 7
  ENSP ID: ENSP00000465340
MCPKNASYYGNRAATLMMLGRFREALGDAQQSVRLDDSFVRGHLREGKCHLSLGNAMAACRSFQRALELDHKNAQAQQEFKNANAVMEYEKIAETDFEKRDFRKVVFCMDRAL

SEQ ID NO: 25358 - protein, 75 aa, Homo sapiens
  Payload ID: 5017
  Gene Symbol: DNAJC7
  Gene Name: DnaJ (Hsp40) homolog, subfamily C, member 7
  ENSP ID: ENSP00000465399
MCPKNASYYGNRAATLMMLGRFREALGDAQQSVRLDDSFVRGHLREGKCHLSLGNAMAACRSFQRALELDHKNAQ

SEQ ID NO: 25359 - protein, 137 aa, Homo sapiens
  Payload ID: 5017
  Gene Symbol: DNAJC7
  Gene Name: DnaJ (Hsp40) homolog, subfamily C, member 7
  ENSP ID: ENSP00000466114
MAAAAECDVVMAATEPELLDDQEAKREAETFKEQGNAYYAKKDYNEAYNYYTKAIDMCPKNASYYGNRAATLMMLGRFREALGDAQQSVRLDDSFVRGHLREGKCHLSLGNAMAACRSFQRALELDHKNAQAQQELH

SEQ ID NO: 25360 - protein, 104 aa, Homo sapiens
  Payload ID: 5017
  Gene Symbol: DNAJC7
  Gene Name: DnaJ (Hsp40) homolog, subfamily C, member 7
  ENSP ID: ENSP00000466748
MCPKNASYYGNRAATLMMLGRFREALGDAQQSVRLDDSFVRGHLREGKCHLSLGNAMAACRSFQRALELDHKNAQAQQEFKNANAVMEYEKIAETDFEKRDFRK

SEQ ID NO: 25361 - protein, 39 aa, Homo sapiens
  Payload ID: 5017
  Gene Symbol: DNAJC7
  Gene Name: DnaJ (Hsp40) homolog, subfamily C, member 7
  ENSP ID: ENSP00000466877
MAAAAECDVVMAATEPELLDDQEAKSPTPLTSHPSVPLL

SEQ ID NO: 25362 - protein, 253 aa, Homo sapiens
  Payload ID: 5017
  Gene Symbol: DNAJC7
  Gene Name: DnaJ (Hsp40) homolog, subfamily C, member 7
  ENSP ID: ENSP00000467477
MCPKNASYYGNRAATLMMLGRFREALGDAQQSVRLDDSFVRGHLREGKCHLSLGNAMAACRSFQRALELDHKNAQAQQEFKNANAVMEYEKIAETDFEKRDFRKVVFCMDRALEFAPACHRFKILKAECLAMLGRYPEAQSVASDILRMDSTNADALYVRGLCLYYEDCIEKAVQFFVQALRMAPDHEKACIACRNAKALKAKKEDGNKAFKEGNYKLAYELYTEALGIDPNNIKTNAKLYCNRGTVNSKETR

SEQ ID NO: 25363 - protein, 55 aa, Homo sapiens
  Payload ID: 5017
  Gene Symbol: DNAJC7
  Gene Name: DnaJ (Hsp40) homolog, subfamily C, member 7
  ENSP ID: ENSP00000467702
DKNASEDEIKKAYRKRALMHHPDFDPNNIFKAFFGGPGGFSFEASGPGNFFFQFG

SEQ ID NO: 25364 - protein, 128 aa, Homo sapiens
  Payload ID: 5017
  Gene Symbol: DNAJC7
  Gene Name: DnaJ (Hsp40) homolog, subfamily C, member 7
  ENSP ID: ENSP00000468102
MCPKNASYYGNRAATLMMLGRFREALGDAQQSVRLDDSFVRGHLREGKCHLSLGNAMAACRSFQRALELDHKNAQAQQEFKNANAVMEYEKIAETDFEKRDFRKVVFCMDRALEFAPACHRFKILKAE

SEQ ID NO: 25365 - protein, 258 aa, Homo sapiens
  Payload ID: 5017
  Gene Symbol: DNAJC7
  Gene Name: DnaJ (Hsp40) homolog, subfamily C, member 7
  ENSP ID: ENSP00000468805
MAAAAECDVVMAATEPELLDDQEAKREAETFKEQGNAYYAKKDYNEAYNYYTKAIDMCPKNASYYGNRAATLMMLGRFREALGDAQQSVRLDDSFVRFKNANAVMEYEKIAETDFEKRDFRKVVFCMDRALEFAPACHRFKILKAECLAMLGRYPEAQSVASDILRMDSTNADALYVRGLCLYYEDCIEKAVQFFVQALRMAPDHEKACIACRNAKALKAKKEDGNKAFKEGNYKLAYELYTEALGIDPNNIKTNAKL

SEQ ID NO: 25366 - protein, 253 aa, Homo sapiens
  Payload ID: 5018
  Gene Symbol: DNAJC8
  Gene Name: DnaJ (Hsp40) homolog, subfamily C, member 8
  Uniprot ID: O75937
  ENSP ID: ENSP00000263697
MAASGESGTSGGGGSTEEAFMTFYSEVKQIEKRDSVLTSKNQIERLTRPGSSYFNLNPFEVLQIDPEVTDEEIKKRFRQLSILVHPDKNQDDADRAQKAFEAVDKAYKLLLDQEQKKRALDVIQAGKEYVEHTVKERKKQLKKEGKPTIVEEDDPELFKQAVYKQTMKLFAELEIKRKEREAKEMHERKRQREEEIEAQEKAKREREWQKNFEESRDGRVDSWRNFQANTKGKKEKKNRTFLRPPKVKMEQRE

SEQ ID NO: 25367 - protein, 106 aa, Homo sapiens
  Payload ID: 5018
  Gene Symbol: DNAJC8
  Gene Name: DnaJ (Hsp40) homolog, subfamily C, member 8
  ENSP ID: ENSP00000474440
  MOD_RES (1)..(1): Any amino acid
XFKQAVYKQTMKLFAELEIKRKEREAKEMHERKRQREEEIEAQEKAKREREWQKNFEESRDGRVDSWRNFQANTKGKKEKKNRTFLRPPKVKMEQRTESALRRGPK

SEQ ID NO: 25368 - protein, 260 aa, Homo sapiens
  Payload ID: 5019
  Gene Symbol: DNAJC9
  Gene Name: DnaJ (Hsp40) homolog, subfamily C, member 9
  Uniprot ID: Q8WXX5
  ENSP ID: ENSP00000362041
MGLLDLCEEVFGTADLYRVLGVRREASDGEVRRGYHKVSLQVHPDRVGEGDKEDATRRFQILGKVYSVLSDREQRAVYDEQGTVDEDSPVLTQDRDWEAYWRLLFKKISLEDIQAFEKTYKGSEEELADIKQAYLDFKGDMDQIMESVLCVQYTEEPRIRNIIQQAIDAGEVPSYNAFVKESKQKMNARKRRAQEEAKEAEMSRKELGLDEGVDSLKAAIQSRQKDRQKEMDNFLAQMEAKYCKSSKGGGKKSALKKEKK

SEQ ID NO: 25369 - protein, 153 aa, Homo sapiens
  Payload ID: 5020
  Gene Symbol: DNAJC25-GNG10
  Gene Name: DNAJC25-GNG10 readthrough
  ENSP ID: ENSP00000363412
MGAPLLSPGWGAGAAGRRWWMLLAPLLPALLLVRPAGALVEGLYCGTRDCYEVLGVSRSAGKAEIARAYRQLARRYHPDRYRPQPGDEGPGRTPQSAEEAFLLVATAYETLKVSQAAAELQQYCMQNACKDALLVGVPAGSNPFREPRSCALL

SEQ ID NO: 25370 - protein, 353 aa, Homo sapiens
  Payload ID: 5021
  Gene Symbol: DND1
  Gene Name: DND microRNA-mediated repression inhibitor 1
  Uniprot ID: Q8IYX4
  ENSP ID: ENSP00000445366
MQSKRDCELWCERVNPENKAALEAWVRETGIRLVQVNGQRKYGGPPPGWVGSPPPAGSEVFIGRLPQDVYEHQLIPLFQRVGRLYEFRLMMTFSGLNRGFAYARYSSRRGAQAAIATLHNHPLRPSCPLLVCRSTEKCELSVDGLPPNLTRSALLLALQPLGPGLQEARLLPSPGPAPGQIALLKFSSHRAAAMAKKALVEGQSHLCGEQVAVEWLKPDLKQRLRQQLVGPFLRSPQPEGSQLALARDKLGFQGARATLQLLCQRMKLGSPVFLTKCLGIGPAGWHRFWYQVVIPGHPVPFSGLIWVVLTLDGRDGHEVAKDAVSVRLLQALSESGANLLWSAGAEAGTMVKQ

SEQ ID NO: 25371 - protein, 178 aa, Homo sapiens
  Payload ID: 5022
  Gene Symbol: DNLZ
  Gene Name: DNL-type zinc finger
  Uniprot ID: Q5SXM8
  ENSP ID: ENSP00000360803
MLRTALRGAPRLLSRVQPRAPCLRRLWGRGARPEVAGRRRAWAWGWRRSSSEQGPGPAAALGRVEAAHYQLVYTCKVCGTRSSKRISKLAYHQGVVIVTCPGCQNHHIIADNLGWFSDLNGKRNIEEILTARGEQVHRVAGEGALELVLEAAGAPTSTAAPEAGEDEGPPSPGKTEPS

SEQ ID NO: 25372 - protein, 117 aa, Homo sapiens
  Payload ID: 5022
  Gene Symbol: DNLZ
  Gene Name: DNL-type zinc finger
  ENSP ID: ENSP00000360804
MLRTALRGAPRLLSRVQPRAPCLRRLWGRGARPEVAGRRRAWAWGWRRSSSEQGPGPAAALGRVEAAHYQLVYTCKKYRRDPDGQRRAGAPCGGRGGPGTGSGGCRGPHIHCSSGSG

SEQ ID NO: 25373 - protein, 481 aa, Homo sapiens [sequence omitted]

SEQ ID NO: 25374 - protein, 177 aa, Homo sapiens
  Payload ID: 5023
  Gene Symbol: DOK1
  Gene Name: docking protein 1, 62kDa (downstream of tyrosine kinase 1)
  Uniprot ID: Q99704
  ENSP ID: ENSP00000344330
MDGAVMEGPLFLQSQRFGTKRWRKTWAVLYPASPHGVARLEFFDHKGSSSGGGRGSSRRLDCKVIRLAECVSVAPVTVETPPEPGATAFRLDTAQRSHLLAADAPSSAAWVQTLCRNAFPKGSWTLAPTDNPPKLSALEMLENSLYSPTWEGHVLFRGRPPLPLRPWNLHLPDGTGK

SEQ ID NO: 25375 - protein, 342 aa, Homo sapiens
  Payload ID: 5023
  Gene Symbol: DOK1
  Gene Name: docking protein 1, 62kDa (downstream of tyrosine kinase 1)
  Uniprot ID: Q99704
  ENSP ID: ENSP00000387016
MLENSLYSPTWEGSQFWVTVQRTEAAERCGLHGSYVLRVEAERLTLLTVGAQSQILEPLLSWPYTLLRRYGRDKVMFSFEAGRRCPSGPGTFTFQTAQGNDIFQAVETAIHRQKAQGKAGQGHDVLRADSHEGEVAEGKLPSPPGPQELLDSPPALYAEPLDSLRIAPCPSQDSLYSDPLDSTSAQAGEGVQRKKPLYWDLYEHAQQQLLKAKLTDPKEDPIYDEPEGLAPVPPQGLYDLPREPKDAWWCQARVKEEGYELPYNPATDDYAVPPPRSTKPLLAPKPQGPAFPEPGTATGSGIKSHNSALYSQVQKSGASGSWDCGLSRVGTDKTGVKSEGST

SEQ ID NO: 25376 - protein, 88 aa, Homo sapiens
  Payload ID: 5023
  Gene Symbol: DOK1
  Gene Name: docking protein 1, 62kDa (downstream of tyrosine kinase 1)
  ENSP ID: ENSP00000393586
  MOD_RES (1)..(1): Any amino acid
XRLEFFDHKGSSSGGGRGSSRRLDCKVIRLAECVSVAPVTVETPPEPGATAFRLDTAQRSHLLAADAPSSAAWVQTLCRNAFPDPNSG

SEQ ID NO: 25377 - protein, 412 aa, Homo sapiens
  Payload ID: 5024
  Gene Symbol: DOK2
  Gene Name: docking protein 2, 56kDa
  Uniprot ID: O60496
  ENSP ID: ENSP00000276420
MGDGAVKQGFLYLQQQQTFGKKWRRFGASLYGGSDCALARLELQEGPEKPRRCEAARKVIRLSDCLRVAEAGGEASSPRDTSAFFLETKERLYLLAAPAAERGDWVQAICLLAFPGQRKELSGPEGKQSRPCMEENELYSSAVTVGPHKEFAVTMRPTEASERCHLRGSYTLRAGESALELWGGPEPGTQLYDWPYRFLRRFGRDKVTFSFEAGRRCVSGEGNFEFETRQGNEIFLALEEAISAQKNAAPATPQPQPATIPASLPRPDSPYSRPHDSLPPPSPTTPVPAPRPRGQEGEYAVPFDAVARSLGKNFRGILAVPPQLLADPLYDSIEETLPPRPDHIYDEPEGVAALSLYDSPQEPRGEAWRRQATADRDPAGLQHVQPAGQDFSASGWQPGTEYDNVVLKKGPK

SEQ ID NO: 25378 - protein, 233 aa, Homo sapiens
  Payload ID: 5024
  Gene Symbol: DOK2
  Gene Name: docking protein 2, 56kDa
  ENSP ID: ENSP00000429224
MGDGAVKQGFLYLQQQQTFGKKWRRFGASLYGGSDCALARLELQEGPEKPRRCEAARKVIRLSDCLRVAEAGGEASSPRDTSAFFLETKERLYLLAAPAAERGDWVQAICLLAFPGQRKELSGPEGKQSRPCMEENELYSSAVTVGPHKEFAVTMRPTEASERCHLRGSYTLRAGESALELWGGPEPGTQLYDWPYRFLRRFGRDKAVAASLERATLSSKPGKAMRSSWPWKR

SEQ ID NO: 25379 - protein, 123 aa, Homo sapiens
  Payload ID: 5024
  Gene Symbol: DOK2
  Gene Name: docking protein 2, 56kDa
  ENSP ID: ENSP00000429508
MGDGAVKQGFLYLQQQQTFGKKWRRFGASLYGGSDCALARLELQEGPEKPRRCEAARKVIRLSDCLRVAEAGGEASSPRDTSAFFLETKERLYLLAAPAAERGDWVQAICLLAFPSAPTRNLL

SEQ ID NO: 25380 - protein, 151 aa, Homo sapiens
  Payload ID: 5024
  Gene Symbol: DOK2
  Gene Name: docking protein 2, 56kDa
  ENSP ID: ENSP00000430729
MRPTEASERCHLRGSYTLRAGESALELWGGPEPGTQLYDWPYRFLRRFGRDKVTFSFEAGRRCVSGEGNFEFETRQGNEIFLALEEAISAQKNAAPATPQPQPATIPASLPRPDSPYSRPHDSLPPPSPTTPVPAPRPRGQEGEYAVPFDA

SEQ ID NO: 25381 - protein, 330 aa, Homo sapiens
  Payload ID: 5025
  Gene Symbol: DOK3
  Gene Name: docking protein 3
  Uniprot ID: Q7L591
  ENSP ID: ENSP00000325174
MDPLETPIKDGILYQQHVKFGKKCWRKVWALLYAGGPSGVARLESWEVRDGGLGAAGDRSAGPGRRGERRVIRLADCVSVLPADGESCPRDTGAFLLTTTERSHLLAAQHRQAWMGPICQLAFPGTGEASSGSTDAQSPKRGLVPMEENSIYSSWQEVGEFPVVVQRTEAATRCQLKGPALLVLGPDAIQLREAKGTQALYSWPYHFLRKFGSDKILLGTPGVSLLICKGERTDDVSGIILDESLLRAYSVPGAGGHSRVQDSLGPVLREPTFQGERSFLKTSMLRSLLCSCSWRHPRSQPRTQASCLQGSDCPAPHRNSTSAAHTLGTS

SEQ ID NO: 25382 - protein, 496 aa, Homo sapiens
  Payload ID: 5025
  Gene Symbol: DOK3
  Gene Name: docking protein 3
  Uniprot ID: Q7L591
  ENSP ID: ENSP00000349727
MTRGARLRSDARAQLNQLSLDGGTGSGQKGKCEEFPSSLSSVSPGLEAAALLLAVTMDPLETPIKDGILYQQHVKFGKKCWRKVWALLYAGGPSGVARLESWEVRDGGLGAAGDRSAGPGRRGERRVIRLADCVSVLPADGESCPRDTGAFLLTTTERSHLLAAQHRQAWMGPICQLAFPGTGEASSGSTDAQSPKRGLVPMEENSIYSSWQEVGEFPVVVQRTEAATRCQLKGPALLVLGPDAIQLREAKGTQALYSWPYHFLRKFGSDKGVFSFEAGRRCHSGEGLFAFSTPCAPDLCRAVAGAIARQRERLPELTRPQPCPLPRATSLPSLDTPGELREMPPGPEPPTSRKMHLAEPGPQSLPLLLGPEPNDLASGLYASVCKRASGPPGNEHLYENLCVLEASPTLHGGEPEPHEGPGSRSPTTSPIYHNGQDLSWPGPANDSTLEAQYRRLLELDQVEGTGRPDPQAGFKAKLVTLLSRERRKGPAPCDRP

SEQ ID NO: 25383 - protein, 228 aa, Homo sapiens
  Payload ID: 5025
  Gene Symbol: DOK3
  Gene Name: docking protein 3
  Uniprot ID: Q7L591
  ENSP ID: ENSP00000366316
MDPLETPIKDGILYQQHVKFGKGTGEASSGSTDAQSPKRGLVPMEENSIYSSWQEVGEFPVVVQRTEAATRCQLKGPALLVLGPDAIQLREAKGTQALYSWPYHFLRKFGSDKILLGTPGVSLLICKGERTDDVSGIILDESLLRAYSVPGAGGHSRVQDSLGPVLREPTFQGERSFLKTSMLRSLLCSCSWRHPRSQPRTQASCLQGSDCPAPHRNSTSAAHTLGTS

SEQ ID NO: 25384 - protein, 440 aa, Homo sapiens
  Payload ID: 5025
  Gene Symbol: DOK3
  Gene Name: docking protein 3
  ENSP ID: ENSP00000421688
MDPLETPIKDGILYQQHVKFGKKCWRKVWALLYAGGPSGVARLESWEVRDGGLGAAGDRSAGPGRRGERRVIRLADCVSVLPADGESCPRDTGAFLLTTTERSHLLAAQHRQAWMGPICQLAFPGTGEASSGSTDAQSPKRGLVPMEENSIYSSWQEVGEFPVVVQRTEAATRCQLKGPALLVLGPDAIQLREAKGTQALYSWPYHFLRKFGSDKGVFSFEAGRRCHSGEGLFAFSTPCAPDLCRAVAGAIARQRERLPELTRPQPCPLPRATSLPSLDTPGELREMPPGPEPPTSRKMHLAEPGPQSLPLLLGPEPNDLASGLYASVCKRASGPPGNEHLYENLCVLEASPTLHGGEPEPHEGPGSRSPTTSPIYHNGQDLSWPGPANDSTLEAQYRRLLELDQVEGTGRPDPQAGFKAKLVTLLSRERRKGPAPCDRP

SEQ ID NO: 25385 - protein, 213 aa, Homo sapiens
  Payload ID: 5025
  Gene Symbol: DOK3
  Gene Name: docking protein 3
  ENSP ID: ENSP00000422395
MDPLETPIKDGILYQQHVKFGKKCWRKVWALLYAGGPSGVARLESWEVRDGGLGAAGDRSAGPGRRGERRVIRLADCVSVLPADGESCPRDTGAFLLTTTERSHLLAAQHRQAWMGPICQLAFPGTGEASSGSTDAQSPKRGLVPMEENSIYSSWQEVGEFPVVVQRTEAATRCQLKGPALLVLGPDAIQLREAKGTQALYSWPYHFLRKFGS

SEQ ID NO: 25386 - protein, 156 aa, Homo sapiens
  Payload ID: 5025
  Gene Symbol: DOK3
  Gene Name: docking protein 3
  ENSP ID: ENSP00000423328
MDPLETPIKDGILYQQHVKFGKKCWRKVWALLYAGGPSGVARLESWEVRDGGLGAAGDRSAGPGRRGERRVIRLADCVSVLPADGESCPRDTGAFLLTTTERSHLLAAQHRQAWMGPICQLAFPGTGEASSGSTDAQSPKRGLVPMEENSIYSSWQ

SEQ ID NO: 25387 - protein, 144 aa, Homo sapiens
  Payload ID: 5025
  Gene Symbol: DOK3
  Gene Name: docking protein 3
  ENSP ID: ENSP00000423635
MDPLETPIKDGILYQQHVKFGKKCWRKVWALLYAGGPSGVARLESWEVRDGGLGAAGDRSAGPGRRGERRVIRLADCVSVLPADGESCPRDTGAFLLTTTERSHLLAAQHRQAWMGPICQLAFPGTGEASSGSTDAQSPKRGLV

SEQ ID NO: 25388 - protein, 43 aa, Homo sapiens
  Payload ID: 5025
  Gene Symbol: DOK3
  Gene Name: docking protein 3
  ENSP ID: ENSP00000424580
MDPLETPIKDGILYQQHVKFGKKCWRKVWALLYAGGPSGVARL

SEQ ID NO: 25389 - protein, 85 aa, Homo sapiens
  Payload ID: 5025
  Gene Symbol: DOK3
  Gene Name: docking protein 3
  ENSP ID: ENSP00000424726
MDPLETPIKDGILYQQHVKFGKKCWRKVWALLYAGGPSGVARLESWEVRDGGLGAAGDRSAGPGRRGERRVIRLADCVSVLPADG

SEQ ID NO: 25390 - protein, 13 aa, Homo sapiens
  Payload ID: 5025
  Gene Symbol: DOK3
  Gene Name: docking protein 3
  ENSP ID: ENSP00000426694
MDPLETPIKDGIL

SEQ ID NO: 25391 - protein, 326 aa, Homo sapiens
  Payload ID: 5026
  Gene Symbol: DOK4
  Gene Name: docking protein 4
  Uniprot ID: Q8TEW6
  ENSP ID: ENSP00000344277
MATNFSDIVKQGYVKMKSRKLGIYRRCWLVFRKSSSKGPQRLEKYPDEKSVCLRGCPKVTEISNVKCVTRLPKETKRQAVAIIFTDDSARTFTCDSELEAEEWYKTLSVECLGSRLNDISLGEPDLLAPGVQCEQTDRFNVFLLPCPNLDVYGECKLQITHENIYLWDIHNPRVKLVSWPLCSLRRYGRDATRFTFEAGRMCDAGEGLYTFQTQEGEQIYQRVHSATLAIAEQHKRVLLEMEKNVRLLNKGTEHYSYPCTPTTMLPRSAYWHHITGSQNIAEASSYAGEGYGAAQASSETDLLNRFILLKPKPSQGDSSEAKTPSQ

SEQ ID NO: 25392 - protein, 78 aa, Homo sapiens
  Payload ID: 5026
  Gene Symbol: DOK4
  Gene Name: docking protein 4
  ENSP ID: ENSP00000454738
MATNFSDIVKQGYVKMKSRKLGIYRRCWLVFRKSSSKGPQRLEKYPDEKSVCLRGCPKVTEISNVKCVTRLPKETKRQ

SEQ ID NO: 25393 - protein, 326 aa, Homo sapiens; identical to SEQ ID NO: 25391
  Payload ID: 5026
  Gene Symbol: DOK4
  Gene Name: docking protein 4
  Uniprot ID: Q8TEW6
  ENSP ID: ENSP00000455128

SEQ ID NO: 25394 - protein, 53 aa, Homo sapiens
  Payload ID: 5026
  Gene Symbol: DOK4
  Gene Name: docking protein 4
  ENSP ID: ENSP00000455528
MATNFSDIVKQGYVKMKSRKLGIYRRCWLVFRKSSSKGPQRLEKYPDEKSVCL

SEQ ID NO: 25395 - protein, 365 aa, Homo sapiens
  Payload ID: 5026
  Gene Symbol: DOK4
  Gene Name: docking protein 4
  ENSP ID: ENSP00000455566
MATNFSDIVKQGYVKMKSRKLGIYRRCWLVFRKSSSKGPQRLEKYPDEKSVCLRGCPKVTEISNVKCVTRLPKETKRQAVAIIFTDDSARTFTCDSELEAEEWYKTLSVECLGSRLNDISLGEPDLLAPGVQCEQTDRFNVFLLPCPNLDVYGECKLQITHENIYLWDIHNPRVKLVSWPLCSLRRYGRDATRFTFEAGRMCDAGEGLYTFQTQEGEQIYQRVHSATLAIAEQHKRVLLEMEKNVRLLNKGTEHYSYPCTPTTMLPRSAYWHHITGSQNIAEASSYAGESLPCPTPTCQEALWRMRPIGQGSFDLALSSEPASVPTGEGYGAAQASSETDLLNRFILLKPKPSQGDSSEAKTPSQ

SEQ ID NO: 25396 - protein, 122 aa, Homo sapiens
  Payload ID: 5026
  Gene Symbol: DOK4
  Gene Name: docking protein 4
  ENSP ID: ENSP00000456590
MATNFSDIVKQGYVKMKSRKLGIYRRCWLVFRKSSSKGPQRLEKYPDEKSVCLRGCPKVTEISNVKCVTRLPKETKRQAVAIIFTDDSARTFTCDSELEAEEWYKTLSVECLGSRLNDISLG

SEQ ID NO: 25397 - protein, 100 aa, Homo sapiens
  Payload ID: 5026
  Gene Symbol: DOK4
  Gene Name: docking protein 4
  ENSP ID: ENSP00000456739
MATNFSDIVKQGYVKMKSRKLGIYRRCWLVFRKSSSKGPQRLEKYPDEKSVCLRGCPKVTEISNVKCVTRLPKETKRQAVAIIFTDDSARTFTCDSELEA

SEQ ID NO: 25398 - protein, 59 aa, Homo sapiens
  Payload ID: 5026
  Gene Symbol: DOK4
  Gene Name: docking protein 4
  ENSP ID: ENSP00000456864
MATNFSDIVKQGYVKMKSRKLGIYRRCWLVFRKSSSKGPQRLEKYPDEKSVCLRGCPKS

SEQ ID NO: 25399 - protein, 77 aa, Homo sapiens
  Payload ID: 5026
  Gene Symbol: DOK4
  Gene Name: docking protein 4
  ENSP ID: ENSP00000457188
MATNFSDIVKQGYVKMKSRKLGIYRRCWLVFRKSSSKGPQRLEKYPDEKSVCLRGCPKVTEISNVKCVTRLPKETKR

SEQ ID NO: 25400 - protein, 113 aa, Homo sapiens
  Payload ID: 5026
  Gene Symbol: DOK4
  Gene Name: docking protein 4
  ENSP ID: ENSP00000457192
MATNFSDIVKQGYVKMKSRKLGIYRRCWLVFRKSSSKGPQRLEKYPDEKSVCLRGCPKVTEISNVKCVTRLPKETKRQAVAIIFTDDSARTFTCDSELEAEEWYKTLSVECLG

SEQ ID NO: 25401 - protein, 103 aa, Homo sapiens
  Payload ID: 5026
  Gene Symbol: DOK4
  Gene Name: docking protein 4
  ENSP ID: ENSP00000457212
MATNFSDIVKQGYVKMKSRKLGIYRRCWLVFRKSSSKGPQRLEKYPDEKSVCLRGCPKVTEISNVKCVTRLPKETKRQAVAIIFTDDSARTFTCDSELEAEEW

SEQ ID NO: 25402 - protein, 115 aa, Homo sapiens
  Payload ID: 5026
  Gene Symbol: DOK4
  Gene Name: docking protein 4
  ENSP ID: ENSP00000457621
MATNFSDIVKQGYVKMKSRKLGIYRRCWLVFRKSSSKGPQRLEKYPDEKSVCLRGCPKVTEISNVKCVTRLPKETKRQAVAIIFTDDSARTFTCDSELEAEEWYKTLSVECLGSR

SEQ ID NO: 25403 - protein, 113 aa, Homo sapiens; identical to SEQ ID NO: 25400
  Payload ID: 5026
  Gene Symbol: DOK4
  Gene Name: docking protein 4
  ENSP ID: ENSP00000457670

SEQ ID NO: 25404 - protein, 113 aa, Homo sapiens; identical to SEQ ID NO: 25400
  Payload ID: 5026
  Gene Symbol: DOK4
  Gene Name: docking protein 4
  ENSP ID: ENSP00000457730

SEQ ID NO: 25405 - protein, 246 aa, Homo sapiens
  Payload ID: 5026
  Gene Symbol: DOK4
  Gene Name: docking protein 4
  ENSP ID: ENSP00000457971
MATNFSDIVKQGYVKMKSRKLGIYRRCWLVFRKSSSKGPQRLEKYPDEKSVCLRGCPKVTEISNVKCVTRLPKETKRQAVAIIFTDDSARTFTCDSELEAEEWYKTLSVECLGSRLNDISLGEPDLLAPGVQCEQTDRFNVFLLPCPNLDVYGECKLQITHENIYLWDIHNPRVKLVSWPLCSLRRYGRDATRFTFEAGRMCDAGEGLYTFQTQEGEQIYQRVHSATLAIAEQHKRVLLEMEKNVR

SEQ ID NO: 25406 - protein, 116 aa, Homo sapiens
  Payload ID: 5026
  Gene Symbol: DOK4
  Gene Name: docking protein 4
  ENSP ID: ENSP00000458037
MATNFSDIVKQGYVKMKSRKLGIYRRCWLVFRKSSSKGPQRLEKYPDEKSVCLRGCPKVTEISNVKCVTRLPKETKRQAVAIIFTDDSARTFTCDSELEAEEWYKTLSVECLGSRL

SEQ ID NO: 25407 - protein, 306 aa, Homo sapiens [sequence omitted]

SEQ ID NO: 25408 - protein, 198 aa, Homo sapiens
  Payload ID: 5027
  Gene Symbol: DOK5
  Gene Name: docking protein 5
  Uniprot ID: Q9P104
  ENSP ID: ENSP00000379270
MECVGTRINDISLGEPDLLATGVEREQSERFNVYLMPSPNLDVHGECALQITYEYICLWDVQNPRVKLISWPLSALRRYGRDTTWFTFEAGRMCETGEGLFIFQTRDGEAIYQKVHSAALAIAEQHERLLQSVKNSMLQMKMSERAASLSTMVPLPRSAYWQHITRQHSTGQLYRLQDVSSPLKLHRTETFPAYRSEH

SEQ ID NO: 25409 - protein, 331 aa, Homo sapiens
  Payload ID: 5028
  Gene Symbol: DOK6
  Gene Name: docking protein 6
  Uniprot ID: Q6PKX4
  ENSP ID: ENSP00000372160
MASNFNDIVKQGYVKIRSRKLGIFRRCWLVFKKASSKGPRRLEKFPDEKAAYFRNFHKVTELHNIKNITRLPRETKKHAVAIIFHDETSKTFACESELEAEEWCKHLCMECLGTRLNDISLGEPDLLAAGVQREQNERFNVYLMPTPNLDIYGECTMQITHENIYLWDIHNAKVKLVMWPLSSLRRYGRDSTWFTFESGRMCDTGEGLFTFQTREGEMIYQKVHSATLAIAEQHERLMLEMEQKARLQTSLTEPMTLSKSISLPRSAYWHHITRQNSVGEIYSLQGHGFGSSKMSRAQTFPSYAPEQSEEAQQPLSRSSSYGFSYSSSLIQ

SEQ ID NO: 25410 - protein, 156 aa, Homo sapiens
  Payload ID: 5028
  Gene Symbol: DOK6
  Gene Name: docking protein 6
  ENSP ID: ENSP00000462984
  MOD_RES (1)..(1): Any amino acid
XLEAEEWCKHLCMECLGTRLNDISLGEPDLLAAGVQREQNERFNVYLMPTPNLDIYGECTMQITHENIYLWDIHNAKVKLVMWPLSSLRRYGRDSTWFTFESGRMCDTGEGLFTFQTREGEMIYQKVHSATLAIAEQHERLMLEMEQKARVRPLPW

SEQ ID NO: 25411 - protein, 504 aa, Homo sapiens
  Payload ID: 5029
  Gene Symbol: DOK7
  Gene Name: docking protein 7
  Uniprot ID: Q18PE1
  ENSP ID: ENSP00000344432
MTEAALVEGQVKLRDGKKWKSRWLVLRKPSPVADCLLMLVYKDKSERIKGLRERSSLTLEDICGLEPGLPYEGLVHTLAIVCLSQAIMLGFDSHEAMCAWDARIRYALGEVHRFHVTVAPGTKLESGPATLHLCNDVLVLARDIPPAVTGQWKLSDLRRYGAVPSGFIFEGGTRCGYWAGVFFLSSAEGEQISFLFDCIVRGISPTKGPFGLRPVLPDPSPPGPSTVEERVAQEALETLQLEKRLSLLSHAGRPGSGGDDRSLSSSSSEASHLDVSASSRLTAWPEQSSSSASTSQEGPRPAAAQAAGEAMVGASRPPPKPLRPRQLQEVGRQSSSDSGIATGSHSSYSSSLSSYAGSSLDVWRATDELGSLLSLPAAGAPEPSLCTCLPGTVEYQVPTSLRAHYDTPRSLCLAPRDHSPPSQGSPGNSAARDSGGQTSAGCPSGWLGTRRRGLVMEAPQGSEATLPGPAPGEPWEAGGPHAGPPPAFFSACPVCGGLKVNPPP

SEQ ID NO: 25412 - protein, 255 aa, Homo sapiens
  Payload ID: 5029
  Gene Symbol: DOK7
  Gene Name: docking protein 7
  Uniprot ID: Q18PE1
  ENSP ID: ENSP00000423614
MTEAALVEGQVKLRDGKKWKSRWLVLRKPSPVADCLLMLVYKDKSERIKGLRERSSLTLEDICGLEPGLPYEGLVHTLAIVCLSQAIMLGFDSHEAMCAWDARIRYALGEVHRFHVTVAPGTKLESGPATLHLCNDVLVLARDIPPAVTGQWKLSDLRRYGAVPSGFIFEGGTRGWRLLPVLGRGGADQLPVRLHRPRHLPHQGPLWAAAGSTRPKSPGTLDCGGACGPGSPGNPTAGEAAEPPLTCGQAGQWRG

SEQ ID NO: 25413 - protein, 538 aa, Homo sapiens
  Payload ID: 5030
  Gene Symbol: DOLK
  Gene Name: dolichol kinase
  Uniprot ID: Q9UPQ8
  ENSP ID: ENSP00000361667
MTRECPSPAPGPGAPLSGSVLAEAAVVFAVVLSIHATVWDRYSWCAVALAVQAFYVQYKWDRLLQQGSAVFQFRMSANSGLLPASMVMPLLGLVMKERCQTAGNPFFERFGIVVAATGMAVALFSSVLALGITRPVPTNTCVILGLAGGVIIYIMKHSLSVGEVIEVLEVLLIFVYLNMILLYLLPRCFTPGEALLVLGGISFVLNQLIKRSLTLVESQGDPVDFFLLVVVVGMVLMGIFFSTLFVFMDSGTWASSIFFHLMTCVLSLGVVLPWLHRLIRRNPLLWLLQFLFQTDTRIYLLAYWSLLATLACLVVLYQNAKRSSSESKKHQAPTIARKYFHLIVVATYIPGIIFDRPLLYVAATVCLAVFIFLEYVRYFRIKPLGHTLRSFLSLFLDERDSGPLILTHIYLLLGMSLPIWLIPRPCTQKGSLGGARALVPYAGVLAVGVGDTVASIFGSTMGEIRWPGTKKTFEGTMTSIFAQIISVALILIFDSGVDLNYSYAWILGSISTVSLLEAYTTQIDNLLLPLYLLILLMA

SEQ ID NO: 25414 - protein, 91 aa, Homo sapiens
  Payload ID: 5031
  Gene Symbol: DOLPP1
  Gene Name: dolichyldiphosphatase 1
  ENSP ID: ENSP00000333294
  MOD_RES (1)..(1): Any amino acid
XAADGQCSLPASWRPVTLTHVEYPAGDLSGHLLAYLSLSPVFVIVGFVTLIIFKRELHTAPTQQWAPSTGCPPAIPSLCGSSPSIPSFSCI

SEQ ID NO: 25415 - protein, 238 aa, Homo sapiens
  Payload ID: 5031
  Gene Symbol: DOLPP1
  Gene Name: dolichyldiphosphatase 1
  Uniprot ID: Q86YN1
  ENSP ID: ENSP00000361625
MAADGQCSLPASWRPVTLTHVEYPAGDLSGHLLAYLSLSPVFVIVGFVTLIIFKRELHTISFLGGLALNEGVNWLIKNVIQEPRPCGGPHTAVGTKYGMPSSHSQFMWFFSVYSFLFLYLRMHQTNNARFLDLLWRHVLSLGLLAVAFLVSYSRVYLLYHTWSQVLYGGIAGGLMAIAWFIFTQEVLTPLFPRIAAWPVSEFFLIRDTSLIPNVLWFEYTVTRAEARNRQRKLGTKLQ

SEQ ID NO: 25416 - protein, 195 aa, Homo sapiens
  Payload ID: 5031
  Gene Symbol: DOLPP1
  Gene Name: dolichyldiphosphatase 1
  Uniprot ID: Q86YN1
  ENSP ID: ENSP00000384043
MAADGQCSLPASWRPVTLTHVEYPAGDLSGHLLAYLSLSPVFVIVGFVTLIIFKRELHTISFLGGLALNEGVNWLIKNVIQEPRPCGGPHTAVGTKYGMPSSHSQFMWFFSVYSFLFLYLRMHQTNNARFLDLLWRHVLSLGLLAVAFLVSYSRPVSEFFLIRDTSLIPNVLWFEYTVTRAEARNRQRKLGTKLQ

SEQ ID NO: 25417 - protein, 89 aa, Homo sapiens
  Payload ID: 5031
  Gene Symbol: DOLPP1
  Gene Name: dolichyldiphosphatase 1
  ENSP ID: ENSP00000403278
  MOD_RES (1)..(1): Any amino acid
XDGQCSLPASWRPVTLTHVEYPAGDLSGHLLAYLSLSPVFVIVGFVTLIIFKRELHTAPTQQWAPSTGCPPAIPSLCGSSPSIPSFSCI

SEQ ID NO: 25418 - protein, 456 aa, Homo sapiens
  Payload ID: 5032
  Gene Symbol: DDOST
  Gene Name: dolichyl-diphosphooligosaccharide--protein glycosyltransferase subunit (non-catalytic)
  Uniprot ID: P39656
  ENSP ID: ENSP00000364188
MGYFRCARAGSFGRRRKMEPSTAARAWALFWLLLPLLGAVCASGPRTLVLLDNLNVRETHSLFFRSLKDRGFELTFKTADDPSLSLIKYGEFLYDNLIIFSPSVEDFGGNINVETISAFIDGGGSVLVAASSDIGDPLRELGSECGIEFDEEKTAVIDHHNYDISDLGQHTLIVADTENLLKAPTIVGKSSLNPILFRGVGMVADPDNPLVLDILTGSSTSYSFFPDKPITQYPHAVGKNTLLIAGLQARNNARVIFSGSLDFFSDSFFNSAVQKAAPGSQRYSQTGNYELAVALSRWVFKEEGVLRVGPVSHHRVGETAPPNAYTVTDLVEYSIVIQQLSNGKWVPFDGDDIQLEFVRIDPFVRTFLKKKGGKYSVQFKLPDVYGVFQFKVDYNRLGYTHLYSSTQVSVRPLQHTQYERFIPSAYPYYASAFSMMLGLFIFSIVFLHMKEKEKSD

SEQ ID NO: 25419 - protein, 456 aa, Homo sapiens; identical to SEQ ID NO: 25418
  Payload ID: 5032
  Gene Symbol: DDOST
  Gene Name: dolichyl-diphosphooligosaccharide--protein glycosyltransferase subunit (non-catalytic)
  Uniprot ID: P39656
  ENSP ID: ENSP00000399457

SEQ ID NO: 25420 - protein, 439 aa, Homo sapiens
  Payload ID: 5032
  Gene Symbol: DDOST
  Gene Name: dolichyl-diphosphooligosaccharide--protein glycosyltransferase subunit (non-catalytic)
  ENSP ID: ENSP00000473655
MEPSTAARAWALFWLLLPLLGAVCASGPRTLVLLDNLNVRETHSLFFRSLKDRGFELTFKTADDPSLSLIKYGEFLYDNLIIFSPSVEDFGGNINVETISAFIDGGGSVLVAASSDIGDPLRELGSECGIEFDEEKTAVIDHHNYDISDLGQHTLIVADTENLLKAPTIVGKSSLNPILFRGVGMVADPDNPLVLDILTGSSTSYSFFPDKPITQYPHAVGKNTLLIAGLQARNNARVIFSGSLDFFSDSFFNSAVQKAAPGSQRYSQTGNYELAVALSRWVFKEEGVLRVGPVSHHRVGETAPPNAYTVTDLVEYSIVIQQLSNGKWVPFDGDDIQLEFVRIDPFVRTFLKKKGGKYSVQFKLPDVYGVFQFKVDYNRLGYTHLYSSTQVSVRPLQHTQYERFIPSAYPYYASAFSMMLGLFIFSIVFLHMKEKEKSD

SEQ ID NO: 25421 - protein, 154 aa, Homo sapiens
  Payload ID: 5032
  Gene Symbol: DDOST
  Gene Name: dolichyl-diphosphooligosaccharide--protein glycosyltransferase subunit (non-catalytic)
  ENSP ID: ENSP00000475634
MEPSTAARAWALFWLLLPLLGAVCASGPRTLVLLDNLNVRETHSLFFRSLKDRGFELTFKTADDPSLSLIKYGEFLYDNLIIFSPSVEGDPLRELGSECGIEFDEEKTAVIDHHNYDISDLGQHTLIVADTENLLKAPTIVGKSSLNPILFRGV

SEQ ID NO: 25422 - protein, 408 aa, Homo sapiens
  Payload ID: 5033
  Gene Symbol: DPAGT1
  Gene Name: dolichyl-phosphate (UDP-N-acetylglucosamine) N-acetylglucosaminephosphotransferase 1 (GlcNAc-1-P transferase)
  Uniprot ID: Q9H3H5
  ENSP ID: ENSP00000346142
MWAFSELPMPLLINLIVSLLGFVATVTLIPAFRGHFIAARLCGQDLNKTSRQQIPESQGVISGAVFLIILFCFIPFPFLNCFVKEQCKAFPHHEFVALIGALLAICCMIFLGFADDVLNLRWRHKLLLPTAASLPLLMVYFTNFGNTTIVVPKPFRPILGLHLDLGILYYVYMGLLAVFCTNAINILAGINGLEAGQSLVISASIIVFNLVELEGDCRDDHVFSLYFMIPFFFTTLGLLYHNWYPSRVFVGDTFCYFAGMTFAVVGILGHFSKTMLLFFMPQVFNFLYSLPQLLHIIPCPRHRIPRLNIKTGKLEMSYSKFKTKSLSFLGTFILKVAESLQLVTVHQSETEDGEFTECNNMTLINLLLKVLGPIHERNLTLLLLLLQILGSAITFSIRYQLVRLFYDV

SEQ ID NO: 25423 - protein, 57 aa, Homo sapiens
  Payload ID: 5033
  Gene Symbol: DPAGT1
  Gene Name: dolichyl-phosphate (UDP-N-acetylglucosamine) N-acetylglucosaminephosphotransferase 1 (GlcNAc-1-P transferase)
  ENSP ID: ENSP00000376579
MWAFSELPMPLLINLIVSLLGFVATVTLIPAFRGHFIAARLCGQDLNKTSRQQILWP

SEQ ID NO: 25424 - protein, 408 aa, Homo sapiens; identical to SEQ ID NO: 25422
  Payload ID: 5033
  Gene Symbol: DPAGT1
  Gene Name: dolichyl-phosphate (UDP-N-acetylglucosamine) N-acetylglucosaminephosphotransferase 1 (GlcNAc-1-P transferase)
  Uniprot ID: Q9H3H5
  ENSP ID: ENSP00000386597

SEQ ID NO: 25425 - protein, 95 aa, Homo sapiens
  Payload ID: 5033
  Gene Symbol: DPAGT1
  Gene Name: dolichyl-phosphate (UDP-N-acetylglucosamine) N-acetylglucosaminephosphotransferase 1 (GlcNAc-1-P transferase)
  ENSP ID: ENSP00000402019
MWAFSELPMPLLINLIVSLLGFVATVTLIPAFRGHFIAARLCGQDLNKTSRQQIPESQGVISGAVFLIILFCFIPFPFLNCFVKEQCKAFPHHEA

SEQ ID NO: 25426 - protein, 226 aa, Homo sapiens
  Payload ID: 5033
  Gene Symbol: DPAGT1
  Gene Name: dolichyl-phosphate (UDP-N-acetylglucosamine) N-acetylglucosaminephosphotransferase 1 (GlcNAc-1-P transferase)
  ENSP ID: ENSP00000406591
ASDYVGNRFPARNRRVSTPSSLLPTPCLSIAIFLEPEASQIKGEFVALIGALLAICCMIFLGFADDVLNLRWRHKLLLPTAASLPLLMVYFTNFGNTTIVVPKPFRPILGLHLDLGILYYVYMGLLAVFCTNAINILAGINGLEAGQSLVISASIIVFNLVELEGDCRDDHVFSLYFMIPFFFTTLGLLYHNWCSTSSTHCLSSCISSPALATAYPDSISRQANWR

SEQ ID NO: 25427 - protein, 287 aa, Homo sapiens
  Payload ID: 5034
  Gene Symbol: DPM1
  Gene Name: dolichyl-phosphate mannosyltransferase polypeptide 1, catalytic subunit
  ENSP ID: ENSP00000360638
MASLEVSRSPRRSRRELEVRSPRQNKYSVLLPTYNERENLPLIVWLLVKSFSESGINYEIIIIDDGSPDGTRDVAEQLEKIYGSDRILLRPREKKLGLGTAYIHGMKHATGNYIIIMDADLSHHPKFIPEFIRKQKEGNFDIVSGTRYKGNGGVYGWDLKRKIISDGVLPCCPGWSLLGSSDPAILASWDYSRGANFLTQILLRPGASDLTGSFRLYRKEVLEKLIEKCVSKGYVFQMEMIVRARQLNYTIGEVPISFVDRVYGESKLGGNEIVSFLKGLLTLFATT

SEQ ID NO: 25428 - protein, 295 aa, Homo sapiens
  Payload ID: 5034
  Gene Symbol: DPM1
  Gene Name: dolichyl-phosphate mannosyltransferase polypeptide 1, catalytic subunit
  ENSP ID: ENSP00000360640
  MOD_RES (1)..(1): Any amino acid
XASLEVSRSPRRSRRELEVRSPRQNKYSVLLPTYNERENLPLIVWLLVKSFSESGINYEIIIIDDGSPDGTRDVAEQLEKIYGSDRILLRPREKKLGLGTAYIHGMKHATGNYIIIMDADLSHHPKFIPEFIRKQKEGNFDIVSGTRYKGNGGVYGWDLKRKIISDGVLPCCPGWSLLGSSDPAILASWDYRCEPPRLASRGANFLTQILLRPGASDLTGSFRLYRKEVLEKLIEKCVSKGYVFQMEMIVRARQLNYTIGEVPISFVDRVYGESKLGGNEIVSFLKGLLTLFATT

SEQ ID NO: 25429 - protein, 260 aa, Homo sapiens
  Payload ID: 5034
  Gene Symbol: DPM1
  Gene Name: dolichyl-phosphate mannosyltransferase polypeptide 1, catalytic subunit
  Uniprot ID: O60762
  ENSP ID: ENSP00000360644
MASLEVSRSPRRSRRELEVRSPRQNKYSVLLPTYNERENLPLIVWLLVKSFSESGINYEIIIIDDGSPDGTRDVAEQLEKIYGSDRILLRPREKKLGLGTAYIHGMKHATGNYIIIMDADLSHHPKFIPEFIRKQKEGNFDIVSGTRYKGNGGVYGWDLKRKIISRGANFLTQILLRPGASDLTGSFRLYRKEVLEKLIEKCVSKGYVFQMEMIVRARQLNYTIGEVPISFVDRVYGESKLGGNEIVSFLKGLLTLFATT

SEQ ID NO: 25430 - protein, 221 aa, Homo sapiens
  Payload ID: 5034
  Gene Symbol: DPM1
  Gene Name: dolichyl-phosphate mannosyltransferase polypeptide 1, catalytic subunit
  ENSP ID: ENSP00000394921
MASLEVSRSPRRSRRELEVRSPRQNKYSVLLPTYNERENLPLIVWLLVKSFSESGINYEIIIIDDGSPDGTRDVAEQLEKIYGSDRILLRPREKKLGLGTAYIHGMKHATGNYIIIMDADLSHHPKFIPEFISDGVLPCCPGWSLLGSSDPAILASWDYSRGANFLTQILLRPGASDLTGSFRLYRKEVLEKLIEKCVSKGYVFQMEMIVRARQLNYTIGE

SEQ ID NO: 25431 - protein, 84 aa, Homo sapiens
  Payload ID: 5035
  Gene Symbol: DPM2
  Gene Name: dolichyl-phosphate mannosyltransferase polypeptide 2, regulatory subunit
  Uniprot ID: O94777
  ENSP ID: ENSP00000322181
MATGTDQVVGLGLVAVSLIIFTYYTAWVILLPFIDSQHVIHKYFLPRAYAVAIPLAAGLLLLLFVGLFISYVMLKTKRVTKKAQ

SEQ ID NO: 25432 - protein, 130 aa, Homo sapiens
  Payload ID: 5035
  Gene Symbol: DPM2
  Gene Name: dolichyl-phosphate mannosyltransferase polypeptide 2, regulatory subunit
  ENSP ID: ENSP00000362202
MATGTDQVVGLGLVAVSLIIFTYYTAWVILLPFIDSQHVIHKYFLPRAYAVAIPLAAGLLLLLFVGKSSPPPLDPGQGFGKTPPLNMLPHFGGAGSCLPRTHPWGFPVHPSRLPVSNLWVSWCPRLFGLQ

SEQ ID NO: 25433 - protein, 92 aa, Homo sapiens
  Payload ID: 5036
  Gene Symbol: DPM3
  Gene Name: dolichyl-phosphate mannosyltransferase polypeptide 3
  Uniprot ID: Q9P2X0
  ENSP ID: ENSP00000344338
MTKLAQWLWGLAILGSTWVALTTGALGLELPLSCQEVLWPLPAYLLVSAGCYALGTVGYRVATFHDCEDAARELQSQIQEARADLARRGLRF

SEQ ID NO: 25434 - protein, 122 aa, Homo sapiens
  Payload ID: 5036
  Gene Symbol: DPM3
  Gene Name: dolichyl-phosphate mannosyltransferase polypeptide 3
  Uniprot ID: Q9P2X0
  ENSP ID: ENSP00000357384
MLSVGGLRLSLVRFSFLLLRGALLPSLAVTMTKLAQWLWGLAILGSTWVALTTGALGLELPLSCQEVLWPLPAYLLVSAGCYALGTVGYRVATFHDCEDAARELQSQIQEARADLARRGLRF

SEQ ID NO: 25435 - protein, 92 aa, Homo sapiens; identical to SEQ ID NO: 25433
  Payload ID: 5036
  Gene Symbol: DPM3
  Gene Name: dolichyl-phosphate mannosyltransferase polypeptide 3
  Uniprot ID: Q9P2X0
  ENSP ID: ENSP00000357385

SEQ ID NO: 25436 - protein, 480 aa, Homo sapiens
  Payload ID: 5037
  Gene Symbol: DDC
  Gene Name: dopa decarboxylase (aromatic L-amino acid decarboxylase)
  Uniprot ID: P20711
  ENSP ID: ENSP00000350616
MNASEFRRRGKEMVDYMANYMEGIEGRQVYPDVEPGYLRPLIPAAAPQEPDTFEDIINDVEKIIMPGVTHWHSPYFFAYFPTASSYPAMLADMLCGAIGCIGFSWAASPACTELETVMMDWLGKMLELPKAFLNEKAGEGGGVIQGSASEATLVALLAARTKVIHRLQAASPELTQAAIMEKLVAYSSDQAHSSVERAGLIGGVKLKAIPSDGNFAMRASALQEALERDKAAGLIPFFMVATLGTTTCCSFDNLLEVGPICNKEDIWLHVDAAYAGSAFICPEFRHLLNGVEFADSFNFNPHKWLLVNFDCSAMWVKKRTDLTGAFRLDPTYLKHSHQDSGLITDYRHWQIPLGRRFRSLKMWFVFRMYGVKGLQAYIRKHVQLSHEFESLVRQDPRFEICVEVILGLVCFRLKGSNKVNEALLQRINSAKKIHLVPCHLRDKFVLRFAICSRTVESAHVQRAWEHIKELAADVLRAERE

SEQ ID NO: 25437 - protein, 338 aa, Homo sapiens
  Payload ID: 5037
  Gene Symbol: DDC
  Gene Name: dopa decarboxylase (aromatic L-amino acid decarboxylase)
  Uniprot ID: P20711
  ENSP ID: ENSP00000370371
MNASEFRRRGKEMVDYMANYMEGIEGRQVYPDVEPGYLRPLIPAAAPQEPDTFEDIINDVEKIIMPGVTHWHSPYFFAYFPTASSYPAMLADMLCGAIGCIGFSWAASPACTELETVMMDWLGKMLELPKAFLNEKAGEGGGVIQGSASEATLVALLAARTKVIHRLQAASPELTQAAIMEKLVAYSSDQAHSSVERAGLIGGVKLKAIPSDGNFAMRASALQEALERDKAAGLIPFFMVATLGTTTCCSFDNLLEVGPICNKEDIWLHVDAAYAGSAFICPEFRHLLNGVEFADSFNFNPHKWLLVNFDCSAMWSRQPVRMLRLKKTCLVSAVVRRS

SEQ ID NO: 25438 - protein, 361 aa, Homo sapiens
  Payload ID: 5037
  Gene Symbol: DDC
  Gene Name: dopa decarboxylase (aromatic L-amino acid decarboxylase)
  ENSP ID: ENSP00000389422
  MOD_RES (1)..(1): Any amino acid
XGYLRPLIPAAAPQEPDTFEDIINDVEKIIMPGVTHWHSPYFFAYFPTASSYPAMLADMLCGAIGCIGFSWAHSSVERAGLIGGVKLKAIPSDGNFAMRASALQEALERDKAAGLIPFFMVATLGTTTCCSFDNLLEVGPICNKEDIWLHVDAAYAGSAFICPEFRHLLNGVEFADSFNFNPHKWLLVNFDCSAMWVKKRTDLTGAFRLDPTYLKHSHQDSGLITDYRHWQIPLGRRFRSLKMWFVFRMYGVKGLQAYIRKHVQLSHEFESLVRQDPRFEICVEVILGLVCFRLKGSNKVNEALLQRINSAKKIHLVPCHLRDKFVLRFAICSRTVESAHVQRAWEHIKELAADVLRAERE

SEQ ID NO: 25439 - protein, 229 aa, Homo sapiens
  Payload ID: 5037
  Gene Symbol: DDC
  Gene Name: dopa decarboxylase (aromatic L-amino acid decarboxylase)
  ENSP ID: ENSP00000393724
MNASEFRRRGKEMVDYMANYMEGIEGRQVYPDVEPGYLRPLIPAAAPQEPDTFEDIINDVEKIIMPGAASPACTELETVMMDWLGKMLELPKAFLNEKAGEGGGVIQGSASEATLVALLAARTKVIHRLQAASPELTQAAIMEKLVAYSSDQAHSSVERAGLIGGVKLKAIPSDGNFAMRASALQEALERDKAAGLIPFFMVATLGTTTCCSFDNLLEVGPIFCRFIQL

SEQ ID NO: 25440 - protein, 402 aa, Homo sapiens
  Payload ID: 5037
  Gene Symbol: DDC
  Gene Name: dopa decarboxylase (aromatic L-amino acid decarboxylase)
  Uniprot ID: P20711
  ENSP ID: ENSP00000395069
MNASEFRRRGKEMVDYMANYMEGIEGRQVYPDVEPGYLRPLIPAAAPQEPDTFEDIINDVEKIIMPGGSASEATLVALLAARTKVIHRLQAASPELTQAAIMEKLVAYSSDQAHSSVERAGLIGGVKLKAIPSDGNFAMRASALQEALERDKAAGLIPFFMVATLGTTTCCSFDNLLEVGPICNKEDIWLHVDAAYAGSAFICPEFRHLLNGVEFADSFNFNPHKWLLVNFDCSAMWVKKRTDLTGAFRLDPTYLKHSHQDSGLITDYRHWQIPLGRRFRSLKMWFVFRMYGVKGLQAYIRKHVQLSHEFESLVRQDPRFEICVEVILGLVCFRLKGSNKVNEALLQRINSAKKIHLVPCHLRDKFVLRFAICSRTVESAHVQRAWEHIKELAADVLRAERE

SEQ ID NO: 25441 - protein, 387 aa, Homo sapiens
  Payload ID: 5037
  Gene Symbol: DDC
  Gene Name: dopa decarboxylase (aromatic L-amino acid decarboxylase)
  Uniprot ID: P20711
  ENSP ID: ENSP00000399184
MNASEFRRRGKEMVDYMANYMEGIEGRQVYPDVEPGYLRPLIPAAAPQEPDTFEDIINDVEKIIMPGVTHWHSPYFFAYFPTASSYPAMLADMLCGAIGCIGFSWAASPACTELETVMMDWLGKMLELPKAFLNEKAGEGGGVIQMVATLGTTTCCSFDNLLEVGPICNKEDIWLHVDAAYAGSAFICPEFRHLLNGVEFADSFNFNPHKWLLVNFDCSAMWVKKRTDLTGAFRLDPTYLKHSHQDSGLITDYRHWQIPLGRRFRSLKMWFVFRMYGVKGLQAYIRKHVQLSHEFESLVRQDPRFEICVEVILGLVCFRLKGSNKVNEALLQRINSAKKIHLVPCHLRDKFVLRFAICSRTVESAHVQRAWEHIKELAADVLRAERE

SEQ ID NO: 25442 - protein, 480 aa, Homo sapiens; identical to SEQ ID NO: 25436
  Payload ID: 5037
  Gene Symbol: DDC
  Gene Name: dopa decarboxylase (aromatic L-amino acid decarboxylase)
  Uniprot ID: P20711
  ENSP ID: ENSP00000403644

SEQ ID NO: 25443 - protein, 30 aa, Homo sapiens
  Payload ID: 5037
  Gene Symbol: DDC
  Gene Name: dopa decarboxylase (aromatic L-amino acid decarboxylase)
  ENSP ID: ENSP00000408626
MNASEFRRRGKEMVDYMANYMEGIEGRQVY

SEQ ID NO: 25444 - protein, 432 aa, Homo sapiens
  Payload ID: 5037
  Gene Symbol: DDC
  Gene Name: dopa decarboxylase (aromatic L-amino acid decarboxylase)
  ENSP ID: ENSP00000478385
MNASEFRRRGKEMVDYMANYMEGIEGRQVYPDVEPGYLRPLIPAAAPQEPDTFEDIINDVEKIIMPGVTHWHSPYFFAYFPTASSYPAMLADMLCGAIGCIGFSWAASPACTELETVMMDWLGKMLELPKAFLNEKAGEGGGVIQGSASEATLVALLAARTKVIHRLQAASPELTQAAIMEKLVAYSSDQMVATLGTTTCCSFDNLLEVGPICNKEDIWLHVDAAYAGSAFICPEFRHLLNGVEFADSFNFNPHKWLLVNFDCSAMWVKKRTDLTGAFRLDPTYLKHSHQDSGLITDYRHWQIPLGRRFRSLKMWFVFRMYGVKGLQAYIRKHVQLSHEFESLVRQDPRFEICVEVILGLVCFRLKGSNKVNEALLQRINSAKKIHLVPCHLRDKFVLRFAICSRTVESAHVQRAWEHIKELAADVLRAERE

SEQ ID NO: 25445 - protein, 442 aa, Homo sapiens
  Payload ID: 5037
  Gene Symbol: DDC
  Gene Name: dopa decarboxylase (aromatic L-amino acid decarboxylase)
  ENSP ID: ENSP00000479110
MNASEFRRRGKEMVDYMANYMEGIEGRQVYPDVEPGYLRPLIPAAAPQEPDTFEDIINDVEKIIMPGAASPACTELETVMMDWLGKMLELPKAFLNEKAGEGGGVIQGSASEATLVALLAARTKVIHRLQAASPELTQAAIMEKLVAYSSDQAHSSVERAGLIGGVKLKAIPSDGNFAMRASALQEALERDKAAGLIPFFMVATLGTTTCCSFDNLLEVGPICNKEDIWLHVDAAYAGSAFICPEFRHLLNGVEFADSFNFNPHKWLLVNFDCSAMWVKKRTDLTGAFRLDPTYLKHSHQDSGLITDYRHWQIPLGRRFRSLKMWFVFRMYGVKGLQAYIRKHVQLSHEFESLVRQDPRFEICVEVILGLVCFRLKGSNKVNEALLQRINSAKKIHLVPCHLRDKFVLRFAICSRTVESAHVQRAWEHIKELAADVLRAERE

SEQ ID NO: 25446 - protein, 387 aa, Homo sapiens; identical to SEQ ID NO: 25441
  Payload ID: 5037
  Gene Symbol: DDC
  Gene Name: dopa decarboxylase (aromatic L-amino acid decarboxylase)
  Uniprot ID: P20711
  ENSP ID: ENSP00000484104

SEQ ID NO: 25447 - protein, 519 aa, Homo sapiens
  Payload ID: 5038
  Gene Symbol: DCT
  Gene Name: dopachrome tautomerase
  Uniprot ID: P40126
  ENSP ID: ENSP00000366227
MSPLWWGFLLSCLGCKILPGAQGQFPRVCMTVDSLVNKECCPRLGAESANVCGSQQGRGQCTEVRADTRPWSGPYILRNQDDRELWPRKFFHRTCKCTGNFAGYNCGDCKFGWTGPNCERKKPPVIRQNIHSLSPQEREQFLGALDLAKKRVHPDYVITTQHWLGLLGPNGTQPQFANCSVYDFFVWLHYYSVRDTLLGPGRPYRAIDFSHQGPAFVTWHRYHLLCLERDLQRLIGNESFALPYWNFATGRNECDVCTDQLFGAARPDDPTLISRNSRFSSWETVCDSLDDYNHLVTLCNGTYEGLLRRNQMGRNSMKLPTLKDIRDCLSLQKFDNPPFFQNSTFSFRNALEGFDKADGTLDSQVMSLHNLVHSFLNGTNALPHSAANDPIFVVLHSFTDAIFDEWMKRFNPPADAWPQELAPIGHNRMYNMVPFFPPVTNEELFLTSDQLGYSYAIDLPVSVEETPGWPTTLLVVMGTLVALVGLFVLLAFLQYRRLRKGYTPLMETHLSSKRYTEEA

SEQ ID NO: 25448 - protein, 552 aa, Homo sapiens
  Payload ID: 5038
  Gene Symbol: DCT
  Gene Name: dopachrome tautomerase
  Uniprot ID: P40126
  ENSP ID: ENSP00000392762
MSPLWWGFLLSCLGCKILPGAQGQFPRVCMTVDSLVNKECCPRLGAESANVCGSQQGRGQCTEVRADTRPWSGPYILRNQDDRELWPRKFFHRTCKCTGNFAGYNCGDCKFGWTGPNCERKKPPVIRQNIHSLSPQEREQFLGALDLAKKRVHPDYVITTQHWLGLLGPNGTQPQFANCSVYDFFVWLHYYSVRDTLLGPGRPYRAIDFSHQGPAFVTWHRYHLLCLERDLQRLIGNESFALPYWNFATGRNECDVCTDQLFGAARPDDPTLISRNSRFSSWETVCDSLDDYNHLVTLCNGTYEGLLRRNQMGRNSMKLPTLKDIRDCLSLQKFDNPPFFQNSTFSFRNALEGFDKADGTLDSQVMSLHNLVHSFLNGTNALPHSAANDPIFVVISNRLLYNATTNILEHVRKEKATKELPSLHVLVLHSFTDAIFDEWMKRFNPPADAWPQELAPIGHNRMYNMVPFFPPVTNEELFLTSDQLGYSYAIDLPVSVEETPGWPTTLLVVMGTLVALVGLFVLLAFLQYRRLRKGYTPLMETHLSSKRYTEEA

SEQ ID NO: 25449 - protein, 233 aa, Homo sapiens
  Payload ID: 5038
  Gene Symbol: DCT
  Gene Name: dopachrome tautomerase
  ENSP ID: ENSP00000431275
YSVRDTLLGPGRPYRAIDFSHQGPAFVTWHRYHLLCLERDLQRLIGNESFALPYWNFATGRNECDVCTDQLFGAARPDDPTLISRNSRFSSWETVCDSLDDYNHLVTLCNGTYEGLLRRNQMGRNSMKLPTLKDIRDCLSLQKFDNPPFFQNSTFSFRNALEGFDKADGTLDSQVMSLHNLVHSFLNGTNALPHSAANDPIFVKRESDQGTPFPACAGNHEPGRLYSDFLLLA

SEQ ID NO: 25450 - protein, 244 aa, Homo sapiens
  Payload ID: 5039
  Gene Symbol: DBH
  Gene Name: dopamine beta-hydroxylase (dopamine beta-monooxygenase)
  ENSP ID: ENSP00000263611
MREAAFMYSTAVAIFLVILVAALQGSAPRESPLPYHIPLDPEGSLELSWNVSYTQEAIHFQLLVRRLKAGVLFGMSDRGELENADLVVLWTDGDTAYFADGTVHLVYGILEEPFRSLEAINGSGLQMGLQRVQLLKPNIPEPELPSDACTMEVQAPNIQIPSQETTYWCYIKELPKGFSRHHIIKYEPIVTKGNEALVHHMEVFQCAPEMDSVPHFSGPCDSKMKPDRLNYCRHVLAAWALGAK

SEQ ID NO: 25451 - protein, 617 aa, Homo sapiens
  Payload ID: 5039
  Gene Symbol: DBH
  Gene Name: dopamine beta-hydroxylase (dopamine beta-monooxygenase)
  Uniprot ID: P09172
  ENSP ID: ENSP00000376776
MPALSRWASLPGPSMREAAFMYSTAVAIFLVILVAALQGSAPRESPLPYHIPLDPEGSLELSWNVSYTQEAIHFQLLVRRLKAGVLFGMSDRGELENADLVVLWTDGDTAYFADAWSDQKGQIHLDPQQDYQLLQVQRTPEGLTLLFKRPFGTCDPKDYLIEDGTVHLVYGILEEPFRSLEAINGSGLQMGLQRVQLLKPNIPEPELPSDACTMEVQAPNIQIPSQETTYWCYIKELPKGFSRHHIIKYEPIVTKGNEALVHHMEVFQCAPEMDSVPHFSGPCDSKMKPDRLNYCRHVLAAWALGAKAFYYPEEAGLAFGGPGSSRYLRLEVHYHNPLVIEGRNDSSGIRLYYTAKLRRFNAGIMELGLVYTPVMAIPPRETAFILTGYCTDKCTQLALPPSGIHIFASQLHTHLTGRKVVTVLVRDGREWEIVNQDNHYSPHFQEIRMLKKVVSVHPGDVLITSCTYNTEDRELATVGGFGILEEMCVNYVHYYPQTQLELCKSAVDAGFLQKYFHLINRFNNEDVCTCPQASVSQQFTSVPWNSFNRDVLKALYSFAPISMHCNKSSAVRFQGEWNLQPLPKVISTLEEPTPQCPTSQGRSPAGPTVVSIGGGKG

SEQ ID NO: 25452 - protein, 446 aa, Homo sapiens
  Payload ID: 5040
  Gene Symbol: DRD1
  Gene Name: dopamine receptor D1
  Uniprot ID: P21728
  ENSP ID: ENSP00000377353
MRTLNTSAMDGTGLVVERDFSVRILTACFLSLLILSTLLGNTLVCAAVIRFRHLRSKVTNFFVISLAVSDLLVAVLVMPWKAVAEIAGFWPFGSFCNIWVAFDIMCSTASILNLCVISVDRYWAISSPFRYERKMTPKAAFILISVAWTLSVLISFIPVQLSWHKAKPTSPSDGNATSLAETIDNCDSSLSRTYAISSSVISFYIPVAIMIVTYTRIYRIAQKQIRRIAALERAAVHAKNCQTTTGNGKPVECSQPESSFKMSFKRETKVLKTLSVIMGVFVCCWLPFFILNCILPFCGSGETQPFCIDSNTFDVFVWFGWANSSLNPIIYAFNADFRKAFSTLLGCYRLCPATNNAIETVSINNNGAAMFSSHHEPRGSISKECNLVYLIPHAVGSSEDLKKEEAAGIARPLEKLSPALSVILDYDTDVSLEKIQPITQNGQHPT

SEQ ID NO: 25453 - protein, 414 aa, Homo sapiens
  Payload ID: 5041
  Gene Symbol: DRD2
  Gene Name: dopamine receptor D2
  Uniprot ID: P14416
  ENSP ID: ENSP00000278597
MDPLNLSWYDDDLERQNWSRPFNGSDGKADRPHYNYYATLLTLLIAVIVFGNVLVCMAVSREKALQTTTNYLIVSLAVADLLVATLVMPWVVYLEVVGEWKFSRIHCDIFVTLDVMMCTASILNLCAISIDRYTAVAMPMLYNTRYSSKRRVTVMISIVWVLSFTISCPLLFGLNNADQNECIIANPAFVVYSSIVSFYVPFIVTLLVYIKIYIVLRRRRKRVNTKRSSRAFRAHLRAPLKEAARRAQELEMEMLSSTSPPERTRYSPIPPSHHQLTLPDPSHHGLHSTPDSPAKPEKNGHAKDHPKIAKIFEIQTMPNGKTRTSLKTMSRRKLSQQKEKKATQMLAIVLGVFIICWLPFFITHILNIHCDCNIPPVLYSAFTWLGYVNSAVNPIIYTTFNIEFRKAFLKILHC

SEQ ID NO: 25454 - protein, 443 aa, Homo sapiens
  Payload ID: 5041
  Gene Symbol: DRD2
  Gene Name: dopamine receptor D2
  Uniprot ID: P14416
  ENSP ID: ENSP00000354859
MDPLNLSWYDDDLERQNWSRPFNGSDGKADRPHYNYYATLLTLLIAVIVFGNVLVCMAVSREKALQTTTNYLIVSLAVADLLVATLVMPWVVYLEVVGEWKFSRIHCDIFVTLDVMMCTASILNLCAISIDRYTAVAMPMLYNTRYSSKRRVTVMISIVWVLSFTISCPLLFGLNNADQNECIIANPAFVVYSSIVSFYVPFIVTLLVYIKIYIVLRRRRKRVNTKRSSRAFRAHLRAPLKGNCTHPEDMKLCTVIMKSNGSFPVNRRRVEAARRAQELEMEMLSSTSPPERTRYSPIPPSHHQLTLPDPSHHGLHSTPDSPAKPEKNGHAKDHPKIAKIFEIQTMPNGKTRTSLKTMSRRKLSQQKEKKATQMLAIVLGVFIICWLPFFITHILNIHCDCNIPPVLYSAFTWLGYVNSAVNPIIYTTFNIEFRKAFLKILHC

SEQ ID NO: 25455 - protein, 445 aa, Homo sapiens
  Payload ID: 5041
  Gene Symbol: DRD2
  Gene Name: dopamine receptor D2
  Uniprot ID: P14416
  ENSP ID: ENSP00000438215
MDPLNLSWYDDDLERQNWSRPFNGSDGKADRPHYNYYATLLTLLIAVIVFGNVLVCMAVSREKALQTTTNYLIVSLAVADLLVATLVMPWVVYLEVVGEWKFSRIHCDIFVTLDVMMCTASILNLCAISIDRYTAVAMPMLYNTRYSSKRRVTVMISIVWVLSFTISCPLLFGLNNADQNECIIANPAFVVYSSIVSFYVPFIVTLLVYIKIYIVLRRRRKRVNTKRSSRAFRAHLRAPLKGNCTHPEDMKLCTVIMKSNGSFPVNRRRVVQEAARRAQELEMEMLSSTSPPERTRYSPIPPSHHQLTLPDPSHHGLHSTPDSPAKPEKNGHAKDHPKIAKIFEIQTMPNGKTRTSLKTMSRRKLSQQKEKKATQMLAIVLGVFIICWLPFFITHILNIHCDCNIPPVLYSAFTWLGYVNSAVNPIIYTTFNIEFRKAFLKILHC

SEQ ID NO: 25456 - protein, 177 aa, Homo sapiens
  Payload ID: 5041
  Gene Symbol: DRD2
  Gene Name: dopamine receptor D2
  ENSP ID: ENSP00000438419
MDPLNLSWYDDDLERQNWSRPFNGSDGKADRPHYNYYATLLTLLIAVIVFGNVLVCMAVSREKALQTTTNYLIVSLAVADLLVATLVMPWVVYLEVVGEWKFSRIHCDIFVTLDVMMCTASILNLCAISIDRYTAVAMPMLYNTRYSSKRRVTVMISIVWVLSFTISCPLLFGLNNA

SEQ ID NO: 25457 - protein, 442 aa, Homo sapiens
  Payload ID: 5041
  Gene Symbol: DRD2
  Gene Name: dopamine receptor D2
  ENSP ID: ENSP00000441068
MDPLNLSWYDDDLERQNWSRPFNGSDGKADRPHYNYYATLLTLLIAVIVFGNVLVCMAVSREKALQTTTNYLIVSLAVADLLVATLVMPWVVYLEVGEWKFSRIHCDIFVTLDVMMCTASILNLCAISIDRYTAVAMPMLYNTRYSSKRRVTVMISIVWVLSFTISCPLLFGLNNADQNECIIANPAFVVYSSIVSFYVPFIVTLLVYIKIYIVLRRRRKRVNTKRSSRAFRAHLRAPLKGNCTHPEDMKLCTVIMKSNGSFPVNRRRVEAARRAQELEMEMLSSTSPPERTRYSPIPPSHHQLTLPDPSHHGLHSTPDSPAKPEKNGHAKDHPKIAKIFEIQTMPNGKTRTSLKTMSRRKLSQQKEKKATQMLAIVLGVFIICWLPFFITHILNIHCDCNIPPVLYSAFTWLGYVNSAVNPIIYTTFNIEFRKAFLKILHC

SEQ ID NO: 25458 - protein, 7 aa, Homo sapiens
  Payload ID: 5041
  Gene Symbol: DRD2
  Gene Name: dopamine receptor D2
  ENSP ID: ENSP00000441474
MDPLNLS

SEQ ID NO: 25459 - protein, 443 aa, Homo sapiens; identical to SEQ ID NO: 25454
  Payload ID: 5041
  Gene Symbol: DRD2
  Gene Name: dopamine receptor D2
  Uniprot ID: P14416
  ENSP ID: ENSP00000442172

SEQ ID NO: 25460 - protein, 367 aa, Homo sapiens
  Payload ID: 5042
  Gene Symbol: DRD3
  Gene Name: dopamine receptor D3
  ENSP ID: ENSP00000295881
MASLSQLSGHLNYTCGAENSTGASQARPHAYYALSYCALILAIVFGNGLVCMAVLKERALQTTTNYLVVSLAVADLLVATLVMPWVVYLEVTGGVWNFSRICCDVFVTLDVMMCTASILNLCAISIDRYTAVVMPVHYQHGTGQSSCRRVALMITAVWVLAFAVSCPLLFGFNTTGDPTVCSISNPDFVIYSSVVSFYLPFGVTVLVYARIYVVLKQRRRKRILTRQNSQCNSVRPGFPQQTLSPDPAHLELKRYYSICQDTALGGPGFQERGGELKREEKTRNSLMPLREKKATQMVAIVLGAFIVCWLPFFLTHVLNTHCQTCHVSPELYSATTWLGYVNSALNPVIYTTFNIEFRKAFLKILSC

SEQ ID NO: 25461 - protein, 400 aa, Homo sapiens
  Payload ID: 5042
  Gene Symbol: DRD3
  Gene Name: dopamine receptor D3
  Uniprot ID: P35462
  ENSP ID: ENSP00000373169
MASLSQLSGHLNYTCGAENSTGASQARPHAYYALSYCALILAIVFGNGLVCMAVLKERALQTTTNYLVVSLAVADLLVATLVMPWVVYLEVTGGVWNFSRICCDVFVTLDVMMCTASILNLCAISIDRYTAVVMPVHYQHGTGQSSCRRVALMITAVWVLAFAVSCPLLFGFNTTGDPTVCSISNPDFVIYSSVVSFYLPFGVTVLVYARIYVVLKQRRRKRILTRQNSQCNSVRPGFPQQTLSPDPAHLELKRYYSICQDTALGGPGFQERGGELKREEKTRNSLSPTIAPKLSLEVRKLSNGRLSTSLKLGPLQPRGVPLREKKATQMVAIVLGAFIVCWLPFFLTHVLNTHCQTCHVSPELYSATTWLGYVNSALNPVIYTTFNIEFRKAFLKILSC

SEQ ID NO: 25462 - protein, 400 aa, Homo sapiens; identical to SEQ ID NO: 25461
  Payload ID: 5042
  Gene Symbol: DRD3
  Gene Name: dopamine receptor D3
  Uniprot ID: P35462
  ENSP ID: ENSP00000419402

SEQ ID NO: 25463 - protein, 400 aa, Homo sapiens; identical to SEQ ID NO: 25461
  Payload ID: 5042
  Gene Symbol: DRD3
  Gene Name: dopamine receptor D3
  Uniprot ID: P35462
  ENSP ID: ENSP00000420662

SEQ ID NO: 25464 - protein, 419 aa, Homo sapiens
  Payload ID: 5043
  Gene Symbol: DRD4
  Gene Name: dopamine receptor D4
  Uniprot ID: P21917
  ENSP ID: ENSP00000176183
MGNRSTADADGLLAGRGPAAGASAGASAGLAGQGAAALVGGVLLIGAVLAGNSLVCVSVATERALQTPTNSFIVSLAAADLLLALLVLPLFVYSEVQGGAWLLSPRLCDALMAMDVMLCTASIFNLCAISVDRFVAVAVPLRYNRQGGSRRQLLLIGATWLLSAAVAAPVLCGLNDVRGRDPAVCRLEDRDYVVYSSVCSFFLPCPLMLLLYWATFRGLQRWEVARRAKLHGRAPRRPSGPGPPSPTPPAPRLPQDPCGPDCAPPAPGLPRGPCGPDCAPAAPSLPQDPCGPDCAPPAPGLPPDPCGSNCAPPDAVRAAALPPQTPPQTRRRRRAKITGRERKAMRVLPVVVGAFLLCWTPFFVVHITQALCPACSVPPRLVSAVTWLGYVNSALNPVIYTVFNAEFRNVFRKALRACC

SEQ ID NO: 25465 - protein, 419 aa, Homo sapiens; identical to SEQ ID NO: 25464
  Payload ID: 5043
  Gene Symbol: DRD4
  Gene Name: dopamine receptor D4
  ENSP ID: ENSP00000478431

SEQ ID NO: 25466 - protein, 477 aa, Homo sapiens
  Payload ID: 5044
  Gene Symbol: DRD5
  Gene Name: dopamine receptor D5
  Uniprot ID: P21918
  ENSP ID: ENSP00000306129
MLPPGSNGTAYPGQFALYQQLAQGNAVGGSAGAPPLGPSQVVTACLLTLLIIWTLLGNVLVCAAIVRSRHLRANMTNVFIVSLAVSDLFVALLVMPWKAVAEVAGYWPFGAFCDVWVAFDIMCSTASILNLCVISVDRYWAISRPFRYKRKMTQRMALVMVGLAWTLSILISFIPVQLNWHRDQAASWGGLDLPNNLANWTPWEEDFWEPDVNAENCDSSLNRTYAISSSLISFYIPVAIMIVTYTRIYRIAQVQIRRISSLERAAEHAQSCRSSAACAPDTSLRASIKKETKVLKTLSVIMGVFVCCWLPFFILNCMVPFCSGHPEGPPAGFPCVSETTFDVFVWFGWANSSLNPVIYAFNADFQKVFAQLLGCSHFCSRTPVETVNISNELISYNQDIVFHKEIAAAYIHMMPNAVTPGNREVDNDEEEGPFDRMFQIYQTSPDGDPVAESVWELDCEGEISLDKITPFTPNGFH

SEQ ID NO: 25467 - protein, 2465 aa, Homo sapiens
  Payload ID: 5045
  Gene Symbol: DOPEY1
  Gene Name: dopey family member 1
  Uniprot ID: Q5JWR5
  ENSP ID: ENSP00000195654
MNTEELELLSDSKYRNYVAAIDKALKNFEYSSEWADLISALGKLNKVLQNNAKYQVVPKKLTIGKRLAQCLHPALPGGVHRKALETYEIIFKIIGPKRLAKDLFLYSSGLFPLLANAAMSVKPTLLSLYEIYYLPLGKTLKPGLQGLLTGILPGLEEGSEYYERTNMLLEKVAAAVDQSAFYSALWGSLLTSPAVRLPGITYVLAHLNRKLSMEDQLYIIGSDIELMVEAVSTSVQDSSVLVQRSTLDLILFCFPFHMSQATRPDMIRILSAALHVVLRRDMSLNRRLYAWLLGFDNNGAIIGPRSTRHSNPEEHATYYFTTFSKELLVQAMVGILQVNGFGEENTLMQDLKPFRILISLLDKPELGPVILEDVLIEVFRTLYSQCKAELDLQTEPPFSKDHAQLSSKLRENKKTAELIKTANLLFNSFEPYYMWDYVARWFEECCRRTLHVRLQIGPGDSNDSSELQLTNFCLLVDFLLDIVSLPTRSMRVLCQETYIEIQTEHLPQLLLRMISALTSHLQTLHLSELTDSLRLCSKILSKVQPPLLSASTGGVLQFPSGQNNSVKEWEDKKVSSVSHENPTEVFEDGENPPSSRSSESGFTEFIQYQADRTDDIDRELSEGQGAAAIPIGSTSSETETASTVGSEETIIQTPSVVTQGTATRSRKTAQKTAMQCCLEYVQQFLTRLINLYIIQNNSFSQSLATEHQGDLGREQGETSKWDRNSQGDVKEKNISKQKTSKEYLSAFLAACQLFLECSSFPVYIAEGNHTSELRSEKLETDCEHVQPPQWLQTLMNACSQASDFSVQSVAISLVMDLVGLTQSVAMVTGENINSVEPAQPLSPNQGRVAVVIRPPLTQGNLRYIAEKTEFFKHVALTLWDQLGDGTPQHHQKSVELFYQLHNLVPSSSICEDVISQQLTHKDKKIRMEAHAKFAVLWHLTRDLHINKSSSFVRSFDRSLFIMLDSLNSLDGSTSSVGQAWLNQVLQRHDIARVLEPLLLLLLHPKTQRVSVQRVQAERYWNKSPCYPGEESDKHFMQNFACSNVSQVQLITSKGNGEKPLTMDEIENFSLTVNPLSDRLSLLSTSSETIPMVVSDFDLPDQQIEILQSSDSGCSQSSAGDNLSYEVDPETVNAQEDSQMPKESSPDDDVQQVVFDLICKVVSGLEVESASVTSQLEIEAMPPKCSDIDPDEETIKIEDDSIQQSQNALLSNESSQFLSVSAEGGHECVANGISRNSSSPCISGTTHTLHDSSVASIETKSRQRSHSSIQFSFKEKLSEKVSEKETIVKESGKQPGAKPKVKLARKKDDDKKKSSNEKLKQTSVFFSDGLDLENWYSCGEGDISEIESDMGSPGSRKSPNFNIHPLYQHVLLYLQLYDSSRTLYAFSAIKAILKTNPIAFVNAISTTSVNNAYTPQLSLLQNLLARHRISVMGKDFYSHIPVDSNHNFRSSMYIEILISLCLYYMRSHYPTHVKVTAQDLIGNRNMQMMSIEILTLLFTELAKVIESSAKGFPSFISDMLSKCKVQKVILHCLLSSIFSAQKWHSEKMAGKNLVAVEEGFSEDSLINFSEDEFDNGSTLQSQLLKVLQRLIVLEHRVMTIPEENETGFDFVVSDLEHISPHQPMTSLQYLHAQPITCQGMFLCAVIRALHQHCACKMHPQWIGLITSTLPYMGKVLQRVVVSVTLQLCRNLDNLIQQYKYETGLSDSRPLWMASIIPPDMILTLLEGITAIIHYCLLDPTTQYHQLLVSVDQKHLFEARSGILSILHMIMSSVTLLWSILHQADSSEKMTIAASASLTTINLGATKNLRQQILELLGPISMNHGVHFMAAIAFVWNERRQNKTTTRTKVIPAASEEQLLLVELVRSISVMRAETVIQTVKEVLKQPPAIAKDKKHLSLEVCMLQFFYAYIQRIPVPNLVDSWASLLILLKDSIQLSLPAPGQFLILGVLNEFIMKNPSLENKKDQRDLQDVTHKIVDAIGAIAGSSLEQTTWLRRNLEVKPSPKIMVDGTNLESDVEDMLSPAMETANITPSVYSVHALTLLSEVLAHLLDMVFYSDEKERVIPLLVNIMHYVVPYLRNHSAHNAPSYRACVQLLSSLSGYQYTRRAWKKEAFDLFMDPSFFQMDASCVNHWRAIMDNLMTHDKTTFRDLMTRVAVAQSSSLNLFANRDVELEQRAMLLKRLAFAIFSSEIDQYQKYLPDIQERLVESLRLPQVPTLHSQVFLFFRVLLLRMSPQHLTSLWPTMITELVQVFLLMEQELTADEDISRTSGPSVAGLETTYTGGNGFSTSYNSQRWLNLYLSACKFLDLALALPSENLPQFQMYRWAFIPEASDDSGLEVRRQGIHQREFKPYVVRLAKLLRKRAKKNPEEDNSGRTLGWEPGHLLLTICTVRSMEQLLPFFNVLSQVFNSKVTSRCGGHSGSPILYSNAFPNKDMKLENHKPCSSKARQKIEEMVEKDFLEGMIKT

SEQ ID NO: 25468 - protein, 2476 aa, Homo sapiens
  Payload ID: 5045
  Gene Symbol: DOPEY1
  Gene Name: dopey family member 1
  ENSP ID: ENSP00000237163
MNTEELELLSDSKYRNYVAAIDKALKNFEYSSEWADLISALGKLNKVLQNNAKYQVVPKKLTIGKRLAQCLHPALPGGVHRKALETYEIIFKIIGPKRLAKDLFLYSSGLFPLLANAAMSVKPTLLSLYEIYYLPLGKTLKPGLQGLLTGILPGLEEGSEYYERTNMLLEKVAAAVDQSAFYSALWGSLLTSPAVRLPGITYVLAHLNRKLSMEDQLYIIGSDIELMVEAVSTSVQDSSVLVQRSTLDLILFCFPFHMSQATRPDMIRILSAALHVVLRRDMSLNRRLYAWLLGPRSTRHSNPEEHATYYFTTFSKELLVQAMVGILQVNGFGEENTLMQDLKPFRILISLLDKPELGPVILEDVLIEVFRTLYSQCKAELDLQTEPPFSKDHAQLSSKLRENKKTAELIKTANLLFNSFEPYYMWDYVARWFEECCRRTLHVRLQIGPGDSNDSSELQLTNFCLLVDFLLDIVSLPTRSMRVLCQETYIEIQTEHLPQLLLRMISALTSHLQTLHLSELTDSLRLCSKILSKVQPPLLSASTGGVLQFPSGQNNSVKEWEDKKVSSVSHENPTEVFEDGENPPSSRSSESGFTEFIQYQADRTDDIDRELSEGQGAAAIPIGSTSSETETASTVGSEETIIQTPSVVTQGTATRSRKTAQKTAMQCCLEYVQQFLTRLINLYIIQNNSFSQSLATEHQGDLGREQGETSKWDRNSQGDVKEKNISKQKTSKEYLSAFLAACQLFLECSSFPVYIAEGNHTSELRSEKLETDCEHVQPPQWLQTLMNACSQASDFSVQSVAISLVMDLVGLTQSVAMVTGENINSVEPAQPLSPNQGRVAVVIRPPLTQGNLRYIAEKTEFFKHVALTLWDQLGDGTPQHHQKSVELFYQLHNLVPSSSICEDVISQQLTHKDKKIRMEAHAKFAVLWHLTRDLHINKSSSFVRSFDRSLFIMLDSLNSLDGSTSSVGQAWLNQVLQRHDIARVLEPLLLLLLHPKTQRVSVQRVQAERYWNKSPCYPGEESDKHFMQNFACSNVSQVQLITSKGNGEKPLTMDEIENFSLTVNPLSDRLSLLSTSSETIPMVVSDFDLPDQQIEILQSSDSGCSQSSAGDNLSYEVDPETVNAQEDSQMPKESSPDDDVQQVVFDLICKVVSGLEVESASVTSQLEIEAMPPKCSDIDPDEETIKIEDDSIQQSQNALLSNESSQFLSVSAEGGHECVANGISRNSSSPCISGTTHTLHDSSVASIETKSRQRSHSSIQFSFKEKLSEKVSEKETIVKESGKQPGAKPKVKLARKKDDDKKKSSNEKLKQTSVFFSDGLDLENWYSCGEGDISEIESDMGSPGSRKSPNFNIHPLYQHVLLYLQLYDSSRTLYAFSAIKAILKTNPIAFVNAISTTSVNNAYTPQLSLLQNLLARHRISVMGKDFYSHIPVDSNHNFRSSMYIEILISLCLYYMRSHYPTHVKVTAQDLIGNRNMQMMSIEILTLLFTELAKVIESSAKGFPSFISDMLSKCKVQKVILHCLLSSIFSAQKWHSEKMAGKNLVAVEEGFSEDSLINFSEDEFDNGSTLQSQLLKVLQRLIVLEHRVMTIPEENETGFDFVVSDLEHISPHQPMTSLQYLHAQPITCQGMFLCAVIRALHQHCACKMHPQWIGLITSTLPYMGKVLQRVVVSVTLQLCRNLDNLIQQYKYETGLSDSRPLWMASIIPPDMILTLLEGITAIIHYCLLDPTTQYHQLLVSVDQKHLFEARSGILSILHMIMSSVTLLWSILHQADSSEKMTIAASASLTTINLGATKNLRQQILELLGPISMNHGVHFMAAIAFVWNERRQNKTTTRTKVIPAASEEQLLLVELVRSISVMRAETVIQTVKEVLKQPPAIAKDKKHLSLEVCMLQFFYAYIQRIPVPNLVDSWASLLILLKDSIQLSLPAPGQFLILGVLNEFIMKNPSLENKKDQRDLQDVTHKIVDAIGAIAGSSLEQTTWLRRNLEVKPSPKIMVDGTNLESDVEDMLSPAMETANITPSVYSVHALTLLSEVLAHLLDMVFYSDEKERVIPLLVNIMHYVVPYLRNHSAHNAPSYRACVQLLSSLSGYQYTRRAWKKEAFDLFMDPSFFQMDASCVNHWRAIMDNLMTHDKTTFRDLMTRVAVAQSSSLNLFANRDVELEQRAMLLKRLAFAIFSSEIDQYQKYLPDIQERLVESLRLPQVPTLHSQVFLFFRVLLLRMSPQHLTSLWPTMITELVQVFLLMEQELTADEDISRTSGPSVAGLETTYTGGNGFSTSYNSQRWLNLYLSACKFLDLALALPSENLPQFQMYRWAFIPEASDDSGLEVRRQGIHQREFKPYVVRLAKLLRKRAKDKEEDFKTVILEGLEMAKHQKNPEEDNSGRTLGWEPGHLLLTICTVRSMEQLLPFFNVLSQVFNSKVTSRCGGHSGSPILYSNAFPNKDMKLENHKPCSSKARQKIEEMVEKDFLEGMIKT

SEQ ID NO: 25469 - protein, 2476 aa, Homo sapiens; identical to SEQ ID NO: 25468
  Payload ID: 5045
  Gene Symbol: DOPEY1
  Gene Name: dopey family member 1
  ENSP ID: ENSP00000358754

SEQ ID NO: 25470 - protein, 171 aa, Homo sapiens
  Payload ID: 5045
  Gene Symbol: DOPEY1
  Gene Name: dopey family member 1
  ENSP ID: ENSP00000474846
  MOD_RES (1)..(1): Any amino acid
XKLRENKKTAELIKTANLLFNSFEPYYMWDYVARWFEECCRRTLHVRLQIGPGDSNDSSELQLTNFCLLVDFLLDIVSLETYIEIQTEHLPQLLLRMISALTSHLQTLHLSELTDSLRLCSKILSKVQPPLLSASTGGVLQFPSGQNNSVKEWEDKKVSSVSHENPTEVFE

SEQ ID NO: 25471 - protein, 145 aa, Homo sapiens
  Payload ID: 5046
  Gene Symbol: DOPEY2
  Gene Name: dopey family member 2
  ENSP ID: ENSP00000270190
MDPEEQELLNDYRYRSYSSVIEKALRNFESSSEWADLISSLGKLNKALQSNLRYSLLPRRLLISKRLAQCLHPALPSGVHLKALETYEIIFKIVGTKWLAKDLFLYSCGLFPLLAHAAVSVRPVLLTLYEKYFLPLQKLLLPSLQ

SEQ ID NO: 25472 - protein, 2298 aa, Homo sapiens
  Payload ID: 5046
  Gene Symbol: DOPEY2
  Gene Name: dopey family member 2
  Uniprot ID: Q9Y3R5
  ENSP ID: ENSP00000382104
MDPEEQELLNDYRYRSYSSVIEKALRNFESSSEWADLISSLGKLNKALQSNLRYSLLPRRLLISKRLAQCLHPALPSGVHLKALETYEIIFKIVGTKWLAKDLFLYSCGLFPLLAHAAVSVRPVLLTLYEKYFLPLQKLLLPSLQAFIVGLLPGLEEGSEISDRTDALLLRLSLVVGKEVFYTALWGSVLASPSIRLPASVFVVGHINRDAPGREQKYMLGTNHQLTVKSLRASLLDSNVLVQRNNLEIVLFFFPFYTCLDSNERAIPLLRSDIVRILSAATQTLLRRDMSLNRRLYAWLLGSDIKGNTVVPESEISNSYEDQSSYFFEKYSKDLLVEGLAEILHQKFIDADVEERHHAYLKPFRVLISLLDKPEIGPQVVGNLFLEVIRAFYSYCRDALGSDLKLSYTQSGNSLISAIKENRNASEIVKTVNLLITSLSTDFLWDYMTRCFEECFRPVKQRYSVRNSVSPPPTVSELCALLVFLLDVIPLELYSEVQTQYLPQVLGCLVQPLAEDMEALSLPELTHALKTCFKVLSKVQMPPSYLDTESTSGTSSPVKGENGKIILETKAVIPGDEDASFPPLKSEDSGIGLSASSPELSEHLRVPRVSLERDDVWKKGGSMQRTFLCIQELIANFASKNIFGVQLTASGEESKSEEPAGKRDRDGTQSLAANDSSRKNSWEPKPITVPQFKQMLSDLFTARGSPFKTKSSESPSSSPSSPARKNGGEWDVEKVVIDLGGSREERREAFAAACHLLLDCATFPVYLSEEETEQLCATLFQLPGAGDSSFPSWLKSLMTICCCVTDCYLQNVAISTLLEVINHSQSLALVIEDKMKRYKSSGHNPFFGKLQMVTVPPIAPGILKVIAEKTDFYQRVARVLWNQLNKETREHHVTCVELFYRLHCLAPTANICEDIICHALLDPDKGTRLEALFRFSVIWHLTREIQGSRVTSHNRSFDRSLFVVLDSLACTDGAIGAAAQGWLVRALSLGDVARILEPVLLLLLQPKTQRTSIHCLKQENSADDLHRWFNRKKTSFREACAVPEPQESGSEEHLPLSQFTTVDREAIWAEVEKEPEKYPLRGELSEEELPYYVELPDRTAHGAPDSSEHTESADTSSCHTDSENTSSFSSPSHDLQELSNEENCCAPIPMGGRAYPKRSALLAAFQSESFKAGAKLSLVRVDSDKTQASESFSSDEEADLELQALTTSRLLKQQRERQEAVEALFKHILLYLQPYDSRRVLYAFSVLEAVLKTNPKEFIEAVSRTSMDTSSTAHLNLISNLLARHQEALIGQSFYGKLQTQVPNVCPHSLLLELLTYLCLSFLRSYYPCYLKVSHRDILGNRDVQVKSVEVLIRIMMQLVSVAKSSEGKNVEFIHSLLQRCKVQEFVLLSLSASMYTSQKRYGLATAHHGRALPEDSLFEESLINLGQDQIWSEHPLQIELLKLLQVLIVLEHHLGRAHEEAENQPDLSREWQRALNFQQAISALQYVQPHPLTSQGLLVSAVVRGLQPAYGYGMHPAWVSLVTHSLPYFGKSLGWTVTPFVVQICKNLDDLVKQYESESVKLSVSTTSKRENISPDYPLTLLEGLTTISHFCLLEQANQNKKTMAAGDPANLRNARNAILEELPRTVNTMALLWNVLRKEETQKRPVDLLGATKGSSSVYFKTTKTIRQKILDFLNPLTAHLGVQLTAAVAAVWSRKKAQRHSKMKIIPTASASQLTLVDLVCALSTLQTDTLLHLVKEVVKRPPQVKGGDEKSPLVDIPVLQFCYAFLQRLPVPALQENFSSLLGVLKESVQLNLAPPGYFLLLSMLNDFVTRTPNLENKKDQKDLQEITQKILEAVGNIAGSSLEQTSWLSRNLEVKAQPQASLEESDAEEDLYDAAAASAMVSSSAPSVYSVQALSLLAEVLASLLDMVYRSDEKEKAVPLISRLLYYVFPYLRNHSAYNAPSFRAGAQLLSSLSGYAYTKRAWRKEVLELFLDPAFFQMDTSCVHWKSIIDHLLTHEKTMFKDLMNMQSSSLKLFSSFEQKAMLLKRQAFAVFSGELDQYHLYLPLIQERLTDNLRVGQTSIVAAQMFLFFRVLLLRISPQHLTSLWPIMVSELIQTFTQLEEDLKDEDESLRSTNKVNRTKVSVPDANGPSVGEIPQSELILYLSACKFLDTALSFPPDKMPLFQIYRWAFIPEVDTEGPAFLSDVEENHQECKPHTVRILELLKLKFGEISSSDEITMKSEFPLLRQHSVSSIRQLMPFFMTLNGAFKTQRQLPADSPGTPFLDFPVTDSPRILKQLEECIEYDFLEHPEC

SEQ ID NO: 25473 - protein, 349 aa, Homo sapiens
  Payload ID: 5047
  Gene Symbol: DRAXIN
  Gene Name: dorsal inhibitory axon guidance protein
  Uniprot ID: Q8NBI3
  ENSP ID: ENSP00000294485
MAGPAIHTAPMLFLVLLLPLELSLAGALAPGTPARNLPENHIDLPGPALWTPQASHHRRRGPGKKEWGPGLPSQAQDGAVVTATRQASRLPEAEGLLPEQSPAGLLQDKDLLLGLALPYPEKENRPPGWERTRKRSREHKRRRDRLRLHQGRALVRGPSSLMKKAELSEAQVLDAAMEESSTSLAPTMFFLTTFEAAPATEESLILPVTSLRPQQAQPRSDGEVMPTLDMALFDWTDYEDLKPDGWPSAKKKEKHRGKLSSDGNETSPAEGEPCDHHQDCLPGTCCDLREHLCTPHNRGLNNKCFDDCMCVEGLRCYAKFHRNRRVTRRKGRCVEPETANGDQGSFINV

SEQ ID NO: 25474 - protein, 263 aa, Homo sapiens
  Payload ID: 5048
  Gene Symbol: DRGX
  Gene Name: dorsal root ganglia homeobox
  Uniprot ID: A6NNA5
  ENSP ID: ENSP00000363254
MFYFHCPPQLEGTATFGNHSSGDFDDGFLRRKQRRNRTTFTLQQLEALEAVFAQTHYPDVFTREELAMKINLTEARVQVWFQNRRAKWRKTERGASDQEPGAKEPMAEVTPPPVRNINSPPPGDQARSKKEALEAQQSLGRTVGPAGPFFPSCLPGTLLNTATYAQALSHVASLKGGPLCSCCVPDPMGLSFLPTYGCQSNRTASVATLRMKAREHSEAVLQSANLLPSTSSSPGPVAKPAPPDGSQEKTSPTKEQSEAEKSV

SEQ ID NO: 25475 - protein, 263 aa, Homo sapiens; identical to SEQ ID NO: 25474
  Payload ID: 5048
  Gene Symbol: DRGX
  Gene Name: dorsal root ganglia homeobox
  Uniprot ID: A6NNA5
  ENSP ID: ENSP00000401653

SEQ ID NO: 25476 - protein, 1537 aa, Homo sapiens
  Payload ID: 5049
  Gene Symbol: DOT1L
  Gene Name: DOT1-like histone H3K79 methyltransferase
  Uniprot ID: Q8TEK3
  ENSP ID: ENSP00000381657
MGEKLELRLKSPVGAEPAVYPWPLPVYDKHHDAAHEIIETIRWVCEEIPDLKLAMENYVLIDYDTKSFESMQRLCDKYNRAIDSIHQLWKGTTQPMKLNTRPSTGLLRHILQQVYNHSVTDPEKLNNYEPFSPEVYGETSFDLVAQMIDEIKMTDDDLFVDLGSGVGQVVLQVAAATNCKHHYGVEKADIPAKYAETMDREFRKWMKWYGKKHAEYTLERGDFLSEEWRERIANTSVIFVNNFAFGPEVDHQLKERFANMKEGGRIVSSKPFAPLNFRINSRNLSDIGTIMRVVELSPLKGSVSWTGKPVSYYLHTIDRTILENYFSSLKNPKLREEQEAARRRQQRESKSNAATPTKGPEGKVAGPADAPMDSGAEEEKAGAATVKKPSPSKARKKKLNKKGRKMAGRKRGRPKKMNTANPERKPKKNQTALDALHAQTVSQTAASSPQDAYRSPHSPFYQLPPSVQRHSPNPLLVAPTPPALQKLLESFKIQYLQFLAYTKTPQYKASLQELLGQEKEKNAQLLGAAQQLLSHCQAQKEEIRRLFQQKLDELGVKALTYNDLIQAQKEISAHNQQLREQSEQLEQDNRALRGQSLQLLKARCEELQLDWATLSLEKLLKEKQALKSQISEKQRHCLELQISIVELEKSQRQQELLQLKSCVPPDDALSLHLRGKGALGRELEPDASRLHLELDCTKFSLPHLSSMSPELSMNGQAAGYELCGVLSRPSSKQNTPQYLASPLDQEVVPCTPSHVGRPRLEKLSGLAAPDYTRLSPAKIVLRRHLSQDHTVPGRPAASELHSRAEHTKENGLPYQSPSVPGSMKLSPQDPRPLSPGALQLAGEKSSEKGLRERAYGSSGELITSLPISIPLSTVQPNKLPVSIPLASVVLPSRAERARSTPSPVLQPRDPSSTLEKQIGANAHGAGSRSLALAPAGFSYAGSVAISGALAGSPASLTPGAEPATLDESSSSGSLFATVGSRSSTPQHPLLLAQPRNSLPASPAHQLSSSPRLGGAAQGPLPEASKGDLPSDSGFSDPESEAKRRIVFTITTGAGSAKQSPSSKHSPLTASARGDCVPSHGQDSRRRGRRKRASAGTPSLSAGVSPKRRALPSVAGLFTQPSGSPLNLNSMVSNINQPLEITAISSPETSLKSSPVPYQDHDQPPVLKKERPLSQTNGAHYSPLTSDEEPGSEDEPSSARIERKIATISLESKSPPKTLENGGGLAGRKPAPAGEPVNSSKWKSTFSPISDIGLAKSADSPLQASSALSQNSLFTFRPALEEPSADAKLAAHPRKGFPGSLSGADGLSPGTNPANGCTFGGGLAADLSLHSFSDGASLPHKGPEAAGLSSPLSFPSQRGKEGSDANPFLSKRQLDGLAGLKGEGSRGKEAGEGGLPLCGPTDKTPLLSGKAAKARDREVDLKNGHNLFISAAAVPPGSLLSGPGLAPAASSAGGAASSAQTHRSFLGPFPPGPQFALGPMSLQANLGSVAGSSVLQSLFSSVPAAAGLVHVSSAATRLTNSHAMGSFSGVAGGTVGGN

SEQ ID NO: 25477 - protein, 208 aa, Homo sapiens
  Payload ID: 5049
  Gene Symbol: DOT1L
  Gene Name: DOT1-like histone H3K79 methyltransferase
  ENSP ID: ENSP00000404284
MGEKLELRLKSPVGAEPAVYPWPLPVYDKHHDAAHEIIETIRWVCEEIPDLKLAMENYVLIDYDTKSFESMQRLCDKYNRAIDSIHQLQVYNHSVTDPEKLNNYEPFSPEVYGETSFDLVAQMIDEIKMTDDDLFVDLGSGVGQVVLQVAAATNCKHHYGVEKADIPAKYAETMDREFRKWMKWYGKKHAEYTLERGDFLSEEWRERI

SEQ ID NO: 25478 - protein, 653 aa, Homo sapiens
  Payload ID: 5049
  Gene Symbol: DOT1L
  Gene Name: DOT1-like histone H3K79 methyltransferase
  ENSP ID: ENSP00000407411
SGSPLNLNSMVSNINQPLEITAISSPETSLKSSPVPYQDHDQPPVLKKERPLSQTNGAHYSPLTSDEEPGSEDEPSSARIERKIATISLESKSPPKTLENGGGLAGRKPAPAGEPVNSSKWKSTFSPISDIGLAKSADSPLQASSALSQNSLFTFRPALEEPSADAKLAAHPRKGFPGSLSGADGLSPGTNPANGCTFGGGLAADLSLHSFSDGASLPHKGPEAAGLSSPLSFPSQRGKEGSDANPFLSKRQLDGLAGLKGEGSRGKEAGEGGLPLCGPTDKTPLLSGKAAKARDREVDLKNGHNLFISAAAVPPGSLLSGPGLAPAASSAGGAASSAQTHRSFLGPFPPGPQFALGPMSLQANLGSVAGSSVLQSLFSSVPAAAGLVHVSSAATRLTNSHAMGSFSGVAGGTVGEGHRAQGHQSITFSRGGHLLGVAARALARLWELVLGVFNHAVPSASAHPFGARVGRGAACGSATLGPSPLQAAASASASSFQAPASVETRPPPPPPPPPPPLPPPAHLGRSPAGPPVLHAPPPPNAALPPPPTLLASNPEPALLQSLASLPPNQAFLPPTSAASLPPANASLSIKLTSLPHKGARPSFTVHHQPLPRLALAQAAPGIPQASATGPSAVWVSLGMPPPYAAHLSGVKPR

SEQ ID NO: 25479 - protein, 125 aa, Homo sapiens
  Payload ID: 5049
  Gene Symbol: DOT1L
  Gene Name: DOT1-like histone H3K79 methyltransferase
  ENSP ID: ENSP00000412916
GPFPPGPQFALGPMSLQANLGSVAGSSVLQSLFSSVPAAAGLVHVSSAATRLTNSHAMGSFSGVAGGTVGGVFNHAVPSASAHPFGARVGRGAACGSATLGPSPLQAAASASASSFQAPASVETR

SEQ ID NO: 25480 - protein, 142 aa, Homo sapiens
  Payload ID: 5049
  Gene Symbol: DOT1L
  Gene Name: DOT1-like histone H3K79 methyltransferase
  ENSP ID: ENSP00000476469
QAQKEEIRRLFQQKLDELGVKALTYNDLIQAQKEISAHNQQLREQSEQLEQDNRALRGQSLQLLKARCEELQLDWATLSLEKLLKEKQALKSQISEKQRHCLELQSPIPSTLCPPAHLTCPQRGFTVDGPGALSLDLCCLFK

SEQ ID NO: 25481 - protein, 69 aa, Homo sapiens
  Payload ID: 5049
  Gene Symbol: DOT1L
  Gene Name: DOT1-like histone H3K79 methyltransferase
  ENSP ID: ENSP00000484015
  MOD_RES (1)..(1): Any amino acid
XELRLKSPVGAEPAVYPWPLPVYDKHHDAAHEIIETIRWVCEEIPDLKLAMENYVLIDYDTKSCWLRKT

SEQ ID NO: 25482 - protein, 400 aa, Homo sapiens
  Payload ID: 5050
  Gene Symbol: DOC2A
  Gene Name: double C2-like domains, alpha
  Uniprot ID: Q14183
  ENSP ID: ENSP00000340017
MRGRRGDRMTINIQEHMAINVCPGPIRPIRQISDYFPRGPGPEGGGGGGGEAPAHLVPLALAPPAALLGATTPEDGAEVDSYDSDDATALGTLEFDLLYDRASCTLHCSILRAKGLKPMDFNGLADPYVKLHLLPGACKANKLKTKTQRNTLNPVWNEDLTYSGITDDDITHKVLRIAVCDEDKLSHNEFIGEIRVPLRRLKPSQKKHFNICLERQVPLASPSSMSAALRGISCYLKELEQAEQGQGLLEERGRILLSLSYSSRRRGLLVGILRCAHLAAMDVNGYSDPYVKTYLRPDVDKKSKHKTCVKKKTLNPEFNEEFFYEIELSTLATKTLEVTVWDYDIGKSNDFIGGVSLGPGARGEARKHWSDCLQQPDAALERWHTLTSELPPAAGALSSA

SEQ ID NO: 25483 - protein, 80 aa, Homo sapiens
  Payload ID: 5050
  Gene Symbol: DOC2A
  Gene Name: double C2-like domains, alpha
  ENSP ID: ENSP00000454827
MDFNGLADPYVKLHLLPGACKANKLKTKTQRNTLNPVWNEDLTYSGITDDDITHKVLRIAVCDEDKLSHNEFIGEIRVPL

SEQ ID NO: 25484 - protein, 163 aa, Homo sapiens
  Payload ID: 5050
  Gene Symbol: DOC2A
  Gene Name: double C2-like domains, alpha
  Uniprot ID: Q14183
  ENSP ID: ENSP00000454857
MDFNGLADPYVKLHLLPGACKANKLKTKTQRNTLNPVWNEDLTYSGITDDDITHKVLRIAVCDEDKLSHNEFIGEIRVPLRRLKPSQKKHFNICLERQVPLASPSSMSAALRGISCYLKELEQAEQGQGLLEERGRILLSLSYSSRRRGLLVPEARCGQEIQA

SEQ ID NO: 25485 - protein, 400 aa, Homo sapiens; identical to SEQ ID NO: 25482
  Payload ID: 5050
  Gene Symbol: DOC2A
  Gene Name: double C2-like domains, alpha
  Uniprot ID: Q14183
  ENSP ID: ENSP00000455196

SEQ ID NO: 25486 - protein, 400 aa, Homo sapiens; identical to SEQ ID NO: 25482
  Payload ID: 5050
  Gene Symbol: DOC2A
  Gene Name: double C2-like domains, alpha
  Uniprot ID: Q14183
  ENSP ID: ENSP00000455624

SEQ ID NO: 25487 - protein, 203 aa, Homo sapiens
  Payload ID: 5050
  Gene Symbol: DOC2A
  Gene Name: double C2-like domains, alpha
  ENSP ID: ENSP00000456704
MRGRRGDRMTINIQEHMAINVCPGPIRPIRQISDYFPRGPGPEGGGGGGGEAPAHLVPLALAPPAALLGATTPEDGAEVDSYDSDDATALGTLEFDLLYDRASCTLHCSILRAKGLKPMDFNGLADPYVKLHLLPGACKANKLKTKTQRNTLNPVWNEDLTYSGITDDDITHKVLRIAVCDEDKLSHNEFIGEIRVPLRRLKP

SEQ ID NO: 25488 - protein, 218 aa, Homo sapiens
  Payload ID: 5050
  Gene Symbol: DOC2A
  Gene Name: double C2-like domains, alpha
  ENSP ID: ENSP00000457184
MRGRRGDRMTINIQEHMAINVCPGPIRPIRQISDYFPRGPGPEGGGGGGGEAPAHLVPLALAPPAALLGATTPEDGAEVDSYDSDDATALGTLEFDLLYDRASCTLHCSILRAKGLKPMDFNGLADPYVKLHLLPGACKANKLKTKTQRNTLNPVWNEDLTYSGITDDDITHKVLRIAVCDEDKLSHNEFIGEIRVPLRRLKPSQKKHFNICLERQVP

SEQ ID NO: 25489 - protein, 53 aa, Homo sapiens
  Payload ID: 5050
  Gene Symbol: DOC2A
  Gene Name: double C2-like domains, alpha
  ENSP ID: ENSP00000457454
MDFNGLADPYVKLHLLPGACKANKLKTKTQRNTLNPVWNEDLTYSGITDDDIT

SEQ ID NO: 25490 - protein, 59 aa, Homo sapiens
  Payload ID: 5050
  Gene Symbol: DOC2A
  Gene Name: double C2-like domains, alpha
  ENSP ID: ENSP00000458670
MDFNGLADPYVKLHLLPGACKANKLKTKTQRNTLNPVWNEDLTYSGITDDDITHKDRRL

SEQ ID NO: 25491 - protein, 13 aa, Homo sapiens
  Payload ID: 5050
  Gene Symbol: DOC2A
  Gene Name: double C2-like domains, alpha
  ENSP ID: ENSP00000460622
MDFNGLADPYVKL

SEQ ID NO: 25492 - protein, 400 aa, Homo sapiens; identical to SEQ ID NO: 25482
  Payload ID: 5050
  Gene Symbol: DOC2A
  Gene Name: double C2-like domains, alpha
  Uniprot ID: Q14183
  ENSP ID: ENSP00000482870

SEQ ID NO: 25493 - protein, 412 aa, Homo sapiens
  Payload ID: 5051
  Gene Symbol: DOC2B
  Gene Name: double C2-like domains, beta
  ENSP ID: ENSP00000417238
MTLRRRGEKATISIQEHMAIDVCPGPTRPIKQISDYFPRFPRGLPPDAGPRAAAPPDAPARPAVAGAGRRSPSDGAREDDEDVDQLFGAYGSSPGPSPGPSPARPPAKPPEDEPDADGYESDDCTALGTLDFSLLYDQENNALHCTITKAKGLKPMDHNGLADPYVKLHLLPGASKANKLRTKTLRNTLNPTWNETLTYYGITDEDMIRKTLRISVCDEDKFRHNEFIGETRVPLKKLKPNHTKTFSICLEKQLPVDKTEDKSLEERGRILISLKYSSQKQGLLVGIVRCAHLAAMDANGYSDPYVKTYLRPDVDKKSKHKTAVKKKTLNPEFNEEFCYEIKHGDLAKKSLEVTVWDYDIGKSNDFIGGVVLGIHAKGERLKHWFDCLKNKDKRIERWHTLTSELPGAVLSD

SEQ ID NO: 25494 - protein, 412 aa, Homo sapiens
  Payload ID: 5051
  Gene Symbol: DOC2B
  Gene Name: double C2-like domains, beta
  ENSP ID: ENSP00000482950
MTLRRRGEKATISIQEHMAIDVCPGPIRPIKQISDYFPRFPRGLPPDAGPRAAAPPDAPARPAVAGAGRRSPSDGAREDDEDVDQLFGAYGSSPGPSPGPSPARPPAKPPEDEPDADGYESDDCTALGTLDFSLLYDQENNALHCTITKAKGLKPMDHNGLADPYVKLHLLPGASKANKLRTKTLRNTLNPTWNETLTYYGITDEDMIRKTLRISVCDEDKFRHNEFIGETRVPLKKLKPNHTKTFSICLEKQLPVDKTEDKSLEERGRILISLKYSSQKQGLLVGIVRCAHLAAMDANGYSDPYVKTYLRPDVDKKSKHKTAVKKKTLNPEFNEEFCYEIKHGDLAKKSLEVTVWDYDIGKSNDFIGGVVLGIHAKGERLKHWFDCLKNKDKRIERWHTLTSELPGAVLSD

SEQ ID NO: 25495 - protein, 160 aa, Homo sapiens
  Payload ID: 5052
  Gene Symbol: DUX4
  Gene Name: double homeobox 4
  ENSP ID: ENSP00000455112
MALPTPSDSTLPAEARGRGRRRRLVWTPSQSEALRACFERNPYPGIATRERLAQAIGIPEPRVQIWFQNERSRQLRQHRRESRPWPGRRGPPEGRRKRTAVTGSQTALLLRAFEKDRFPGIAAREELARETGLPESRIQIWFQNRRARHPGQGGRAPAQV

SEQ ID NO: 25496 - protein, 424 aa, Homo sapiens
  Payload ID: 5052
  Gene Symbol: DUX4
  Gene Name: double homeobox 4
  Uniprot ID: Q9UBX2
  ENSP ID: ENSP00000456539
MALPTPSDSTLPAEARGRGRRRRLVWTPSQSEALRACFERNPYPGIATRERLAQAIGIPEPRVQIWFQNERSRQLRQHRRESRPWPGRRGPPEGRRKRTAVTGSQTALLLRAFEKDRFPGIAAREELARETGLPESRIQIWFQNRRARHPGQGGRAPAQAGGLCSAAPGGGHPAPSWVAFAHTGAWGTGLPAPHVPCAPGALPQGAFVSQAARAAPALQPSQAAPAEGISQPAPARGDFAYAAPAPPDGALSHPQAPRWPPHPGKSREDRDPQRDGLPGPCAVAQPGPAQAGPQGQGVLAPPTSQGSPWWGWGRGPQVAGAAWEPQAGAAPPPQPAPPDASASARQGQMQGIPAPSQALQEPAPWSALPCGLLLDELLASPEFLQQAQPLLETEAPGELEASEEAASLEAPLSEEEYRALLEEL

SEQ ID NO: 25497 - protein, 424 aa, Homo sapiens; identical to SEQ ID NO: 25496
  Payload ID: 5052
  Gene Symbol: DUX4
  Gene Name: double homeobox 4
  Uniprot ID: Q9UBX2
  ENSP ID: ENSP00000458065

SEQ ID NO: 25498 - protein, 424 aa, Homo sapiens; identical to SEQ ID NO: 25496
  Payload ID: 5052
  Gene Symbol: DUX4
  Gene Name: double homeobox 4
  Uniprot ID: Q9UBX2
  ENSP ID: ENSP00000483555

SEQ ID NO: 25499 - protein, 204 aa, Homo sapiens
  Payload ID: 5053
  Gene Symbol: DUXA
  Gene Name: double homeobox A
  Uniprot ID: A6NLW8
  ENSP ID: ENSP00000452398
MAEDTYSHKMVKTNHRRCRTKFTEEQLKILINTFNQKPYPGYATKQKLALEINTEESRIQIWFQNRRARHGFQKRPEAETLESSQSQGQDQPGVEFQSREARRCRTTYSASQLHTLIKAFMKNPYPGIDSREELAKEIGVPESRVQIWFQNRRSRLLLQRKREPVASLEQEEQGKIPEGLQGAEDTQNGTNFTSDSHFSGARTW

SEQ ID NO: 25500 - protein, 752 aa, Homo sapiens
  Payload ID: 5054
  Gene Symbol: DZANK1
  Gene Name: double zinc ribbon and ankyrin repeat domains 1
  Uniprot ID: Q9NVP4
  ENSP ID: ENSP00000262547
MTAGSVCVPQIIPLRVPQPGKANHEIDNNTLLEMKSDTPDVNIYYTLDGSKPEFLKRIGYGENNTFKYIKPITLPDGKIQVKAIAVSKDCRQSGIVTKVFHVDYEPPNIVSPEDNVENVLKDSSRQEFKNGFVGSKLKKKYKNSENQRSWNVNLRKFPESPLEIPAYGGGSGSRPPTRQSQSPGFAHVSGQKCLTSTEIMRIQRETDFLKCAHCLAPRPSDPFARFCQECGSPVPPIFGCRLPPPEGAQMGLCAECRSLVPMNTPICVVCEAPLALQLQPQASLHLKEKVICRACGTGNPAHLRYCVTCEGALPSSQESMCSGDKAPPPPTQKGGTISCYRCGRWNLWEASFCGWCGAMLGIPAGCSVCPKCGASNHLSARFCGSCGICVKSLVKLSLDRSLALAAEEPRPFSESLNIPLPRSDVGTKRDIGTQTVGLFYPSGKLLAKKEQELASQKQRQEKMSDHKPLLTAISPGRGYWRRQLDHISAHLRCYAQNNPEFRALIAEPRMGKLISATVHEDGCEVSIRLNYSQVSNKNLYLNKAVNFSDHLLSSAAEGDGGLCGSRSSWVSDYSQSTSDTIEKIKRIKNFKTKTFQEKKEQLIPENRLLLKEVGPTGEGRVSVIEQLLDEGADPNCCDEDNRPVITVAVMNKHHEAIPVLVQRGADIDQQWGPLRNTALHEATLLGLAGRESTATLLGCNASIQKKNAGGQTAYDLALNTGDDLVTSLFAAKFGQGLEDQLAQTRSLSLDDC

SEQ ID NO: 25501 - protein, 462 aa, Homo sapiens
  Payload ID: 5054
  Gene Symbol: DZANK1
  Gene Name: double zinc ribbon and ankyrin repeat domains 1
  ENSP ID: ENSP00000328866
MGLCAECRSLVPMNTPICVVCEAPLALQLQPQASLHLKEKVICRACGTGNPAHLRYCVTCEGALPSSQELGIPAGCSVCPKCGASNHLSARFCGSCGICVKSLVKLSLDRSLALAAEEPRPFSESLNIPLPRSDVGTKRDIGTQTVGLFYPSGKLLAKKEQELASQKQRQEKMSDHKPLLTAISPGRGYWRRQLDHISAHLRCYAQNNPEFRALIAEPRMGKLISATVHEDGCEVSIRLNYSQVSNKNLYLNKAVNFSDHLLSSAAEGDGGLCGSRSSWVSDYSQSTSDTIEKIKRIKNFKTKTFQEKKEQLIPENRLLLKEVGPTGEGRVSVIEQLLDEGADPNCCDEDNRPVITVAVMNKHHEAIPVLVQRGADIDQQWGPLRNTALHEATLLGLAGRESTATLLGCNASIQKKNAGGQTAYDLALNTGDDLVTSLFAAKFGQGLEDQLAQTRSLSLDDC

SEQ ID NO: 25502 - protein, 559 aa, Homo sapiens
  Payload ID: 5054
  Gene Symbol: DZANK1
  Gene Name: double zinc ribbon and ankyrin repeat domains 1
  ENSP ID: ENSP00000349774
MRIQRETDFLKCAHCLAPRPSDPFARFCQECGSPVPPIFGCRLPPPEGAQMGLCAECRSLVPMNTPICVVCEAPLALQLQPQASLHLKEKVICRACGTGNPAHLRYCVTCEGALPSSQESMCSGDKAPPPPTQKGGTISCYRCGRWNLWEASFCGWCGAMLGIPAGCSVCPKCGASNHLSARFCGSCGICVKSLVKLSLDRSLALAAEEPRPFSEPRCAWQSLNIPLPRSDVGTKRDIGTQTVGLFYPSGKLLAKKEQELASQKQRQEKMSDHKPLLTAISPGRGYWRRQLDHISAHLRCYAQNNPEFRALIAEPRMGKLISATVHEDGCEVSIRLNYSQVSNKNLYLNKAVNFSDHLLSSAAEGDGGLCGSRSSWVSDYSQSTSDTIEKIKRIKNFKTKTFQEKKEQLIPENRLLLKEVGPTGEGRVSVIEQLLDEGADPNCCDEDNRPVITVAVMNKHHEAIPVLVQRGADIDQQWGPLRNTALHEATLLGLAGRESTATLLGCNASIQKKNAGGQTAYDLALNTGDDLVTSLFAAKFGQGLEDQLAQTRSLSLDDC

SEQ ID NO: 25503 - protein, 752 aa, Homo sapiens; identical to SEQ ID NO: 25500
  Payload ID: 5054
  Gene Symbol: DZANK1
  Gene Name: double zinc ribbon and ankyrin repeat domains 1
  Uniprot ID: Q9NVP4
  ENSP ID: ENSP00000351734

SEQ ID NO: 25504 - protein, 247 aa, Homo sapiens
  Payload ID: 5054
  Gene Symbol: DZANK1
  Gene Name: double zinc ribbon and ankyrin repeat domains 1
  ENSP ID: ENSP00000366857
MTAGSVCVPQIIPLRVPQPGKANHEIDNNTLLEMKSDTPDVNIYYTLDGSKPEFLKRIGYGENNTFKYIKPITLPDGKIQVKAIAVSKDCRQSGIVTKVFHVDYEPPNIVSPEDNVENVLKDSSRQEFKNGFVGSKLKKKYKNSENQRSWNVNLRKFPVPRFCTRKRSEVFDKHGDNENSKGDRLSQVCPLPCPPAIRSLCSLLSRMWLSCPTHIWLSSPTPRRSSDGLVCRMQKLGTHEHSHLCGV

SEQ ID NO: 25505 - protein, 189 aa, Homo sapiens
  Payload ID: 5054
  Gene Symbol: DZANK1
  Gene Name: double zinc ribbon and ankyrin repeat domains 1
  ENSP ID: ENSP00000476391
MTAGSVCVPQIIPLRVPQPGKANHEIDNNTLLEMKSDTPDVNIYYTLDGSKPEFLKRIGYGENNTFKYIKPITLPDGKIQVKAIAVSKDCRQSGIVTKVFHVDYEPPNIVSPEDNVENVLKDSSRQEFKNGFVGSKLKKKYKNSENQRSWNVNLRKFPESPLEIPAYGGGSGSRPPTRQSQARHSPIYI

SEQ ID NO: 25506 - protein, 574 aa, Homo sapiens
  Payload ID: 5054
  Gene Symbol: DZANK1
  Gene Name: double zinc ribbon and ankyrin repeat domains 1
  Uniprot ID: Q9NVP4
  ENSP ID: ENSP00000477046
MTAGSVCVPQIIPLRVPQPGKANHEIDNNTLLEMKSDTPDVNIYYTLDGSKPEFLKRIGYGENNTFKYIKPITLPDGKIQVKAIAVSKDCRQSGIVTKVFHVDYEPPNIVSPEDNVENVLKDSSRQEFKNGFVGSKLKKKYKNSENQRSWNVNLRKFPESPLEIPAYGGGSGSRPPTRQSQSPGFAHVSGQKCLTSTEIMRIQRETDFLKCAHCLAPRPSDPFARFCQECGSPVPPIFGCRLPPPEGAQMGLCAECRSLVPMNTPICVVCEAPLALQLQPQASLHLKEKVICRACGTGNPAHLRYCVTCEGALPSSQESMCSGDKAPPPPTQKGGTISCYRCGRWNLWEASFCGWCGAMLGIPAGCSVCPKCGASNHLSARFCGSCGICVKSLVKLSLDRSLALAAEEPRPFSESLNIPLPRSDVGTKRDIGTQTVGLFYPSGKLLAKKEQELASQKQRQEKMSDHKPLLTAISPGRGYWRRQLDHISAHLRCYAQNNPEFRALIAEPRMGKLISATVHEDGCEVSIRLNYSQVSNKVRKLRLREVKQPASSKGTKLVSGRPRIHTWQPETFPS

SEQ ID NO: 25507 - protein, 247 aa, Homo sapiens; identical to SEQ ID NO: 25504
  Payload ID: 5054
  Gene Symbol: DZANK1
  Gene Name: double zinc ribbon and ankyrin repeat domains 1
  ENSP ID: ENSP00000477872

SEQ ID NO: 25508 - protein, 225 aa, Homo sapiens
  Payload ID: 5054
  Gene Symbol: DZANK1
  Gene Name: double zinc ribbon and ankyrin repeat domains 1
  ENSP ID: ENSP00000479439
  MOD_RES (1)..(1): Any amino acid
XTQSLIKDLKNLYLNKAVNFSDHLLSSAAEGDGGLCGSRSSWVSDYSQSTSDTIEKIKRIKNFKTKTFQEKKEQLIPENRLLLKEVGPTGEGRVSVIEQLLDEGADPNCCDEDNRPVITVAVMNKHHEAIPVLVQRGADIDQQWGPLRNTALHEATLLGLAGRESTATLLGCNASIQKKNAGGQTAYDLALNTGDDLVTSLFAAKFGQGLEDQLAQTRSLSLDDC

SEQ ID NO: 25509 - protein, 140 aa, Homo sapiens
  Payload ID: 5054
  Gene Symbol: DZANK1
  Gene Name: double zinc ribbon and ankyrin repeat domains 1
  ENSP ID: ENSP00000484666
MSDHKPLLTAISPGRGYWRRQLDHISAHLRCYAQNNPEFRALIAEPRMGKLISATVHEDGCEVSIRLNYSQVSNKNLYLNKAVNFSDHLLSSAAEGDGGLCGSRSSWVSDYSQSTSDTIEKIKRIKNFKTKTFQEKKEQL

SEQ ID NO: 25510 - protein, 441 aa, Homo sapiens
  Payload ID: 5055
  Gene Symbol: DCX
  Gene Name: doublecortin
  Uniprot ID: O43602
  ENSP ID: ENSP00000337697
MKTLPLHSHCTEMQRLLPKLEMLTLGSSFCSLQGEFCQAMDSFTTVSHVGMCEETDASFNVFSPKFQFDRSHCQSLRFHQNMELDFGHFDERDKTSRNMRGSRMNGLPSPTHSAHCSFYRTRTLQALSNEKKAKKVRFYRNGDRYFKGIVYAVSSDRFRSFDALLADLTRSLSDNINLPQGVRYIYTIDGSRKIGSMDELEEGESYVCSSDNFFKKVEYTKNVNPNWSVNVKTSANMKAPQSLASSNSAQARENKDFVRPKLVTIIRSGVKPRKAVRVLLNKKTAHSFEQVLTDITEAIKLETGVVKKLYTLDGKQVTCLHDFFGDDDVFIACGPEKFRYAQDDFSLDENECRVMKGNPSATAGPKASPTPQKTSAKSPGPMRRSKSPADSANGTSSSQLSTPKSKQSPISTPTSPGSLRKHKDLYLPLSLDDSDSLGDSM

SEQ ID NO: 25511 - protein, 365 aa, Homo sapiens
  Payload ID: 5055
  Gene Symbol: DCX
  Gene Name: doublecortin
  Uniprot ID: O43602
  ENSP ID: ENSP00000348553
MELDFGHFDERDKTSRNMRGSRMNGLPSPTHSAHCSFYRTRTLQALSNEKKAKKVRFYRNGDRYFKGIVYAVSSDRFRSFDALLADLTRSLSDNINLPQGVRYIYTIDGSRKIGSMDELEEGESYVCSSDNFFKKVEYTKNVNPNWSVNVKTSANMKAPQSLASSNSAQARENKDFVRPKLVTIIRSGVKPRKAVRVLLNKKTAHSFEQVLTDITEAIKLETGVVKKLYTLDGKQVTCLHDFFGDDDVFIACGPEKFRYAQDDFSLDENECRVMKGNPSATAGPKASPTPQKTSAKSPGPMRRSKSPADSGNDQDANGTSSSQLSTPKSKQSPISTPTSPGSLRKHKDLYLPLSLDDSDSLGDSM

SEQ ID NO: 25512 - protein, 438 aa, Homo sapiens
  Payload ID: 5055
  Gene Symbol: DCX
  Gene Name: doublecortin
  ENSP ID: ENSP00000350776
  MOD_RES (1)..(1): Any amino acid
XCTEMQRLLPKLEMLTLGSSFCSLQGEFCQAMDSFTTVSHVGMCEETDASFNVFSPKFQFDRSHCQSLRFHQNMELDFGHFDERDKTSRNMRGSRMNGLPSPTHSAHCSFYRTRTLQALSNEKKAKKVRFYRNGDRYFKGIVYAVSSDRFRSFDALLADLTRSLSDNINLPQGVRYIYTIDGSRKIGSMDELEEGESYVCSSDNFFKKVEYTKNVNPNWSVNVKTSANMKAPQSLASSNSAQARENKDFVRPKLVTIIRSGVKPRKAVRVLLNKKTAHSFEQVLTDITEAIKLETGVVKKLYTLDGKQVTCLHDFFGDDDVFIACGPEKFRYAQDDFSLDENECRVMKGNPSATAGPKASPTPQKTSAKSPGPMRRSKSPADSGNDQDANGTSSSQLSTPKSKQSPISTPTSPGSLRKHKDLYLPLSLDDSDSLGDSM

SEQ ID NO: 25513 - protein, 360 aa, Homo sapiens
  Payload ID: 5055
  Gene Symbol: DCX
  Gene Name: doublecortin
  Uniprot ID: O43602
  ENSP ID: ENSP00000361061
MELDFGHFDERDKTSRNMRGSRMNGLPSPTHSAHCSFYRTRTLQALSNEKKAKKVRFYRNGDRYFKGIVYAVSSDRFRSFDALLADLTRSLSDNINLPQGVRYIYTIDGSRKIGSMDELEEGESYVCSSDNFFKKVEYTKNVNPNWSVNVKTSANMKAPQSLASSNSAQARENKDFVRPKLVTIIRSGVKPRKAVRVLLNKKTAHSFEQVLTDITEAIKLETGVVKKLYTLDGKQVTCLHDFFGDDDVFIACGPEKFRYAQDDFSLDENECRVMKGNPSATAGPKASPTPQKTSAKSPGPMRRSKSPADSANGTSSSQLSTPKSKQSPISTPTSPGSLRKHKDLYLPLSLDDSDSLGDSM

SEQ ID NO: 25514 - protein, 113 aa, Homo sapiens
  Payload ID: 5055
  Gene Symbol: DCX
  Gene Name: doublecortin
  ENSP ID: ENSP00000418811
MELDFGHFDERDKTSRNMRGSRMNGLPSPTHSAHCSFYRTRTLQALSNEKKAKKVRFYRNGDRYFKGIVYAVSSDRFRSFDALLADLTRSLSDNINLPQGVRYIYTIDGSRKI

SEQ ID NO: 25515 - protein, 360 aa, Homo sapiens; identical to SEQ ID NO: 25513
  Payload ID: 5055
  Gene Symbol: DCX
  Gene Name: doublecortin
  Uniprot ID: O43602
  ENSP ID: ENSP00000419861

SEQ ID NO: 25516 - protein, 407 aa, Homo sapiens
  Payload ID: 5056
  Gene Symbol: DCDC1
  Gene Name: doublecortin domain containing 1
  ENSP ID: ENSP00000306898
  MOD_RES (1)..(1): Any amino acid
XDGKRKTMLCLACGQSMRTEKGLKQLLPGVPFLCISGTKTQKPFLQGPFKVISVAEVDLSCDKAEKTLSYYQARLLSLRMKTCTQAASHSGMAATHQKAVKIIAYKNGDGYRNGKLIVAGTFPMLLTECTEQLGLARAASKVYTKDGTPIFTLRDLVLWALDESFLQRDSEKQKQDAAPVGKEQIIVESMEENPRMKVKNRLFAKSVTSDSLDGIDKSLLTLILRNPIAIWVSCGEPFLPPNALQKAEKLEKQNWLKKDRILADLDTMRHKMRQLKGRRVAACQPATMVPTKSPVQPVVVEGGWTEQTQQEIKLMELIRHTEAHLSEIQEMESKINFPIATKRIAVKPSNLYKQPNTKRVWIYLNGGRPEDGTYAWGKTISEVSLLYLKTWIFIWSRKVFFYFLITA

SEQ ID NO: 25517 - protein, 270 aa, Homo sapiens
  Payload ID: 5056
  Gene Symbol: DCDC1
  Gene Name: doublecortin domain containing 1
  Uniprot ID: P59894
  ENSP ID: ENSP00000343496
MAKTGAEDHREALSQSSLSLLTEAMEVLQQSSPEGTLDGNTVNPIYKYILNDLPREFMSSQAKAVIKTTDDYLQSQFGPNRLVHSAAVSEGSGLQDCSTHQTASDHSHDEISDLDSYKSNSKNNSCSISASKRNRPVSAPVGQLRVAEFSSLKFQSARNWQKLSQRHKLQPRVIKVTAYKNGSRTVFARVTVPTITLLLEECTEKLNLNMAARRVFLADGKEALEPEDIPHEADVYVSTGEPFLNPFKKIKGFRYLYNKNESKFTSQIFL

SEQ ID NO: 25518 - protein, 890 aa, Homo sapiens
  Payload ID: 5056
  Gene Symbol: DCDC1
  Gene Name: doublecortin domain containing 1
  ENSP ID: ENSP00000385936
MWPVLPSGQLNEEFDWPIQGLLVPSSPPMKKPICKTTEPYAPVRLRVLQNGEKNKNRSVTILGPDISPGRKTQCTEILNLPSAARRLYNEKGKEIFALKDLQRDELVYVSCGELWINPDLSIAQQKKQIFLRNLESDIAKIQIFCSTHKIEALVLEVQSDIVSGSKLAVHKPVAIFGEEKQVTEPEEKQMQEDPLTTENASSEILDSHVRAHLRMKACHTLPRYAWQETSHDFDEDDSLPKKTEKGLFENVEPQKKHSCSPKHSKLHKHCHQQFEYRDGQIISHAAPQLVLGVQGPNLRSGMEVVLVEKKSDGSHQRWIHQEDSRTFHLVSNPDLVLAVSMTKTRNEVCGYPVIVQKYKPYNNGAANQKWHYMKNIKALVAFHSTALDKEITSANYAGVCTSSVIKEENIDQPGYCYLSPDGKRKTMLCLACGQSMRTEKGLKQLLPGVPFLCISGTKTQKPFLQGPFKVISVAEVDLSCDKAEKTLSYYQARLLSLRMKTCTQAASHSGMAATHQKAVKIIAYKNGDGYRNGKLIVAGTFPMLLTECTEQLGLARAASKVYTKDGTPIFTLRDLVLWALDESFLQRDSEKQKQDAAPVGKEQIIVEKNPRMKVKNRLFAKSVTSDSLDGIDKSLLTLILRNPIAIWVSCGEPFLPPNALQKAEKLEKQNWLKKDRILADLDTMRHKMRQLKGRRVAACQPATMVPTKSPVQPVVVEGGWTEQTQQEIKLMELIRHTEAHLSEIQEMESKINFPIATKRIAVKPSNLYKQPNTKRVWIYLNGGRPEDGTYAWGKTISELLQDCSSRLKMTHPARALYTPSGEPIQSWDDIERDMVICVSMGHGFKTPKELKQLMEIRANYARIRRQQGPQATDIVVSPSTKLLSLAHLHN

SEQ ID NO: 25519 - protein, 354 aa, Homo sapiens
  Payload ID: 5056
  Gene Symbol: DCDC1
  Gene Name: doublecortin domain containing 1
  Uniprot ID: P59894
  ENSP ID: ENSP00000389792
MAKTGAEDHREALSQSSLSLLTEAMEVLQQSSPEGTLDGNTVNPIYKYILNDLPREFMSSQAKAVIKTTDDYLQSQFGPNRLVHSAAVSEGSGLQDCSTHQTASDHSHDEISDLDSYKSNSKNNSCSISASKRNRPVSAPVGQLRVAEFSSLKFQSARNWQKLSQRHKLQPRVIKVTAYKNGSRTVFARVTVPTITLLLEECTEKLNLNMAARRVFLADGKEALEPEDIPHEADVYVSTGEPFLNPFKKIKDHLLLIKKVTWTMNGLMLPTDIKRRKTKPVLSIRMKKLTERTSVRILFFKNGMGQDGHEITVGKETMKKVLDTCTIRMNLNLPARYFYDLYGRKIEDISKGKH

SEQ ID NO: 25520 - protein, 818 aa, Homo sapiens
  Payload ID: 5056
  Gene Symbol: DCDC1
  Gene Name: doublecortin domain containing 1
  ENSP ID: ENSP00000404672
  MOD_RES (1)..(1): Any amino acid
XCTEILNLPSAARRLYNEKGKEIFALKDLQRDELVYVSCGELWINPDLSIAQQKKQIFLRNLESDIAKIQIFCSTHKIEALVLEVQSDIVSGSKLAVHKPVAIFGEEKQVTEPEEKQMQEDPLTTENASSEILDSHVRAHLRMKACHTLPRYAWQETSHDFDEDDSLPKKTEKGLFENVEPQKKHSCSPKHSKLHKHCHQQFEYRDGQIISHAAPQLVLGVQGPNLRSGMEVVLVEKKSDGSHQRWIHQEDSRTFHLVSNPDLVLAVSMTKTRNEVCGYPVIVQKYKPYNNGAANQKWHYMKNIKALVAFHSTALDKEITSANYAGVCTSSVIKEENIDQPGYCYLSPDGKRKTMLCLACGQSMRTEKGLKQLLPGVPFLCISGTKTQKPFLQGPFKVISVAEVDLSCDKAEKTLSYYQARLLSLRMKTCTQAASHSGMAATHQKAVKIIAYKNGDGYRNGKLIVAGTFPMLLTECTEQLGLARAASKVYTKDGTPIFTLRDLVLWALDESFLQRDSEKQKQDAAPVGKEQIIVEKNPRMKVKNRLFAKSVTSDSLDGIDKSLLTLILRNPIAIWVSCGEPFLPPNALQKAEKLEKQNWLKKDRILADLDTMRHKMRQLKGRRVAACQPATMVPTKSPVQPVVVEGGWTEQTQQEIKLMELIRHTEAHLSEIQEMESKINFPIATKRIAVKPSNLYKQPNTKRVWIYLNGGRPEDGTYAWGKTISELLQDCSSRLKMTHPARALYTPSGEPIQSWDDIERDMVICVSMGHGFKTPKELKQLMEIRANYARIRRQQGPQATDIVVSPSTKLLSLAHLHN

SEQ ID NO: 25521 - protein, 1783 aa, Homo sapiens
  Payload ID: 5056
  Gene Symbol: DCDC1
  Gene Name: doublecortin domain containing 1
  ENSP ID: ENSP00000472625
MAKTGAEDHREALSQSSLSLLTEAMEVLQQSSPEGTLDGNTVNPIYKYILNDLPREFMSSQAKAVIKTTDDYLQSQFGPNRLVHSAAVSEGSGLQDCSTHQTASDHSHDEISDLDSYKSNSKNNSCSISASKRNRPVSAPVGQLRVAEFSSLKFQSARNWQKLSQRHKLQPRVIKVTAYKNGSRTVFARVTVPTITLLLEECTEKLNLNMAARRVFLADGKEALEPEDIPHEADVYVSTGEPFLNPFKKIKDHLLLIKKVTWTMNGLMLPTDIKRRKTKPVLSIRMKKLTERTSVRILFFKNGMGQDGHEITVGKETMKKVLDTCTIRMNLNLPARYFYDLYGRKIEDISKVPLLEKCLQNSITPLRGLLWVSKGEGFSPSGAKMYIQGVLLALYQRLKSAKKYYKQLNLVMNEQKEKITEKVILSMTAKEHHKEQEEVSRLIDELQTAIKSNIGHLCKLGPQLQAEQEQFSSYVYQHIKSLPANTLVPGGLQLKVFENGKNTGEISVGISKKDLGSDSPIQTDHMMERLLLKIHQRLQGSSINPPGLNYSSMRLFDENGQEIKNPLSLKNEQKIWVSYGRAYRSPLNLALGLTFDRVSAFARGDIMVAYKTFLDPNAVLLPGCGNWEVCEGFPINFNCTSQQIPDQFEKVDLENHFLQNKVDPNIVLHASVSIGKWSFSGSEASSRSQIAPSILWPVASVWLITKTGMILSRAITQGCLAIGHPIRVKAAEGTSLEGYKLILQKRHSGDDSQKWVFGTDGCIYSKAYPQFVLTYLEELNAQVDVTQTEYHIHHGAWTTAHQEHGRNLAEEVLQESASNLGLKQLPEPSDTHLMPEGSLEETGELTVALVRKLEEKHPKASAQRWAIKHEGTSKPGQWKHSRVENPLWNKLTYMWPVLPSGQLNEEFDWPIQGLLVPSSPPMKKPICKTTEPYAPVRLRVLQNGEKNKNRSVTILGPDISPGRKTQCTEILNLPSAARRLYNEKGKEIFALKDLQRDELVYVSCGELWINPDLSIAQQKKQIFLRNLESDIAKIQIFCSTHKIEALVLEVQSDIVSGSKLAVHKPVAIFGEEKQVTEPEEKQMQEDPLTTENASSEILDSHVRAHLRMKACHTLPRYAWQETSHDFDEDDSLPKKTEKGLFENVEPQKKHSCSPKHSKLHKHCHQQFEYRDGQIISHAAPQLVLGVQGPNLRSGMEVVLVEKKSDGSHQRWIHQEDSRTFHLVSNPDLVLAVSMTKTRNEVCGYPVIVQKYKPYNNGAANQKWHYMKNIKALVAFHSTALDKEITSANYAGVCTSSVIKEENIDQPGYCYLSPDGKRKTMLCLACGQSMRTEKGLKQLLPGVPFLCISGTKTQKPFLQGPFKVISVAEVDLSCDKAEKTLSYYQARLLSLRMKTCTQAASHSGMAATHQKAVKIIAYKNGDGYRNGKLIVAGTFPMLLTECTEQLGLARAASKVYTKDGTPIFTLRDLVLWALDESFLQRDSEKQKQDAAPVGKEQIIVEKNPRMKVKNRLFAKSVTSDSLDGIDKSLLTLILRNPIAIWVSCGEPFLPPNALQKAEKLEKQNWLKKDRILADLDTMRHKMRQLKGRRVAACQPATMVPTKSPVQPVVVEGGWTEQTQQEIKLMELIRHTEAHLSEIQEMESKINFPIATKRIAVKPSNLYKQPNTKRVWIYLNGGRPEDGTYAWGKTISELLQDCSSRLKMTHPARALYTPSGEPIQSWDDIERDMVICVSMGHGFKTPKELKQLMEIRANYARIRRQQGPQATDIVVSPSTKLLSLAHLHN

SEQ ID NO: 25522 - protein, 229 aa, Homo sapiens
  Payload ID: 5057
  Gene Symbol: DCDC2
  Gene Name: doublecortin domain containing 2
  Uniprot ID: Q9UHG0
  ENSP ID: ENSP00000367711
MKMWNNWGWCGGRRRGCTKILSTKKGIQMSIKNKHLIVIPAFSHTMSQLDFDFHCVFVSIDEGIFKAGAERSETRGAAEVQEDEDTQVEVPVDQRPAEIVDEEEDGEKANKDAEQKEDFSGMNGDLEEEGGREATDAPEQVEEILDHSEQQARPARVNGGTDEENGEELQQVNNELQLVLDKERKSQGAGSGQDEADVDPQRPPRPEVKITSPEENENNQQNKDYAAVA

SEQ ID NO: 25523 - protein, 476 aa, Homo sapiens
  Payload ID: 5057
  Gene Symbol: DCDC2
  Gene Name: doublecortin domain containing 2
  Uniprot ID: Q9UHG0
  ENSP ID: ENSP00000367715
MSGSSARSSHLSQPVVKSVLVYRNGDPFYAGRRVVIHEKKVSSFEVFLKEVTGGVQAPFGAVRNIYTPRTGHRIRKLDQIQSGGNYVAGGQEAFKKLNYLDIGEIKKRPMEVVNTEVKPVIHSRINVSARFRKPLQEPCTIFLIANGDLINPASRLLIPRKTLNQWDHVLQMVTEKITLRSGAVHRLYTLEGKLVESGAELENGQFYVAVGRDKFKKLPYSELLFDKSTMRRPFGQKASSLPPIVGSRKSKGSGNDRHSKSTVGSSDNSSPQPLKRKGKKEDVNSEKLTKLKQNVKLKNSQETIPNSDEGIFKAGAERSETRGAAEVQEDEDTQVEVPVDQRPAEIVDEEEDGEKANKDAEQKEDFSGMNGDLEEEGGREATDAPEQVEEILDHSEQQARPARVNGGTDEENGEELQQVNNELQLVLDKERKSQGAGSGQDEADVDPQRPPRPEVKITSPEENENNQQNKDYAAVA

SEQ ID NO: 25524 - protein, 88 aa, Homo sapiens
  Payload ID: 5057
  Gene Symbol: DCDC2
  Gene Name: doublecortin domain containing 2
  ENSP ID: ENSP00000410939
  MOD_RES (1)..(1): Any amino acid
XVVIHEKKVSSFEVFLKEVTGGVQAPFGAVRNIYTPRTGHRIRKLDQIQSGGNYVAGGQEAFKKLNYLDIGEIKKRPMEVVNTELHVL

SEQ ID NO: 25525 - protein, 349 aa, Homo sapiens
  Payload ID: 5058
  Gene Symbol: DCDC2B
  Gene Name: doublecortin domain containing 2B
  Uniprot ID: A2VCK2
  ENSP ID: ENSP00000386870
MAGGSPAAKRVVVYRNGDPFFPGSQLVVTQRRFPTMEAFLCEVTSAVQAPLAVRALYTPCHGHPVTNLADLKNRGQYVAAGFERFHKLHYLPHRGKDPGGKSCRLQGPPVTRHLCDGAIGRQLPAGAPSYIHVFRNGDLVSPPFSLKLSQAASQDWETVLKLLTEKVKLQSGAVCKLCTLEGLPLSAGKELVTGHYYVAVGEDEFKDLPYLELLVPSPSLPRGCWQPPGSKSRPHRQGAQGHRAQVTQPSPKEPDRIKPSAFYARPQQTIQPRSKLPTLSFPSGVIGVYGAPHRRKETAGALEVADDEDTQTEEPLDQRAAQIVEEALSLENQPGAGAAISASAPALPS

SEQ ID NO: 25526 - protein, 364 aa, Homo sapiens
  Payload ID: 5059
  Gene Symbol: DCDC2C
  Gene Name: doublecortin domain containing 2C
  Uniprot ID: A8MYV0
  ENSP ID: ENSP00000382097
MGTRGPSAPVDTTPAKTIVVYRNGDPFYVGKKFVLSRRRAATFEALLEQLTEQVDVPFGVRRLFTPTRGHRVLGLDALQAGGKYVAAGRERFKELDYIHIVPRKPAKIRKLKEIKPVVHCDINVPSKWQTYHRISRHINVFTNGRLFIPPAKIIIPKFSLSDWDIVLATIGEKVFPLGGVRKLFTMNGHLLGDSKDLQDNHFYVAVGLETFKYFPYWKSPRVPSEVQQRYANVEKNSQRKKKVDSKGKEPCKYDGIPPKTQDSVYYAKEEKKKTLAEPLVQRGAEGDVYKAPTPSKETQGALDVKEEHNVQLEVPVDQRQAEIVKEDEEIHENTPDFEGNKDKEDARLCEDVERKMAREWKPVD

SEQ ID NO: 25527 - protein, 298 aa, Homo sapiens
  Payload ID: 5059
  Gene Symbol: DCDC2C
  Gene Name: doublecortin domain containing 2C
  ENSP ID: ENSP00000403984
RRAATFEALLEQLTEQVDVPFGVRRLFTPTRGHRVLGLDALQAGGKYVAAGRERFKELDYIHIVPRKPAKIRKLKEIKPVVHCDINVPSKWQTYHRISRHINVFTNGRLFIPPAKIIIPKFSLSDWDIVLATIGEKVFPLGGVRKLFTMNGHLLGDSKDLQDNHFYVAVGLETFKYFPYWKSPRVPSEVQQRYANVEKNSQRKKKVDSKGKEPCKYDGIPPKTQDSVYYAKEEKKKTLAEPLVQRGAEGDVYKAPTPSKETQGALDVKEEHNVQLEVPVDQRQAEIVKEDEEIHENTP

SEQ ID NO: 25528 - protein, 729 aa, Homo sapiens
  Payload ID: 5060
  Gene Symbol: DCLK1
  Gene Name: doublecortin-like kinase 1
  Uniprot ID: O15075
  ENSP ID: ENSP00000255448
MSFGRDMELEHFDERDKAQRYSRGSRVNGLPSPTHSAHCSFYRTRTLQTLSSEKKAKKVRFYRNGDRYFKGIVYAISPDRFRSFEALLADLTRTLSDNVNLPQGVRTIYTIDGLKKISSLDQLVEGESYVCGSIEPFKKLEYTKNVNPNWSVNVKTTSASRAVSSLATAKGSPSEVRENKDFIRPKLVTIIRSGVKPRKAVRILLNKKTAHSFEQVLTDITDAIKLDSGVVKRLYTLDGKQVMCLQDFFGDDDIFIACGPEKFRYQDDFLLDESECRVVKSTSYTKIASSSRRSTTKSPGPSRRSKSPASTSSVNGTPGSQLSTPRSGKSPSPSPTSPGSLRKQRSSQHGGSSTSLASTKVCSSMDENDGPGEEVSEEGFQIPATITERYKVGRTIGDGNFAVVKECVERSTAREYALKIIKKSKCRGKEHMIQNEVSILRRVKHPNIVLLIEEMDVPTELYLVMELVKGGDLFDAITSTNKYTERDASGMLYNLASAIKYLHSLNIVHRDIKPENLLVYEHQDGSKSLKLGDFGLATIVDGPLYTVCGTPTYVAPEIIAETGYGLKVDIWAAGVITYILLCGFPPFRGSGDDQEVLFDQILMGQVDFPSPYWDNVSDSAKELITMMLLVDVDQRFSAVQVLEHPWVNDDGLPENEHQLSVAGKIKKHFNTGPKPNSTAAGVSVIALDHGFTIKRSGSLDYYQQPGMYWIRPPLLIRRGRFSDEDATRM

SEQ ID NO: 25529 - protein, 740 aa, Homo sapiens
  Payload ID: 5060
  Gene Symbol: DCLK1
  Gene Name: doublecortin-like kinase 1
  Uniprot ID: O15075
  ENSP ID: ENSP00000353846
MSFGRDMELEHFDERDKAQRYSRGSRVNGLPSPTHSAHCSFYRTRTLQTLSSEKKAKKVRFYRNGDRYFKGIVYAISPDRFRSFEALLADLTRTLSDNVNLPQGVRTIYTIDGLKKISSLDQLVEGESYVCGSIEPFKKLEYTKNVNPNWSVNVKTTSASRAVSSLATAKGSPSEVRENKDFIRPKLVTIIRSGVKPRKAVRILLNKKTAHSFEQVLTDITDAIKLDSGVVKRLYTLDGKQVMCLQDFFGDDDIFIACGPEKFRYQDDFLLDESECRVVKSTSYTKIASSSRRSTTKSPGPSRRSKSPASTSSVNGTPGSQLSTPRSGKSPSPSPTSPGSLRKQRSSQHGGSSTSLASTKVCSSMDENDGPGEEVSEEGFQIPATITERYKVGRTIGDGNFAVVKECVERSTAREYALKIIKKSKCRGKEHMIQNEVSILRRVKHPNIVLLIEEMDVPTELYLVMELVKGGDLFDAITSTNKYTERDASGMLYNLASAIKYLHSLNIVHRDIKPENLLVYEHQDGSKSLKLGDFGLATIVDGPLYTVCGTPTYVAPEIIAETGYGLKVDIWAAGVITYILLCGFPPFRGSGDDQEVLFDQILMGQVDFPSPYWDNVSDSAKELITMMLLVDVDQRFSAVQVLEHPWVNDDGLPENEHQLSVAGKIKKHFNTGPKPNSTAAGVSVIATTALDKERQVFRRRRNQDVRSRYKAQPAPPELNSESEDYSPSSSETVRSPNSPF

SEQ ID NO: 25530 - protein, 363 aa, Homo sapiens
  Payload ID: 5060
  Gene Symbol: DCLK1
  Gene Name: doublecortin-like kinase 1
  ENSP ID: ENSP00000369222
MSFGRDMELEHFDERDKAQRYSRGSRVNGLPSPTHSAHCSFYRTRTLQTLSSEKKAKKVRFYRNGDRYFKGIVYAISPDRFRSFEALLADLTRTLSDNVNLPQGVRTIYTIDGLKKISSLDQLVEGESYVCGSIEPFKKLEYTKNVNPNWSVNVKTTSASRAVSSLATAKGSPSEVRENKDFIRPKLVTIIRSGVKPRKAVRILLNKKTAHSFEQVLTDITDAIKLDSGVVKRLYTLDGKQVMCLQDFFGDDDIFIACGPEKFRYQDDFLLDESECRVVKSTSYTKIASSSRRSTTKSPGPSRRSKSPASTSSVNGTPGSQLSTPRSGKSPSPSPTSPGSLRKQRDLYRPLSSDDLDSVGDSV

SEQ ID NO: 25531 - protein, 433 aa, Homo sapiens
  Payload ID: 5060
  Gene Symbol: DCLK1
  Gene Name: doublecortin-like kinase 1
  Uniprot ID: O15075
  ENSP ID: ENSP00000369223
MLELIEVNGTPGSQLSTPRSGKSPSPSPTSPGSLRKQRSSQHGGSSTSLASTKVCSSMDENDGPGEEVSEEGFQIPATITERYKVGRTIGDGNFAVVKECVERSTAREYALKIIKKSKCRGKEHMIQNEVSILRRVKHPNIVLLIEEMDVPTELYLVMELVKGGDLFDAITSTNKYTERDASGMLYNLASAIKYLHSLNIVHRDIKPENLLVYEHQDGSKSLKLGDFGLATIVDGPLYTVCGTPTYVAPEIIAETGYGLKVDIWAAGVITYILLCGFPPFRGSGDDQEVLFDQILMGQVDFPSPYWDNVSDSAKELITMMLLVDVDQRFSAVQVLEHPWVNDDGLPENEHQLSVAGKIKKHFNTGPKPNSTAAGVSVIATTALDKERQVFRRRRNQDVRSRYKAQPAPPELNSESEDYSPSSSETVRSPNSPF

SEQ ID NO: 25532 - protein, 422 aa, Homo sapiens
  Payload ID: 5060
  Gene Symbol: DCLK1
  Gene Name: doublecortin-like kinase 1
  Uniprot ID: O15075
  ENSP ID: ENSP00000484452
MLELIEVNGTPGSQLSTPRSGKSPSPSPTSPGSLRKQRSSQHGGSSTSLASTKVCSSMDENDGPGEEVSEEGFQIPATITERYKVGRTIGDGNFAVVKECVERSTAREYALKIIKKSKCRGKEHMIQNEVSILRRVKHPNIVLLIEEMDVPTELYLVMELVKGGDLFDAITSTNKYTERDASGMLYNLASAIKYLHSLNIVHRDIKPENLLVYEHQDGSKSLKLGDFGLATIVDGPLYTVCGTPTYVAPEIIAETGYGLKVDIWAAGVITYILLCGFPPFRGSGDDQEVLFDQILMGQVDFPSPYWDNVSDSAKELITMMLLVDVDQRFSAVQVLEHPWVNDDGLPENEHQLSVAGKIKKHFNTGPKPNSTAAGVSVIALDHGFTIKRSGSLDYYQQPGMYWIRPPLLIRRGRFSDEDATRM

SEQ ID NO: 25533 - protein, 766 aa, Homo sapiens
  Payload ID: 5061
  Gene Symbol: DCLK2
  Gene Name: doublecortin-like kinase 2
  Uniprot ID: Q8N568
  ENSP ID: ENSP00000296550
MASTRSIELEHFEERDKRPRPGSRRGAPSSSGGSSSSGPKGNGLIPSPAHSAHCSFYRTRTLQALSSEKKAKKARFYRNGDRYFKGLVFAISSDRFRSFDALLIELTRSLSDNVNLPQGVRTIYTIDGSRKVTSLDELLEGESYVCASNEPFRKVDYTKNINPNWSVNIKGGTSRALAAASSVKSEVKESKDFIKPKLVTVIRSGVKPRKAVRILLNKKTAHSFEQVLTDITEAIKLDSGVVKRLCTLDGKQVTCLQDFFGDDDVFIACGPEKFRYAQDDFVLDHSECRVLKSSYSRSSAVKYSGSKSPGPSRRSKSPASVNGTPSSQLSTPKSTKSSSSSPTSPGSFRGLKQISAHGRSSSNVNGGPELDRCISPEGVNGNRCSESSTLLEKYKIGKVIGDGNFAVVKECIDRSTGKEFALKIIDKAKCCGKEHLIENEVSILRRVKHPNIIMLVEEMETATELFLVMELVKGGDLFDAITSSTKYTERDGSAMVYNLANALRYLHGLSIVHRDIKPENLLVCEYPDGTKSLKLGDFGLATVVEGPLYTVCGTPTYVAPEIIAETGYGLKVDIWAAGVITYILLCGFPPFRSENNLQEDLFDQILAGKLEFPAPYWDNITDSAKELISQMLQVNVEARCTAGQILSHPWVSDDASQENNMQAEVTGKLKQHFNNALPKQNSTTTGVSVIMNTALDKEGQIFCSKHCQDSGRPGMEPISPVPPSVEEIPVPGEAVPAPTPPESPTPHPPPAAPGGERAGTWRRHRD

SEQ ID NO: 25534 - protein, 783 aa, Homo sapiens
  Payload ID: 5061
  Gene Symbol: DCLK2
  Gene Name: doublecortin-like kinase 2
  Uniprot ID: Q8N568
  ENSP ID: ENSP00000303887
MASTRSIELEHFEERDKRPRPGSRRGAPSSSGGSSSSGPKGNGLIPSPAHSAHCSFYRTRTLQALSSEKKAKKARFYRNGDRYFKGLVFAISSDRFRSFDALLIELTRSLSDNVNLPQGVRTIYTIDGSRKVTSLDELLEGESYVCASNEPFRKVDYTKNINPNWSVNIKGGTSRALAAASSVKSEVKESKDFIKPKLVTVIRSGVKPRKAVRILLNKKTAHSFEQVLTDITEAIKLDSGVVKRLCTLDGKQVTCLQDFFGDDDVFIACGPEKFRYAQDDFVLDHSECRVLKSSYSRSSAVKYSGSKSPGPSRRSKSPASVKRGGHYSSAYSTAKSPVNGTPSSQLSTPKSTKSSSSSPTSPGSFRGLKQISAHGRSSSNVNGGPELDRCISPEGVNGNRCSESSTLLEKYKIGKVIGDGNFAVVKECIDRSTGKEFALKIIDKAKCCGKEHLIENEVSILRRVKHPNIIMLVEEMETATELFLVMELVKGGDLFDAITSSTKYTERDGSAMVYNLANALRYLHGLSIVHRDIKPENLLVCEYPDGTKSLKLGDFGLATVVEGPLYTVCGTPTYVAPEIIAETGYGLKVDIWAAGVITYILLCGFPPFRSENNLQEDLFDQILAGKLEFPAPYWDNITDSAKELISQMLQVNVEARCTAGQILSHPWVSDDASQENNMQAEVTGKLKQHFNNALPKQNSTTTGVSVIMNTALDKEGQIFCSKHCQDSGRPGMEPISPVPPSVEEIPVPGEAVPAPTPPESPTPHPPPAAPGGERAGTWRRHRD

SEQ ID NO: 25535 - protein, 695 aa, Homo sapiens
  Payload ID: 5061
  Gene Symbol: DCLK2
  Gene Name: doublecortin-like kinase 2
  ENSP ID: ENSP00000401916
MASTRSIELEHFEERDKRPRPGSRRGAPSSSGGSSSSGPKGNGLIPSPAHSAHCSFYRTRTLQALSSEKKAKKARFYRNGDRYFKGLVFAISSDRFRSFDALLIELTRSLSDNVNLPQGVRTIYTIDGSRKVTSLDELLEGESYVCASNEPFRKVDYTKNINPNWSVNIKGGTSRALAAASSVKSEVKESKDFIKPKLVTVIRSGVKPRKAVRILLNKKTAHSFEQVLTDITEAIKLDSGVVKRLCTLDGKQVTCLQDFFGDDDVFIACGPEKFRYAQDDFVLDHSECRVLKSSYSRSSAVKYSGSKSPGPSRRSKSPASVNGTPSSQLSTPKSTKSSSSSPTSPGSFRGLKISAHGRSSSNVNGGPELDRCISPEGVNGNRCSESSTLLEKYKIGKVIGDGNFAVVKECIDRSTGKEFALKIIDKAKCCGKEHLIENEVSILRRVKHPNIIMLVEEMETATELFLVMELVKGGDLFDAITSSTKYTERDGSAMVYNLANALRYLHGLSIVHRDIKPENLLVCEYPDGTKSLKLGDFGLATVVEGPLYTVCGTPTYVAPEIIAETGYGLKVDIWAAGVITYILLCGFPPFRSENNLQEDLFDQILAGKLEFPAPYWDNITDSAKELISQMLQVNVEARCTAGQILSHPWVSDDASQENNMQAEVTGKLKQHFNNALPKQNSTTTGVSVIMFDLTV

SEQ ID NO: 25536 - protein, 765 aa, Homo sapiens
  Payload ID: 5061
  Gene Symbol: DCLK2
  Gene Name: doublecortin-like kinase 2
  Uniprot ID: Q8N568
  ENSP ID: ENSP00000427235
MASTRSIELEHFEERDKRPRPGSRRGAPSSSGGSSSSGPKGNGLIPSPAHSAHCSFYRTRTLQALSSEKKAKKARFYRNGDRYFKGLVFAISSDRFRSFDALLIELTRSLSDNVNLPQGVRTIYTIDGSRKVTSLDELLEGESYVCASNEPFRKVDYTKNINPNWSVNIKGGTSRALAAASSVKSEVKESKDFIKPKLVTVIRSGVKPRKAVRILLNKKTAHSFEQVLTDITEAIKLDSGVVKRLCTLDGKQVTCLQDFFGDDDVFIACGPEKFRYAQDDFVLDHSECRVLKSSYSRSSAVKYSGSKSPGPSRRSKSPASVNGTPSSQLSTPKSTKSSSSSPTSPGSFRGLKISAHGRSSSNVNGGPELDRCISPEGVNGNRCSESSTLLEKYKIGKVIGDGNFAVVKECIDRSTGKEFALKIIDKAKCCGKEHLIENEVSILRRVKHPNIIMLVEEMETATELFLVMELVKGGDLFDAITSSTKYTERDGSAMVYNLANALRYLHGLSIVHRDIKPENLLVCEYPDGTKSLKLGDFGLATVVEGPLYTVCGTPTYVAPEIIAETGYGLKVDIWAAGVITYILLCGFPPFRSENNLQEDLFDQILAGKLEFPAPYWDNITDSAKELISQMLQVNVEARCTAGQILSHPWVSDDASQENNMQAEVTGKLKQHFNNALPKQNSTTTGVSVIMNTALDKEGQIFCSKHCQDSGRPGMEPISPVPPSVEEIPVPGEAVPAPTPPESPTPHPPPAAPGGERAGTWRRHRD

SEQ ID NO: 25537 - protein, 716 aa, Homo sapiens
  Payload ID: 5061
  Gene Symbol: DCLK2
  Gene Name: doublecortin-like kinase 2
  ENSP ID: ENSP00000489372
MASTRSIELEHFEERDKRPRPGSRRGAPSSSGGSSSSGPKGNGLIPSPAHSAHCSFYRTRTLQALSSEKKAKKARFYRNGDRYFKGLVFAISSDRFRSFDALLIELTRSLSDNVNLPQGVRTIYTIDGSRKVTSLDELLEGESYVCASNEPFRKVDYTKNINPNWSVNIKGGTSRALAAASSVKSEVKESKDFIKPKLVTVIRSGVKPRKAVRILLNKKTAHSFEQVLTDITEAIKLDSGVVKRLCTLDGKQVTCLQDFFGDDDVFIACGPEKFRYAQDDFVLDHSECRVLKSSYSRSSAVKYSGSKSPGPSRRSKSPASVKRGGHYSSAYSTAKSPVNGTPSSQLSTPKSTKSSSSSPTSPGSFRGLKISAHGRSSSNVNGGPELDRCISPEGVNGNRCSESSTLLEKYKIGKVIGDGNFAVVKECIDRSTGKEFALKIIDKAKCCGKEHLIENEVSILRRVKHPNIIMLVEEMETATELFLVMELVKGGDLFDAITSSTKYTERDGSAMVYNLANALRYLHGLSIVHRDIKPENLLVCEYPDGTKSLKLGDFGLATVVEGPLYTVCGTPTYVAPEIIAETGYGLKVDIWAAGVITYILLCGFPPFRSENNLQEDLFDQILAGKLEFPAPYWDNITDSAKELISQMLQVNVEARCTAGQILSHPWVSDDASQENNMQAEVTGKLKQHFNNALPKQNSTTTGVSVIMVQGHEHGSR

SEQ ID NO: 25538 - protein, 78 aa, Homo sapiens
  Payload ID: 5061
  Gene Symbol: DCLK2
  Gene Name: doublecortin-like kinase 2
  ENSP ID: ENSP00000489465
RSENNLQEDLFDQILAGKLEFPAPYWDNITDSAKDDASQENNMQAEVTGKLKQHFNNALPKQNSTTTGVSVIMFDLTV

SEQ ID NO: 25539 - protein, 648 aa, Homo sapiens
  Payload ID: 5062
  Gene Symbol: DCLK3
  Gene Name: doublecortin-like kinase 3
  Uniprot ID: Q9C098
  ENSP ID: ENSP00000394484
MGKEPLTLKSIQVAVEELYPNKARALTLAQHSRAPSPRLRSRLFSKALKGDHRCGETETPKSCSEVAGCKAAMRHQGKIPEELSLDDRARTQKKWGRGKWEPEPSSKPPREATLEERHARGEKHLGVEIEKTSGEIIRCEKCKRERELQQSLERERLSLGTSELDMGKGPMYDVEKLVRTRSCRRSPEANPASGEEGWKGDSHRSSPRNPTQELRRPSKSMDKKEDRGPEDQESHAQGAAKAKKDLVEVLPVTEEGLREVKKDTRPMSRSKHGGWLLREHQAGFEKLRRTRGEEKEAEKEKKPCMSGGRRMTLRDDQPAKLEKEPKTRPEENKPERPSGRKPRPMGIIAANVEKHYETGRVIGDGNFAVVKECRHRETRQAYAMKIIDKSRLKGKEDMVDSEILIIQSLSHPNIVKLHEVYETDMEIYLILEYVQGGDLFDAIIESVKFPEPDAALMIMDLCKALVHMHDKSIVHRDLKPENLLVQRNEDKSTTLKLADFGLAKHVVRPIFTVCGTPTYVAPEILSEKGYGLEVDMWAAGVILYILLCGFPPFRSPERDQDELFNIIQLGHFEFLPPYWDNISDAAKDLVSRLLVVDPKKRYTAHQVLQHPWIETAGKTNTVKRQKQVSPSSEGHFRSQHKRVVEQVS

SEQ ID NO: 25540 - protein, 373 aa, Homo sapiens
  Payload ID: 5063
  Gene Symbol: DMRT1
  Gene Name: doublesex and mab-3 related transcription factor 1
  Uniprot ID: Q9Y5R6
  ENSP ID: ENSP00000371711
MPNDEAFSKPSTPSEAPHAPGVPPQGRAGGFGKASGALVGAASGSSAGGSSRGGGSGSGASDLGAGSKKSPRLPKCARCRNHGYASPLKGHKRFCMWRDCQCKKCNLIAERQRVMAAQVALRRQQAQEEELGISHPIPLPSAAELLVKRENNGSNPCLMTECSGTSQPPPASVPTTAASEGRMVIQDIPAVTSRGHVENTPDLVSDSTYYSSFYQPSLFPYYNNLYNCPQYSMALAADSASGEVGNPLGGSPVKNSLRGLPGPYVPGQTGNQWQMKNMENRHAMSSQYRMHSYYPPPSYLGQSVPQFFTFEDAPSYPEARASVFSPPSSQDSGLVSLSSSSPISNKSTKAVLECEPASEPSSFTVTPVIEEDE

SEQ ID NO: 25541 - protein, 215 aa, Homo sapiens
  Payload ID: 5063
  Gene Symbol: DMRT1
  Gene Name: doublesex and mab-3 related transcription factor 1
  ENSP ID: ENSP00000454701
MTECSGTSQPPPASVPTTAASEGRMVIQDIPAVTSRGHVENTPDLVSDSTYYSSFYQPSLFPYYNNLYNCPQYSMALAADSASGEVGNPLGGSPVKNSLRGLPGPYVPGQTGNQWQMKNMENRHAMSSQYRMHSYYPPPSYLGQSVPQFFTFEDAPSYPEARASVFSPPSSQDSGLVSLSSSSPISNKSTKAVLECEPASEPSSFTVTPVIEEDE

SEQ ID NO: 25542 - protein, 226 aa, Homo sapiens
  Payload ID: 5064
  Gene Symbol: DMRT2
  Gene Name: doublesex and mab-3 related transcription factor 2
  Uniprot ID: Q9Y5R5
  ENSP ID: ENSP00000259622
MADPQAGSAAGDWEIDVESLELEEDVCGAPRSTPPGPSPPPADGDCEDDEDDDGVDEDAEEEGDGEEAGASPGMPGQPEQRGGPQPRPPLAPQASPAGTGPRERCTPAGGGAEPRKLSRTPKCARCRNHGVVSCLKGHKRFCRWRDCQCANCLLVVERQRVMAAQVALRRQQATEDKKGLSGKQNNFERKAVYQRQVRAPSLLAKSILEVLLGLFYSYYVYIMNHL

SEQ ID NO: 25543 - protein, 405 aa, Homo sapiens
  Payload ID: 5064
  Gene Symbol: DMRT2
  Gene Name: doublesex and mab-3 related transcription factor 2
  ENSP ID: ENSP00000305785
MADPQAGSAAGDWEIDATEDKKGLSGKQNNFERKAVYQRQVRAPSLLAKSILEGYRPIPAETYVGGTFPLPPPVSDRMRKRRAFADKELENIMLEREYKEREMLETSQAAALFLPNRMVPGPDYNSYKSAYSPSPVEPPSKDFCNFLPTCLDLTMQYSGSGNMELISSNVSVATTYRQYPLSSRFLVWPKCGPISDTLLYQQCLLNATTSVQALKPGASWDLKGARVQDGLSAEQDMMPSKLEGSLVLPHTPEIQTTRSDLQGHQAVPERSAFSPPRRNFSPIVDTDSLAAQGHVLTKISKENTRHPLPLRHNPFHSLFQQTLTDKSGPELKTPFVKEAFEETPKKHRECLVKDNQKYTFTIDRCAKDLFVAKQVGTKLSVNEPLSFSVESILKRPSSAITRVSQ

SEQ ID NO: 25544 - protein, 561 aa, Homo sapiens
  Payload ID: 5064
  Gene Symbol: DMRT2
  Gene Name: doublesex and mab-3 related transcription factor 2
  Uniprot ID: Q9Y5R5
  ENSP ID: ENSP00000350865
MADPQAGSAAGDWEIDVESLELEEDVCGAPRSTPPGPSPPPADGDCEDDEDDDGVDEDAEEEGDGEEAGASPGMPGQPEQRGGPQPRPPLAPQASPAGTGPRERCTPAGGGAEPRKLSRTPKCARCRNHGVVSCLKGHKRFCRWRDCQCANCLLVVERQRVMAAQVALRRQQATEDKKGLSGKQNNFERKAVYQRQVRAPSLLAKSILEGYRPIPAETYVGGTFPLPPPVSDRMRKRRAFADKELENIMLEREYKEREMLETSQAAALFLPNRMVPGPDYNSYKSAYSPSPVEPPSKDFCNFLPTCLDLTMQYSGSGNMELISSNVSVATTYRQYPLSSRFLVWPKCGPISDTLLYQQCLLNATTSVQALKPGASWDLKGARVQDGLSAEQDMMPSKLEGSLVLPHTPEIQTTRSDLQGHQAVPERSAFSPPRRNFSPIVDTDSLAAQGHVLTKISKENTRHPLPLRHNPFHSLFQQTLTDKSGPELKTPFVKEAFEETPKKHRECLVKDNQKYTFTIDRCAKDLFVAKQVGTKLSVNEPLSFSVESILKRPSSAITRVSQ

SEQ ID NO: 25545 - protein, 561 aa, Homo sapiens; identical to SEQ ID NO: 25544
  Payload ID: 5064
  Gene Symbol: DMRT2
  Gene Name: doublesex and mab-3 related transcription factor 2
  Uniprot ID: Q9Y5R5
  ENSP ID: ENSP00000371686

SEQ ID NO: 25546 - protein, 226 aa, Homo sapiens; identical to SEQ ID NO: 25542
  Payload ID: 5064
  Gene Symbol: DMRT2
  Gene Name: doublesex and mab-3 related transcription factor 2
  Uniprot ID: Q9Y5R5
  ENSP ID: ENSP00000371690

SEQ ID NO: 25547 - protein, 226 aa, Homo sapiens; identical to SEQ ID NO: 25542
  Payload ID: 5064
  Gene Symbol: DMRT2
  Gene Name: doublesex and mab-3 related transcription factor 2
  Uniprot ID: Q9Y5R5
  ENSP ID: ENSP00000397494

SEQ ID NO: 25548 - protein, 226 aa, Homo sapiens; identical to SEQ ID NO: 25542
  Payload ID: 5064
  Gene Symbol: DMRT2
  Gene Name: doublesex and mab-3 related transcription factor 2
  ENSP ID: ENSP00000489226

SEQ ID NO: 25549 - protein, 472 aa, Homo sapiens
  Payload ID: 5065
  Gene Symbol: DMRT3
  Gene Name: doublesex and mab-3 related transcription factor 3
  Uniprot ID: Q9NQL9
  ENSP ID: ENSP00000190165
MNGYGSPYLYMGGPVSQPPRAPLQRTPKCARCRNHGVLSWLKGHKRYCRFKDCTCEKCILIIERQRVMAAQVALRRQQANESLESLIPDSLRALPGPPPPGDAVAAPQPPPASQPSQPQPPRPAAELAAAAALRWTAEPQPGALQAQLAKPDLTEERLGDGKSADNTEVFSDKDTDQRSSPDVAKSKGCFTPESPEIVSVEEGGYAVQKNGGNPESRPDSPKCHAEQNHLLIEGPSGTVSLPFSLKANRPPLEVLKKIFPNQKPTVLELILKGCGGDLVSAVEVLLSSRSSVTGAERTSAEPESLALPSNGHIFEHTLSSYPISSSKWSVGSAFRVPDTLRFSADSSNVVPSPLAGPLQPPFPQPPRYPLMLRNTLARSQSSPFLPNDVTLWNTMTLQQQYQLRSQYVSPFPSNSTSVFRSSPVLPARATEDPRISIPDDGCPFVSKQSIYTEDDYDERSDSSDSRTLNTSS

SEQ ID NO: 25550 - protein, 112 aa, Homo sapiens
  Payload ID: 5065
  Gene Symbol: DMRT3
  Gene Name: doublesex and mab-3 related transcription factor 3
  ENSP ID: ENSP00000387472
MHTRKRLTQLFCFPDLTEERLGDGKSADNTEVFSDKDTDQRSSPDVAKSKGCFTPESPEIVSVEEGGYAVQKNGGNPESRPDSPKCHAEQNHLLIEGPSGTVSLPFSLKANR

SEQ ID NO: 25551 - protein, 2012 aa, Homo sapiens
  Payload ID: 5066
  Gene Symbol: DSCAM
  Gene Name: Down syndrome cell adhesion molecule
  Uniprot ID: O60469
  ENSP ID: ENSP00000383303
MWILALSLFQSFANVFSEDLHSSLYFVNASLQEVVFASTTGTLVPCPAAGIPPVTLRWYLATGEEIYDVPGIRHVHPNGTLQIFPFPPSSFSTLIHDNTYYCTAENPSGKIRSQDVHIKAVLREPYTVRVEDQKTMRGNVAVFKCIIPSSVEAYITVVSWEKDTVSLVSGSRFLITSTGALYIKDVQNEDGLYNYRCITRHRYTGETRQSNSARLFVSDPANSAPSILDGFDHRKAMAGQRVELPCKALGHPEPDYRWLKDNMPLELSGRFQKTVTGLLIENIRPSDSGSYVCEVSNRYGTAKVIGRLYVKQPLKATISPRKVKSSVGSQVSLSCSVTGTEDQELSWYRNGEILNPGKNVRITGINHENLIMDHMVKSDGGAYQCFVRKDKLSAQDYVQVVLEDGTPKIISAFSEKVVSPAEPVSLMCNVKGTPLPTITWTLDDDPILKGGSHRISQMITSEGNVVSYLNISSSQVRDGGVYRCTANNSAGVVLYQARINVRGPASIRPMKNITAIAGRDTYIHCRVIGYPYYSIKWYKNSNLLPFNHRQVAFENNGTLKLSDVQKEVDEGEYTCNVLVQPQLSTSQSVHVTVKVPPFIQPFEFPRFSIGQRVFIPCVVVSGDLPITITWQKDGRPIPGSLGVTIDNIDFTSSLRISNLSLMHNGNYTCIARNEAAAVEHQSQLIVRVPPKFVVQPRDQDGIYGKAVILNCSAEGYPVPTIVWKFSKGAGVPQFQPIALNGRIQVLSNGSLLIKHVVEEDSGYYLCKVSNDVGADVSKSMYLTVKIPAMITSYPNTTLATQGQKKEMSCTAHGEKPIIVRWEKEDRIINPEMARYLVSTKEVGEEVISTLQILPTVREDSGFFSCHAINSYGEDRGIIQLTVQEPPDPPEIEIKDVKARTITLRWTMGFDGNSPITGYDIECKNKSDSWDSAQRTKDVSPQLNSATIIDIHPSSTYSIRMYAKNRIGKSEPSNELTITADEAAPDGPPQEVHLEPISSQSIRVTWKAPKKHLQNGIIRGYQIGYREYSTGGNFQFNIISVDTSGDSEVYTLDNLNKFTQYGLVVQACNRAGTGPSSQEIITTTLEDVPSYPPENVQAIATSPESISISWSTLSKEALNGILQGFRVIYWANLMDGELGEIKNITTTQPSLELDGLEKYTNYSIQVLAFTRAGDGVRSEQIFTRTKEDVPGPPAGVKAAAASASMVFVSWLPPLKLNGIIRKYTVFCSHPYPTVISEFEASPDSFSYRIPNLSRNRQYSVWVVAVTSAGRGNSSEIITVEPLAKAPARILTFSGTVTTPWMKDIVLPCKAVGDPSPAVKWMKDSNGTPSLVTIDGRRSIFSNGSFIIRTVKAEDSGYYSCIANNNWGSDEIILNLQVQVPPDQPRLTVSKTTSSSITLSWLPGDNGGSSIRGYILQYSEDNSEQWGSFPISPSERSYRLENLKCGTWYKFTLTAQNGVGPGRISEIIEAKTLGKEPQFSKEQELFASINTTRVRLNLIGWNDGGCPITSFTLEYRPFGTTVWTTAQRTSLSKSYILYDLQEATWYELQMRVCNSAGCAEKQANFATLNYDGSTIPPLIKSVVQNEEGLTTNEGLKMLVTISCILVGVLLLFVLLLVVRRRRREQRLKRLRDAKSLAEMLMSKNTRTSDTLSKQQQTLRMHIDIPRAQLLIEERDTMETIDDRSTVLLTDADFGEAAKQKSLTVTHTVHYQSVSQATGPLVDVSDARPGTNPTTRRNAKAGPTARNRYASQWTLNRPHPTISAHTLTTDWRLPTPRAAGSVDKESDSYSVSPSQDTDRARSSMVSTESASSTYEELARAYEHAKMEEQLRHAKFTITECFISDTSSEQLTAGTNEYTDSLTSSTPSESGICRFTASPPKPQDGGRVMNMAVPKAHRPGDLIHLPPYLRMDFLLNRGGPGTSRDLSLGQACLEPQKSRTLKRPTVLEPIPMEAASSASSTREGQSWQPGAVATLPQREGAELGQAAKMSSSQESLLDSRGHLKGNNPYAKSYTLV

SEQ ID NO: 25552 - protein, 1746 aa, Homo sapiens
  Payload ID: 5066
  Gene Symbol: DSCAM
  Gene Name: Down syndrome cell adhesion molecule
  ENSP ID: ENSP00000385342
LGHPEPDYRWLKDNMPLELSGRFQKTVTGLLIENIRPSDSGSYVCEVSNRYGTAKVIGRLYVKQPLKATISPRKVKSSVGSQVSLSCSVTGTEDQELSWYRNGEILNPGKNVRITGINHENLIMDHMVKSDGGAYQCFVRKDKLSAQDYVQVVLEDGTPKIISAFSEKVVSPAEPVSLMCNVKGTPLPTITWTLDDDPILKGGSHRISQMITSEGNVVSYLNISSSQVRDGGVYRCTANNSAGVVLYQARINVRGPASIRPMKNITAIAGRDTYIHCRVIGYPYYSIKWYKNSNLLPFNHRQVAFENNGTLKLSDVQKEVDEGEYTCNVLVQPQLSTSQSVHVTVKVPPFIQPFEFPRFSIGQRVFIPCVVVSGDLPITITWQKDGRPIPGSLGVTIDNIDFTSSLRISNLSLMHNGNYTCIARNEAAAVEHQSQLIVRVPPKFVVQPRDQDGIYGKAVILNCSAEGYPVPTIVWKFSKGAGVPQFQPIALNGRIQVLSNGSLLIKHVVEEDSGYYLCKVSNDVGADVSKSMYLTVKIPAMITSYPNTTLATQGQKKEMSCTAHGEKPIIVRWEKEDRIINPEMARYLVSTKEVGEEVISTLQILPTVREDSGFFSCHAINSYGEDRGIIQLTVQEPPDPPEIEIKDVKARTITLRWTMGFDGNSPITGYDIECKNKSDSWDSAQRTKDVSPQLNSATIIDIHPSSTYSIRMYAKNRIGKSEPSNELTITADEAAPDGPPQEVHLEPISSQSIRVTWKAPKKHLQNGIIRGYQIGYREYSTGGNFQFNIISVDTSGDSEVYTLDNLNKFTQYGLVVQACNRAGTGPSSQEIITTTLEDVPSYPPENVQAIATSPESISISWSTLSKEALNGILQGFRVIYWANLMDGELGEIKNITTTQPSLELDGLEKYTNYSIQVLAFTRAGDGVRSEQIFTRTKEDVPGPPAGVKAAAASASMVFVSWLPPLKLNGIIRKYTVFCSHPYPTVISEFEASPDSFSYRIPNLSRNRQYSVWVVAVTSAGRGNSSEIITVEPLAKAPARILTFSGTVTTPWMKDIVLPCKAVGDPSPAVKWMKDSNGTPSLVTIDGRRSIFSNGSFIIRTVKAEDSGYYSCIANNNWGSDEIILNLQVQVPPDQPRLTVSKTTSSSITLSWLPGDNGGSSIRGYILQYSEDNSEQWGSFPISPSERSYRLENLKCGTWYKFTLTAQNGVGPGRISEIIEAKTLGKEPQFSKEQELFASINTTRVRLNLIGWNDGGCPITSFTLEYRPFGTTVWTTAQRTSLSKSYILYDLQEATWYELQMRVCNSAGCAEKQANFATLNYDGSTIPPLIKSVVQNEEGLTTNEGLKMLVTISCILVGVLLLFVLLLVVRRRRREQRLKRLRDAKSLAEMLMSKNTRTSDTLSKQQQTLRMHIDIPRAQLLIEERDTMETIDDRSTVLLTDADFGEAAKQKSLTVTHTVHYQSVSQATGPLVDVSDARPGTNPTTRRNAKAGPTARNRYASQWTLNRPHPTISAHTLTTDWRLPTPRAAGSVDKESDSYSVSPSQDTDRARSSMVSTESASSTYEELARAYEHAKMEEQLRHAKFTITECFISDTSSEQLTAGTNEYTDSLTSSTPSESGICRFTASPPKPQDGGRVMNMAVPKAHRPGGPGTSRDLSLGQACLEPQKSRTLKRPTVLEPIPMEAASSASSTREGQSWQPGAVATLPQREGAELGQAAKMSSSQESLLDSRGHLKGNNPYAKSYTLV

SEQ ID NO: 25553 - protein, 1847 aa, Homo sapiens
  Payload ID: 5066
  Gene Symbol: DSCAM
  Gene Name: Down syndrome cell adhesion molecule
  ENSP ID: ENSP00000478698
SSISGSRFLITSTGALYIKDVQNEDGLYNYRCITRHRYTGETRQSNSARLFVSDPANSAPSILDGFDHRKAMAGQRVELPCKALGHPEPDYRWLKDNMPLELSGRFQKTVTGLLIENIRPSDSGSYVCEVSNRYGTAKVIGRLYVKQPLKATISPRKVKSSVGSQVSLSCSVTGTEDQELSWYRNGEILNPGKNVRITGINHENLIMDHMVKSDGGAYQCFVRKDKLSAQDYVQVVLEDGTPKIISAFSEKVVSPAEPVSLMCNVKGTPLPTITWTLDDDPILKGGSHRISQMITSEGNVVSYLNISSSQVRDGGVYRCTANNSAGVVLYQARINVRGPASIRPMKNITAIAGRDTYIHCRVIGYPYYSIKWYKNSNLLPFNHRQVAFENNGTLKLSDVQKEVDEGEYTCNVLVQPQLSTSQSVHVTVKVPPFIQPFEFPRFSIGQRVFIPCVVVSGDLPITITWQKDGRPIPGSLGVTIDNIDFTSSLRISNLSLMHNGNYTCIARNEAAAVEHQSQLIVRVPPKFVVQPRDQDGIYGKAVILNCSAEGYPVPTIVWKFSKGAGVPQFQPIALNGRIQVLSNGSLLIKHVVEEDSGYYLCKVSNDVGADVSKSMYLTVKIPAMITSYPNTTLATQGQKKEMSCTAHGEKPIIVRWEKEDRIINPEMARYLVSTKEVGEEVISTLQILPTVREDSGFFSCHAINSYGEDRGIIQLTVQEPPDPPEIEIKDVKARTITLRWTMGFDGNSPITGYDIECKNKSDSWDSAQRTKDVSPQLNSATIIDIHPSSTYSIRMYAKNRIGKSEPSNELTITADEAAPDGPPQEVHLEPISSQSIRVTWKAPKKHLQNGIIRGYQIGYREYSTGGNFQFNIISVDTSGDSEVYTLDNLNKFTQYGLVVQACNRAGTGPSSQEIITTTLEDVPSYPPENVQAIATSPESISISWSTLSKEALNGILQGFRVIYWANLMDGELGEIKNITTTQPSLELDGLEKYTNYSIQVLAFTRAGDGVRSEQIFTRTKEDVPGPPAGVKAAAASASMVFVSWLPPLKLNGIIRKYTVFCSHPYPTVISEFEASPDSFSYRIPNLSRNRQYSVWVVAVTSAGRGNSSEIITVEPLAKAPARILTFSGTVTTPWMKDIVLPCKAVGDPSPAVKWMKDSNGTPSLVTIDGRRSIFSNGSFIIRTVKAEDSGYYSCIANNNWGSDEIILNLQVQVPPDQPRLTVSKTTSSSITLSWLPGDNGGSSIRGYILQYSEDNSEQWGSFPISPSERSYRLENLKCGTWYKFTLTAQNGVGPGRISEIIEAKTLGKEPQFSKEQELFASINTTRVRLNLIGWNDGGCPITSFTLEYRPFGTTVWTTAQRTSLSKSYILYDLQEATWYELQMRVCNSAGCAEKQANFATLNYDGSTIPPLIKSVVQNEEGLTTNEGLKMLVTISCILVGVLLLFVLLLVVRRRRREQRLKRLRDAKSLAEMLMSKNTRTSDTLSKQQQTLRMHIDIPRAQLLIEERDTMETIDDRSTVLLTDADFGEAAKQKSLTVTHTVHYQSVSQATGPLVDVSDARPGTNPTTRRNAKAGPTARNRYASQWTLNRPHPTISAHTLTTDWRLPTPRAAGSVDKESDSYSVSPSQDTDRARSSMVSTESASSTYEELARAYEHAKMEEQLRHAKFTITECFISDTSSEQLTAGTNEYTDSLTSSTPSESGICRFTASPPKPQDGGRVMNMAVPKAHRPGDLIHLPPYLRMDFLLNRGGPGTSRDLSLGQACLEPQKSRTLKRPTVLEPIPMEAASSASSTREGQSWQPGAVATLPQREGAELGQAAKMSSSQESLLDSRGHLKGNNPYAKSYTLV

SEQ ID NO: 25554 - protein, 2113 aa, Homo sapiens
  Payload ID: 5067
  Gene Symbol: DSCAML1
  Gene Name: Down syndrome cell adhesion molecule like 1
  Uniprot ID: Q8TD84
  ENSP ID: ENSP00000315465
MTGAGEPRREEPPPQPSAGLRSRESGAPSAGGWERAERGRGAAARPATGPPPRRIGPLYGMWLVTFLLLLDSLHKARPEDVGTSLYFVNDSLQQVTFSSSVGVVVPCPAAGSPSAALRWYLATGDDIYDVPHIRHVHANGTLQLYPFSPSAFNSFIHDNDYFCTAENAAGKIRSPNIRVKAVFREPYTVRVEDQRSMRGNVAVFKCLIPSSVQEYVSVVSWEKDTVSIIPEHRFFITYHGGLYISDVQKEDALSTYRCITKHKYSGETRQSNGARLSVTDPAESIPTILDGFHSQEVWAGHTVELPCTASGYPIPAIRWLKDGRPLPADSRWTKRITGLTISDLRTEDSGTYICEVTNTFGSAEATGILMVIDPLHVTLTPKKLKTGIGSTVILSCALTGSPEFTIRWYRNTELVLPDEAISIRGLSNETLLITSAQKSHSGAYQCFATRKAQTAQDFAIIALEDGTPRIVSSFSEKVVNPGEQFSLMCAAKGAPPPTVTWALDDEPIVRDGSHRTNQYTMSDGTTISHMNVTGPQIRDGGVYRCTARNLVGSAEYQARINVRGPPSIRAMRNITAVAGRDTLINCRVIGYPYYSIKWYKDALLLPDNHRQVVFENGTLKLTDVQKGMDEGEYLCSVLIQPQLSISQSVHVAVKVPPLIQPFEFPPASIGQLLYIPCVVSSGDMPIRITWRKDGQVIISGSGVTIESKEFMSSLQISSVSLKHNGNYTCIASNAAATVSRERQLIVRVPPRFVVQPNNQDGIYGKAGVLNCSVDGYPPPKVMWKHAKGSGNPQQYHPVPLTGRIQILPNSSLLIRHVLEEDIGYYLCQASNGVGTDISKSMFLTVKIPAMITSHPNTTIAIKGHAKELNCTARGERPIIIRWEKGDTVIDPDRVMRYAIATKDNGDEVVSTLKLKPADRGDSVFFSCHAINSYGEDRGLIQLTVQEPPDPPELEIREVKARSMNLRWTQRFDGNSIITGFDIEYKNKSDSWDFKQSTRNISPTINQANIVDLHPASVYSIRMYSFNKIGRSEPSKELTISTEEAAPDGPPMDVTLQPVTSQSIQVTWKAPKKELQNGVIRGYQIGYRENSPGSNGQYSIVEMKATGDSEVYTLDNLKKFAQYGVVVQAFNRAGTGPSSSEINATTLEDVPSQPPENVRALSITSDVAVISWSEPPRSTLNGVLKGYRVIFWSLYVDGEWGEMQNITTTRERVELRGMEKFTNYSVQVLAYTQAGDGVRSSVLYIQTKEDVPGPPAGIKAVPSSASSVVVSWLPPTKPNGVIRKYTIFCSSPGSGQPAPSEYETSPEQLFYRIAHLNRGQQYLLWVAAVTSAGRGNSSEKVTIEPAGKAPAKIISFGGTVTTPWMKDVRLPCNSVGDPAPAVKWTKDSEDSAIPVSMDGHRLIHTNGTLLLRAVKAEDSGYYTCTATNTGGFDTIIVNLLVQVPPDQPRLTVSKTSASSITLTWIPGDNGGSSIRGFVLQYSVDNSEEWKDVFISSSERSFKLDSLKCGTWYKVKLAAKNSVGSGRISEIIEAKTHGREPSFSKDQHLFTHINSTHARLNLQGWNNGGCPITAIVLEYRPKGTWAWQGLRANSSGEVFLTELREATWYELRMRACNSAGCGNETAQFATLDYDGSTIPPIKSAQGEGDDVKKLFTIGCPVILATLGVALLFIVRKKRKEKRLKRLRDAKSLAEMLISKNNRSFDTPVKGPPQGPRLHIDIPRVQLLIEDKEGIKQLGDDKATIPVTDAEFSQAVNPQSFCTGVSLHHPTLIQSTGPLIDMSDIRPGTNPVSRKNVKSAHSTRNRYSSQWTLTKCQASTPARTLTSDWRTVGSQHGVTVTESDSYSASLSQDTDKGRNSMVSTESASSTYEELARAYEHAKLEEQLQHAKFEITECFISDSSSDQMTTGTNENADSMTSMSTPSEPGICRFTASPPKPQDADRGKNVAVPIPHRANKSDYCNLPLYAKSEAFFRKADGREPCPVVPPREASIRNLARTYHTQARHLTLDPASKSLGLPHPGAPAAASTATLPQRTLAMPAPPAGTAPPAPGPTPAEPPTAPSAAPPAPSTEPPRAGGPHTKMGGSRDSLLEMSTSGVGRSQKQGAGAYSKSYTLV

SEQ ID NO: 25555 - protein, 1843 aa, Homo sapiens
  Payload ID: 5067
  Gene Symbol: DSCAML1
  Gene Name: Down syndrome cell adhesion molecule like 1
  ENSP ID: ENSP00000434335
MWLVTFLLLLDSLHKARPEDVGTSLYFVNDSLQQLPCTASGYPIPAIRWLKDGRPLPADSRWTKRITGLTISDLRTEDSGTYICEVTNTFGSAEATGILMVIDPLHVTLTPKKLKTGIGSTVILSCALTGSPEFTIRWYRNTELVLPDEAISIRGLSNETLLITSAQKSHSGAYQCFATRKAQTAQDFAIIALEDGTPRIVSSFSEKVVNPGEQFSLMCAAKGAPPPTVTWALDDEPIVRDGSHRTNQYTMSDGTTISHMNVTGPQIRDGGVYRCTARNLVGSAEYQARINVRGPPSIRAMRNITAVAGRDTLINCRVIGYPYYSIKWYKDALLLPDNHRQVVFENGTLKLTDVQKGMDEGEYLCSVLIQPQLSISQSVHVAVKVPPLIQPFEFPPASIGQLLYIPCVVSSGDMPIRITWRKDGQVIISGSGVTIESKEFMSSLQISSVSLKHNGNYTCIASNAAATVSRERQLIVRVPPRFVVQPNNQDGIYGKAGVLNCSVDGYPPPKVMWKHAKGSGNPQQYHPVPLTGRIQILPNSSLLIRHVLEEDIGYYLCQASNGVGTDISKSMFLTVKIPAMITSHPNTTIAIKGHAKELNCTARGERPIIIRWEKGDTVIDPDRVMRYAIATKDNGDEVVSTLKLKPADRGDSVFFSCHAINSYGEDRGLIQLTVQEPPDPPELEIREVKARSMNLRWTQRFDGNSIITGFDIEYKNKSDSWDFKQSTRNISPTINQANIVDLHPASVYSIRMYSFNKIGRSEPSKELTISTEEAAPDGPPMDVTLQPVTSQSIQVTWKAPKKELQNGVIRGYQIGYRENSPGSNGQYSIVEMKATGDSEVYTLDNLKKFAQYGVVVQAFNRAGTGPSSSEINATTLEDVPSQPPENVRALSITSDVAVISWSEPPRSTLNGVLKGYRVIFWSLYVDGEWGEMQNITTTRERVELRGMEKFTNYSVQVLAYTQAGDGVRSSVLYIQTKEDVPGPPAGIKAVPSSASSVVVSWLPPTKPNGVIRKYTIFCSSPGSGQPAPSEYETSPEQLFYRIAHLNRGQQYLLWVAAVTSAGRGNSSEKVTIEPAGKAPAKIISFGGTVTTPWMKDVRLPCNSVGDPAPAVKWTKDSEDSAIPVSMDGHRLIHTNGTLLLRAVKAEDSGYYTCTATNTGGFDTIIVNLLVQVPPDQPRLTVSKTSASSITLTWIPGDNGGSSIRGFVLQYSVDNSEEWKDVFISSSERSFKLDSLKCGTWYKVKLAAKNSVGSGRISEIIEAKTHGREPSFSKDQHLFTHINSTHARLNLQGWNNGGCPITAIVLEYRPKGTWAWQGLRANSSGEVFLTELREATWYELRMRACNSAGCGNETAQFATLDYDGSTIPPIKSAQGEGDDVKKLFTIGCPVILATLGVALLFIVRKKRKEKRLKRLRDAKSLAEMLISKNNRSFDTPVKGPPQGPRLHIDIPRVQLLIEDKEGIKQLGDDKATIPVTDAEFSQAVNPQSFCTGVSLHHPTLIQSTGPLIDMSDIRPGTNPVSRKNVKSAHSTRNRYSSQWTLTKCQASTPARTLTSDWRTVGSQHGVTVTESDSYSASLSQDTDKGRNSMVSTESASSTYEELARAYEHAKLEEQLQHAKFEITECFISDSSSDQMTTGTNENADSMTSMSTPSEPGICRFTASPPKPQDADRGKNVAVPIPHRANKSDYCNLPLYAKSEAFFRKADGREPCPVVPPREASIRNLARTYHTQARHLTLDPASKSLGLPHPGAPAAASTATLPQRTLAMPAPPAGTAPPAPGPTPAEPPTAPSAAPPAPSTEPPRAGGPHTKMGGSRDSLLEMSTSGVGRSQKQGAGAYSKSYTLV

SEQ ID NO: 25556 - protein, 66 aa, Homo sapiens
  Payload ID: 5067
  Gene Symbol: DSCAML1
  Gene Name: Down syndrome cell adhesion molecule like 1
  ENSP ID: ENSP00000436387
MTTSAPRRTLPARSGAPTSASKQFSGNPTPSGWRIKGQCVATWPSSSASSPLQCRNMLALYLGRKT

SEQ ID NO: 25557 - protein, 297 aa, Homo sapiens
  Payload ID: 5068
  Gene Symbol: DSCR3
  Gene Name: Down syndrome critical region 3
  Uniprot ID: O14972
  ENSP ID: ENSP00000311399
MGTALDIKIKRANKVYHAGEVLSGVVVISSKDSVQHQGVSLTMEGTVNLQLSAKSVGVFEAFYNSVKPIQIINSTIEMVKPGKFPSGKTEIPFEFPLHLKGNKVLYETYHGVFVNIQYTLRCDMKRSLLAKDLTKTCEFIVHSAPQKGKFTPSPVDFTITPETLQNVKERALLPKFLLRGHLNSTNCVITQPLTGELVVESSEAAIRSVELQLVRVETCGCAEGYARDATEIQNIQIADGDVCRGLSVPIYMVFPRLFTCPTLETTNFKVEFEVNIVVLLHPDHLITENFPLKLCRI

SEQ ID NO: 25558 - protein, 249 aa, Homo sapiens
  Payload ID: 5068
  Gene Symbol: DSCR3
  Gene Name: Down syndrome critical region 3
  ENSP ID: ENSP00000381964
MGTALDIKIKRANKVYHAGPIQIINSTIEMVKPGKFPSGKTEIPFEFPLHLKGNKVLYETYHGVFVNIQYTLRCDMKRSLLAKDLTKTCEFIVHSAPQKGKFTPSPVDFTITPETLQNVKERALLPKFLLRGHLNSTNCVITQPLTGELVVESSEAAIRSVELQLVRVETCGCAEGYARDATEIQNIQIADGDVCRGLSVPIYMVFPRLFTCPTLETTNFKVEFEVNIVVLLHPDHLITENFPLKLCRI

SEQ ID NO: 25559 - protein, 172 aa, Homo sapiens
  Payload ID: 5068
  Gene Symbol: DSCR3
  Gene Name: Down syndrome critical region 3
  ENSP ID: ENSP00000381967
MGTALDIKIKRANKVYHAGPQKGKFTPSPVDFTITPETLQNVKERALLPKFLLRGHLNSTNCVITQPLTGELVVESSEAAIRSVELQLVRVETCGCAEGYARDATEIQNIQIADGDVCRGLSVPIYMVFPRLFTCPTLETTNFKVEFEVNIVVLLHPDHLITENFPLKLCRI

SEQ ID NO: 25560 - protein, 270 aa, Homo sapiens
  Payload ID: 5068
  Gene Symbol: DSCR3
  Gene Name: Down syndrome critical region 3
  Uniprot ID: O14972
  ENSP ID: ENSP00000419496
MGTALDIKIKRANKVYHAGEVLSGVVVISSKDSVQHQGVSLTMEGTVNLQLSAKSVGVFEAFYNSVKPIQIINSTIEMVKPGKFPSGKTEIPFEFPLHLKGNKVLYETYHGVFVNIQPQKGKFTPSPVDFTITPETLQNVKERALLPKFLLRGHLNSTNCVITQPLTGELVVESSEAAIRSVELQLVRVETCGCAEGYARDATEIQNIQIADGDVCRGLSVPIYMVFPRLFTCPTLETTNFKVEFEVNIVVLLHPDHLITENFPLKLCRI

SEQ ID NO: 25561 - protein, 118 aa, Homo sapiens
  Payload ID: 5069
  Gene Symbol: DSCR4
  Gene Name: Down syndrome critical region 4
  Uniprot ID: P56555
  ENSP ID: ENSP00000328676
MSLIILTRDDEPRIFTPDSDAASPALHSTSPLPDPASASPLHREEKILPKVCNIVSCLSFSLPASPTDSGLASPTIITREGQQFWAKCLIWKYQLYLHGLHKKSDGRRDKQISASPST

SEQ ID NO: 25562 - protein, 127 aa, Homo sapiens
  Payload ID: 5069
  Gene Symbol: DSCR4
  Gene Name: Down syndrome critical region 4
  ENSP ID: ENSP00000381921
MSLIILTRDDEPRIFTPDSDAASPALHSTSPLPDPASASPLHREEKILPKVCNIVSCLSFSLPASPTDSGLASPTIIRDPVASKSQLELSSRPAKTEPRAWSAQFGRCSAQPQPQVDFLPAENTCSG

SEQ ID NO: 25563 - protein, 79 aa, Homo sapiens
  Payload ID: 5069
  Gene Symbol: DSCR4
  Gene Name: Down syndrome critical region 4
  ENSP ID: ENSP00000434191
MSLIILTRDDEPRIFTPDSDAASPALHSTSPLPDPASASPLHREEKILPKVCNIVSCLSFSLPASPTDSGLASPTIISW

SEQ ID NO: 25564 - protein, 97 aa, Homo sapiens
  Payload ID: 5070
  Gene Symbol: DSCR8
  Gene Name: Down syndrome critical region 8
  Uniprot ID: Q96T75
  ENSP ID: ENSP00000350336
MKEPGPNFVTVRKGLHSFKMAFVKHLLLFLSPRLECSGSITDHCSLHLPVQEILMSQPPEQLGLQTNLGNQESSGMMKLFMPRPKVLAQYESIQFMP

SEQ ID NO: 25565 - protein, 91 aa, Homo sapiens
  Payload ID: 5070
  Gene Symbol: DSCR8
  Gene Name: Down syndrome critical region 8
  Uniprot ID: Q96T75
  ENSP ID: ENSP00000383325
MKEPGPNFVTVRKGLHSFKMAFVKHLLLECSGSITDHCSLHLPVQEILMSQPPEQLGLQTNLGNQESSGMMKLFMPRPKVLAQYESIQFMP

SEQ ID NO: 25566 - protein, 97 aa, Homo sapiens; identical to SEQ ID NO: 25564
  Payload ID: 5070
  Gene Symbol: DSCR8
  Gene Name: Down syndrome critical region 8
  Uniprot ID: Q96T75
  ENSP ID: ENSP00000480061

SEQ ID NO: 25567 - protein, 176 aa, Homo sapiens
  Payload ID: 5071
  Gene Symbol: DR1
  Gene Name: down-regulator of transcription 1
  Uniprot ID: Q01658
  ENSP ID: ENSP00000359290
MASSSGNDDDLTIPRAAINKMIKETLPNVRVANDARELVVNCCTEFIHLISSEANEICNKSEKKTISPEHVIQALESLGFGSYISEVKEVLQECKTVALKRRKASSRLENLGIPEEELLRQQQELFAKARQQQAELAQQEWLQMQQAAQQAQLAAASASASNQAGSSQDEEDDDDI

SEQ ID NO: 25568 - protein, 176 aa, Homo sapiens; identical to SEQ ID NO: 25567
  Payload ID: 5071
  Gene Symbol: DR1
  Gene Name: down-regulator of transcription 1
  Uniprot ID: Q01658
  ENSP ID: ENSP00000359295

SEQ ID NO: 25569 - protein, 552 aa, Homo sapiens
  Payload ID: 5072
  Gene Symbol: DONSON
  Gene Name: downstream neighbor of SON
  ENSP ID: ENSP00000304716
MALSVPGYSPGFRKPPEVVRLRRKRARSRGAAASPPRELTEPAARRAALVAGLPLRPFPAAGGRGGGSGGGPAAARRNPFARLDNRPRVAAEPPDGPAREQPEAPVPFLDSNQENDLLWEEKFPERTTVTELPQTSHVSFSEPDIPSSKSTELPVDWSIKTRLLFTSSQPFTWADHLKAQEEAQGLVQHCRATEVTLPKSIQSLIYWLHPALSWLPLFPRIGADRKMAGKTSPWSNDATLQHVLMSDWSVSFTSLYNLLKTKLCPYFYVCTYQFTVLFRAAGLAGSDLITALISPTTRGLREAMRNEGIEFSLPLIKESGHKKETASGTSLGYGEEQAISDEDEEESFSWLEEMGVQDKIKKPDILSIKLRKEKHEVQMDHRPESVVLVKGINTFTLLNFLINSKSLVATSGPQAGLPPTLLSPVAFRGATMQMLKARSVNVKTQALSGYRDQFSLEITGPIMPHSLHSLTMLLKSSQSGSFSAVLYPHEPTAVFNICLQMDKVLDMEVVHKELTNCGLHPNTLEQLSQIPLLGKSSLRNVVLRDYIYNWRS

SEQ ID NO: 25570 - protein, 566 aa, Homo sapiens
  Payload ID: 5072
  Gene Symbol: DONSON
  Gene Name: downstream neighbor of SON
  Uniprot ID: Q9NYP3
  ENSP ID: ENSP00000307143
MALSVPGYSPGFRKPPEVVRLRRKRARSRGAAASPPRELTEPAARRAALVAGLPLRPFPAAGGRGGGSGGGPAAARRNPFARLDNRPRVAAEPPDGPAREQPEAPVPFLDSNQENDLLWEEKFPERTTVTELPQTSHVSFSEPDIPSSKSTELPVDWSIKTRLLFTSSQPFTWADHLKAQEEAQGLVQHCRATEVTLPKSIQDPKLSSELRCTFQQSLIYWLHPALSWLPLFPRIGADRKMAGKTSPWSNDATLQHVLMSDWSVSFTSLYNLLKTKLCPYFYVCTYQFTVLFRAAGLAGSDLITALISPTTRGLREAMRNEGIEFSLPLIKESGHKKETASGTSLGYGEEQAISDEDEEESFSWLEEMGVQDKIKKPDILSIKLRKEKHEVQMDHRPESVVLVKGINTFTLLNFLINSKSLVATSGPQAGLPPTLLSPVAFRGATMQMLKARSVNVKTQALSGYRDQFSLEITGPIMPHSLHSLTMLLKSSQSGSFSAVLYPHEPTAVFNICLQMDKVLDMEVVHKELTNCGLHPNTLEQLSQIPLLGKSSLRNVVLRDYIYNWRS

SEQ ID NO: 25571 - protein, 136 aa, Homo sapiens
  Payload ID: 5072
  Gene Symbol: DONSON
  Gene Name: downstream neighbor of SON
  ENSP ID: ENSP00000392014
MALSVPGYSPGFRKPPEVVRLRRKRARSRGAAASPPRELTEPAARRAALVAGLPLRPFPAAGGRGGGSGGGPAAARRNPFARLDNRPRVAAEPPDGPAREQPEAPVPFLDSNQENDLLWEEKFPERTTVTELPQII

SEQ ID NO: 25572 - protein, 158 aa, Homo sapiens
  Payload ID: 5072
  Gene Symbol: DONSON
  Gene Name: downstream neighbor of SON
  ENSP ID: ENSP00000392405
FLDSNQENDLLWEEKFPERTTVTELPQTSHVSFSEPDIPSSKSTELPVDWSIKTRLLFTSSQPFTWADHLKAQEEAQGLVQHCRATEVTLPKSIQDPKLSSELRCTFQQSLIYWLHPALSWLPLFPRIGADRKMAGKTSPWSNDATLQHVLMSDWHGV

SEQ ID NO: 25573 - protein, 508 aa, Homo sapiens
  Payload ID: 5072
  Gene Symbol: DONSON
  Gene Name: downstream neighbor of SON
  ENSP ID: ENSP00000394276
MALSVPGYSPGFRKPPEVVRLRRKRARSRGAAASPPRELTEPAARRAALVAGLPLRPFPAAGGRGGGSGGGPAAARRNPFARLDNRPRVAAEPPDGPAREQPEAPVPFLDSNQENDLLWEEKFPERTTVTELPQTSHVSFSEPDIPSSKSTELPVDWSIKTRLLFTSSQPFTWADHLKAQEEAQGLVQHCRATEVTLPKSIQDPKLSSELRCTFQQSLIYWLHPALSWLPLFPRIGADRKMAGKTSPWSNDATLQHVLMSDWSVSFTSLYNLLKTKLCPYFYVCTYQFTVLFRAAGLAGSDLITALISPTTRGLREAMRNEGIEFSLPLIKESGHKKETASGTSLGYGEEQAISDEDEEESFSWLEEMGVQDKIKKPDILSIKLRKEKHEVQMDHRPESVVLVKGINTFTLLNFLINSKSLVATSGPQAGLPPTLLSPVAFRGATMQMLKYCIHTSQLLYLTSACKWTKYLIWRLFIRSLLTVVCTLTLWSNLVKYRYLGNHLYGMWC

SEQ ID NO: 25574 - protein, 495 aa, Homo sapiens
  Payload ID: 5072
  Gene Symbol: DONSON
  Gene Name: downstream neighbor of SON
  ENSP ID: ENSP00000398329
MALSVPGYSPGFRKPPEVVRLRRKRARSRGAAASPPRELTEPAARRAALVAGLPLRPFPAAGGRGGGSGGGPAAARRNPFARLDNRPRVAAEPPDGPAREQPEAPVPFLDSNQENDLLWEEKFPERTTVTELPQTSHVSFSEPDIPSSKSTELPVDWSIKTRLLFTSSQPFTWADHLKAQEEAQGLVQHCRATEVTLPKSIQDPKLSSELRCTFQQSLIYWLHPALSWLPLFPRIGADRKMAGKTSPWSNDATLQHVLMSDWSVSFTSLYNLLKTKLCPYFYVCTYQFTVLFRAAGLAGSDLITALISPTTRGLREAMRNEGIEFSLPLIKESGHKKETASGTSLGYGEEQAISDEDEEESFSWLEEMGVQDKIKKPDILSIKLRKEKHEVQMDHRPESVVLVKGINTFTLLNFLINSKSLVATSGPQAGLPPTLLSPVAFRGATMQMLKEVVHKELTNCGLHPNTLEQLSQIPLLGKSSLRNVVLRDYIYNWRS

SEQ ID NO: 25575 - protein, 537 aa, Homo sapiens
  Payload ID: 5072
  Gene Symbol: DONSON
  Gene Name: downstream neighbor of SON
  ENSP ID: ENSP00000399535
  MOD_RES (1)..(1): Any amino acid
XSVPGYSPGFRKPPEVVRLRRKRARSRGAAASPPRELTEPAARRAALVAGLPLRPFPAAGGRGGGSGGGPAAARRNPFARLDNRPRVAAEPPDGPAREQPEAPVPTSHVSFSEPDIPSSKSTELPVDWSIKTRLLFTSSQPFTWADHLKAQEEAQGLVQHCRATEVTLPKSIQDPKLSSELRCTFQQSLIYWLHPALSWLPLFPRIGADRKMAGKTSPWSNDATLQHVLMSDWSVSFTSLYNLLKTKLCPYFYVCTYQFTVLFRAAGLAGSDLITALISPTTRGLREAMRNEGIEFSLPLIKESGHKKETASGTSLGYGEEQAISDEDEEESFSWLEEMGVQDKIKKPDILSIKLRKEKHEVQMDHRPESVVLVKGINTFTLLNFLINSKSLVATSGPQAGLPPTLLSPVAFRGATMQMLKARSVNVKTQALSGYRDQFSLEITGPIMPHSLHSLTMLLKSSQSGSFSAVLYPHEPTAVFNICLQMDKVLDMEVVHKELTNCGLHPNTLEQLSQIPLLGKSSLRNVVLRDYIYNWRS

SEQ ID NO: 25576 - protein, 235 aa, Homo sapiens
  Payload ID: 5072
  Gene Symbol: DONSON
  Gene Name: downstream neighbor of SON
  ENSP ID: ENSP00000401082
  MOD_RES (1)..(1): Any amino acid
XPDIPSSKSTELPVDWSIKTRLLFTSSQPFTWADHLKAQEEAQGLVQHCRATEVTLPKSIQDPKLSSELRCTFQQSLIYWLHPALSWLPLFPRIGADRKMAGKTSPWSNDATLQHVLMSDWEQAISDEDEEESFSWLEEMGVQDKIKKPDILSIKLRKEKHEVQMDHRPESVVLVKGINTFTLLNFLINSKSLVATSGPQAGLPPTLLSPVAFRGATMQMLKARSVNVKTQALSG

SEQ ID NO: 25577 - protein, 156 aa, Homo sapiens
  Payload ID: 5072
  Gene Symbol: DONSON
  Gene Name: downstream neighbor of SON
  ENSP ID: ENSP00000408788
FLDSNQENDLLWEEKFPERTTVTELPQTSHVSFSEPDIPSSKSTELPVDWSIKTRLLFTSSQPFTWADHLKAQEEAQGLVQHCRATEVTLPKSIQDPKLSSELRCTFQQSLIYWLHPALSWLPLFPRIGADRKMAGKTSPWSNDATLQHVLMSDWY

SEQ ID NO: 25578 - protein, 210 aa, Homo sapiens
  Payload ID: 5072
  Gene Symbol: DONSON
  Gene Name: downstream neighbor of SON
  ENSP ID: ENSP00000415191
MALSVPGYSPGFRKPPEVVRLRRKRARSRGAAASPPRELTEPAARRAALVAGLPLRPFPAAGGRGGGSGGGPAAARRNPFARLDNRPRVAAEPPDGPAREQPEAPVPFLDSNQENDLLWEEKFPERTTVTELPQTSHVSFSEPDIPSSKSTELPVDWSIKTRLLFTSSQPFTWADHLKAQEEAQGLVQHCRATEVTLPKSIQVCELYFSI

SEQ ID NO: 25579 - protein, 18 aa, Homo sapiens
  Payload ID: 5072
  Gene Symbol: DONSON
  Gene Name: downstream neighbor of SON
  ENSP ID: ENSP00000476496
KSSLRNVVLRDYIYNWRS

SEQ ID NO: 25580 - protein, 489 aa, Homo sapiens
  Payload ID: 5073
  Gene Symbol: DPH2
  Gene Name: DPH2 homolog
  Uniprot ID: Q9BQC3
  ENSP ID: ENSP00000255108
MESMFSSPAEAALQRETGVPGLLTPLPDLDGVYELERVAGFVRDLGCERVALQFPDQLLGDAVAVAARLEETTGSKMFILGDTAYGSCCVDVLGAEQAGAQALIHFGPACLSPPARPLPVAFVLRQRSVALELCVKAFEAQNPDPKAPVVLLSEPACAHALEALATLLRPRYLDLLVSSPAFPQPVGSLSPEPMPLERFGRRFPLAPGRRLEEYGAFYVGGSKASPDPDLDPDLSRLLLGWAPGQPFSSCCPDTGKTQDEGARAGRLRARRRYLVERARDARVVGLLAGTLGVAQHREALAHLRNLTQAAGKRSYVLALGRPTPAKLANFPEVDVFVLLACPLGALAPQLSGSFFQPILAPCELEAACNPAWPPPGLAPHLTHYADLLPGSPFHVALPPPESELWETPDVSLITGDLRPPPAWKSSNDHGSLALTPRPQLELAESSPAASFLSSRSWQGLEPRLGQTPVTEAVSGRRGIAIAYEDEGSG

SEQ ID NO: 25581 - protein, 261 aa, Homo sapiens
  Payload ID: 5073
  Gene Symbol: DPH2
  Gene Name: DPH2 homolog
  Uniprot ID: Q9BQC3
  ENSP ID: ENSP00000379981
MESMFSSPAEAALQRETGVPGLLTPLPDLDGVYELERVAGFVRDLGCERVALQFPDQLLGDAVAVAARLEETTGSKMFILGDTAYGSCCVDVLGAEQAGAQALIHFGPACLSPPARPLPVAFVLRQRSVALELCVKAFEAQNPDPKAPVVLLSEPACAHALGSPFHVALPPPESELWETPDVSLITGDLRPPPAWKSSNDHGSLALTPRPQLELAESSPAASFLSSRSWQGLEPRLGQTPVTEAVSGRRGIAIAYEDEGSG

SEQ ID NO: 25582 - protein, 52 aa, Homo sapiens
  Payload ID: 5073
  Gene Symbol: DPH2
  Gene Name: DPH2 homolog
  ENSP ID: ENSP00000431831
MESMFSSPAEAALQRETGVPGLLTPLPDLDGVYELERVAGFVRDLGCCLAVP

SEQ ID NO: 25583 - protein, 93 aa, Homo sapiens
  Payload ID: 5073
  Gene Symbol: DPH2
  Gene Name: DPH2 homolog
  ENSP ID: ENSP00000431944
MESMFSSPAEAALQRETGVPGLLTPLPDLDGVLPCSSLTSYWEMLWLWLHDWRRRQGQRCSFWVTQPTAAAAWMCWVLSKLELRLSYILALPA

SEQ ID NO: 25584 - protein, 262 aa, Homo sapiens
  Payload ID: 5073
  Gene Symbol: DPH2
  Gene Name: DPH2 homolog
  ENSP ID: ENSP00000432162
AFEAQNPDPKAPVVLLSEPACAHALDTGKTQDEGARAGRLRARRRYLVERARDARVVGLLAGTLGVAQHREALAHLRNLTQAAGKRSYVLALGRPTPAKLANFPEVDVFVLLACPLGALAPQLSGSFFQPILAPCELEAACNPAWPPPGLAPHLTHYADLLPGSPFHVALPPPESELWETPDVSLITGDLRPPPAWKSSNDHGSLALTPRPQLELAESSPAASFLSSRSWQGLEPRLGQTPVTEAVSGRRGIAIAYEDEGSG

SEQ ID NO: 25585 - protein, 100 aa, Homo sapiens
  Payload ID: 5073
  Gene Symbol: DPH2
  Gene Name: DPH2 homolog
  ENSP ID: ENSP00000433273
MESMFSSPAEAALQRETGVPGLLTPLPDLDGVYELERVAGFVRDLGCERVALQFPDQLLGDAVAVAARLEETTGSKMFILGDTAYGSDDSNSPPEENPFL

SEQ ID NO: 25586 - protein, 147 aa, Homo sapiens
  Payload ID: 5073
  Gene Symbol: DPH2
  Gene Name: DPH2 homolog
  ENSP ID: ENSP00000434977
MESMFSSPAEAALQRETGVPGLLTPLPDLDGVYELERVAGFVRDLGCERVALQFPDQLLGDAVAVAARLEETTGSKMFILGDTAYGRGFGYSPAPTVPGPASLQPSFSPTSGFPESRAYAPRAFWAPLPPCPREASRRVWCLLCRGL

SEQ ID NO: 25587 - protein, 35 aa, Homo sapiens
  Payload ID: 5073
  Gene Symbol: DPH2
  Gene Name: DPH2 homolog
  ENSP ID: ENSP00000435561
  MOD_RES (1)..(1): Any amino acid
XSPEPMPLERFGRRFPLAPGRRLEELSLPRGSPTT

SEQ ID NO: 25588 - protein, 102 aa, Homo sapiens
  Payload ID: 5073
  Gene Symbol: DPH2
  Gene Name: DPH2 homolog
  ENSP ID: ENSP00000436330
MESMFSSPAEAALQRETGVPGLLTPLPDLDGVLPCSSLTSYWEMLWLWLHDWRRRQGQRCSFWVTQPTAGVNLALGGPGLGIRGSWGFTSMTVIAFNGGVSP

SEQ ID NO: 25589 - protein, 803 aa, Homo sapiens; identical to SEQ ID NO: 24545
  Payload ID: 5074
  Gene Symbol:
  Gene Name: DPP6
  ENSP ID: ENSP00000488956

SEQ ID NO: 25590 - protein, 291 aa, Homo sapiens; identical to SEQ ID NO: 24550
  Payload ID: 5074
  Gene Symbol:
  Gene Name: DPP6
  ENSP ID: ENSP00000489119

SEQ ID NO: 25591 - protein, 865 aa, Homo sapiens; identical to SEQ ID NO: 24546
  Payload ID: 5074
  Gene Symbol:
  Gene Name: DPP6
  ENSP ID: ENSP00000489137

SEQ ID NO: 25592 - protein, 801 aa, Homo sapiens; identical to SEQ ID NO: 24548
  Payload ID: 5074
  Gene Symbol:
  Gene Name: DPP6
  ENSP ID: ENSP00000489259

SEQ ID NO: 25593 - protein, 353 aa, Homo sapiens; identical to SEQ ID NO: 24547
  Payload ID: 5074
  Gene Symbol:
  Gene Name: DPP6
  ENSP ID: ENSP00000489402

SEQ ID NO: 25594 - protein, 758 aa, Homo sapiens; identical to SEQ ID NO: 24549
  Payload ID: 5074
  Gene Symbol:
  Gene Name: DPP6
  ENSP ID: ENSP00000489584

SEQ ID NO: 25595 - protein, 675 aa, Homo sapiens
  Payload ID: 5075
  Gene Symbol: DPY19L1
  Gene Name: dpy-19-like 1 (C. elegans)
  Uniprot ID: Q2PZI1
  ENSP ID: ENSP00000308695
MEGRPPPEGRPPPRPRTGRAPRGRRRAVFAAVLHWSHITHLFENDRHFSHLSTLEREMAFRTEMGLYYSYFKTIVEAPSFLNGVWMIMNDKLTEYPLVINTLKRFNLYPEVILASWYRIYTKIMDLIGIQTKICWTVTRGEGLSPIESCEGLGDPACFYVAVIFILNGLMMALFFIYGTYLSGSRLGGLVTVLCFFFNHGECTRVMWTPPLRESFSYPFLVLQMLLVTHILRATKLYRGSLIALCISNVFFMLPWQFAQFVLLTQIASLFAVYVVGYIDICKLRKIIYIHMISLALCFVLMFGNSMLLTSYYASSLVIIWGILAMKPHFLKINVSELSLWVIQGCFWLFGTVILKYLTSKIFGIADDAHIGNLLTSKFFSYKDFDTLLYTCAAEFDFMEKETPLRYTKTLLLPVVLVVFVAIVRKIISDMWGVLAKQQTHVRKHQFDHGELVYHALQLLAYTALGILIMRLKLFLTPHMCVMASLICSRQLFGWLFCKVHPGAIVFAILAAMSIQGSANLQTQWNIVGEFSNLPQEELIEWIKYSTKPDAVFAGAMPTMASVKLSALRPIVNHPHYEDAGLRARTKIVYSMYSRKAAEEVKRELIKLKVNYYILEESWCVRRSKPGCSMPEIWDVEDPANAGKTPLCNLLVKDSKPHFTTVFQNSVYKVLEVVKE

SEQ ID NO: 25596 - protein, 206 aa, Homo sapiens
  Payload ID: 5075
  Gene Symbol: DPY19L1
  Gene Name: dpy-19-like 1 (C. elegans)
  ENSP ID: ENSP00000400510
CTRVMWTPPLRESFSYPFLVLQMLLVTHILRATKLYRGSLIALCISNVFFMLPWQFAQFVLLTQIASLFAVYVVGYIDICKLRKIIYIHMGILAMKPHFLKINVSELSLWVIQGCFWLFGTVILKYLTSKIFGIADDAHIGNLLTSKFFSYKDFDTLLYTCAAEFDFMEKETPLRYTKTLLLPVVLVVFVAIVRKIISDMWGVLAK

SEQ ID NO: 25597 - protein, 83 aa, Homo sapiens
  Payload ID: 5075
  Gene Symbol: DPY19L1
  Gene Name: dpy-19-like 1 (C. elegans)
  ENSP ID: ENSP00000412745
  MOD_RES (1)..(1): Any amino acid
XFAGAMPTMASVKLSALRPIVNHPHYEDAGLRPGCSMPEIWDVEDPANAGKTPLCNLLVKDSKPHFTTVFQNSVYKVLEVVKE

SEQ ID NO: 25598 - protein, 85 aa, Homo sapiens
  Payload ID: 5075
  Gene Symbol: DPY19L1
  Gene Name: dpy-19-like 1 (C. elegans)
  Uniprot ID: Q2PZI1
  ENSP ID: ENSP00000478865
MYSRKAAEEVKRELIKLKVNYYILEESWCVRRSKPGCSMPEIWDVEDPANAGKTPLCNLLVKDSKPHFTTVFQNSVYKVLEVVKE

SEQ ID NO: 25599 - protein, 758 aa, Homo sapiens
  Payload ID: 5076
  Gene Symbol: DPY19L2
  Gene Name: dpy-19-like 2 (C. elegans)
  Uniprot ID: Q6NUT2
  ENSP ID: ENSP00000315988
MRKQGVSSKRLQSSGRSQSKGRRGASLAREPEVEEEMEKSALGGGKLPRGSWRSSPGRIQSLKERKGLELEVVAKTFLLGPFQFVRNSLAQLREKVQELQARRFSSRTTLGIAVFVAILHWLHLVTLFENDRHFSHLSSLEREMTFRTEMGLYYSYFKTIIEAPSFLEGLWMIMNDRLTEYPLIINAIKRFHLYPEVIIASWYCTFMGIMNLFGLETKTCWNVTRIEPLNEVQSCEGLGDPACFYVGVIFILNGLMMGLFFMYGAYLSGTQLGGLITVLCFFFNHGEATRVMWTPPLRESFSYPFLVLQMCILTLILRTSSNDRRPFIALCLSNVAFMLPWQFAQFILFTQIASLFPMYVVGYIEPSKFQKIIYMNMISVTLSFILMFGNSMYLSSYYSSSLLMTWAIILKRNEIQKLGVSKLNFWLIQGSAWWCGTIILKFLTSKILGVSDHIRLSDLIAARILRYTDFDTLIYTCAPEFDFMEKATPLRYTKTLLLPVVMVITCFIFKKTVRDISYVLATNIYLRKQLLEHSELAFHTLQLLVFTALAILIMRLKMFLTPHMCVMASLICSRQLFGWLFRRVRFEKVIFGILTVMSIQGYANLRNQWSIIGEFNNLPQEELLQWIKYSTTSDAVFAGAMPTMASIKLSTLHPIVNHPHYEDADLRARTKIVYSTYSRKSAKEVRDKLLELHVNYYVLEEAWCVVRTKPGCSMLEIWDVEDPSNAANPPLCSVLLEDARPYFTTVFQNSVYRVLKVN

SEQ ID NO: 25600 - protein, 149 aa, Homo sapiens
  Payload ID: 5076
  Gene Symbol: DPY19L2
  Gene Name: dpy-19-like 2 (C. elegans)
  ENSP ID: ENSP00000437474
  MOD_RES (1)..(1): Any amino acid
XIILKRNEIQKLGVSKLNFWLIQGSAWWCGTIILKFLTSKILGVSDHIRLSDLIAARILRYTDFDTLIYTCAPEFDFMEKATPLRYTKTLLLPVVMVITCFIFKKTVRDISYVLATNIYLRQMEHREMCLGILKKNEWRTLDTVPIRST

SEQ ID NO: 25601 - protein, 47 aa, Homo sapiens
  Payload ID: 5076
  Gene Symbol: DPY19L2
  Gene Name: dpy-19-like 2 (C. elegans)
  ENSP ID: ENSP00000439567
MTFRTEMGLYYSYFKTIIEAPSFLEGLWMIMNDRLTEYPLIINAIKR

SEQ ID NO: 25602 - protein, 124 aa, Homo sapiens
  Payload ID: 5076
  Gene Symbol: DPY19L2
  Gene Name: dpy-19-like 2 (C. elegans)
  ENSP ID: ENSP00000443126
MFKVFRLFNFIKVGPFQIASLFPMYVVGYIEPSKFQKIIYMNMISVTLSFILMFGNSMYLSSYYSSSLLMTWAIILKRNEIQKLGVSKLNFWLIQGSAWWCGTIILKFLTSKILGVSDHIRLSD

SEQ ID NO: 25603 - protein, 90 aa, Homo sapiens
  Payload ID: 5076
  Gene Symbol: DPY19L2
  Gene Name: dpy-19-like 2 (C. elegans)
  ENSP ID: ENSP00000444932
MRKQGVSSKRLQSSGRSQSKGRRGASLAREPEVEEEMEKSALGGGKLPRGSWRSSPGRIQSLKERKGLELEVVAKTFLLGPFQFVRNSLA

SEQ ID NO: 25604 - protein, 142 aa, Homo sapiens
  Payload ID: 5076
  Gene Symbol: DPY19L2
  Gene Name: dpy-19-like 2 (C. elegans)
  ENSP ID: ENSP00000445878
MRKQGVSSKRLQSSGRSQSKGRRGASLAREPEVEEEMEKSALGGGKLPRGSWRSSPGRIQSLKERKGLELEVVAKTFLLGPFQFVRNSLAQLREKVQELQARRFSSRTTLGIAVFVAILHWDFIIHTSRPLLKHLRFWKDCG

SEQ ID NO: 25605 - protein, 716 aa, Homo sapiens
  Payload ID: 5077
  Gene Symbol: DPY19L3
  Gene Name: dpy-19-like 3 (C. elegans)
  Uniprot ID: Q6ZPD9
  ENSP ID: ENSP00000344937
MMSIRQRREIRATEVSEDFPAQEENVKLENKLPSGCTSRRLWKILSLTIGGTIALCIGLLTSVYLATLHENDLWFSNIKEVEREISFRTECGLYYSYYKQMLQAPTLVQGFHGLIYDNKTESMKTINLLQRMNIYQEVFLSILYRVLPIQKYLEPVYFYIYTLFGLQAIYVTALYITSWLLSGTWLSGLLAAFWYVTNRIDTTRVEFTIPLRENWALPFFAIQIAAITYFLRPNLQPLSERLTLLAIFISTFLFSLTWQFNQFMMLMQALVLFTLDSLDMLPAVKATWLYGIQITSLLLVCILQFFNSMILGSLLISFNLSVFIARKLQKNLKTGSFLNRLGKLLLHLFMVLCLTLFLNNIIKKILNLKSDEHIFKFLKAKFGLGATRDFDANLYLCEEAFGLLPFNTFGRLSDTLLFYAYIFVLSITVIVAFVVAFHNLSDSTNQQSVGKMEKGTVDLKPETAYNLIHTILFGFLALSTMRMKYLWTSHMCVFASFGLCSPEIWELLLKSVHLYNPKRICIMRYSVPILILLYLCYKFWPGMMDELSELREFYDPDTVELMNWINSNTPRKAVFAGSMQLLAGVKLCTGRTLTNHPHYEDSSLRERTRAVYQIYAKRAPEEVHALLRSFGTDYVILEDSICYERRHRRGCRLRDLLDIANGHMMDGPGENDPDLKPADHPRFCEEIKRNLPPYVAYFTRVFQNKTFHVYKLSRNK

SEQ ID NO: 25606 - protein, 716 aa, Homo sapiens; identical to SEQ ID NO: 25605
  Payload ID: 5077
  Gene Symbol: DPY19L3
  Gene Name: dpy-19-like 3 (C. elegans)
  Uniprot ID: Q6ZPD9
  ENSP ID: ENSP00000376081

SEQ ID NO: 25607 - protein, 102 aa, Homo sapiens
  Payload ID: 5077
  Gene Symbol: DPY19L3
  Gene Name: dpy-19-like 3 (C. elegans)
  ENSP ID: ENSP00000465995
MMSIRQRREIRATEVSEDFPAQEENVKLENKLPSGCTSRRLWKILSLTIGGTIALCIGLLTSVYLATLHENDLWFSNIKVWSFFDHCIIHSVGSPVVSHVDE

SEQ ID NO: 25608 - protein, 309 aa, Homo sapiens
  Payload ID: 5077
  Gene Symbol: DPY19L3
  Gene Name: dpy-19-like 3 (C. elegans)
  ENSP ID: ENSP00000465997
  MOD_RES (1)..(1): Any amino acid
XLQPLSERLTLLAIFISTFLFSLTWQFNQFMMLMQALVLFTLDSLDMLPAVKATWLYGIQITSLLLVCILQFFNSMILGSLLISFNLSVFIARKLQKNLKTGSFLNRLGKLLLHLFMVLCLTLFLNNIIKKILNLKSDEHIFKFLKAKFGLGATRDFDANLYLCEEAFGLLPFNTFGRLSDTLLFYAYIFVLSITVIVAFVVAFHNLSDSTNQQSVGKMEKGTVDLKPETAYNLIHTILFGFLALSTMRMKYLWTSHMCVFASFGLCSPEIWELLLKSVHLYNPKRICIMRYSVPILILLYLCYKNQKS

SEQ ID NO: 25609 - protein, 126 aa, Homo sapiens
  Payload ID: 5077
  Gene Symbol: DPY19L3
  Gene Name: dpy-19-like 3 (C. elegans)
  ENSP ID: ENSP00000466062
MMSIRQRREIRATEVSEDFPAQEENVKLENKLPSGCTSRRLWKILSLTIGGTIALCIGLLTSVYLATLHENDLWFSNIKEVEREISFRTECGLYYSYYKQMLQAPTLVQGFHGLIYDNKTESMKTI

SEQ ID NO: 25610 - protein, 688 aa, Homo sapiens
  Payload ID: 5077
  Gene Symbol: DPY19L3
  Gene Name: dpy-19-like 3 (C. elegans)
  ENSP ID: ENSP00000466086
MMSIRQRREIRATEVSEDFPAQEENVKLENKLPSGCTSRRLWKILSLTIGGTIALCIGLLTSVYLATLHENDLWFSNIKEVEREISFRTECGLYYSYYKQMLQAPTLVQGFHGLIYDNKTESMKTINLLQRMNIYQEVFLSILYRVLPIQKYLEPVYFYIYTLFGLQAIYVTALYITSWLLSGTWLSGLLAAFWYVTNRIDTTRVEFTIPLRENWALPFFAIQIAAITYFLRPNLQPLSERLTLLAIFISTFLFSLTWQFNQFMMLMQALVLFTLDSLDMLPAVKATWLYGIQITSLLLVCILQFFNSMILGSLLISFNLSVFIARKLQKNLKTGSFLNRLGKLLLHLFMVLCLTLFLNNIIKKILNLKSDEHIFKFLKAKFGLGATRDFDANLYLCEEAFGLLPFNTFGRLSDTLLFYAYIFVLSITVIVAFVVAFHNLSDSTNQQSVGKMEKGTVDLKPETAYNLIHTILFGFLALSTMRMKYLWTSHMCVFASFGLCSPEIWELLLKSVHLYNPKRICIMRYSVPILILLYLCYKFWPGMMDELSELREFYDPDTVELMNWINSNTPRKAVFAGSMQLLAGVKLCTGRTLTNHPHYEDSSLRERTRAVYQIYAKRAPEEVHALLRSFGTDYVILEDSICYERRHRRGCRLRDLLDIANGHKPSLGTLVTATGAGQGRDDGWPRRE

SEQ ID NO: 25611 - protein, 134 aa, Homo sapiens
  Payload ID: 5077
  Gene Symbol: DPY19L3
  Gene Name: dpy-19-like 3 (C. elegans)
  ENSP ID: ENSP00000474174
  MOD_RES (1)..(1): Any amino acid
XNTFGRLSDTLLFYAYIFVLSITVIVAFVVAFHNLSDSTNQQSVGKMEKGTVDLKPETAYNLIHTILFGFLALSTMRMKYLWTSHMCVFASFGLCSPEIWELLLKSVHLYNPKRICIMRYSVPILILLYLCYKL

SEQ ID NO: 25612 - protein, 723 aa, Homo sapiens
  Payload ID: 5078
  Gene Symbol: DPY19L4
  Gene Name: dpy-19-like 4 (C. elegans)
  Uniprot ID: Q7Z388
  ENSP ID: ENSP00000389630
MAEEEGPPVELRQRKKPKSSENKESAKEEKISDIPIPERAPKHVLFQRFAKIFIGCLAAVTSGMMYALYLSAYHERKFWFSNRQELEREITFQGDSAIYYSYYKDMLKAPSFERGVYELTHNNKTVSLKTINAVQQMSLYPELIASILYQATGSNEIIEPVYFYIGIVFGLQGIYVTALFVTSWLMSGTWLAGMLTVAWFVINRVDTTRIEYSIPLRENWALPYFACQIAALTGYLKSNLNTYGERFCYLLMSASTYTFMMMWEYSHYLLFLQAISLFLLDTFSVEQSDKVYEVYKIYIFSLFLGYLLQFENPALLVSPLLSLVAALMLAKCLQLNVKKGSFVAKIIKVINFYLVCTLTITLNIIMKMFVPHKENGHMLKFLEVKFGLNMTKNFTMNWLLCQESLQAPSQDFFLRLTQSSLLPFYILVLIICFLSMLQVIFRRINGKSLKETVTLEDGRIGERPEIIYHVIHTILLGSLAMVIEGLKYIWIPYVCMLAAFGVCSPELWMTLFKWLRLRTVHPILLALILSMAVPTIIGLSLWKEFFPRLMTELMELQEFYDPDTVELMTWIKRQAPVAAVFAGSPQLMGAIKLCTGWMVTSLPLYNDDDLLKRNENIYQIYSKRSAEDIYKILTSYKANYLIVEDAICNEVGPMRGCRVKDLLDIANGHMVCEEGDKLTYSKYGRFCHEVKINYSPYVNYFTRVYWNRSYFVYKINTVISFQS

SEQ ID NO: 25613 - protein, 114 aa, Homo sapiens
  Payload ID: 5078
  Gene Symbol: DPY19L4
  Gene Name: dpy-19-like 4 (C. elegans)
  ENSP ID: ENSP00000428041
  MOD_RES (1)..(1): Any amino acid
XKRKSVTFQFLKELQNELEREITFQGDSAIYYSYYKDMLKAPSFERGVYELTHNNKTVSLKTINAVQQMSLYPELIASILYQATGSNEIIEPVYFYIGIVFGLQGIYVTALFVT

SEQ ID NO: 25614 - protein, 128 aa, Homo sapiens
  Payload ID: 5078
  Gene Symbol: DPY19L4
  Gene Name: dpy-19-like 4 (C. elegans)
  ENSP ID: ENSP00000428762
MAEEEGPPVELRQRKKPKSSENKESAKEEKISDIPIPERAPKRVYELTHNNKTVSLKTINAVQQMSLYPELIASILYQATGSNEIIEPVYFYIGIVFGLQGIYVTALFVTSWLMSGTWLAGMLTVAWF

SEQ ID NO: 25615 - protein, 67 aa, Homo sapiens
  Payload ID: 5078
  Gene Symbol: DPY19L4
  Gene Name: dpy-19-like 4 (C. elegans)
  ENSP ID: ENSP00000429559
ATGSNEIIEPVYFYIGIVFGLQGIYVTALFVTSWLMSGTWLAGMLTVAWFVINRAACNLAAGLPYSE

SEQ ID NO: 25616 - protein, 75 aa, Homo sapiens
  Payload ID: 5078
  Gene Symbol: DPY19L4
  Gene Name: dpy-19-like 4 (C. elegans)
  ENSP ID: ENSP00000429711
  MOD_RES (1)..(1): Any amino acid
XWIPYVCMLAAFGVCSPELWMTLFKWLRLRTVHPILLALILSMAVPTIIGLSLWKEKASSSCSCVCRESTVNGCD

SEQ ID NO: 25617 - protein, 276 aa, Homo sapiens
  Payload ID: 5078
  Gene Symbol: DPY19L4
  Gene Name: dpy-19-like 4 (C. elegans)
  ENSP ID: ENSP00000429785
  MOD_RES (1)..(1): Any amino acid
XIEPVYFYIGIVFGLQGIYVTALFVTSWLMSGTWLAGMLTVAWFVINRVDTTRIEYSIPLRENWALPYFACQIAALTGYLKSNLNTYGERFCYLLMSASTYTFMMMWEYSHYLLFLQAISLFLLDTFSVEQSDKLNVKKGSFVAKIIKVINFYLVCTLTITLNIIMKMFVPHKENGHMLKFLEVKFGLNMTKNFTMNWLLCQESLQAPSQDFFLRLTQSSLLPFYILVLIICFLSMLQVIFRRINGKSLKETVTLEDGRIGERPEIIYHVIHTILL

SEQ ID NO: 25618 - protein, 44 aa, Homo sapiens
  Payload ID: 5078
  Gene Symbol: DPY19L4
  Gene Name: dpy-19-like 4 (C. elegans)
  ENSP ID: ENSP00000430162
MAEEEGPPVELRQRKKPKSSENKESAKEEKISDIPIPERAPKRA

SEQ ID NO: 25619 - protein, 190 aa, Homo sapiens
  Payload ID: 5078
  Gene Symbol: DPY19L4
  Gene Name: dpy-19-like 4 (C. elegans)
  ENSP ID: ENSP00000430417
KISDIPIPERAPKHVLFQRFAKIFIGCLAAVTSGMMYALYLSAYHERKFWFSNRQELEREITFQGDSAIYYSYYKDMLKAPSFERGVYELTHNNKTVSLKTINAVQQMSLYPELIASILYQATGSNEIIEPVYFYIGIVFGLQGIYVTALFVTSWLMSGTWLAGMLTVAWFVINSCTDPWYSVGGDNTGY

SEQ ID NO: 25620 - protein, 177 aa, Homo sapiens
  Payload ID: 5079
  Gene Symbol: DYDC1
  Gene Name: DPY30 domain containing 1
  Uniprot ID: Q8WWB3
  ENSP ID: ENSP00000361276
MESIYLQKHLGACLTQGLAEVARVRPVDPIEYLALWIYKYKENVTMEQLRQKEMAKLERERELALMEQEMMERLKAEELLLQQQQLALQLELEMQEKERQRIQELQRAQEQLGKEMRMNMENLVRNEDILHSEEATLDSGKTLAEISDRYGAPNLSRVEELDEPMFSDIALNIDQDL

SEQ ID NO: 25621 - protein, 177 aa, Homo sapiens; identical to SEQ ID NO: 25620
  Payload ID: 5079
  Gene Symbol: DYDC1
  Gene Name: DPY30 domain containing 1
  Uniprot ID: Q8WWB3
  ENSP ID: ENSP00000361278

SEQ ID NO: 25622 - protein, 80 aa, Homo sapiens
  Payload ID: 5079
  Gene Symbol: DYDC1
  Gene Name: DPY30 domain containing 1
  ENSP ID: ENSP00000388160
MESIYLQKHLGACLTQGLAEVARVRPVDPIEYLALWIYKYKENVTMEQLRQKEMAKLERERELALMEQEMMERLKAEELL

SEQ ID NO: 25623 - protein, 177 aa, Homo sapiens; identical to SEQ ID NO: 25620
  Payload ID: 5079
  Gene Symbol: DYDC1
  Gene Name: DPY30 domain containing 1
  Uniprot ID: Q8WWB3
  ENSP ID: ENSP00000402890

SEQ ID NO: 25624 - protein, 152 aa, Homo sapiens
  Payload ID: 5079
  Gene Symbol: DYDC1
  Gene Name: DPY30 domain containing 1
  ENSP ID: ENSP00000414798
MESIYLQKHLGACLTQGLAEVARVRPVDPIEYLALWIYKYKENVTMEQLRQKEMAKLERERELALMEQEMMERLKAEELLLQQQQLALQLELEMQEKERQRIQELQRAQEQLGKEMRMNMENLVRNEDILHSEEATLDSGKTLAEISDRYGA

SEQ ID NO: 25625 - protein, 177 aa, Homo sapiens
  Payload ID: 5080
  Gene Symbol: DYDC2
  Gene Name: DPY30 domain containing 2
  Uniprot ID: Q96IM9
  ENSP ID: ENSP00000256039
METNYLKRCFGNCLAQALAEVAKVRPSDPIEYLAHWLYHYRKTAKAKEENREKKIHLQEEYDSSLKEMEMTEMLKQEEYQIQQNCEKCHKELTSETVSTKKTIFMQEDTNPLEKEALKQEFLPGTSSLIPGMPQQVPPSESAGQIDQNFKMPQEINYKEAFQHEVAHEMPPGSKSPF

SEQ ID NO: 25626 - protein, 177 aa, Homo sapiens; identical to SEQ ID NO: 25625
  Payload ID: 5080
  Gene Symbol: DYDC2
  Gene Name: DPY30 domain containing 2
  Uniprot ID: Q96IM9
  ENSP ID: ENSP00000361271

SEQ ID NO: 25627 - protein, 191 aa, Homo sapiens
  Payload ID: 5080
  Gene Symbol: DYDC2
  Gene Name: DPY30 domain containing 2
  ENSP ID: ENSP00000361272
MILRPPQQCGTAARMETNYLKRCFGNCLAQALAEVAKVRPSDPIEYLAHWLYHYRKTAKAKEENREKKIHLQEEYDSSLKEMEMTEMLKQEEYQIQQNCEKCHKELTSETVSTKKTIFMQEDTNPLEKEALKQEFLPGTSSLIPGMPQQVPPSESAGQIDQNFKMPQEINYKEAFQHEVAHEMPPGSKSPF

SEQ ID NO: 25628 - protein, 177 aa, Homo sapiens; identical to SEQ ID NO: 25625
  Payload ID: 5080
  Gene Symbol: DYDC2
  Gene Name: DPY30 domain containing 2
  Uniprot ID: Q96IM9
  ENSP ID: ENSP00000361273

SEQ ID NO: 25629 - protein, 125 aa, Homo sapiens
  Payload ID: 5080
  Gene Symbol: DYDC2
  Gene Name: DPY30 domain containing 2
  ENSP ID: ENSP00000401333
METNYLKRCFGNCLAQALAEVAKVRPSDPIEYLAHWLYHYRKTAKAKEENREKKIHLQEEYDSSLKEMEMTEMLKQEEYQIQQNCEKCHKELTSETVSTKKTIFMQEDTNPLEKEALKQEFLPGT

SEQ ID NO: 25630 - protein, 177 aa, Homo sapiens; identical to SEQ ID NO: 25625
  Payload ID: 5080
  Gene Symbol: DYDC2
  Gene Name: DPY30 domain containing 2
  Uniprot ID: Q96IM9
  ENSP ID: ENSP00000410285

SEQ ID NO: 25631 - protein, 177 aa, Homo sapiens; identical to SEQ ID NO: 25625
  Payload ID: 5080
  Gene Symbol: DYDC2
  Gene Name: DPY30 domain containing 2
  Uniprot ID: Q96IM9
  ENSP ID: ENSP00000483479

SEQ ID NO: 25632 - protein, 99 aa, Homo sapiens
  Payload ID: 5081
  Gene Symbol: DPY30
  Gene Name: dpy-30 histone methyltransferase complex regulatory subunit
  Uniprot ID: Q9C005
  ENSP ID: ENSP00000295066
MEPEQMLEGQTQVAENPHSEYGLTDNVERIVENEKINAEKSSKQKVDLQSLPTRAYLDQTVVPILLQGLAVLAKERPPNPIEFLASYLLKNKAQFEDRN

SEQ ID NO: 25633 - protein, 99 aa, Homo sapiens; identical to SEQ ID NO: 25632
  Payload ID: 5081
  Gene Symbol: DPY30
  Gene Name: dpy-30 histone methyltransferase complex regulatory subunit
  Uniprot ID: Q9C005
  ENSP ID: ENSP00000345837

SEQ ID NO: 25634 - protein, 205 aa, Homo sapiens
  Payload ID: 5082
  Gene Symbol: DRAP1
  Gene Name: DR1-associated protein 1 (negative cofactor 2 alpha)
  Uniprot ID: Q14919
  ENSP ID: ENSP00000307850
MPSKKKKYNARFPPARIKKIMQTDEEIGKVAAAVPVIISRALELFLESLLKKACQVTQSRNAKTMTTSHLKQCIELEQQFDFLKDLVASVPDMQGDGEDNHMDGDKGARRGRKPGSGGRKNGGMGTKSKDKKLSGTDSEQEDESEDTDTDGEEETSQPPPQASHPSAHFQSPPTPFLPFASTLPLPPAPPGPSAPDEEDEEDYDS

SEQ ID NO: 25635 - protein, 212 aa, Homo sapiens
  Payload ID: 5082
  Gene Symbol: DRAP1
  Gene Name: DR1-associated protein 1 (negative cofactor 2 alpha)
  ENSP ID: ENSP00000366190
MPSKKKKYNARFPPARIKKIMQTDEEIGKVAAAVPVIISRALELFLESLLKKACQVTQSRNAKTMTTSHLKQCIELEQQFDFLKDLVASVPDMQGDGEDNHMDGDKGARRWTVPSQRGRKPGSGGRKNGGMGTKSKDKKLSGTDSEQEDESEDTDTDGEEETSQPPPQASHPSAHFQSPPTPFLPFASTLPLPPAPPGPSAPDEEDEEDYDS

SEQ ID NO: 25636 - protein, 185 aa, Homo sapiens
  Payload ID: 5082
  Gene Symbol: DRAP1
  Gene Name: DR1-associated protein 1 (negative cofactor 2 alpha)
  ENSP ID: ENSP00000432445
MQTDEEIGKVAAAVPVIISRALELFLESLLKKACQVTQSRNAKTMTTSHLKQCIELEQQFDFLKDLVASVPDMQGDGEDNHMDGDKGARRGRKPGSGGRKNGGMGTKSKDKKLSGTDSEQEDESEDTDTDGEEETSQPPPQASHPSAHFQSPPTPFLPFASTLPLPPAPPGPSAPDEEDEEDYDS

SEQ ID NO: 25637 - protein, 155 aa, Homo sapiens
  Payload ID: 5082
  Gene Symbol: DRAP1
  Gene Name: DR1-associated protein 1 (negative cofactor 2 alpha)
  ENSP ID: ENSP00000437225
MPSKKKKYNARFPPARIKKIMQTDEEIGKVAAAVPVIISRALELFLESLLKKACQGDGEDNHMDGDKGARRGRKPGSGGRKNGGMGTKSKDKKLSGTDSEQEDESEDTDTDGEEETSQPPPQASHPSAHFQSPPTPFLPFASTLPLPPAPPGPSA

SEQ ID NO: 25638 - protein, 161 aa, Homo sapiens
  Payload ID: 5082
  Gene Symbol: DRAP1
  Gene Name: DR1-associated protein 1 (negative cofactor 2 alpha)
  ENSP ID: ENSP00000437287
MPSKKKKYNARFPPSRNAKTMTTSHLKQCIELEQQFDFLKDLVASVPDMQGDGEDNHMDGDKGARRGRKPGSGGRKNGGMGTKSKDKKLSGTDSEQEDESEDTDTDGEEETSQPPPQASHPSAHFQSPPTPFLPFASTLPLPPAPPGPSAPDEEDEEDYDS

SEQ ID NO: 25639 - protein, 651 aa, Homo sapiens
  Payload ID: 5083
  Gene Symbol: DBN1
  Gene Name: drebrin 1
  Uniprot ID: Q16643
  ENSP ID: ENSP00000292385
MAGHPWHGTAALASSQAWRDGRERQALVSCRALYTYEDGSDDLKLAASGEGGLQELSGHFENQKVMYGFCSVKDSQAALPKYVLINWVGEDVPDARKCACASHVAKVAEFFQGVDVIVNASSVEDIDAGAIGQRLSNGLARLSSPVLHRLRLREDENAEPVGTTYQKTDAAVEMKRINREQFWEQAKKEEELRKEEERKKALDERLRFEQERMEQERQEQEERERRYREREQQIEEHRRKQQTLEAEEAKRRLKEQSIFGDHRDEEEETHMKKSESEVEEAAAIIAQRPDNPREFFKQQERVASASAGSCDVPSPFNHRPGSHLDSHRRMAPTPIPTRSPSDSSTASTPVAEQIERALDEVTSSQPPPLPPPPPPAQETQEPSPILDSEETRAAAPQAWAGPMEEPPQAQAPPRGPGSPAEDLMFMESAEQAVLAAPVEPATADATEIHDAADTIETDTATADTTVANNVPPAATSLIDLWPGNGEGASTLQGEPRAPTPPSGTEVTLAEVPLLDEVAPEPLLPAGEGCATLLNFDELPEPPATFCDPEEVEGESLAAPQTPTLPSALEELEQEQEPEPHLLTNGETTQKEGTQASEGYFSQSQEEEFAQSEELCAKAPPPVFYNKPPEIDITCWDADPVPEEEEGFEGGD

SEQ ID NO: 25640 - protein, 649 aa, Homo sapiens
  Payload ID: 5083
  Gene Symbol: DBN1
  Gene Name: drebrin 1
  Uniprot ID: Q16643
  ENSP ID: ENSP00000308532
MAGVSFSGHRLELLAAYEEVIREESAADWALYTYEDGSDDLKLAASGEGGLQELSGHFENQKVMYGFCSVKDSQAALPKYVLINWVGEDVPDARKCACASHVAKVAEFFQGVDVIVNASSVEDIDAGAIGQRLSNGLARLSSPVLHRLRLREDENAEPVGTTYQKTDAAVEMKRINREQFWEQAKKEEELRKEEERKKALDERLRFEQERMEQERQEQEERERRYREREQQIEEHRRKQQTLEAEEAKRRLKEQSIFGDHRDEEEETHMKKSESEVEEAAAIIAQRPDNPREFFKQQERVASASAGSCDVPSPFNHRPGSHLDSHRRMAPTPIPTRSPSDSSTASTPVAEQIERALDEVTSSQPPPLPPPPPPAQETQEPSPILDSEETRAAAPQAWAGPMEEPPQAQAPPRGPGSPAEDLMFMESAEQAVLAAPVEPATADATEIHDAADTIETDTATADTTVANNVPPAATSLIDLWPGNGEGASTLQGEPRAPTPPSGTEVTLAEVPLLDEVAPEPLLPAGEGCATLLNFDELPEPPATFCDPEEVEGESLAAPQTPTLPSALEELEQEQEPEPHLLTNGETTQKEGTQASEGYFSQSQEEEFAQSEELCAKAPPPVFYNKPPEIDITCWDADPVPEEEEGFEGGD

SEQ ID NO: 25641 - protein, 695 aa, Homo sapiens
  Payload ID: 5083
  Gene Symbol: DBN1
  Gene Name: drebrin 1
  Uniprot ID: Q16643
  ENSP ID: ENSP00000377195
MAGVSFSGHRLELLAAYEEVIREESAADWALYTYEDGSDDLKLAASGEGGLQELSGHFENQKVMYGFCSVKDSQAALPKYVLINWVGEDVPDARKCACASHVAKVAEFFQGVDVIVNASSVEDIDAGAIGQRLSNGLARLSSPVLHRLRLREDENAEPVGTTYQKTDAAVEMKRINREQFWEQAKKEEELRKEEERKKALDERLRFEQERMEQERQEQEERERRYREREQQIEEHRRKQQTLEAEEAKRRLKEQSIFGDHRDEEEETHMKKSESEVEEAAAIIAQRPDNPREFFKQQERVASASAGSCDVPSPFNHRPGRPYCPFIKASDSGPSSSSSSSSSPPRTPFPYITCHRTPNLSSSLPCSHLDSHRRMAPTPIPTRSPSDSSTASTPVAEQIERALDEVTSSQPPPLPPPPPPAQETQEPSPILDSEETRAAAPQAWAGPMEEPPQAQAPPRGPGSPAEDLMFMESAEQAVLAAPVEPATADATEIHDAADTIETDTATADTTVANNVPPAATSLIDLWPGNGEGASTLQGEPRAPTPPSGTEVTLAEVPLLDEVAPEPLLPAGEGCATLLNFDELPEPPATFCDPEEVEGESLAAPQTPTLPSALEELEQEQEPEPHLLTNGETTQKEGTQASEGYFSQSQEEEFAQSEELCAKAPPPVFYNKPPEIDITCWDADPVPEEEEGFEGGD

SEQ ID NO: 25642 - protein, 124 aa, Homo sapiens
  Payload ID: 5083
  Gene Symbol: DBN1
  Gene Name: drebrin 1
  ENSP ID: ENSP00000421465
MAGVSFSGHRLELLAAYEEVIREESAADWALYTYEDGSDDLKLAASGEGGLQELSGHFENQKVMYGFCSVKDSQAALPKYVLINWVGEDVPDARKCACASHVAKVAEFFQGVDVIVNASSVEDI

SEQ ID NO: 25643 - protein, 317 aa, Homo sapiens
  Payload ID: 5083
  Gene Symbol: DBN1
  Gene Name: drebrin 1
  ENSP ID: ENSP00000422854
MAGVSFSGHRLELLAAYEEVIREESAADWALYTYEDGSDDLKLAASGGGLQELSGHFENQKVMYGFCSVKDSQAALPKYVLINWVGEDVPDARKCACASHVAKVAEFFQGVDVIVNASSVEDIDAGAIGQRLSNGLARLSSPVLHRLRLREDENAEPVGTTYQKTDAAVEMKRINREQFWEQAKKEEELRKEEERKKALDERLRFEQERMEQERQEQEERERRYREREQQIEEHRRKQQTLEAEEAKRRLKEQSIFGDHRDEEEETHMKKSESEVEEAAAIIAQRPDNPREFFKQQERVASASAGSCDVPSPFNHRP

SEQ ID NO: 25644 - protein, 391 aa, Homo sapiens
  Payload ID: 5083
  Gene Symbol: DBN1
  Gene Name: drebrin 1
  ENSP ID: ENSP00000423208
MKKSESEVEEAAAIIAQRPDNPREFFKQQERVASASAGSCDVPSPFNHRPGSHLDSHRRMAPTPIPTRSPSDSSTASTPVAEQIERALDEVTSSQPPPLPPPPPPAQETQEPSPILDSEETRAAAPQAWAGPMEEPPQAQAPPRGPGSPAEDLMFMESAEQAVLAAPVEPATADATEIHDAADTIETDTATADTTVANNVPPAATSLIDLWPGNGEGASTLQGEPRAPTPPSGTEVTLAEVPLLDEVAPEPLLPAGEGCATLLNFDELPEPPATFCDPEEVEGESLAAPQTPTLPSALEELEQEQEPEPHLLTNGETTQKEGTQVRQGLPGGRDGREWGLSRVLALHSSCLHQYPLLCDPHYLRGSPSHPPSLGRLCFCSQGRHPCFPGNH

SEQ ID NO: 25645 - protein, 93 aa, Homo sapiens
  Payload ID: 5083
  Gene Symbol: DBN1
  Gene Name: drebrin 1
  ENSP ID: ENSP00000425546
MYGFCSVKDSQAALPKYVLINWVGEDVPDARKCACASHVAKVAEFFQGVDVIVNASSVEDIDAGAIGQRLSNGLARLSSPVLHRLRLREDENA

SEQ ID NO: 25646 - protein, 62 aa, Homo sapiens
  Payload ID: 5084
  Gene Symbol: DBNL
  Gene Name: drebrin-like
  ENSP ID: ENSP00000390397
MAANLSRNGPALQEAYVRVVTEKSPTDWALFTYEGNSNDIRVAGTGGGPCDHQRTGRGGCGA

SEQ ID NO: 25647 - protein, 50 aa, Homo sapiens
  Payload ID: 5084
  Gene Symbol: DBNL
  Gene Name: drebrin-like
  ENSP ID: ENSP00000392113
MAANLSRNGPALQEAYVRVVTEKSPTDWALFTYEGNSNDIRCCSCCRGPM

SEQ ID NO: 25648 - protein, 138 aa, Homo sapiens
  Payload ID: 5084
  Gene Symbol: DBNL
  Gene Name: drebrin-like
  ENSP ID: ENSP00000397855
  MOD_RES (1)..(1): Any amino acid
XKQKERAMSTTSISSPQPDLPAEEPAPSTPPCLVQAEEEAVYEEPPEQETFYEQPPLVQQQGAGSEHIDHHIQGQGLSGQGLCARALYDYQAADDTEISFDPENLITGIEVIDEGWWRGYGPDGHFGMFPANYVELIE

SEQ ID NO: 25649 - protein, 359 aa, Homo sapiens
  Payload ID: 5084
  Gene Symbol: DBNL
  Gene Name: drebrin-like
  ENSP ID: ENSP00000398931
  MOD_RES (1)..(1): Any amino acid
XATAMTSAWLAQGTGEGVNDVRKGACASHVSTMASFLKGAHVTINARAEEDVEPECIMEKVAKASGANYSFHKESGRFQDVGPQAPVGSVYQKTNAVSEIKRVGKDSFWAKAEKEEENRRLEEKRRAEEAQRQLEQERRERELREAARREQRYQEQGGEASPQRTWEQQQEVVSRNRNEQESAVHPREIFKQKERAMSTTSISSPQPGKLRSPFLQKQLTQPETHFGREPAAAISRPRADLPAEEPAPSTPPCLVQAEEEAVYEEPPEQETFYEQPPLVQQQGAGSEHIDHHIQGQGLSGQGLCARALYDYQAADDTEISFDPENLITGIEVIDEGWWRGYGPDGHFGMFPANYVELIE

SEQ ID NO: 25650 - protein, 87 aa, Homo sapiens
  Payload ID: 5084
  Gene Symbol: DBNL
  Gene Name: drebrin-like
  ENSP ID: ENSP00000400817
MAANLSRNGPALQEAYVRVVTEKSPTDWALFTYEGNSNDIRVAGTGDRRGRERCAEGSLCQPRQHHGQLPEGGPCDHQRTGRGGCGA

SEQ ID NO: 25651 - protein, 27 aa, Homo sapiens
  Payload ID: 5084
  Gene Symbol: DBNL
  Gene Name: drebrin-like
  ENSP ID: ENSP00000403372
MAANLSRNGPALQEAYVRVVTEKSPTD

SEQ ID NO: 25652 - protein, 406 aa, Homo sapiens
  Payload ID: 5084
  Gene Symbol: DBNL
  Gene Name: drebrin-like
  ENSP ID: ENSP00000405343
MAANLSRNGPALQEAYVRVVTEKSPTDWALFTYEGNSNDIRVAGTGEGGLEEMVEELNSGKVMYAFCRVKDPNSGLPKFVLINWGAHVTINARAEEDVEPECIMEKVAKASGANYSFHKESGRFQDVGPQAPVGSVYQKTNAVSEIKRVGKDSFWAKAEKEEENRRLEEKRRAEEAQRQLEQERRERELREAARREQRYQEQGGEASPQSRTWEQQQEVVSRNRNEQESAVHPREIFKQKERAMSTTSISSPQPGKLRSPFLQKQLTQPETHFGREPAAAISRPRADLPAEEPAPSTPPCLVQAEEEAVYEEPPEQETFYEQPPLVQQQGAGSEHIDHHIQGQGLSGQGLCARALYDYQAADDTEISFDPENLITGIEVIDEGWWRGYGPDGHFGMFPANYVELIE

SEQ ID NO: 25653 - protein, 31 aa, Homo sapiens
  Payload ID: 5084
  Gene Symbol: DBNL
  Gene Name: drebrin-like
  ENSP ID: ENSP00000410681
MAANLSRNGPALQEAYVRVVTEKSPTDWGPM

SEQ ID NO: 25654 - protein, 430 aa, Homo sapiens
  Payload ID: 5084
  Gene Symbol: DBNL
  Gene Name: drebrin-like
  Uniprot ID: Q9UJU6
  ENSP ID: ENSP00000411701
MAANLSRNGPALQEAYVRVVTEKSPTDWALFTYEGNSNDIRVAGTGEGGLEEMVEELNSGKVMYAFCRVKDPNSGLPKFVLINWTGEGVNDVRKGACASHVSTMASFLKGAHVTINARAEEDVEPECIMEKVAKASGANYSFHKESGRFQDVGPQAPVGSVYQKTNAVSEIKRVGKDSFWAKAEKEEENRRLEEKRRAEEAQRQLEQERRERELREAARREQRYQEQGGEASPQRTWEQQQEVVSRNRNEQESAVHPREIFKQKERAMSTTSISSPQPGKLRSPFLQKQLTQPETHFGREPAAAISRPRADLPAEEPAPSTPPCLVQAEEEAVYEEPPEQETFYEQPPLVQQQGAGSEHIDHHIQGQGLSGQGLCARALYDYQAADDTEISFDPENLITGIEVIDEGWWRGYGPDGHFGMFPANYVELIE

SEQ ID NO: 25655 - protein, 327 aa, Homo sapiens
  Payload ID: 5084
  Gene Symbol: DBNL
  Gene Name: drebrin-like
  Uniprot ID: Q9UJU6
  ENSP ID: ENSP00000415173
MASFLKGAHVTINARAEEDVEPECIMEKVAKASGANYSFHKESGRFQDVGPQAPVGSVYQKTNAVSEIKRVGKDSFWAKAEKEEENRRLEEKRRAEEAQRQLEQERRERELREAARREQRYQEQGGEASPQRTWEQQQEVVSRNRNEQESAVHPREIFKQKERAMSTTSISSPQPGKLRSPFLQKQLTQPETHFGREPAAAISRPRADLPAEEPAPSTPPCLVQAEEEAVYEEPPEQETFYEQPPLVQQQGAGSEHIDHHIQGQGLSGQGLCARALYDYQAADDTEISFDPENLITGIEVIDEGWWRGYGPDGHFGMFPANYVELIE

SEQ ID NO: 25656 - protein, 48 aa, Homo sapiens
  Payload ID: 5084
  Gene Symbol: DBNL
  Gene Name: drebrin-like
  ENSP ID: ENSP00000415395
MAANLSRNGPALQEAYVRVVTEKSPTDWWAARRARVGPGAASGGSLYL

SEQ ID NO: 25657 - protein, 382 aa, Homo sapiens
  Payload ID: 5084
  Gene Symbol: DBNL
  Gene Name: drebrin-like
  Uniprot ID: Q9UJU6
  ENSP ID: ENSP00000416421
MAANLSRNGPALQEAYVRVVTEKSPTDWALFTYEGNSNDIRVAGTGEGGLEEMVEELNSGKVMYAFCRVKDPNSGLPKFVLINWTGEGVNDVRKGACASHVSTMASFLKGSVYQKTNAVSEIKRVGKDSFWAKAEKEEENRRLEEKRRAEEAQRQLEQERRERELREAARREQRYQEQGGEASPQSRTWEQQQEVVSRNRNEQESAVHPREIFKQKERAMSTTSISSPQPGKLRSPFLQKQLTQPETHFGREPAAAISRPRADLPAEEPAPSTPPCLVQAEEEAVYEEPPEQETFYEQPPLVQQQGAGSEHIDHHIQGQGLSGQGLCARALYDYQAADDTEISFDPENLITGIEVIDEGWWRGYGPDGHFGMFPANYVELIE

SEQ ID NO: 25658 - protein, 439 aa, Homo sapiens
  Payload ID: 5084
  Gene Symbol: DBNL
  Gene Name: drebrin-like
  Uniprot ID: Q9UJU6
  ENSP ID: ENSP00000417653
MAANLSRNGPALQEAYVRVVTEKSPTDWALFTYEGNSNDIRVAGTGEGGLEEMVEELNSGKVMYAFCRVKDPNSGLPKFVLINWTGEGVNDVRKGACASHVSTMASFLKGAHVTINARAEEDVEPECIMEKVAKASGANYSFHKESGRFQDVGPQAPVGSVYQKTNAVSEIKRVGKDSFWAKAEKEEENRRLEEKRRAEEAQRQLEQERRERELREAARREQRYQEQGGEASPQSRTWEQQQEVVSRNRNEQGSTCASLQESAVHPREIFKQKERAMSTTSISSPQPGKLRSPFLQKQLTQPETHFGREPAAAISRPRADLPAEEPAPSTPPCLVQAEEEAVYEEPPEQETFYEQPPLVQQQGAGSEHIDHHIQGQGLSGQGLCARALYDYQAADDTEISFDPENLITGIEVIDEGWWRGYGPDGHFGMFPANYVELIE

SEQ ID NO: 25659 - protein, 336 aa, Homo sapiens
  Payload ID: 5084
  Gene Symbol: DBNL
  Gene Name: drebrin-like
  Uniprot ID: Q9UJU6
  ENSP ID: ENSP00000417749
MKATAMTSAWLAQGGAHVTINARAEEDVEPECIMEKVAKASGANYSFHKESGRFQDVGPQAPVGSVYQKTNAVSEIKRVGKDSFWAKAEKEEENRRLEEKRRAEEAQRQLEQERRERELREAARREQRYQEQGGEASPQSRTWEQQQEVVSRNRNEQESAVHPREIFKQKERAMSTTSISSPQPGKLRSPFLQKQLTQPETHFGREPAAAISRPRADLPAEEPAPSTPPCLVQAEEEAVYEEPPEQETFYEQPPLVQQQGAGSEHIDHHIQGQGLSGQGLCARALYDYQAADDTEISFDPENLITGIEVIDEGWWRGYGPDGHFGMFPANYVELIE

SEQ ID NO: 25660 - protein, 128 aa, Homo sapiens
  Payload ID: 5084
  Gene Symbol: DBNL
  Gene Name: drebrin-like
  ENSP ID: ENSP00000418006
MAANLSRNGPALQEAYVRVVTEKSPTDWALFTYEGNSNDIRVAGTGEGGLEEMVEELNSGKVMYAFCRVKDPNSGLPKFVLINWTGEGVNDVRKGACASHVSTMASFLKVRPGGPCDHQRTGRGGCGA

SEQ ID NO: 25661 - protein, 40 aa, Homo sapiens
  Payload ID: 5084
  Gene Symbol: DBNL
  Gene Name: drebrin-like
  ENSP ID: ENSP00000418301
MAANLSRNGPALQEAYVRVVTEKSPTDWWAARRARGSLYL

SEQ ID NO: 25662 - protein, 48 aa, Homo sapiens; identical to SEQ ID NO: 25656
  Payload ID: 5084
  Gene Symbol: DBNL
  Gene Name: drebrin-like
  ENSP ID: ENSP00000418978

SEQ ID NO: 25663 - protein, 431 aa, Homo sapiens
  Payload ID: 5084
  Gene Symbol: DBNL
  Gene Name: drebrin-like
  Uniprot ID: Q9UJU6
  ENSP ID: ENSP00000419992
MAANLSRNGPALQEAYVRVVTEKSPTDWALFTYEGNSNDIRVAGTGEGGLEEMVEELNSGKVMYAFCRVKDPNSGLPKFVLINWTGEGVNDVRKGACASHVSTMASFLKGAHVTINARAEEDVEPECIMEKVAKASGANYSFHKESGRFQDVGPQAPVGSVYQKTNAVSEIKRVGKDSFWAKAEKEEENRRLEEKRRAEEAQRQLEQERRERELREAARREQRYQEQGGEASPQSRTWEQQQEVVSRNRNEQESAVHPREIFKQKERAMSTTSISSPQPGKLRSPFLQKQLTQPETHFGREPAAAISRPRADLPAEEPAPSTPPCLVQAEEEAVYEEPPEQETFYEQPPLVQQQGAGSEHIDHHIQGQGLSGQGLCARALYDYQAADDTEISFDPENLITGIEVIDEGWWRGYGPDGHFGMFPANYVELIE

SEQ ID NO: 25664 - protein, 1374 aa, Homo sapiens
  Payload ID: 5085
  Gene Symbol: DROSHA
  Gene Name: drosha, ribonuclease type III
  Uniprot ID: Q9NRR4
  ENSP ID: ENSP00000339845
MMQGNTCHRMSFHPGRGCPRGRGGHGARPSAPSFRPQNLRLLHPQQPPVQYQYEPPSAPSTTFSNSPAPNFLPPRPDFVPFPPPMPPSAQGPLPPCPIRPPFPNHQMRHPFPVPPCFPPMPPPMPCPNNPPVPGAPPGQGTFPFMMPPPSMPHPPPPPVMPQQVNYQYPPGYSHHNFPPPSFNSFQNNPSSFLPSANNSSSPHFRHLPPYPLPKAPSERRSPERLKHYDDHRHRDHSHGRGERHRSLDRRERGRSPDRRRQDSRYRSDYDRGRTPSRHRSYERSRERERERHRHRDNRRSPSLERSYKKEYKRSGRSYGLSVVPEPAGCTPELPGEIIKNTDSWAPPLEIVNHRSPSREKKRARWEEEKDRWSDNQSSGKDKNYTSIKEKEPEETMPDKNEEEEEELLKPVWIRCTHSENYYSSDPMDQVGDSTVVGTSRLRDLYDKFEEELGSRQEKAKAARPPWEPPKTKLDEDLESSSESECESDEDSTCSSSSDSEVFDVIAEIKRKKAHPDRLHDELWYNDPGQMNDGPLCKCSAKARRTGIRHSIYPGEEAIKPCRPMTNNAGRLFHYRITVSPPTNFLTDRPTVIEYDDHEYIFEGFSMFAHAPLTNIPLCKVIRFNIDYTIHFIEEMMPENFCVKGLELFSLFLFRDILELYDWNLKGPLFEDSPPCCPRFHFMPRFVRFLPDGGKEVLSMHQILLYLLRCSKALVPEEEIANMLQWEELEWQKYAEECKGMIVTNPGTKPSSVRIDQLDREQFNPDVITFPIIVHFGIRPAQLSYAGDPQYQKLWKSYVKLRHLLANSPKVKQTDKQKLAQREEALQKIRQKNTMRREVTVELSSQGFWKTGIRSDVCQHAMMLPVLTHHIRYHQCLMHLDKLIGYTFQDRCLLQLAMTHPSHHLNFGMNPDHARNSLSNCGIRQPKYGDRKVHHMHMRKKGINTLINIMSRLGQDDPTPSRINHNERLEFLGDAVVEFLTSVHLYYLFPSLEEGGLATYRTAIVQNQHLAMLAKKLELDRFMLYAHGPDLCRESDLRHAMANCFEALIGAVYLEGSLEEAKQLFGRLLFNDPDLREVWLNYPLHPLQLQEPNTDRQLIETSPVLQKLTEFEEAIGVIFTHVRLLARAFTLRTVGFNHLTLGHNQRMEFLGDSIMQLVATEYLFIHFPDHHEGHLTLLRSSLVNNRTQAKVAEELGMQEYAITNDKTKRPVALRTKTLADLLESFIAALYIDKDLEYVHTFMNVCFFPRLKEFILNQDWNDPKSQLQQCCLTLRTEGKEPDIPLYKTLQTVGPSHARTYTVAVYFKGERIGCGKGPSIQQAEMGAAMDALEKYNFPQMAHQKRFIERKYRQELKEMRWEREHQEREPDETEDIKK

SEQ ID NO: 25665 - protein, 1337 aa, Homo sapiens
  Payload ID: 5085
  Gene Symbol: DROSHA
  Gene Name: drosha, ribonuclease type III
  Uniprot ID: Q9NRR4
  ENSP ID: ENSP00000409335
MMQGNTCHRMSFHPGRGCPRGRGGHGARPSAPSFRPQNLRLLHPQQPPVQYQYEPPSAPSTTFSNSPAPNFLPPRPDFVPFPPPMPPSAQGPLPPCPIRPPFPNHQMRHPFPVPPCFPPMPPPMPCPNNPPVPGAPPGQGTFPFMMPPPSMPHPPPPPVMPQQVNYQYPPGYSHHNFPPPSFNSFQNNPSSFLPSANNSSSPHFRHLPPYPLPKAPSERRSPERLKHYDDHRHRDHSHGRGERHRSLDRRERGRSPDRRRQDSRYRSDYDRGRTPSRHRSYERSRERERERHRHRDNRRSPSLERSYKKEYKRSGSRSPSREKKRARWEEEKDRWSDNQSSGKDKNYTSIKEKEPEETMPDKNEEEEEELLKPVWIRCTHSENYYSSDPMDQVGDSTVVGTSRLRDLYDKFEEELGSRQEKAKAARPPWEPPKTKLDEDLESSSESECESDEDSTCSSSSDSEVFDVIAEIKRKKAHPDRLHDELWYNDPGQMNDGPLCKCSAKARRTGIRHSIYPGEEAIKPCRPMTNNAGRLFHYRITVSPPTNFLTDRPTVIEYDDHEYIFEGFSMFAHAPLTNIPLCKVIRFNIDYTIHFIEEMMPENFCVKGLELFSLFLFRDILELYDWNLKGPLFEDSPPCCPRFHFMPRFVRFLPDGGKEVLSMHQILLYLLRCSKALVPEEEIANMLQWEELEWQKYAEECKGMIVTNPGTKPSSVRIDQLDREQFNPDVITFPIIVHFGIRPAQLSYAGDPQYQKLWKSYVKLRHLLANSPKVKQTDKQKLAQREEALQKIRQKNTMRREVTVELSSQGFWKTGIRSDVCQHAMMLPVLTHHIRYHQCLMHLDKLIGYTFQDRCLLQLAMTHPSHHLNFGMNPDHARNSLSNCGIRQPKYGDRKVHHMHMRKKGINTLINIMSRLGQDDPTPSRINHNERLEFLGDAVVEFLTSVHLYYLFPSLEEGGLATYRTAIVQNQHLAMLAKKLELDRFMLYAHGPDLCRESDLRHAMANCFEALIGAVYLEGSLEEAKQLFGRLLFNDPDLREVWLNYPLHPLQLQEPNTDRQLIETSPVLQKLTEFEEAIGVIFTHVRLLARAFTLRTVGFNHLTLGHNQRMEFLGDSIMQLVATEYLFIHFPDHHEGHLTLLRSSLVNNRTQAKVAEELGMQEYAITNDKTKRPVALRTKTLADLLESFIAALYIDKDLEYVHTFMNVCFFPRLKEFILNQDWNDPKSQLQQCCLTLRTEGKEPDIPLYKTLQTVGPSHARTYTVAVYFKGERIGCGKGPSIQQAEMGAAMDALEKYNFPQMAHQKRFIERKYRQELKEMRWEREHQEREPDETEDIKK

SEQ ID NO: 25666 - protein, 375 aa, Homo sapiens
  Payload ID: 5085
  Gene Symbol: DROSHA
  Gene Name: drosha, ribonuclease type III
  ENSP ID: ENSP00000422745
  MOD_RES (1)..(1): Any amino acid
XYSHHNFPPPSFNSFQNNPSSFLPSANNSSSPHFRHLPPYPLPKAPSERRSPERLKHYDDHRHRDHSHGRGERHRSLDRRERGRSPDRRRQDSRYRSDYDRGRTPSRHRSYERSSRSPSREKKRARWEEEKDRWSDNQSSGKDKNYTSIKEKEPEETMPDKNEEEEEELLKPVWIRCTHSENYYSSDPMDQVGDSTVVGTSRLRDLYDKFEEELGSRQEKAKAARPPWEPPKTKLDEDLESSSESECESDEDSTCSSSSDSEVFDVIAEIKRKKAHPDRLHDELWYNDPGQMNDGPLCKCSAKARRTGIRHSIYPGEEAIKPCRPMTNNAGRLFHYRITVSPPTNFLTDRPTVIEYDDHEYIFEGFSMFAHAPLT

SEQ ID NO: 25667 - protein, 1337 aa, Homo sapiens; identical to SEQ ID NO: 25665
  Payload ID: 5085
  Gene Symbol: DROSHA
  Gene Name: drosha, ribonuclease type III
  Uniprot ID: Q9NRR4
  ENSP ID: ENSP00000424161

SEQ ID NO: 25668 - protein, 1374 aa, Homo sapiens; identical to SEQ ID NO: 25664
  Payload ID: 5085
  Gene Symbol: DROSHA
  Gene Name: drosha, ribonuclease type III
  Uniprot ID: Q9NRR4
  ENSP ID: ENSP00000425979

SEQ ID NO: 25669 - protein, 195 aa, Homo sapiens
  Payload ID: 5085
  Gene Symbol: DROSHA
  Gene Name: drosha, ribonuclease type III
  ENSP ID: ENSP00000428782
HFRHLPPYPLPKAPSERRSPERLKHYDDHRHRDHSHGRGERHRSLDRRERGRSPDRRRQDSRYRSDYDRGRTPSRHRSYERSRSYGLSVVPEPAGCTPELPGEIIKNTDSWAPPLEIVNHRSPSREKKRARWEEEKDRWSDNQSSGKDKNYTSIKEKEPEETMPDKNEEEEEELLKPVWIRCTHSENYYSSDPMD

SEQ ID NO: 25670 - protein, 201 aa, Homo sapiens
  Payload ID: 5085
  Gene Symbol: DROSHA
  Gene Name: drosha, ribonuclease type III
  ENSP ID: ENSP00000430921
MMQGNTCHRMSFHPGRGCPRGRGGHGARPSAPSFRPQNLRLLHPQQPPVQYQYEPPSAPSTTFSNSPAPNFLPPRPDFVPFPPPMPPSAQGPLPPCPIRPPFPNHQMRHPFPVPPCFPPMPPPMPCPNNPPVPGAPPGQGTFPFMMPPPSMPHPPPPPVMPQQVNYQYPPGYSHHNFPPPSFNSFQNNPSSFLPSANNSSS

SEQ ID NO: 25671 - protein, 249 aa, Homo sapiens
  Payload ID: 5086
  Gene Symbol: DSN1
  Gene Name: DSN1 homolog, MIS12 kinetochore complex component
  Uniprot ID: Q9H410
  ENSP ID: ENSP00000362839
MTSVTRSEIIDELSRSISVDLAESKRLGCLLLSSFQFSIQKLEPFLRDTKGFSLESFRAKASSLSEELKHFADGLETDGTLQKCFEDSNGKASDFSLEASVAEMKEYITKFSLERQTWDQLLLHYQQEAKEILSRGSTEAKITEVKVEPMTYLGSSQNEVLNTKPDYQKILQNQSKVFDCMELVMDELQGSVKQLQAFMDESTQCFQKVSVQLGKRSMQQLDPSPARKLLKLQLQNPPAIHGSGSGSCQ

SEQ ID NO: 25672 - protein, 284 aa, Homo sapiens
  Payload ID: 5086
  Gene Symbol: DSN1
  Gene Name: DSN1 homolog, MIS12 kinetochore complex component
  ENSP ID: ENSP00000362845
MTSVTRSEIIDEQSASYQDRRQSWRRASMKETNRRKSLHPIHQGITELSRSISVDLAESKRLGCLLLSSFQFSIQKLEPFLRDTKGFSLESFRAKASSLSEELKHFADGLETDGTLQKCFEDSNGKASDFSLEASVAEMKEYITKFSLERQTWDQLLLHYQQEAKEILSRGSTEAKITEVKVEPMTYLGSSQNEVLNTKPDYQKILQNQSKVFDCMELVMDELQGSVKQLQAFMDESTQCFQKVSVQLGKRSMQQLDPSPARKLLKLQLQNPPAIHGSGSGSCQ

SEQ ID NO: 25673 - protein, 356 aa, Homo sapiens
  Payload ID: 5086
  Gene Symbol: DSN1
  Gene Name: DSN1 homolog, MIS12 kinetochore complex component
  Uniprot ID: Q9H410
  ENSP ID: ENSP00000362855
MTSVTRSEIIDEKGPVMSKTHDHQLESSLSPVEVFAKTSASLEMNQGVSEERIHLGSSPKKGGNCDLSHQERLQSKSLHLSPQEQSASYQDRRQSWRRASMKETNRRKSLHPIHQGITELSRSISVDLAESKRLGCLLLSSFQFSIQKLEPFLRDTKGFSLESFRAKASSLSEELKHFADGLETDGTLQKCFEDSNGKASDFSLEASVAEMKEYITKFSLERQTWDQLLLHYQQEAKEILSRGSTEAKITEVKVEPMTYLGSSQNEVLNTKPDYQKILQNQSKVFDCMELVMDELQGSVKQLQAFMDESTQCFQKVSVQLGKRSMQQLDPSPARKLLKLQLQNPPAIHGSGSGSCQ

SEQ ID NO: 25674 - protein, 356 aa, Homo sapiens; identical to SEQ ID NO: 25673
  Payload ID: 5086
  Gene Symbol: DSN1
  Gene Name: DSN1 homolog, MIS12 kinetochore complex component
  Uniprot ID: Q9H410
  ENSP ID: ENSP00000389810

SEQ ID NO: 25675 - protein, 141 aa, Homo sapiens
  Payload ID: 5086
  Gene Symbol: DSN1
  Gene Name: DSN1 homolog, MIS12 kinetochore complex component
  ENSP ID: ENSP00000395760
MKETNRRKSLHPIHQGITELSRSISVDLAESKRLGCLLLSSFQFSIQKLEPFLRDTKGFSLESFRAKASSLSEELKHFADGLETDGTLQKCFEDSNGKASDFSLEASVAEMKEYITKFSLERQTWDQLLLHYQQEAKEILS

SEQ ID NO: 25676 - protein, 241 aa, Homo sapiens
  Payload ID: 5086
  Gene Symbol: DSN1
  Gene Name: DSN1 homolog, MIS12 kinetochore complex component
  ENSP ID: ENSP00000399654
MTSVTRSEIIDEKGPVMSKTHDHQLESSLSPVEVFAKTSASLEMNQGVSEERIHLGSSPKKGGNCDLSHQERLQSKSLHLSPQEQSASYQDRRQSWRRASMKETNRRKSLHPIHQGITELSRSISVDLAESKRLGCLLLSSFQFSIQKLEPFLRDTKGFSLESFRAKASSLSEELKHFADGLETDGTLQKCFEDSNGKASDFSLEASVAEMKEYITKFSLERQTWDQLLLHYQQEAKEILS

SEQ ID NO: 25677 - protein, 340 aa, Homo sapiens
  Payload ID: 5086
  Gene Symbol: DSN1
  Gene Name: DSN1 homolog, MIS12 kinetochore complex component
  Uniprot ID: Q9H410
  ENSP ID: ENSP00000404463
MSKTHDHQLESSLSPVEVFAKTSASLEMNQGVSEERIHLGSSPKKGGNCDLSHQERLQSKSLHLSPQEQSASYQDRRQSWRRASMKETNRRKSLHPIHQGITELSRSISVDLAESKRLGCLLLSSFQFSIQKLEPFLRDTKGFSLESFRAKASSLSEELKHFADGLETDGTLQKCFEDSNGKASDFSLEASVAEMKEYITKFSLERQTWDQLLLHYQQEAKEILSRGSTEAKITEVKVEPMTYLGSSQNEVLNTKPDYQKILQNQSKVFDCMELVMDELQGSVKQLQAFMDESTQCFQKVSVQLGKRSMQQLDPSPARKLLKLQLQNPPAIHGSGSGSCQ

SEQ ID NO: 25678 - protein, 304 aa, Homo sapiens
  Payload ID: 5087
  Gene Symbol: DTWD1
  Gene Name: DTW domain containing 1
  Uniprot ID: Q8N5C7
  ENSP ID: ENSP00000251250
MSLNPPIFLKRSEENSSKFVETKQSQTTSIASEDPLQNLCLASQEVLQKAQQSGRSKCLKCGGSRMFYCYTCYVPVENVPIEQIPLVKLPLKIDIIKHPNETDGKSTAIHAKLLAPEFVNIYTYPCIPEYEEKDHEVALIFPGPQSISIKDISFHLQKRIQNNVRGKNDDPDKPSFKRKRTEEQEFCDLNDSKCKGTTLKKIIFIDSTWNQTNKIFTDERLQGLLQVELKTRKTCFWRHQKGKPDTFLSTIEAIYYFLVDYHTDILKEKYRGQYDNLLFFYSFMYQLIKNAKCSGDKETGKLTH

SEQ ID NO: 25679 - protein, 304 aa, Homo sapiens; identical to SEQ ID NO: 25678
  Payload ID: 5087
  Gene Symbol: DTWD1
  Gene Name: DTW domain containing 1
  Uniprot ID: Q8N5C7
  ENSP ID: ENSP00000385399

SEQ ID NO: 25680 - protein, 109 aa, Homo sapiens
  Payload ID: 5087
  Gene Symbol: DTWD1
  Gene Name: DTW domain containing 1
  Uniprot ID: Q8N5C7
  ENSP ID: ENSP00000452628
MSLNPPIFLKRSEENSSKFVETKQSQTTSIASEDPLQNLCLASQEVLQKAQQSGRSKCLKCGGSRMFYCYTCYVPVENVPIEQIPLVKFSLYHLGQSMVSSASKITCIG

SEQ ID NO: 25681 - protein, 94 aa, Homo sapiens
  Payload ID: 5087
  Gene Symbol: DTWD1
  Gene Name: DTW domain containing 1
  ENSP ID: ENSP00000452685
MSLNPPIFLKRSEENSSKFVETKQSQTTSIASEDPLQNLCLASQEVLQKAQQSGRSKCLKCGGSRMFYCYTCYVPVENVPIEQIPLVKLPLKID

SEQ ID NO: 25682 - protein, 193 aa, Homo sapiens
  Payload ID: 5087
  Gene Symbol: DTWD1
  Gene Name: DTW domain containing 1
  ENSP ID: ENSP00000453071
MSLNPPIFLKRSEENSSKFVETKQSQTTSIASEDPLQNLCLASQEVLQKAQQSGRSKCLKCGGSRMFYCYTCYVPVENVPIEQIPLVKLPLKIDIIKHPNETDGKSTAIHAKLLAPEFVNIYTYPCIPEYEEKDHERQVSLCCPDWSRTPRAQVILSPWPPKVPGLQVALIFPGPQSISIKDISFHLQKRIQN

SEQ ID NO: 25683 - protein, 304 aa, Homo sapiens; identical to SEQ ID NO: 25678
  Payload ID: 5087
  Gene Symbol: DTWD1
  Gene Name: DTW domain containing 1
  Uniprot ID: Q8N5C7
  ENSP ID: ENSP00000453529

SEQ ID NO: 25684 - protein, 152 aa, Homo sapiens
  Payload ID: 5087
  Gene Symbol: DTWD1
  Gene Name: DTW domain containing 1
  ENSP ID: ENSP00000453649
MSLNPPIFLKRSEENSSKFVETKQSQTTSIASEDPLQNLCLASQEVLQKAQQSGRSKCLKCGGSRMFYCYTCYVPVENVPIEQIPLVKIDIIKHPNETDGKSTAIHAKLLAPEFVNIYTYPCIPEYEEKDHEVALIFPGPQSISIKDISFHL

SEQ ID NO: 25685 - protein, 102 aa, Homo sapiens
  Payload ID: 5087
  Gene Symbol: DTWD1
  Gene Name: DTW domain containing 1
  ENSP ID: ENSP00000453686
MSLNPPIFLKRSEENSSKFVETKQSQTTSIASEDPLQNLCLASQEVLQKAQQSGRSKCLKCGGSRMFYCYTCYVPVENVPIEQIPLVKENPMPEDLSLSPMS

SEQ ID NO: 25686 - protein, 232 aa, Homo sapiens
  Payload ID: 5088
  Gene Symbol: DTWD2
  Gene Name: DTW domain containing 2
  ENSP ID: ENSP00000302892
MPGTATYRPQKVCLCPFLPAHPLHISTHLYIIQHPAEENKVLRTVPLLAACLPQDKCKVKIGRRFSEERDPELSTVCRKSGTLILYPGAEAANLEEFILDSPVYPSTIIIIDGTWSQAKDIFYKNSLFRHPKQVQLKTSISSQYVIRMQPTNRCLSTLECAAVALSILEKNNYIQETLLRPLQALCSFQLQHGAQIRLSKEHLLKNGLYPKPMPKNKRKLRKMELLMNSVKI

SEQ ID NO: 25687 - protein, 202 aa, Homo sapiens
  Payload ID: 5088
  Gene Symbol: DTWD2
  Gene Name: DTW domain containing 2
  ENSP ID: ENSP00000424221
MESQKEARTLQEPVARPSGASSSQTPNDKERREGGAVPAAAALGAEADDDSADGLWELPVEPAERRPECTRCSRPQKVCLCPFLPAHPLHISTHLYIIQHPAEVQLKTSISSQYVIRMQPTNRCLSTLECAAVALSILEKNNYIQETLLRPLQALCSFQLQHGAQIRLSKEHLLKNGLYPKPMPKNKRKLRKMELLMNSVKI

SEQ ID NO: 25688 - protein, 137 aa, Homo sapiens
  Payload ID: 5088
  Gene Symbol: DTWD2
  Gene Name: DTW domain containing 2
  ENSP ID: ENSP00000425016
MESQKEARTLQEPVARPSGASSSQTPNDKERREGGAVPAAAALGAEADDDSADGLWELPVEPAERRPECTRCSRPQKVCLCPFLPAHPLHISTHLYIIQHPAEENKVLRTVPLLAACLPQDKCKVKIGRRFSEERCN

SEQ ID NO: 25689 - protein, 298 aa, Homo sapiens
  Payload ID: 5088
  Gene Symbol: DTWD2
  Gene Name: DTW domain containing 2
  Uniprot ID: Q8NBA8
  ENSP ID: ENSP00000425048
MESQKEARTLQEPVARPSGASSSQTPNDKERREGGAVPAAAALGAEADDDSADGLWELPVEPAERRPECTRCSRPQKVCLCPFLPAHPLHISTHLYIIQHPAEENKVLRTVPLLAACLPQDKCKVKIGRRFSEERDPELSTVCRKSGTLILYPGAEAANLEEFILDSPVYPSTIIIIDGTWSQAKDIFYKNSLFRHPKQVQLKTSISSQYVIRMQPTNRCLSTLECAAVALSILEKNNYIQETLLRPLQALCSFQLQHGAQIRLSKEHLLKNGLYPKPMPKNKRKLRKMELLMNSVKI

SEQ ID NO: 25690 - protein, 209 aa, Homo sapiens
  Payload ID: 5089
  Gene Symbol: DTD1
  Gene Name: D-tyrosyl-tRNA deacylase 1
  Uniprot ID: Q8TEA8
  ENSP ID: ENSP00000366672
MKAVVQRVTRASVTVGGEQISAIGRGICVLLGISLEDTQKELEHMVRKILNLRVFEDESGKHWSKSVMDKQYEILCVSQFTLQCVLKGNKPDFHLAMPTEQAEGFYNSFLEQLRKTYRPELIKDGKFGAYMQVHIQNDGPVTIELESPAPGTATSDPKQLSKLEKQQQRKEKTRAKGPSESSKERNTPRKEDRSASSGAEGDVSSEREP

SEQ ID NO: 25691 - protein, 223 aa, Homo sapiens
  Payload ID: 5089
  Gene Symbol: DTD1
  Gene Name: D-tyrosyl-tRNA deacylase 1
  ENSP ID: ENSP00000482916
MYRNEFTAWYRRMSVVYGIGTWSVLGSLLYYSRTMAKSSVGGEQISAIGRGICVLLGISLEDTQKELEHMVRKILNLRVFEDESGKHWSKSVMDKQYEILCVSQFTLQCVLKGNKPDFHLAMPTEQAEGFYNSFLEQLRKTYRPELIKDGKFGAYMQVHIQNDGPVTIELESPAPGTATSDPKQLSKLEKQQQRKEKTRAKGPSESSKERNTPRKEDRSASSG

SEQ ID NO: 25692 - protein, 168 aa, Homo sapiens
  Payload ID: 5090
  Gene Symbol: DTD2
  Gene Name: D-tyrosyl-tRNA deacylase 2 (putative)
  Uniprot ID: Q96FN9
  ENSP ID: ENSP00000312224
MAEGSRIPQARALLQQCLHARLQIRPADGDVAAQWVEVQRGLVIYVCFFKGADKELLPKMVNTLLNVKLSETENGKHVSILDLPGNILIIPQATLGGRLKGRNMQYHSNSGKEEGFELYSQFVTLCEKEVAANSKCAEARVVVEHGTYGNRQVLKLDTNGPFTHLIEF

SEQ ID NO: 25693 - protein, 168 aa, Homo sapiens; identical to SEQ ID NO: 25692
  Payload ID: 5090
  Gene Symbol: DTD2
  Gene Name: D-tyrosyl-tRNA deacylase 2 (putative)
  Uniprot ID: Q96FN9
  ENSP ID: ENSP00000348503

SEQ ID NO: 25694 - protein, 68 aa, Homo sapiens
  Payload ID: 5090
  Gene Symbol: DTD2
  Gene Name: D-tyrosyl-tRNA deacylase 2 (putative)
  ENSP ID: ENSP00000449624
MAEGSRIPQARALLQQCLHARLQIRPADGDVAAQWVEVTSARQLSLSSGVRGGFFRVVSVTRPLCVSL

SEQ ID NO: 25695 - protein, 263 aa, Homo sapiens
  Payload ID: 5091
  Gene Symbol: DAPP1
  Gene Name: dual adaptor of phosphotyrosine and 3-phosphoinositides
  ENSP ID: ENSP00000296414
MGRAELLEGKMSTQDPSDLWSRSDGEAELLQDLGWYHGNLTRHAAEALLLSNGCDGSYLLRDSNETTGLYSLSVRAKDSVKHFHVEYTGYSFKFGFNEFSSLKDFVKHFANQPLIGSETGTLMVLKHPYPRKVEEPSIYESVRVHTAMQTGRTEDDLVPTAPSLGTKEGYLTKQGGLVKTWKTRWFTLHRNELKYFKDQMSPEPIRILDLTECSAVQFDYSQERVNCFCLVFPFRTFYLCAKTGVEADEWIKILRWKLVKDKS

SEQ ID NO: 25696 - protein, 280 aa, Homo sapiens
  Payload ID: 5091
  Gene Symbol: DAPP1
  Gene Name: dual adaptor of phosphotyrosine and 3-phosphoinositides
  Uniprot ID: Q9UN19
  ENSP ID: ENSP00000423602
MGRAELLEGKMSTQDPSDLWSRSDGEAELLQDLGWYHGNLTRHAAEALLLSNGCDGSYLLRDSNETTGLYSLSVRAKDSVKHFHVEYTGYSFKFGFNEFSSLKDFVKHFANQPLIGSETGTLMVLKHPYPRKVEEPSIYESVRVHTAMQTGRTEDDLVPTAPSLGTKEGYLTKQGGLVKTWKTRWFTLHRNELKYFKDQMSPEPIRILDLTECSAVQFDYSQERVNCFCLVFPFRTFYLCAKTGVEADEWIKILRWKLSQIRKQLNQGEGTIRSRSFIFK

SEQ ID NO: 25697 - protein, 1551 aa, Homo sapiens
  Payload ID: 5092
  Gene Symbol: DUOX1
  Gene Name: dual oxidase 1
  Uniprot ID: Q9NRD9
  ENSP ID: ENSP00000317997
MGFCLALAWTLLVGAWTPLGAQNPISWEVQRFDGWYNNLMEHRWGSKGSRLQRLVPASYADGVYQPLGEPHLPNPRDLSNTISRGPAGLASLRNRTVLGVFFGYHVLSDLVSVETPGCPAEFLNIRIPPGDPMFDPDQRGDVVLPFQRSRWDPETGRSPSNPRDPANQVTGWLDGSAIYGSSHSWSDALRSFSRGQLASGPDPAFPRDSQNPLLMWAAPDPATGQNGPRGLYAFGAERGNREPFLQALGLLWFRYHNLWAQRLARQHPDWEDEELFQHARKRVIATYQNIAVYEWLPSFLQKTLPEYTGYRPFLDPSISSEFVAASEQFLSTMVPPGVYMRNASCHFQGVINRNSSVSRALRVCNSYWSREHPSLQSAEDVDALLLGMASQIAEREDHVLVEDVRDFWPGPLKFSRTDHLASCLQRGRDLGLPSYTKARAALGLSPITRWQDINPALSRSNDTVLEATAALYNQDLSWLELLPGGLLESHRDPGPLFSTIVLEQFVRLRDGDRYWFENTRNGLFSKKEIEEIRNTTLQDVLVAVINIDPSALQPNVFVWHKGDPCPQPRQLSTEGLPACAPSVVRDYFEGSGFGFGVTIGTLCCFPLVSLLSAWIVARLRMRNFKRLQGQDRQSIVSEKLVGGMEALEWQGHKEPCRPVLVYLQPGQIRVVDGRLTVLRTIQLQPPQKVNFVLSSNRGRRTLLLKIPKEYDLVLLFNLEEERQALVENLRGALKESGLSIQEWELREQELMRAAVTREQRRHLLETFFRHLFSQVLDINQADAGTLPLDSSQKVREALTCELSRAEFAESLGLKPQDMFVESMFSLADKDGNGYLSFREFLDILVVFMKGSPEEKSRLMFRMYDFDGNGLISKDEFIRMLRSFIEISNNCLSKAQLAEVVESMFRESGFQDKEELTWEDFHFMLRDHNSELRFTQLCVKGVEVPEVIKDLCRRASYISQDMICPSPRVSARCSRSDIETELTPQRLQCPMDTDPPQEIRRRFGKKVTSFQPLLFTEAHREKFQRSCLHQTVQQFKRFIENYRRHIGCVAVFYAIAGGLFLERAYYYAFAAHHTGITDTTRVGIILSRGTAASISFMFSYILLTMCRNLITFLRETFLNRYVPFDAAVDFHRLIASTAIVLTVLHSVGHVVNVYLFSISPLSVLSCLFPGLFHDDGSELPQKYYWWFFQTVPGLTGVVLLLILAIMYVFASHHFRRRSFRGFWLTHHLYILLYVLLIIHGSFALIQLPRFHIFFLVPAIIYGGDKLVSLSRKKVEISVVKAELLPSGVTHLRFQRPQGFEYKSGQWVRIACLALGTTEYHPFTLTSAPHEDTLSLHIRAAGPWTTRLREIYSAPTGDRCARYPKLYLDGPFGEGHQEWHKFEVSVLVGGGIGVTPFASILKDLVFKSSVSCQVFCKKIYFIWVTRTQRQFEWLADIIREVEENDHQDLVSVHIYITQLAEKFDLRTTMLYICERHFQKVLNRSLFTGLRSITHFGRPPFEPFFNSLQEVHPQVRKIGVFSCGPPGMTKNVEKACQLINRQDRTHFSHHYENF

SEQ ID NO: 25698 - protein, 1551 aa, Homo sapiens; identical to SEQ ID NO: 25697
  Payload ID: 5092
  Gene Symbol: DUOX1
  Gene Name: dual oxidase 1
  Uniprot ID: Q9NRD9
  ENSP ID: ENSP00000373689

SEQ ID NO: 25699 - protein, 444 aa, Homo sapiens
  Payload ID: 5092
  Gene Symbol: DUOX1
  Gene Name: dual oxidase 1
  ENSP ID: ENSP00000452623
MGFCLALAWTLLVGAWTPLGAQNPISWEVQRFDGWYNNLMEHRWGSKGSRLQRLVPASYADGVYQPLGEPHLPNPRDLSNTISRGPAGLASLRNRTVLGVFFGYHVLSDLVSVETPGCPAEFLNIRIPPGDPMFDPDQRGDVVLPFQRSRWDPETGRSPSNPRDPANQVTGWLDGSAIYGSSHSWSDALRSFSRGQLASGPDPAFPRDSQNPLLMWAAPDPATGQNGPRGLYAFGAERGNREPFLQALGLLWFRYHNLWAQRLARQHPDWEDEELFQHARKRVIATYQNIAVYEWLPSFLQKTLPEYTGYRPFLDPSISSEFVAASEQFLSTMVPPGVYMRNASCHFQGVINRNSSVSRALRVCNSYWSREHPSLQSAEDVDALLLGMASQIAEREDHVLVEDVRGTGGHSCPVQPGLILARAAPWGTPGEPPGPWTSVQHHRP

SEQ ID NO: 25700 - protein, 1197 aa, Homo sapiens
  Payload ID: 5092
  Gene Symbol: DUOX1
  Gene Name: dual oxidase 1
  Uniprot ID: Q9NRD9
  ENSP ID: ENSP00000454065
MWMHCCWAWPPRSQSERTMCWLKMCGVSLRLSLQVVNSWPLGRGSAGLPEPDFWPGPLKFSRTDHLASCLQRGRDLGLPSYTKARAALGLSPITRWQDINPALSRSNDTVLEATAALYNQDLSWLELLPGGLLESHRDPGPLFSTIVLEQFVRLRDGDRYWFENTRNGLFSKKEIEEIRNTTLQDVLVAVINIDPSALQPNVFVWHKGDPCPQPRQLSTEGLPACAPSVVRDYFEGSGFGFGVTIGTLCCFPLVSLLSAWIVARLRMRNFKRLQGQDRQSIVSEKLVGGMEALEWQGHKEPCRPVLVYLQPGQIRVVDGRLTVLRTIQLQPPQKVNFVLSSNRGRRTLLLKIPKEYDLVLLFNLEEERQALVENLRGALKESGLSIQEWELREQELMRAAVTREQRRHLLETFFRHLFSQVLDINQADAGTLPLDSSQKVREALTCELSRAEFAESLGLKPQDMFVESMFSLADKDGNGYLSFREFLDILVVFMKGSPEEKSRLMFRMYDFDGNGLISKDEFIRMLRSFIEISNNCLSKAQLAEVVESMFRESGFQDKEELTWEDFHFMLRDHNSELRFTQLCVKGVEVPEVIKDLCRRASYISQDMICPSPRVSARCSRSDIETELTPQRLQCPMDTDPPQEIRRRFGKKVTSFQPLLFTEAHREKFQRSCLHQTVQQFKRFIENYRRHIGCVAVFYAIAGGLFLERAYYYAFAAHHTGITDTTRVGIILSRGTAASISFMFSYILLTMCRNLITFLRETFLNRYVPFDAAVDFHRLIASTAIVLTVLHSVGHVVNVYLFSISPLSVLSCLFPGLFHDDGSELPQKYYWWFFQTVPGLTGVVLLLILAIMYVFASHHFRRRSFRGFWLTHHLYILLYVLLIIHGSFALIQLPRFHIFFLVPAIIYGGDKLVSLSRKKVEISVVKAELLPSGVTHLRFQRPQGFEYKSGQWVRIACLALGTTEYHPFTLTSAPHEDTLSLHIRAAGPWTTRLREIYSAPTGDRCARYPKLYLDGPFGEGHQEWHKFEVSVLVGGGIGVTPFASILKDLVFKSSVSCQVFCKKIYFIWVTRTQRQFEWLADIIREVEENDHQDLVSVHIYITQLAEKFDLRTTMLYICERHFQKVLNRSLFTGLRSITHFGRPPFEPFFNSLQEVHPQVRKIGVFSCGPPGMTKNVEKACQLINRQDRTHFSHHYENF

SEQ ID NO: 25701 - protein, 43 aa, Homo sapiens
  Payload ID: 5092
  Gene Symbol: DUOX1
  Gene Name: dual oxidase 1
  ENSP ID: ENSP00000454121
MGFCLALAWTLLVGAWTPLGAQNPISWEVQRFDGWYNNLMEHR

SEQ ID NO: 25702 - protein, 1548 aa, Homo sapiens
  Payload ID: 5093
  Gene Symbol: DUOX2
  Gene Name: dual oxidase 2
  ENSP ID: ENSP00000373691
MLRARPEALMLLGALLTGSLGPSGSQDALSLPWEVQRYDGWFNNLRHHERGAVGCRLQRRVPANYADGVYQALEEPQLPNPRRLSNAATRGIAGLPSLHNRTVLGVFFGYHVLSDVVSVETPGCPAEFLNIRIPPGDPVFDPDQRGDVVLPFQRSRWDPETGRSPSNPRDLANQVTGWLDGSAIYGSSHSWSDALRSFSGGQLASGPDPAFPRDSQNPLLMWAAPDPATGQNGPRGLYAFGAERGNREPFLQALGLLWFRYHNLWAQRLARQHPDWEDEELFQHARKRVIATYQNIAVYEWLPSFLQKTLPEYTGYRPFLDPSISPEFVVASEQFFSTMVPPGVYMRNASCHFRKVLNKGFQSSQALRVCNNYWIRENPNLNSTQEVNELLLGMASQISELEDNIVVEDLRDYWPGPGKFSRTDYVASSIQRGRDMGLPSYSQALLAFGLDIPRNWSDLNPNVDPQVLEATAALYNQDLSQLELLLGGLLESHGDPGPLFSAIVLDQFVRLRDGDRYWFENTRNGLFSKKEIEDIRNTTLRDVLVAVINIDPSALQPNVFVWHKGAPCPQPKQLTTDGLPQCAPLTVLDFFEGSSPGFAITIIALCCLPLVSLLLSGVVAYFRGREHKKLQKKLKESVKKEAAKDGVPAMEWPGPKERSSPIIIQLLSDRCLQVLNRHLTVLRVVQLQPLQQVNLILSNNRGCRTLLLKIPKEYDLVLLFSSEEERGAFVQQLWDFCVRWALGLHVAEMSEKELFRKAVTKQQRERILEIFFRHLFAQVLDINQADAGTLPLDSSQKVREALTCELSRAEFAESLGLKPQDMFVESMFSLADKDGNGYLSFREFLDILVVFMKGSPEDKSRLMFTMYDLDENGFLSKDEFFTMMRSFIEISNNCLSKAQLAEVVESMFRESGFQDKEELTWEDFHFMLRDHDSELRFTQLCVKGGGGGGNGIRDIFKQNISCRVSFITRTPGERSHPQGLGPPAPEAPELGGPGLKKRFGKKAAVPTPRLYTEALQEKMQRGFLAQKLQQYKRFVENYRRHIVCVAIFSAICVGVFADRAYYYGFASPPSDIAQTTLVGIILSRGTAASVSFMFSYILLTMCRNLITFLRETFLNRYVPFDAAVDFHRWIAMAAVVLAILHSAGHAVNVYIFSVSPLSLLACIFPNVFVNDGSKLPQKFYWWFFQTVPGMTGVLLLLVLAIMYVFASHHFRRRSFRGFWLTHHLYILLYALLIIHGSYALIQLPTFHIYFLVPAIIYGGDKLVSLSRKKVEISVVKAELLPSGVTYLQFQRPQGFEYKSGQWVRIACLALGTTEYHPFTLTSAPHEDTLSLHIRAVGPWTTRLREIYSSPKGNGCAGYPKLYLDGPFGEGHQEWHKFEVSVLVGGGIGVTPFASILKDLVFKSSLGSQMLCKKIYFIWVTRTQRQFEWLADIIQEVEENDHQDLVSVHIYVTQLAEKFDLRTTMLYICERHFQKVLNRSLFTGLRSITHFGRPPFEPFFNSLQEVHPQVRKIGVFSCGPPGMTKNVEKACQLVNRQDRAHFMHHYENF

SEQ ID NO: 25703 - protein, 1548 aa, Homo sapiens
  Payload ID: 5093
  Gene Symbol: DUOX2
  Gene Name: dual oxidase 2
  Uniprot ID: Q9NRD8
  ENSP ID: ENSP00000475084
MLRARPEALMLLGALLTGSLGPSGNQDALSLPWEVQRYDGWFNNLRHHERGAVGCRLQRRVPANYADGVYQALEEPQLPNPRRLSNAATRGIAGLPSLHNRTVLGVFFGYHVLSDVVSVETPGCPAEFLNIRIPPGDPVFDPDQRGDVVLPFQRSRWDPETGRSPSNPRDLANQVTGWLDGSAIYGSSHSWSDALRSFSGGQLASGPDPAFPRDSQNPLLMWAAPDPATGQNGPRGLYAFGAERGNREPFLQALGLLWFRYHNLWAQRLARQHPDWEDEELFQHARKRVIATYQNIAVYEWLPSFLQKTLPEYTGYRPFLDPSISPEFVVASEQFFSTMVPPGVYMRNASCHFRKVLNKGFQSSQALRVCNNYWIRENPNLNSTQEVNELLLGMASQISELEDNIVVEDLRDYWPGPGKFSRTDYVASSIQRGRDMGLPSYSQALLAFGLDIPRNWSDLNPNVDPQVLEATAALYNQDLSQLELLLGGLLESHGDPGPLFSAIVLDQFVRLRDGDRYWFENTRNGLFSKKEIEDIRNTTLRDVLVAVINIDPSALQPNVFVWHKGAPCPQPKQLTTDGLPQCAPLTVLDFFEGSSPGFAITIIALCCLPLVSLLLSGVVAYFRGREHKKLQKKLKESVKKEAAKDGVPAMEWPGPKERSSPIIIQLLSDRCLQVLNRHLTVLRVVQLQPLQQVNLILSNNRGCRTLLLKIPKEYDLVLLFSSEEERGAFVQQLWDFCVRWALGLHVAEMSEKELFRKAVTKQQRERILEIFFRHLFAQVLDINQADAGTLPLDSSQKVREALTCELSRAEFAESLGLKPQDMFVESMFSLADKDGNGYLSFREFLDILVVFMKGSPEDKSRLMFTMYDLDENGFLSKDEFFTMMRSFIEISNNCLSKAQLAEVVESMFRESGFQDKEELTWEDFHFMLRDHDSELRFTQLCVKGGGGGGNGIRDIFKQNISCRVSFITRTPGERSHPQGLGPPAPEAPELGGPGLKKRFGKKAAVPTPRLYTEALQEKMQRGFLAQKLQQYKRFVENYRRHIVCVAIFSAICVGVFADRAYYYGFASPPSDIAQTTLVGIILSRGTAASVSFMFSYILLTMCRNLITFLRETFLNRYVPFDAAVDFHRWIAMAAVVLAILHSAGHAVNVYIFSVSPLSLLACIFPNVFVNDGSKLPQKFYWWFFQTVPGMTGVLLLLVLAIMYVFASHHFRRRSFRGFWLTHHLYILLYALLIIHGSYALIQLPTFHIYFLVPAIIYGGDKLVSLSRKKVEISVVKAELLPSGVTYLQFQRPQGFEYKSGQWVRIACLALGTTEYHPFTLTSAPHEDTLSLHIRAVGPWTTRLREIYSSPKGNGCAGYPKLYLDGPFGEGHQEWHKFEVSVLVGGGIGVTPFASILKDLVFKSSLGSQMLCKKIYFIWVTRTQRQFEWLADIIQEVEENDHQDLVSVHIYVTQLAEKFDLRTTMLYICERHFQKVLNRSLFTGLRSITHFGRPPFEPFFNSLQEVHPQVRKIGVFSCGPPGMTKNVEKACQLVNRQDRAHFMHHYENF

SEQ ID NO: 25704 - protein, 483 aa, Homo sapiens
  Payload ID: 5094
  Gene Symbol: DUOXA1
  Gene Name: dual oxidase maturation factor 1
  Uniprot ID: Q1HG43
  ENSP ID: ENSP00000267803
MATLGHTFPFYAGPKPTFPMDTTLASIIMIFLTALATFIVILPGIRGKTRLFWLLRVVTSLFIGAAILAVNFSSEWSVGQVSTNTSYKAFSSEWISADIGLQVGLGGVNITLTGTPVQQLNETINYNEEFTWRLGENYAEEYAKALEKGLPDPVLYLAEKFTPRSPCGLYRQYRLAGHYTSAMLWVAFLCWLLANVMLSMPVLVYGGYMLLATGIFQLLALLFFSMATSLTSPCPLHLGASVLHTHHGPAFWITLTTGLLCVLLGLAMAVAHRMQPHRLKAFFNQSVDEDPMLEWSPEEGGLLSPRYRSMADSPKSQDIPLSEASSTKAYYRPRRLSLVPADVRGLAPAALSALPGALLAQAWRALLPGLRCPKAGKESRLGPPHSPWRFGPEGCEERWAEHTGDSPRPLRGRGTGRLWRWGSKERRACGVRAMLPRLVSNSGLKRPSCLDLPKCWDYRRDARAFFHLLEPTPCVTSRHTPLI

SEQ ID NO: 25705 - protein, 438 aa, Homo sapiens
  Payload ID: 5094
  Gene Symbol: DUOXA1
  Gene Name: dual oxidase maturation factor 1
  ENSP ID: ENSP00000415512
MATLGHTFPFYAGPKPTFPMDTTLASIIMIFLTALATFIVILPGIRGKTRLFWLLRVVTSLFIGAAILGTPVQQLNETINYNEEFTWRLGENYAEEYAKALEKGLPDPVLYLAEKFTPRSPCGLYRQYRLAGHYTSAMLWVAFLCWLLANVMLSMPVLVYGGYMLLATGIFQLLALLFFSMATSLTSPCPLHLGASVLHTHHGPAFWITLTTGLLCVLLGLAMAVAHRMQPHRLKAFFNQSVDEDPMLEWSPEEGGLLSPRYRSMADSPKSQDIPLSEASSTKAYYRPRRLSLVPADVRGLAPAALSALPGALLAQAWRALLPGLRCPKAGKESRLGPPHSPWRFGPEGCEERWAEHTGDSPRPLRGRGTGRLWRWGSKERRACGVRAMLPRLVSNSGLKRPSCLDLPKCWDYRRDARAFFHLLEPTPCVTSRHTPLI

SEQ ID NO: 25706 - protein, 71 aa, Homo sapiens
  Payload ID: 5094
  Gene Symbol: DUOXA1
  Gene Name: dual oxidase maturation factor 1
  ENSP ID: ENSP00000452782
MATLGHTFPFYAGPKPTFPMDTTLASIIMIFLTALATFIVILPGIRGKTRLFWLLRVVTSLFIGAAILGTP

SEQ ID NO: 25707 - protein, 15 aa, Homo sapiens
  Payload ID: 5094
  Gene Symbol: DUOXA1
  Gene Name: dual oxidase maturation factor 1
  ENSP ID: ENSP00000452795
MATLGHTFPFYAGPK

SEQ ID NO: 25708 - protein, 12 aa, Homo sapiens
  Payload ID: 5094
  Gene Symbol: DUOXA1
  Gene Name: dual oxidase maturation factor 1
  ENSP ID: ENSP00000453217
MATLGHTFPFYA

SEQ ID NO: 25709 - protein, 72 aa, Homo sapiens
  Payload ID: 5094
  Gene Symbol: DUOXA1
  Gene Name: dual oxidase maturation factor 1
  ENSP ID: ENSP00000453295
MATLGHTFPFYAGPKPTFPMDTTLASIIMIFLTALATFIVILPGIRGKTRLFWLLRVVTSLFIGAAILAVNF

SEQ ID NO: 25710 - protein, 483 aa, Homo sapiens; identical to SEQ ID NO: 25704
  Payload ID: 5094
  Gene Symbol: DUOXA1
  Gene Name: dual oxidase maturation factor 1
  Uniprot ID: Q1HG43
  ENSP ID: ENSP00000453569

SEQ ID NO: 25711 - protein, 166 aa, Homo sapiens
  Payload ID: 5094
  Gene Symbol: DUOXA1
  Gene Name: dual oxidase maturation factor 1
  ENSP ID: ENSP00000453614
  MOD_RES (1)..(1): Any amino acid
XTTLASIIMIFLTALATFIVILPGIRGKTRLFWLLRVVTSLFIGAAILAVNFSSEWSVGQVSTNTSYKAFSSEWISADIGLQVGLGGVNITLTGTPVQQLNETINYNEEFTWRLGENYAEEYAKALEKGLPDPVLYLAEKFTPRSPCGLYRQYRLAGHYTSAMLCR

SEQ ID NO: 25712 - protein, 121 aa, Homo sapiens
  Payload ID: 5094
  Gene Symbol: DUOXA1
  Gene Name: dual oxidase maturation factor 1
  ENSP ID: ENSP00000453809
MATLGHTFPFYAGPKPTFPMDTTLASIIMIFLTALATFIVILPGIRGKTRLFWLLRVVTSLFIGAAILAVNFSSEWSVGQVSTNTSYKAFSSEWISADIGLQVGLGGVNITLTGTPVQQLN

SEQ ID NO: 25713 - protein, 298 aa, Homo sapiens
  Payload ID: 5094
  Gene Symbol: DUOXA1
  Gene Name: dual oxidase maturation factor 1
  Uniprot ID: Q1HG43
  ENSP ID: ENSP00000453836
MATLGHTFPFYAGPKPTFPMDTTLASIIMIFLTALATFIVILPGIRGKTRLFWLLRVVTSLFIGAAILGTPVQQLNETINYNEEFTWRLGENYAEEYAKALEKGLPDPVLYLAEKFTPRSPCGLYRQYRLAGHYTSAMLWVAFLCWLLANVMLSMPVLVYGGYMLLATGIFQLLALLFFSMATSLTSPCPLHLGASVLHTHHGPAFWITLTTGLLCVLLGLAMAVAHRMQPHRLKAFFNQSVDEDPMLEWSPEEGGLLSPRYRSMADSPKSQDIPLSEASSTKAYCKEAHPKDPDCAL

SEQ ID NO: 25714 - protein, 298 aa, Homo sapiens; identical to SEQ ID NO: 25713
  Payload ID: 5094
  Gene Symbol: DUOXA1
  Gene Name: dual oxidase maturation factor 1
  Uniprot ID: Q1HG43
  ENSP ID: ENSP00000454019

SEQ ID NO: 25715 - protein, 343 aa, Homo sapiens
  Payload ID: 5094
  Gene Symbol: DUOXA1
  Gene Name: dual oxidase maturation factor 1
  Uniprot ID: Q1HG43
  ENSP ID: ENSP00000454084
MATLGHTFPFYAGPKPTFPMDTTLASIIMIFLTALATFIVILPGIRGKTRLFWLLRVVTSLFIGAAILAVNFSSEWSVGQVSTNTSYKAFSSEWISADIGLQVGLGGVNITLTGTPVQQLNETINYNEEFTWRLGENYAEEYAKALEKGLPDPVLYLAEKFTPRSPCGLYRQYRLAGHYTSAMLWVAFLCWLLANVMLSMPVLVYGGYMLLATGIFQLLALLFFSMATSLTSPCPLHLGASVLHTHHGPAFWITLTTGLLCVLLGLAMAVAHRMQPHRLKAFFNQSVDEDPMLEWSPEEGGLLSPRYRSMADSPKSQDIPLSEASSTKAYCKEAHPKDPDCAL

SEQ ID NO: 25716 - protein, 77 aa, Homo sapiens
  Payload ID: 5094
  Gene Symbol: DUOXA1
  Gene Name: dual oxidase maturation factor 1
  ENSP ID: ENSP00000454117
MATLGHTFPFYAGPKPTFPMDTTLASIIMIFLTALATFIVILPGIRGKTRLFWLLRVVTSLFIGAAILGTPVQQLNE

SEQ ID NO: 25717 - protein, 438 aa, Homo sapiens; identical to SEQ ID NO: 25705
  Payload ID: 5094
  Gene Symbol: DUOXA1
  Gene Name: dual oxidase maturation factor 1
  ENSP ID: ENSP00000480154

SEQ ID NO: 25718 - protein, 320 aa, Homo sapiens
  Payload ID: 5095
  Gene Symbol: DUOXA2
  Gene Name: dual oxidase maturation factor 2
  Uniprot ID: Q1HG44
  ENSP ID: ENSP00000319705
MTLWNGVLPFYPQPRHAAGFSVPLLIVILVFLALAASFLLILPGIRGHSRWFWLVRVLLSLFIGAEIVAVHFSAEWFVGTVNTNTSYKAFSAARVTARVRLLVGLEGINITLTGTPVHQLNETIDYNEQFTWRLKENYAAEYANALEKGLPDPVLYLAEKFTPSSPCGLYHQYHLAGHYASATLWVAFCFWLLSNVLLSTPAPLYGGLALLTTGAFALFGVFALASISSVPLCPLRLGSSALTTQYGAAFWVTLATGVLCLFLGGAVVSLQYVRPSALRTLLDQSAKDCSQERGGSPLILGDPLHKQAALPDLKCITTNL

SEQ ID NO: 25719 - protein, 121 aa, Homo sapiens
  Payload ID: 5095
  Gene Symbol: DUOXA2
  Gene Name: dual oxidase maturation factor 2
  Uniprot ID: Q1HG44
  ENSP ID: ENSP00000454110
MTLWNGVLPFYPQPRHAAGFSVPLLIVILVFLALAASFLLILPGIRGHSEYLHSHLLPSEIRLGPPSSEGGDPCVPSTSGLTEPHQAVTGPGGRTRTRRQTARGVKVVEECQEVGVEGRCC

SEQ ID NO: 25720 - protein, 884 aa, Homo sapiens
  Payload ID: 5096
  Gene Symbol: DSTYK
  Gene Name: dual serine/threonine and tyrosine protein kinase
  Uniprot ID: Q6XUX3
  ENSP ID: ENSP00000356129
MEGDGVPWGSEPVSGPGPGGGGMIRELCRGFGRYRRYLGRLRQNLRETQKFFRDIKCSHNHTCLSSLTGGGGAERGPAGDVAETGLQAGQLSCISFPPKEEKYLQQIVDCLPCILILGQDCNVKCQLLNLLLGVQVLPTTKLGSEESCKLRRLRFTYGTQTRVSLALPGQYELVHTLVAHQGNWETIPEEDLEVQENNEDAAHVLAELEVTMHHALLQEVDVVVAPCQGLRPTVDVLGDLVNDFLPVITYALHKDELSERDEQELQEIRKYFSFPVFFFKVPKLGSEIIDSSTRRMESERSPLYRQLIDLGYLSSSHWNCGAPGQDTKAQSMLVEQSEKLRHLSTFSHQVLQTRLVDAAKALNLVHCHCLDIFINQAFDMQRDLQITPKRLEYTRKKENELYESLMNIANRKQEEMKDMIVETLNTMKEELLDDATNMEFKDVIVPENGEPVGTREIKCCIRQIQELIISRLNQAVANKLISSVDYLRESFVGTLERCLQSLEKSQDVSVHITSNYLKQILNAAYHVEVTFHSGSSVTRMLWEQIKQIIQRITWVSPPAITLEWKRKVAQEAIESLSASKLAKSICSQFRTRLNSSHEAFAASLRQLEAGHSGRLEKTEDLWLRVRKDHAPRLARLSLESCSLQDVLLHRKPKLGQELGRGQYGVVYLCDNWGGHFPCALKSVVPPDEKHWNDLALEFHYMRSLPKHERLVDLHGSVIDYNYGGGSSIAVLLIMERLHRDLYTGLKAGLTLETRLQIALDVVEGIRFLHSQGLVHRDIKLKNVLLDKQNRAKITDLGFCKPEAMMSGSIVGTPIHMAPELFTGARPERLPVFDEECWQLMEACWDGDPLKRPLLGIVQPMLQGIMNRLCKSNSEQPNRGLDDST

SEQ ID NO: 25721 - protein, 929 aa, Homo sapiens
  Payload ID: 5096
  Gene Symbol: DSTYK
  Gene Name: dual serine/threonine and tyrosine protein kinase
  Uniprot ID: Q6XUX3
  ENSP ID: ENSP00000356130
MEGDGVPWGSEPVSGPGPGGGGMIRELCRGFGRYRRYLGRLRQNLRETQKFFRDIKCSHNHTCLSSLTGGGGAERGPAGDVAETGLQAGQLSCISFPPKEEKYLQQIVDCLPCILILGQDCNVKCQLLNLLLGVQVLPTTKLGSEESCKLRRLRFTYGTQTRVSLALPGQYELVHTLVAHQGNWETIPEEDLEVQENNEDAAHVLAELEVTMHHALLQEVDVVVAPCQGLRPTVDVLGDLVNDFLPVITYALHKDELSERDEQELQEIRKYFSFPVFFFKVPKLGSEIIDSSTRRMESERSPLYRQLIDLGYLSSSHWNCGAPGQDTKAQSMLVEQSEKLRHLSTFSHQVLQTRLVDAAKALNLVHCHCLDIFINQAFDMQRDLQITPKRLEYTRKKENELYESLMNIANRKQEEMKDMIVETLNTMKEELLDDATNMEFKDVIVPENGEPVGTREIKCCIRQIQELIISRLNQAVANKLISSVDYLRESFVGTLERCLQSLEKSQDVSVHITSNYLKQILNAAYHVEVTFHSGSSVTRMLWEQIKQIIQRITWVSPPAITLEWKRKVAQEAIESLSASKLAKSICSQFRTRLNSSHEAFAASLRQLEAGHSGRLEKTEDLWLRVRKDHAPRLARLSLESCSLQDVLLHRKPKLGQELGRGQYGVVYLCDNWGGHFPCALKSVVPPDEKHWNDLALEFHYMRSLPKHERLVDLHGSVIDYNYGGGSSIAVLLIMERLHRDLYTGLKAGLTLETRLQIALDVVEGIRFLHSQGLVHRDIKLKNVLLDKQNRAKITDLGFCKPEAMMSGSIVGTPIHMAPELFTGKYDNSVDVYAFGILFWYICSGSVKLPEAFERCASKDHLWNNVRRGARPERLPVFDEECWQLMEACWDGDPLKRPLLGIVQPMLQGIMNRLCKSNSEQPNRGLDDST

SEQ ID NO: 25722 - protein, 179 aa, Homo sapiens
  Payload ID: 5096
  Gene Symbol: DSTYK
  Gene Name: dual serine/threonine and tyrosine protein kinase
  Uniprot ID: Q6XUX3
  ENSP ID: ENSP00000478016
MLWEQIKQIIQRITWVSPPAITLEWKRKVAQEAIESLSASKLAKSICSQFRTRLNSSHEAFAASLRQLEAGHSGRLEKTEDLWLRVRKDHAPRLARLSLESCSLQDVLLHRKPKLGQELGRGQYGVVYLCDNWGGHFPCALKSVVPPDEKHWNDLALEFHYMRWVLASFISMRKIQRRI

SEQ ID NO: 25723 - protein, 367 aa, Homo sapiens
  Payload ID: 5097
  Gene Symbol: DUSP1
  Gene Name: dual specificity phosphatase 1
  Uniprot ID: P28562
  ENSP ID: ENSP00000239223
MVMEVGTLDAGGLRALLGERAAQCLLLDCRSFFAFNAGHIAGSVNVRFSTIVRRRAKGAMGLEHIVPNAELRGRLLAGAYHAVVLLDERSAALDGAKRDGTLALAAGALCREARAAQVFFLKGGYEAFSASCPELCSKQSTPMGLSLPLSTSVPDSAESGCSSCSTPLYDQGGPVEILPFLYLGSAYHASRKDMLDALGITALINVSANCPNHFEGHYQYKSIPVEDNHKADISSWFNEAIDFIDSIKNAGGRVFVHCQAGISRSATICLAYLMRTNRVKLDEAFEFVKQRRSIISPNFSFMGQLLQFESQVLAPHCSAEAGSPAMAVLDRGTSTTTVFNFPVSIPVHSTNSALSYLQSPITTSPSC

SEQ ID NO: 25724 - protein, 482 aa, Homo sapiens
  Payload ID: 5098
  Gene Symbol: DUSP10
  Gene Name: dual specificity phosphatase 10
  Uniprot ID: Q9Y6W6
  ENSP ID: ENSP00000355866
MPPSPLDDRVVVALSRPVRPQDLNLCLDSSYLGSANPGSNSHPPVIATTVVSLKAANLTYMPSSSGSARSLNCGCSSASCCTVATYDKDNQAQTQAIAAGTTTTAIGTSTTCPANQMVNNNENTGSLSPSSGVGSPVSGTPKQLASIKIIYPNDLAKKMTKCSKSHLPSQGPVIIDCRPFMEYNKSHIQGAVHINCADKISRRRLQQGKITVLDLISCREGKDSFKRIFSKEIIVYDENTNEPSRVMPSQPLHIVLESLKREGKEPLVLKGGLSSFKQNHENLCDNSLQLQECREVGGGASAASSLLPQPIPTTPDIENAELTPILPFLFLGNEQDAQDLDTMQRLNIGYVINVTTHLPLYHYEKGLFNYKRLPATDSNKQNLRQYFEEAFEFIEEAHQCGKGLLIHCQAGVSRSATIVIAYLMKHTRMTMTDAYKFVKGKRPIISPNLNFMGQLLEFEEDLNNGVTPRILTPKLMGVETVV

SEQ ID NO: 25725 - protein, 66 aa, Homo sapiens
  Payload ID: 5098
  Gene Symbol: DUSP10
  Gene Name: dual specificity phosphatase 10
  ENSP ID: ENSP00000480008
MKTSVTTPSSSKSAGRWGAAHPRPRACYLSPSPPPLTSRTLSSPPSCPSCSLAMSRMLRTWTPCSG

SEQ ID NO: 25726 - protein, 66 aa, Homo sapiens; identical to SEQ ID NO: 25725
  Payload ID: 5098
  Gene Symbol: DUSP10
  Gene Name: dual specificity phosphatase 10
  ENSP ID: ENSP00000482935

SEQ ID NO: 25727 - protein, 66 aa, Homo sapiens; identical to SEQ ID NO: 25725
  Payload ID: 5098
  Gene Symbol: DUSP10
  Gene Name: dual specificity phosphatase 10
  ENSP ID: ENSP00000483812

SEQ ID NO: 25728 - protein, 377 aa, Homo sapiens
  Payload ID: 5099
  Gene Symbol: DUSP11
  Gene Name: dual specificity phosphatase 11 (RNA/RNP complex 1-interacting)
  Uniprot ID: O75319
  ENSP ID: ENSP00000272444
MRNSETLERGVGGCRVFSCLGSYPGIEGAGLALLADLALGGRLLGTHMSQWHHPRSGWGRRRDFSGRSSAKKKGGNHIPERWKDYLPVGQRMPGTRFIAFKVPLQKSFEKKLAPEECFSPLDLFNKIREQNEELGLIIDLTYTQRYYKPEDLPETVPYLKIFTVGHQVPDDETIFKFKHAVNGFLKENKDNDKLIGVHCTHGLNRTGYLICRYLIDVEGVRPDDAIELFNRCRGHCLERQNYIEDLQNGPIRKNWNSSVPRSSDFEDSAHLMQPVHNKPVKQGPRYNLHQIQGHSAPRHFHTQTQSLQQSVRKFSENPHVYQRHHLPPPGPPGEDYSHRRYSWNVKPNASRAAQDRRRWYPYNYSRLSYPACWEWTQ

SEQ ID NO: 25729 - protein, 150 aa, Homo sapiens
  Payload ID: 5099
  Gene Symbol: DUSP11
  Gene Name: dual specificity phosphatase 11 (RNA/RNP complex 1-interacting)
  ENSP ID: ENSP00000394535
QWHHPRSGWGRRRDFSGRSSAKKKGGNHIPERWKDYLPVGQRMPGTRFIAFKVPLQKSFEKKLAPEECFSPLDLFNKIREQNEELGLIIDLTYTQRYYKPEDLPETVPYLKIFTVGHQVPDDETIFKFKHAVNGFLKENKDNEVRSRRKD

SEQ ID NO: 25730 - protein, 273 aa, Homo sapiens
  Payload ID: 5099
  Gene Symbol: DUSP11
  Gene Name: dual specificity phosphatase 11 (RNA/RNP complex 1-interacting)
  ENSP ID: ENSP00000413444
MRNSETLERGVGGCRVFSCLGSYPGIEGAGLALLADLALGGRLLGTHMSQWHHPRSGWGRRRDFSGRSSAKKKGGNHIPERWKDYLPVGQRMPGTRFIAFKVPLQKSFEKKLAPEECFSPLDLFNKIREQNEELGLIIDLTYTQRYYKPEDLPETVPYLKIFTVGHQVPDDETIFKFKHAVNGFLKENKDNDKLIGVHCTHGLNRTGYLICRRSLALSPRLECSGTISTHSKFCFPGSRRSPASASQVAGTTGARHHARLIFCIFSRDVVSPC

SEQ ID NO: 25731 - protein, 340 aa, Homo sapiens
  Payload ID: 5100
  Gene Symbol: DUSP12
  Gene Name: dual specificity phosphatase 12
  Uniprot ID: Q9UNI6
  ENSP ID: ENSP00000356920
MLEAPGPSDGCELSNPSASRVSCAGQMLEVQPGLYFGGAAAVAEPDHLREAGITAVLTVDSEEPSFKAGPGVEDLWRLFVPALDKPETDLLSHLDRCVAFIGQARAEGRAVLVHCHAGVSRSVAIITAFLMKTDQLPFEKAYEKLQILKPEAKMNEGFEWQLKLYQAMGYEVDTSSAIYKQYRLQKVTEKYPELQNLPQELFAVDPTTVSQGLKDEVLYKCRKCRRSLFRSSSILDHREGSGPIAFAHKRMTPSSMLTTGRQAQCTSYFIEPVQWMESALLGVMDGQLLCPKCSAKLGSFNWYGEQCSCGRWITPAFQIHKNRVDEMKILPVLGSQTGKI

SEQ ID NO: 25732 - protein, 137 aa, Homo sapiens
  Payload ID: 5100
  Gene Symbol: DUSP12
  Gene Name: dual specificity phosphatase 12
  ENSP ID: ENSP00000476528
MLEAPGPSDGCELSNPSASRVSCAGQMLEVQPGLYFGGAAAVAEPDHLREAGITAVLTVDSEEPSFKAGPGVEDLWRLFVPALDKPETDLLSHLDRCVAFIGQARAEGRAVLVHWSLFQSCRSQSKCGHNNCFSHED

SEQ ID NO: 25733 - protein, 137 aa, Homo sapiens; identical to SEQ ID NO: 25732
  Payload ID: 5100
  Gene Symbol: DUSP12
  Gene Name: dual specificity phosphatase 12
  ENSP ID: ENSP00000476912

SEQ ID NO: 25734 - protein, 82 aa, Homo sapiens
  Payload ID: 5100
  Gene Symbol: DUSP12
  Gene Name: dual specificity phosphatase 12
  ENSP ID: ENSP00000477122
MLEVQPGLYFGGAAAVAEPDHLREAGITAVLTVDSEEPSFKAGPGVEDLWRLFVPALDKPETDLLSHLDRVLLCHPGYSVVA

SEQ ID NO: 25735 - protein, 60 aa, Homo sapiens
  Payload ID: 5101
  Gene Symbol: DUSP13
  Gene Name: dual specificity phosphatase 13
  Uniprot ID: Q6B8I1
  ENSP ID: ENSP00000311051
MAETSLPELGGEDKATPCPSILELEELLRAGKSSCSRVDEVWPNLFIGDANSIKCAETGG

SEQ ID NO: 25736 - protein, 248 aa, Homo sapiens
  Payload ID: 5101
  Gene Symbol: DUSP13
  Gene Name: dual specificity phosphatase 13
  Uniprot ID: Q9UII6
  ENSP ID: ENSP00000361785
MAETSLPELGGEDKATPCPSILELEELLRAGKSSCSRVDEVWPNLFIGDAMDSLQKQDLRRPKIHGAVQASPYQPPTLASLQRLLWVRQAATLNHIDEVWPSLFLGDAYAARDKSKLIQLGITHVVNAAAGKFQVDTGAKFYRGMSLEYYGIEADDNPFFDLSVYFLPVARYIRAALSVPQGRVLVHCAMGVSRSATLVLAFLMICENMTLVEAIQTVQAHRNICPNSGFLRQLQVLDNRLGRETGRF

SEQ ID NO: 25737 - protein, 188 aa, Homo sapiens
  Payload ID: 5101
  Gene Symbol: DUSP13
  Gene Name: dual specificity phosphatase 13
  Uniprot ID: Q6B8I1
  ENSP ID: ENSP00000361787
MAETSLPELGGEDKATPCPSILELEELLRAGKSSCSRVDEVWPNLFIGDAATANNRFELWKLGITHVLNAAHKGLYCQGGPDFYGSSVSYLGVPAHDLPDFDISAYFSSAADFIHRALNTPGAKVLVHCVVGVSRSATLVLAYLMLHQRLSLRQAVITVRQHRWVFPNRGFLHQLCRLDQQLRGAGQS

SEQ ID NO: 25738 - protein, 147 aa, Homo sapiens
  Payload ID: 5101
  Gene Symbol: DUSP13
  Gene Name: dual specificity phosphatase 13
  ENSP ID: ENSP00000434041
MDSLQKQDLRRPKIHGAVQASPYQPPTLASLQRLLWVRQAATLNHIDEVWPSLFLGDAYAARDKSKLIQLGITHVVNAAAGRVLVHCAMGVSRSATLVLAFLMICENMTLVEAIQTVQAHRNICPNSGFLRQLQVLDNRLGRETGRF

SEQ ID NO: 25739 - protein, 198 aa, Homo sapiens
  Payload ID: 5101
  Gene Symbol: DUSP13
  Gene Name: dual specificity phosphatase 13
  Uniprot ID: Q9UII6
  ENSP ID: ENSP00000436312
MDSLQKQDLRRPKIHGAVQASPYQPPTLASLQRLLWVRQAATLNHIDEVWPSLFLGDAYAARDKSKLIQLGITHVVNAAAGKFQVDTGAKFYRGMSLEYYGIEADDNPFFDLSVYFLPVARYIRAALSVPQGRVLVHCAMGVSRSATLVLAFLMICENMTLVEAIQTVQAHRNICPNSGFLRQLQVLDNRLGRETGRF

SEQ ID NO: 25740 - protein, 198 aa, Homo sapiens; identical to SEQ ID NO: 25739
  Payload ID: 5101
  Gene Symbol: DUSP13
  Gene Name: dual specificity phosphatase 13
  Uniprot ID: Q9UII6
  ENSP ID: ENSP00000444580

SEQ ID NO: 25741 - protein, 67 aa, Homo sapiens
  Payload ID: 5101
  Gene Symbol: DUSP13
  Gene Name: dual specificity phosphatase 13
  Uniprot ID: Q6B8I1
  ENSP ID: ENSP00000452702
MAETSLPELGGEDKATPCPSILELEELLRAGKSSCSRVDEVWPNLFIGDAAGPYSLPWGSATLPPWH

SEQ ID NO: 25742 - protein, 166 aa, Homo sapiens
  Payload ID: 5101
  Gene Symbol: DUSP13
  Gene Name: dual specificity phosphatase 13
  Uniprot ID: Q6B8I1
  ENSP ID: ENSP00000474298
MAETSLPELGGEDKATPCPSILELEELLRAGKSSCSRVDEVWPNLFIGDAATANNRFELWKLGITHVLNAAHKGLYCQGGPDFYGSSVSYLGVPAHDLPDFDISAYFSSAADFIHRALNTPGELVLTPCHGALPLCHPGTDPAGAAGGSGPGGHTEDGGSPAWGRP

SEQ ID NO: 25743 - protein, 92 aa, Homo sapiens
  Payload ID: 5101
  Gene Symbol: DUSP13
  Gene Name: dual specificity phosphatase 13
  Uniprot ID: Q6B8I1
  ENSP ID: ENSP00000474689
MAETSLPELGGEDKATPCPSILELEELLRAGKSSCSRVDEVWPNLFIGDARGPGTASLLVPWLGRHQVPFLPSPGPRQTTALSCGSWASPTC

SEQ ID NO: 25744 - protein, 334 aa, Homo sapiens
  Payload ID: 5101
  Gene Symbol: DUSP13
  Gene Name: dual specificity phosphatase 13
  ENSP ID: ENSP00000475626
MPQVGGRPLSHLERSQWGMRRTAWSSLPPCPTASHWVSLAKPAASWVPVSFSGPGTAYQREKMFFPVCTFPSHWSRGSGAVSKDRTPSPTRHQAHILVPLKIQLRRVPDSFSQQMPETSYLTRVGPDIQCWPESWGMDSLQKQDLRRPKIHGAVQASPYQPPTLASLQRLLWVRQAATLNHIDEVWPSLFLGDAYAARDKSKLIQLGITHVVNAAAGKFQVDTGAKFYRGMSLEYYGIEADDNPFFDLSVYFLPVARYIRAALSVPQGRVLVHCAMGVSRSATLVLAFLMICENMTLVEAIQTVQAHRNICPNSGFLRQLQVLDNRLGRETGRF

SEQ ID NO: 25745 - protein, 220 aa, Homo sapiens
  Payload ID: 5101
  Gene Symbol: DUSP13
  Gene Name: dual specificity phosphatase 13
  ENSP ID: ENSP00000475675
MPETSYLTRVGPDIQCWPESWGMDSLQKQDLRRPKIHGAVQASPYQPPTLASLQRLLWVRQAATLNHIDEVWPSLFLGDAYAARDKSKLIQLGITHVVNAAAGKFQVDTGAKFYRGMSLEYYGIEADDNPFFDLSVYFLPVARYIRAALSVPQGRVLVHCAMGVSRSATLVLAFLMICENMTLVEAIQTVQAHRNICPNSGFLRQLQVLDNRLGRETGRF

SEQ ID NO: 25746 - protein, 193 aa, Homo sapiens
  Payload ID: 5101
  Gene Symbol: DUSP13
  Gene Name: dual specificity phosphatase 13
  ENSP ID: ENSP00000475732
MAETSLPELGGEDKATPCPSILELEELLRAGKSSCSRVDEVWPNLFIGDAQGPGALCGGREPLCHAGPGLPHAAPAAVPAPGGDHREAAPMGLPQPRLPAPALQAGPATAGCRPELRGQSWSLLPAMGLCHFATLALILLVLLEALAQADTQKMVEAQRGVGPRACYSIWLLLAPTPPLSHCLQSPQKQHQVC

SEQ ID NO: 25747 - protein, 198 aa, Homo sapiens; identical to SEQ ID NO: 25739
  Payload ID: 5101
  Gene Symbol: DUSP13
  Gene Name: dual specificity phosphatase 13
  Uniprot ID: Q9UII6
  ENSP ID: ENSP00000475801

SEQ ID NO: 25748 - protein, 260 aa, Homo sapiens
  Payload ID: 5101
  Gene Symbol: DUSP13
  Gene Name: dual specificity phosphatase 13
  ENSP ID: ENSP00000475851
LGGEDKATPCPSILELEELLRAGKSSCSRVDEVWPNLFIGDAQGPGALCGGREPLCHAGPGLPHAAPAAVPAPGGDHREAAPMGLPQPRLPAPALQAGPATAGCRPELRGQSWSLLPAMGLCHFATLALILLVLLEALAQADTQKMKQHQVCGDRRLKASSTNCPSEKCTAWARYSHRMDSLQKQDLRRPKIHGAVQASPYQPPTLASLQRLLWVRQAATLNHIDEVWPSLFLGDAYAARDKSKLIQLGITHVVNAAAGK

SEQ ID NO: 25749 - protein, 198 aa, Homo sapiens
  Payload ID: 5102
  Gene Symbol: DUSP14
  Gene Name: dual specificity phosphatase 14
  Uniprot ID: O95147
  ENSP ID: ENSP00000477653
MSSRGHSTLPRTLMAPRMISEGDIGGIAQITSSLFLGRGSVASNRHLLQARGITCIVNATIEIPNFNWPQFEYVKVPLADMPHAPIGLYFDTVADKIHSVSRKHGATLVHCAAGVSRSATLCIAYLMKFHNVCLLEAYNWVKARRPVIRPNVGFWRQLIDYERQLFGKSTVKMVQTPYGIVPDVYEKESRHLMPYWGI

SEQ ID NO: 25750 - protein, 198 aa, Homo sapiens; identical to SEQ ID NO: 25749
  Payload ID: 5102
  Gene Symbol: DUSP14
  Gene Name: dual specificity phosphatase 14
  Uniprot ID: O95147
  ENSP ID: ENSP00000478406

SEQ ID NO: 25751 - protein, 198 aa, Homo sapiens; identical to SEQ ID NO: 25749
  Payload ID: 5102
  Gene Symbol: DUSP14
  Gene Name: dual specificity phosphatase 14
  Uniprot ID: O95147
  ENSP ID: ENSP00000478595

SEQ ID NO: 25752 - protein, 198 aa, Homo sapiens; identical to SEQ ID NO: 25749
  Payload ID: 5102
  Gene Symbol: DUSP14
  Gene Name: dual specificity phosphatase 14
  Uniprot ID: O95147
  ENSP ID: ENSP00000484091

SEQ ID NO: 25753 - protein, 198 aa, Homo sapiens; identical to SEQ ID NO: 25749
  Payload ID: 5102
  Gene Symbol: DUSP14
  Gene Name: dual specificity phosphatase 14
  ENSP ID: ENSP00000487886

SEQ ID NO: 25754 - protein, 198 aa, Homo sapiens; identical to SEQ ID NO: 25749
  Payload ID: 5102
  Gene Symbol: DUSP14
  Gene Name: dual specificity phosphatase 14
  ENSP ID: ENSP00000488882

SEQ ID NO: 25755 - protein, 295 aa, Homo sapiens
  Payload ID: 5103
  Gene Symbol: DUSP15
  Gene Name: dual specificity phosphatase 15
  Uniprot ID: Q9H1R2
  ENSP ID: ENSP00000278979
MTEGVLPGLYLGNFIDAKDLDQLGRNKITHIISIHESPQPLLQDITYLRIPVADTPEVPIKKHFKECINFIHCCRLNGGNCLVHCFAGISRSTTIVTAYVMTVTGLGWRDVLEAIKATRPIANPNPGFRQQLEEFGWASSQKGARHRTSKTSGAQCPPMTSATCLLAARVALLSAALVREATGRTAQRCRLSPRAAAERLLGPPPHVAAGWSPDPKYQICLCFGEEDPGPTQHPKEQLIMADVQVQLRPGSSSCTLSASTERPDGSSTPGNPDGITHLQCSCLHPKRAASSSCTR

SEQ ID NO: 25756 - protein, 235 aa, Homo sapiens
  Payload ID: 5103
  Gene Symbol: DUSP15
  Gene Name: dual specificity phosphatase 15
  Uniprot ID: Q9H1R2
  ENSP ID: ENSP00000341658
MGNGMTKVLPGLYLGNFIDAKDLDQLGRNKITHIISIHESPQPLLQDITYLRIPVADTPEVPIKKHFKECINFIHCCRLNGGNCLVHCFAGISRSTTIVTAYVMTVTGLGWRDVLEAIKATRPIANPNPGFRQQLEEFGWASSQKLRRQLEERFGESPFRDEEELRALLPLCKRCRQGSATSASSAGPHSAASEGTVQRLVPRTPREAHRPLPLLARVKQTFSCLPRCLSRKGGK

SEQ ID NO: 25757 - protein, 232 aa, Homo sapiens
  Payload ID: 5103
  Gene Symbol: DUSP15
  Gene Name: dual specificity phosphatase 15
  Uniprot ID: Q9H1R2
  ENSP ID: ENSP00000365133
MTEGVLPGLYLGNFIDAKDLDQLGRNKITHIISIHESPQPLLQDITYLRIPVADTPEVPIKKHFKECINFIHCCRLNGGNCLVHCFAGISRSTTIVTAYVMTVTGLGWRDVLEAIKATRPIANPNPGFRQQLEEFGWASSQKLRRQLEERFGESPFRDEEELRALLPLCKRCRQGSATSASSAGPHSAASEGTVQRLVPRTPREAHRPLPLLARVKQTFSCLPRCLSRKGGK

SEQ ID NO: 25758 - protein, 132 aa, Homo sapiens
  Payload ID: 5103
  Gene Symbol: DUSP15
  Gene Name: dual specificity phosphatase 15
  Uniprot ID: Q9H1R2
  ENSP ID: ENSP00000381157
MTVTGLGWRDVLEAIKATRPIANPNPGFRQQLEEFGWASSQKLRRQLEERFGESPFRDEEELRALLPLCKRCRQGSATSASSAGPHSAASEGTVQRLVPRTPREAHRPLPLLARVKQTFSCLPRCLSRKGGK

SEQ ID NO: 25759 - protein, 132 aa, Homo sapiens; identical to SEQ ID NO: 25758
  Payload ID: 5103
  Gene Symbol: DUSP15
  Gene Name: dual specificity phosphatase 15
  Uniprot ID: Q9H1R2
  ENSP ID: ENSP00000381158

SEQ ID NO: 25760 - protein, 76 aa, Homo sapiens
  Payload ID: 5103
  Gene Symbol: DUSP15
  Gene Name: dual specificity phosphatase 15
  ENSP ID: ENSP00000390355
MGNGMTKMPKTWISWAEIRSHTSSLSMSHPSLCCRISPTFASRSLIPLRYPSKSTSKNVSTSSTAAALMGGTALCT

SEQ ID NO: 25761 - protein, 93 aa, Homo sapiens
  Payload ID: 5103
  Gene Symbol: DUSP15
  Gene Name: dual specificity phosphatase 15
  ENSP ID: ENSP00000397486
  MOD_RES (1)..(1): Any amino acid
XTRLPPGGWSPDPKYQICLCFGEEDPGPTQHPKEQLIMADVQVQLRPGSSSCTLSASTERPDGSSTPGNPDGITHLQCSCLHPKRAASSSCTR

SEQ ID NO: 25762 - protein, 132 aa, Homo sapiens; identical to SEQ ID NO: 25758
  Payload ID: 5103
  Gene Symbol: DUSP15
  Gene Name: dual specificity phosphatase 15
  Uniprot ID: Q9H1R2
  ENSP ID: ENSP00000419818

SEQ ID NO: 25763 - protein, 143 aa, Homo sapiens
  Payload ID: 5104
  Gene Symbol: DUSP16
  Gene Name: dual specificity phosphatase 16
  Uniprot ID: Q9BY84
  ENSP ID: ENSP00000228862
MAHEMIGTQIVTERLVALLESGTEKVLLIDSRPFVEYNTSHILEAININCSKLMKRRLQQDKVLITELIQHSAKHKVDIDCSQKVVVYDQSSQDVASLSSDCFLTVLLGKLEKSFNSVHLLAGADAAEWDWLCVKCQQYLSKA

SEQ ID NO: 25764 - protein, 665 aa, Homo sapiens
  Payload ID: 5104
  Gene Symbol: DUSP16
  Gene Name: dual specificity phosphatase 16
  Uniprot ID: Q9BY84
  ENSP ID: ENSP00000298573
MAHEMIGTQIVTERLVALLESGTEKVLLIDSRPFVEYNTSHILEAININCSKLMKRRLQQDKVLITELIQHSAKHKVDIDCSQKVVVYDQSSQDVASLSSDCFLTVLLGKLEKSFNSVHLLAGGFAEFSRCFPGLCEGKSTLVPTCISQPCLPVANIGPTRILPNLYLGCQRDVLNKELMQQNGIGYVLNASNTCPKPDFIPESHFLRVPVNDSFCEKILPWLDKSVDFIEKAKASNGCVLVHCLAGISRSATIAIAYIMKRMDMSLDEAYRFVKEKRPTISPNFNFLGQLLDYEKKIKNQTGASGPKSKLKLLHLEKPNEPVPAVSEGGQKSETPLSPPCADSATSEAAGQRPVHPASVPSVPSVQPSLLEDSPLVQALSGLHLSADRLEDSNKLKRSFSLDIKSVSYSASMAASLHGFSSSEDALEYYKPSTTLDGTNKLCQFSPVQELSEQTPETSPDKEEASIPKKLQTARPSDSQSKRLHSVRTSSSGTAQRSLLSPLHRSGSVEDNYHTSFLFGLSTSQQHLTKSAGLGLKGWHSDILAPQTSTPSLTSSWYFATESSHFYSASAIYGGSASYSAYSCSQLPTCGDQVYSVRRRQKPSDRADSRRSWHEESPFEKQFKRRSCQMEFGESIMSENRSREELGKVGSQSSFSGSMEIIEVS

SEQ ID NO: 25765 - protein, 6 aa, Homo sapiens
  Payload ID: 5104
  Gene Symbol: DUSP16
  Gene Name: dual specificity phosphatase 16
  ENSP ID: ENSP00000441250
MAHEMI

SEQ ID NO: 25766 - protein, 25 aa, Homo sapiens
  Payload ID: 5104
  Gene Symbol: DUSP16
  Gene Name: dual specificity phosphatase 16
  ENSP ID: ENSP00000443039
MAHEMIGTQIVTERLVALLESGTEK

SEQ ID NO: 25767 - protein, 25 aa, Homo sapiens
  Payload ID: 5104
  Gene Symbol: DUSP16
  Gene Name: Dual specificity phosphatase 16
  ENSP ID: ENSP00000485919
MAHEMIGTQIVTERLVALLESGTEK

SEQ ID NO: 25768 - protein, 143 aa, Homo sapiens; identical to SEQ ID NO: 25763
  Payload ID: 5104
  Gene Symbol: DUSP16
  Gene Name: Dual specificity phosphatase 16
  ENSP ID: ENSP00000487034

SEQ ID NO: 25769 - protein, 6 aa, Homo sapiens
  Payload ID: 5104
  Gene Symbol: DUSP16
  Gene Name: Dual specificity phosphatase 16
  ENSP ID: ENSP00000487493
MAHEMI

SEQ ID NO: 25770 - protein, 665 aa, Homo sapiens; identical to SEQ ID NO: 25764
  Payload ID: 5104
  Gene Symbol: DUSP16
  Gene Name: Dual specificity phosphatase 16
  ENSP ID: ENSP00000487512

SEQ ID NO: 25771 - protein, 188 aa, Homo sapiens
  Payload ID: 5105
  Gene Symbol: DUSP18
  Gene Name: dual specificity phosphatase 18
  Uniprot ID: Q8NEJ0
  ENSP ID: ENSP00000333917
MTAPSCAFPVQFRQPSVSGLSQITKSLYISNGVAANNKLMLSSNQITMVINVSVEVVNTLYEDIQYMQVPVADSPNSRLCDFFDPIADHIHSVEMKQGRTLLHCAAGVSRSAALCLAYLMKYHAMSLLDAHTWTKSCRPIIRPNSGFWEQLIHYEFQLFGKNTVHMVSSPVGMIPDIYEKEVRLMIPL

SEQ ID NO: 25772 - protein, 163 aa, Homo sapiens
  Payload ID: 5105
  Gene Symbol: DUSP18
  Gene Name: dual specificity phosphatase 18
  ENSP ID: ENSP00000340795
MTAPSCAFPVQFRQPSVSGLSQITKSLYISNGVAANNKLMLSSNQITMVINVSVEVVNTLYEDIQYMQVPVADSPNSRLCDFFDPIADHIHSVEMKQGRTLLHCAAGVSRSAALCLAYLMKYHAMSLLDAHTWTKSCRPIIRPNSGFWEQLIHYEFQLFGKNT

SEQ ID NO: 25773 - protein, 188 aa, Homo sapiens; identical to SEQ ID NO: 25771
  Payload ID: 5105
  Gene Symbol: DUSP18
  Gene Name: dual specificity phosphatase 18
  Uniprot ID: Q8NEJ0
  ENSP ID: ENSP00000366291

SEQ ID NO: 25774 - protein, 117 aa, Homo sapiens
  Payload ID: 5105
  Gene Symbol: DUSP18
  Gene Name: dual specificity phosphatase 18
  ENSP ID: ENSP00000384946
MTAPSCAFPVQFRQPSVSGLSQITKSLYISNGVAANNKLMLSSNQITMVINVSVERGDEAGPYFAALCCWCEPLSCPVPRLPHEVPRHVPAGRPHVDQVMPAHHPTQQRLLGAAHPL

SEQ ID NO: 25775 - protein, 188 aa, Homo sapiens; identical to SEQ ID NO: 25771
  Payload ID: 5105
  Gene Symbol: DUSP18
  Gene Name: dual specificity phosphatase 18
  Uniprot ID: Q8NEJ0
  ENSP ID: ENSP00000385463

SEQ ID NO: 25776 - protein, 188 aa, Homo sapiens; identical to SEQ ID NO: 25771
  Payload ID: 5105
  Gene Symbol: DUSP18
  Gene Name: dual specificity phosphatase 18
  Uniprot ID: Q8NEJ0
  ENSP ID: ENSP00000386063

SEQ ID NO: 25777 - protein, 6 aa, Homo sapiens
  Payload ID: 5105
  Gene Symbol: DUSP18
  Gene Name: dual specificity phosphatase 18
  ENSP ID: ENSP00000387680
RLMIPL

SEQ ID NO: 25778 - protein, 11 aa, Homo sapiens
  Payload ID: 5105
  Gene Symbol: DUSP18
  Gene Name: dual specificity phosphatase 18
  ENSP ID: ENSP00000403378
MTAPSCAFPVQ

SEQ ID NO: 25779 - protein, 23 aa, Homo sapiens
  Payload ID: 5105
  Gene Symbol: DUSP18
  Gene Name: dual specificity phosphatase 18
  ENSP ID: ENSP00000414825
  MOD_RES (1)..(1): Any amino acid
XVSSPVGMIPDIYEKEVRLMIPL

SEQ ID NO: 25780 - protein, 166 aa, Homo sapiens
  Payload ID: 5106
  Gene Symbol: DUSP19
  Gene Name: dual specificity phosphatase 19
  Uniprot ID: Q8WTR2
  ENSP ID: ENSP00000343905
MYSLNQEIKAFSRNNLRKQCTRVTTLTGKKIIETWKDARIHVVEEVEPSSGGGCGYVQDLSSDLQVGVIKPWLLLGSQDAAHDLDTLKKNKDGVVLVHCNAGVSRAAAIVIGFLMNSEQTSFTSAFSLVKNARPSICPNSGFMEQLRTYQEGKESNKCDRIQENSS

SEQ ID NO: 25781 - protein, 217 aa, Homo sapiens
  Payload ID: 5106
  Gene Symbol: DUSP19
  Gene Name: dual specificity phosphatase 19
  Uniprot ID: Q8WTR2
  ENSP ID: ENSP00000346160
MYSLNQEIKAFSRNNLRKQCTRVTTLTGKKIIETWKDARIHVVEEVEPSSGGGCGYVQDLSSDLQVGVIKPWLLLGSQDAAHDLDTLKKNKVTHILNVAYGVENAFLSDFTYKSISILDLPETNILSYFPECFEFIEEAKRKDGVVLVHCNAGVSRAAAIVIGFLMNSEQTSFTSAFSLVKNARPSICPNSGFMEQLRTYQEGKESNKCDRIQENSS

SEQ ID NO: 25782 - protein, 314 aa, Homo sapiens
  Payload ID: 5107
  Gene Symbol: DUSP2
  Gene Name: dual specificity phosphatase 2
  Uniprot ID: Q05923
  ENSP ID: ENSP00000288943
MGLEAARELECAALGTLLRDPREAERTLLLDCRPFLAFCRRHVRAARPVPWNALLRRRARGPPAAVLACLLPDRALRTRLVRGELARAVVLDEGSASVAELRPDSPAHVLLAALLHETRAGPTAVYFLRGGFDGFQGCCPDLCSEAPAPALPPTGDKTSRSDSRAPVYDQGGPVEILPYLFLGSCSHSSDLQGLQACGITAVLNVSASCPNHFEGLFRYKSIPVEDNQMVEISAWFQEAIGFIDWVKNSGGRVLVHCQAGISRSATICLAYLMQSRRVRLDEAFDFVKQRRGVISPNFSFMGQLLQFETQVLCH

SEQ ID NO: 25783 - protein, 190 aa, Homo sapiens
  Payload ID: 5108
  Gene Symbol: DUSP21
  Gene Name: dual specificity phosphatase 21
  Uniprot ID: Q9H596
  ENSP ID: ENSP00000343244
MTASASSFSSSQGVQQPSIYSFSQITRSLFLSNGVAANDKLLLSSNRITAIVNASVEVVNVFFEGIQYIKVPVTDARDSRLYDFFDPIADLIHTIDMRQGRTLLHCMAGVSRSASLCLAYLMKYHSMSLLDAHTWTKSRRPIIRPNNGFWEQLINYEFKLFNNNTVRMINSPVGNIPDIYEKDLRMMISM

SEQ ID NO: 25784 - protein, 184 aa, Homo sapiens
  Payload ID: 5109
  Gene Symbol: DUSP22
  Gene Name: dual specificity phosphatase 22
  Uniprot ID: Q9NRW4
  ENSP ID: ENSP00000345281
MGNGMNKILPGLYIGNFKDARDAEQLSKNKVTHILSVHDSARPMLEGVKYLCIPAADSPSQNLTRHFKESIKFIHECRLRGESCLVHCLAGVSRSVTLVIAYIMTVTDFGWEDALHTVRAGRSCANPNVGFQRQLQEFEKHEVHQYRQWLKEEYGESPLQDAEEAKNILAAPGILKFWAFLRRL

SEQ ID NO: 25785 - protein, 205 aa, Homo sapiens
  Payload ID: 5109
  Gene Symbol: DUSP22
  Gene Name: dual specificity phosphatase 22
  Uniprot ID: Q9NRW4
  ENSP ID: ENSP00000397459
MGNGMNKILPGLYIGNFKDARDAEQLSKNKVTHILSVHDSARPMLEGVKYLCIPAADSPSQNLTRHFKESIKFIHECRLRGESCLVHCLAGVSRSVTLVIAYIMTVTDFGWEDALHTVRAGRSCANPNVGFQRQLQEFEKHEVHQYRQWLKEEYGESPLQDAEEAKNILGKYKEQGRTEPQPGARRWSSFPALAPLTYDNYTTET

SEQ ID NO: 25786 - protein, 46 aa, Homo sapiens
  Payload ID: 5109
  Gene Symbol: DUSP22
  Gene Name: dual specificity phosphatase 22
  ENSP ID: ENSP00000474000
MTVTDFGWEDALHTVRAGRSCANPNVGFQRQLQEFEKHEVHQVSSS

SEQ ID NO: 25787 - protein, 75 aa, Homo sapiens
  Payload ID: 5109
  Gene Symbol: DUSP22
  Gene Name: dual specificity phosphatase 22
  ENSP ID: ENSP00000474082
MLEGVKYLCIPAADSPSQNLTRHFKESIKFIHECRLRGESCLVHCLAGVSRSVTLVIAYIMTVTDFGWEDALHTV

SEQ ID NO: 25788 - protein, 54 aa, Homo sapiens
  Payload ID: 5109
  Gene Symbol: DUSP22
  Gene Name: dual specificity phosphatase 22
  ENSP ID: ENSP00000474330
MGNGMNKILPGLYIGNFKDARDAEQLSKNKVTHILSVHDSARPMLEDKTFQRKY

SEQ ID NO: 25789 - protein, 18 aa, Homo sapiens
  Payload ID: 5109
  Gene Symbol: DUSP22
  Gene Name: dual specificity phosphatase 22
  ENSP ID: ENSP00000474450
MPCTPCVLGDPVPTPTWA

SEQ ID NO: 25790 - protein, 102 aa, Homo sapiens
  Payload ID: 5109
  Gene Symbol: DUSP22
  Gene Name: dual specificity phosphatase 22
  ENSP ID: ENSP00000474505
MTVTDFGWEDALHTVRAGRSCANPNVGFQRQLQEFEKHEVHQYRQWLKEEYGESPLQDAEEAKNILGKYKEQGRTEPQPGARRWSSFPALAPLTYDNYTTET

SEQ ID NO: 25791 - protein, 102 aa, Homo sapiens; identical to SEQ ID NO: 25790
  Payload ID: 5109
  Gene Symbol: DUSP22
  Gene Name: dual specificity phosphatase 22
  ENSP ID: ENSP00000474646

SEQ ID NO: 25792 - protein, 102 aa, Homo sapiens; identical to SEQ ID NO: 25790
  Payload ID: 5109
  Gene Symbol: DUSP22
  Gene Name: dual specificity phosphatase 22
  ENSP ID: ENSP00000474827

SEQ ID NO: 25793 - protein, 46 aa, Homo sapiens; identical to SEQ ID NO: 25786
  Payload ID: 5109
  Gene Symbol: DUSP22
  Gene Name: dual specificity phosphatase 22
  ENSP ID: ENSP00000475061

SEQ ID NO: 25794 - protein, 54 aa, Homo sapiens; identical to SEQ ID NO: 25788
  Payload ID: 5109
  Gene Symbol: DUSP22
  Gene Name: dual specificity phosphatase 22
  ENSP ID: ENSP00000475106

SEQ ID NO: 25795 - protein, 150 aa, Homo sapiens
  Payload ID: 5110
  Gene Symbol: DUSP23
  Gene Name: dual specificity phosphatase 23
  Uniprot ID: Q9BVJ7
  ENSP ID: ENSP00000357087
MGVQPPNFSWVLPGRLAGLALPRLPAHYQFLLDLGVRHLVSLTERGPPHSDSCPGLTLHRLRIPDFCPPAPDQIDRFVQIVDEANARGEAVGVHCALGFGRTGTMLACYLVKERGLAAGDAIAEIRRLRPGSIETYEQEKAVFQFYQRTK

SEQ ID NO: 25796 - protein, 150 aa, Homo sapiens; identical to SEQ ID NO: 25795
  Payload ID: 5110
  Gene Symbol: DUSP23
  Gene Name: dual specificity phosphatase 23
  Uniprot ID: Q9BVJ7
  ENSP ID: ENSP00000357088

SEQ ID NO: 25797 - protein, 150 aa, Homo sapiens; identical to SEQ ID NO: 25795
  Payload ID: 5110
  Gene Symbol: DUSP23
  Gene Name: dual specificity phosphatase 23
  Uniprot ID: Q9BVJ7
  ENSP ID: ENSP00000357089

SEQ ID NO: 25798 - protein, 211 aa, Homo sapiens
  Payload ID: 5111
  Gene Symbol: DUSP26
  Gene Name: dual specificity phosphatase 26 (putative)
  Uniprot ID: Q9BV47
  ENSP ID: ENSP00000256261
MCPGNWLWASMTFMARFSRSSSRSPVRTRGTLEEMPTVQHPFLNVFELERLLYTGKTACNHADEVWPGLYLGDQDMANNRRELRRLGITHVLNASHSRWRGTPEAYEGLGIRYLGVEAHDSPAFDMSIHFQTAADFIHRALSQPGGKILVHCAVGVSRSATLVLAYLMLYHHLTLVEAIKKVKDHRGIIPNRGFLRQLLALDRRLRQGLEA

SEQ ID NO: 25799 - protein, 211 aa, Homo sapiens; identical to SEQ ID NO: 25798
  Payload ID: 5111
  Gene Symbol: DUSP26
  Gene Name: dual specificity phosphatase 26 (putative)
  Uniprot ID: Q9BV47
  ENSP ID: ENSP00000429176

SEQ ID NO: 25800 - protein, 145 aa, Homo sapiens
  Payload ID: 5111
  Gene Symbol: DUSP26
  Gene Name: dual specificity phosphatase 26 (putative)
  ENSP ID: ENSP00000430922
MCPGNWLWASMTFMARFSRSSSRSPVRTRGTLEEMPTVQHPFLNVFELERLLYTGKTACNHADEVWPGLYLGDQDMANNRRELRRLGITHVLNASHSRWRGTPEAYEGLGIRYLGVEAHDSPAFDMSIHFQTAADFIHRALSQPG

SEQ ID NO: 25801 - protein, 1158 aa, Homo sapiens
  Payload ID: 5112
  Gene Symbol: DUSP27
  Gene Name: dual specificity phosphatase 27 (putative)
  Uniprot ID: Q5VZP5
  ENSP ID: ENSP00000271385
MATRKDTEEEQVVPSEEDEANVRAVQAHYLRSPSPSQYSMVSDAETESIFMEPIHLSSAIAAKQIINEELKPPGVRADAECPGMLESAEQLLVEDLYNRVREKMDDTSLYNTPCVLDLQRALVQDRQEAPWNEVDEVWPNVFIAEKSVAVNKGRLKRLGITHILNAAHGTGVYTGPEFYTGLEIQYLGVEVDDFPEVDISQHFRKASEFLDEALLTYRGKVLVSSEMGISRSAVLVVAYLMIFHNMAILEALMTVRKKRAIYPNEGFLKQLRELNEKLMEEREEDYGREGGSAEAEEGEGTGSMLGARVHALTVEEEDDSASHLSGSSLGKATQASKPLTLIDEEEEEKLYEQWKKGQGLLSDKVPQDGGGWRSASSGQGGEELEDEDVERIIQEWQSRNERYQAEGYRRWGREEEKEEESDAGSSVGRRRRTLSESSAWESVSSHDIWVLKQQLELNRPDHGRRRRADSMSSESTWDAWNERLLEIEKEASRRYHAKSKREEAADRSSEAGSRVREDDEDSVGSEASSFYNFCSRNKDKLTALERWKIKRIQFGFHKKDLGAGDSSGEPGAEEAVGEKNPSDVSLTAYQAWKLKHQKKVGSENKEEVVELSKGEDSALAKKRQRRLELLERSRQTLEESQSMASWEADSSTASGSIPLSAFWSADPSVSADGDTTSVLSTQSHRSHLSQAASNIAGCSTSNPTTPLPNLPVGPGDTISIASIQNWIANVVSETLAQKQNEMLLLSRSPSVASMKAVPAASCLGDDQVSMLSGHSSSSLGGCLLPQSQARPSSDMQSVLSCNTTLSSPAESCRSKVRGTSKPIFSLFADNVDLKELGRKEKEMQMELREKMSEYKMEKLASDNKRSSLFKKKKVKEDEDDGVGDGDEDTDSAIGSFRYSSRSNSQKPETDTCSSLAVCDHYASGSRVGKEMDSSINKWLSGLRTEEKPPFQSDWSGSSRGKYTRSSLLRETESKSSSYKFSKSQSEEQDTSSYHEANGNSVRSTSRFSSSSTREGREMHKFSRSTYNETSSSREESPEPYFFRRTPESSEREESPEPQRPNWARSRDWEDVEESSKSDFSEFGAKRKFTQSFMRSEEEGEKERTENREEGRFASGRRSQYRRSTDREEEEEMDDEAIIAAWRRRQEETRTKLQKRRED

SEQ ID NO: 25802 - protein, 1158 aa, Homo sapiens; identical to SEQ ID NO: 25801
  Payload ID: 5112
  Gene Symbol: DUSP27
  Gene Name: dual specificity phosphatase 27 (putative)
  Uniprot ID: Q5VZP5
  ENSP ID: ENSP00000354483

SEQ ID NO: 25803 - protein, 1158 aa, Homo sapiens; identical to SEQ ID NO: 25801
  Payload ID: 5112
  Gene Symbol: DUSP27
  Gene Name: dual specificity phosphatase 27 (putative)
  Uniprot ID: Q5VZP5
  ENSP ID: ENSP00000404874

SEQ ID NO: 25804 - protein, 176 aa, Homo sapiens
  Payload ID: 5113
  Gene Symbol: DUSP28
  Gene Name: dual specificity phosphatase 28
  Uniprot ID: Q4G0W2
  ENSP ID: ENSP00000344235
MGPAEAGRRGAASPVPPPLVRVAPSLFLGSARAAGAEEQLARAGVTLCVNVSRQQPGPRAPGVAELRVPVFDDPAEDLLAHLEPTCAAMEAAVRAGGACLVYCKNGRSRSAAVCTAYLMRHRGLSLAKAFQMVKSARPVAEPNPGFWSQLQKYEEALQAQSCLQGEPPALGLGPEA

SEQ ID NO: 25805 - protein, 176 aa, Homo sapiens; identical to SEQ ID NO: 25804
  Payload ID: 5113
  Gene Symbol: DUSP28
  Gene Name: dual specificity phosphatase 28
  Uniprot ID: Q4G0W2
  ENSP ID: ENSP00000385885

SEQ ID NO: 25806 - protein, 141 aa, Homo sapiens
  Payload ID: 5113
  Gene Symbol: DUSP28
  Gene Name: dual specificity phosphatase 28
  ENSP ID: ENSP00000403899
  MOD_RES (1)..(1): Any amino acid
XEEQLARAGVTLCVNVSRQQPGPRAPGVAELRVPVFDDPAEDLLAHLEPTCAAMEAAVRAGGACLVYCKNGRSRSAAVCTAYLMRHRGLSLAKAFQMVKSARPVAEPNPGFWSQLQKYEEALQAQSCLQGEPPALGLGPEA

SEQ ID NO: 25807 - protein, 185 aa, Homo sapiens
  Payload ID: 5114
  Gene Symbol: DUSP3
  Gene Name: dual specificity phosphatase 3
  Uniprot ID: P51452
  ENSP ID: ENSP00000226004
MSGSFELSVQDLNDLLSDGSGCYSLPSQPCNEVTPRIYVGNASVAQDIPKLQKLGITHVLNAAEGRSFMHVNTNANFYKDSGITYLGIKANDTQEFNLSAYFERAADFIDQALAQKNGRVLVHCREGYSRSPTLVIAYLMMRQKMDVKSALSIVRQNREIGPNDGFLAQLCQLNDRLAKEGKLKP

SEQ ID NO: 25808 - protein, 112 aa, Homo sapiens
  Payload ID: 5114
  Gene Symbol: DUSP3
  Gene Name: dual specificity phosphatase 3
  ENSP ID: ENSP00000466069
  MOD_RES (1)..(1): Any amino acid
XAYFERAADFIDQALAQKNDGVSLLLPRLKSNGAILAHRNLHLPGRVLVHCREGYSRSPTLVIAYLMMRQKMDVKSALSIVRQNREIGPNDGFLAQLCQLNDRLAKEGKLKP

SEQ ID NO: 25809 - protein, 45 aa, Homo sapiens
  Payload ID: 5114
  Gene Symbol: DUSP3
  Gene Name: dual specificity phosphatase 3
  ENSP ID: ENSP00000467424
MSGSFELSVQDLNDLLSDGSGCYSLPSQPCNEVTPRIYVGNAKNV

SEQ ID NO: 25810 - protein, 132 aa, Homo sapiens
  Payload ID: 5114
  Gene Symbol: DUSP3
  Gene Name: dual specificity phosphatase 3
  ENSP ID: ENSP00000468604
  MOD_RES (1)..(1): Any amino acid
XSVAQDIPKLQKLGITHVLNAAEGRSFMHVNTNANFYKDSGITYLGIKANDTQEFNLSAYFERAADFIDQALAQKNDGVSLLLPRLKSNGAILAHRNLHLPGSSDSPASASRLSLPSSWDYRPGARPLPGRL

SEQ ID NO: 25811 - protein, 394 aa, Homo sapiens
  Payload ID: 5115
  Gene Symbol: DUSP4
  Gene Name: dual specificity phosphatase 4
  Uniprot ID: Q13115
  ENSP ID: ENSP00000240100
MVTMEELREMDCSVLKRLMNRDENGGGAGGSGSHGTLGLPSGGKCLLLDCRPFLAHSAGYILGSVNVRCNTIVRRRAKGSVSLEQILPAEEEVRARLRSGLYSAVIVYDERSPRAESLREDSTVSLVVQALRRNAERTDICLLKGGYERFSSEYPEFCSKTKALAAIPPPVPPSATEPLDLGCSSCGTPLHDQGGPVEILPFLYLGSAYHAARRDMLDALGITALLNVSSDCPNHFEGHYQYKCIPVEDNHKADISSWFMEAIEYIDAVKDCRGRVLVHCQAGISRSATICLAYLMMKKRVRLEEAFEFVKQRRSIISPNFSFMGQLLQFESQVLATSCAAEAASPSGPLRERGKTPATPTSQFVFSFPVSVGVHSAPSSLPYLHSPITTSPSC

SEQ ID NO: 25812 - protein, 303 aa, Homo sapiens
  Payload ID: 5115
  Gene Symbol: DUSP4
  Gene Name: dual specificity phosphatase 4
  Uniprot ID: Q13115
  ENSP ID: ENSP00000240101
MGRKVHSNGSQFAEHSRSPRRTGRDCKPVRAPSMALGVSQLAGRSRCLCSESQGGYERFSSEYPEFCSKTKALAAIPPPVPPSATEPLDLGCSSCGTPLHDQGGPVEILPFLYLGSAYHAARRDMLDALGITALLNVSSDCPNHFEGHYQYKCIPVEDNHKADISSWFMEAIEYIDAVKDCRGRVLVHCQAGISRSATICLAYLMMKKRVRLEEAFEFVKQRRSIISPNFSFMGQLLQFESQVLATSCAAEAASPSGPLRERGKTPATPTSQFVFSFPVSVGVHSAPSSLPYLHSPITTSPSC

SEQ ID NO: 25813 - protein, 384 aa, Homo sapiens
  Payload ID: 5116
  Gene Symbol: DUSP5
  Gene Name: dual specificity phosphatase 5
  Uniprot ID: Q16690
  ENSP ID: ENSP00000358596
MKVTSLDGRQLRKMLRKEAAARCVVLDCRPYLAFAASNVRGSLNVNLNSVVLRRARGGAVSARYVLPDEAARARLLQEGGGGVAAVVVLDQGSRHWQKLREESAARVVLTSLLACLPAGPRVYFLKGGYETFYSEYPECCVDVKPISQEKIESERALISQCGKPVVNVSYRPAYDQGGPVEILPFLYLGSAYHASKCEFLANLHITALLNVSRRTSEACATHLHYKWIPVEDSHTADISSHFQEAIDFIDCVREKGGKVLVHCEAGISRSPTICMAYLMKTKQFRLKEAFDYIKQRRSMVSPNFGFMGQLLQYESEILPSTPNPQPPSCQGEAAGSSLIGHLQTLSPDMQGAYCTFPASVLAPVPTHSTVSELSRSPVATATSC

SEQ ID NO: 25814 - protein, 381 aa, Homo sapiens
  Payload ID: 5117
  Gene Symbol: DUSP6
  Gene Name: dual specificity phosphatase 6
  Uniprot ID: Q16828
  ENSP ID: ENSP00000279488
MIDTLRPVPFASEMAISKTVAWLNEQLELGNERLLLMDCRPQELYESSHIESAINVAIPGIMLRRLQKGNLPVRALFTRGEDRDRFTRRCGTDTVVLYDESSSDWNENTGGESVLGLLLKKLKDEGCRAFYLEGGFSKFQAEFSLHCETNLDGSCSSSSPPLPVLGLGGLRISSDSSSDIESDLDRDPNSATDSDGSPLSNSQPSFPVEILPFLYLGCAKDSTNLDVLEEFGIKYILNVTPNLPNLFENAGEFKYKQIPISDHWSQNLSQFFPEAISFIDEARGKNCGVLVHCLAGISRSVTVTVAYLMQKLNLSMNDAYDIVKMKKSNISPNFNFMGQLLDFERTLGLSSPCDNRVPAQQLYFTTPSNQNVYQVDSLQST

SEQ ID NO: 25815 - protein, 235 aa, Homo sapiens
  Payload ID: 5117
  Gene Symbol: DUSP6
  Gene Name: dual specificity phosphatase 6
  Uniprot ID: Q16828
  ENSP ID: ENSP00000307835
MIDTLRPVPFASEMAISKTVAWLNEQLELGNERLLLMDCRPQELYESSHIESAINVAIPGIMLRRLQKGNLPVRALFTRGEDRDRFTRRCGTDTVVLYDESSSDWNENTGGESVLGLLLKKLKDEGCRAFYLEDEARGKNCGVLVHCLAGISRSVTVTVAYLMQKLNLSMNDAYDIVKMKKSNISPNFNFMGQLLDFERTLGLSSPCDNRVPAQQLYFTTPSNQNVYQVDSLQST

SEQ ID NO: 25816 - protein, 117 aa, Homo sapiens
  Payload ID: 5117
  Gene Symbol: DUSP6
  Gene Name: dual specificity phosphatase 6
  ENSP ID: ENSP00000446858
MIDTLRPVPFASEMAISKTVAWLNEQLELGNERLLLMDCRPQELYESSHIESAINVAIPGIMLRRLQKGNLPVRALFTRGEDRDRFTRRCGTDTVVLYDESSSDWNENTGGESVLGL

SEQ ID NO: 25817 - protein, 256 aa, Homo sapiens
  Payload ID: 5117
  Gene Symbol: DUSP6
  Gene Name: dual specificity phosphatase 6
  ENSP ID: ENSP00000449838
MIAFLVLAGGFSKFQAEFSLHCETNLDGSCSSSSPPLPVLGLGGLRISSDSSSDIESDLDRDPNSATDSDGSPLSNSQPSFPVEILPFLYLGCAKDSTNLDVLEEFGIKYILNVTPNLPNLFENAGEFKYKQIPISDHWSQNLSQFFPEAISFIDEARGKNCGVLVHCLAGISRSVTVTVAYLMQKLNLSMNDAYDIVKMKKSNISPNFNFMGQLLDFERTLGLSSPCDNRVPAQQLYFTTPSNQNVYQVDSLQST

SEQ ID NO: 25818 - protein, 419 aa, Homo sapiens
  Payload ID: 5118
  Gene Symbol: DUSP7
  Gene Name: dual specificity phosphatase 7
  Uniprot ID: Q16829
  ENSP ID: ENSP00000417183
MKNQLRGPPARAHMSTSGAAAAGGTRAGSEPGAGSGSGAGTGAGAATGAGAMPCKSAEWLQEELEARGGASLLLLDCRPHELFESSHIETAINLAIPGLMLRRLRKGNLPIRSIIPNHADKERFATRCKAATVLLYDEATAEWQPEPGAPASVLGLLLQKLRDDGCQAYYLQGGFNKFQTEYSEHCETNVDSSSSPSSSPPTSVLGLGGLRISSDCSDGESDRELPSSATESDGSPVPSSQPAFPVQILPYLYLGCAKDSTNLDVLGKYGIKYILNVTPNLPNAFEHGGEFTYKQIPISDHWSQNLSQFFPEAISFIDEARSKKCGVLVHCLAGISRSVTVTVAYLMQKMNLSLNDAYDFVKRKKSNISPNFNFMGQLLDFERTLGLSSPCDNHASSEQLYFSTPTNHNLFPLNTLEST

SEQ ID NO: 25819 - protein, 275 aa, Homo sapiens
  Payload ID: 5118
  Gene Symbol: DUSP7
  Gene Name: dual specificity phosphatase 7
  ENSP ID: ENSP00000418566
GGASLLLLDCRPHELFESSHIETAINLAIPGLMLRRLRKGNLPIRSIIPNHADKERFATRCKAATVLLYDEATAEWQPEPGAPASVLGLLLQKLRDDGCQAYYLQGGFNKFQTEYSEHCETNVDSSSSPSSSPPTSVLGLGGLRISSDCSDGESDRELPSSATESDGSPVPSSQPAFPVQILPYLYLGCAKDSTNLDVLGKYGIKYILNVTPNLPNAFEHGGEFTYKQIPISDHWSQNLSQFFPEAISFIGRCCVLGRGVWVHQGVCRTLGGAPA

SEQ ID NO: 25820 - protein, 625 aa, Homo sapiens
  Payload ID: 5119
  Gene Symbol: DUSP8
  Gene Name: dual specificity phosphatase 8
  Uniprot ID: Q13202
  ENSP ID: ENSP00000329539
MAGDRLPRKVMDAKKLASLLRGGPGGPLVIDSRSFVEYNSWHVLSSVNICCSKLVKRRLQQGKVTIAELIQPAARSQVEATEPQDVVVYDQSTRDASVLAADSFLSILLSKLDGCFDSVAILTGGFATFSSCFPGLCEGKPAALLPMSLSQPCLPVPSVGLTRILPHLYLGSQKDVLNKDLMTQNGISYVLNASNSCPKPDFICESRFMRVPINDNYCEKLLPWLDKSIEFIDKAKLSSCQVIVHCLAGISRSATIAIAYIMKTMGMSSDDAYRFVKDRRPSISPNFNFLGQLLEYERSLKLLAALQGDPGTPSGTPEPPPSPAAGAPLPRLPPPTSESAATGNAAAREGGLSAGGEPPAPPTPPATSALQQGLRGLHLSSDRLQDTNRLKRSFSLDIKSAYAPSRRPDGPGPPDPGEAPKLCKLDSPSGAALGLSSPSPDSPDAAPEARPRPRRRPRPPAGSPARSPAHSLGLNFGDAARQTPRHGLSALSAPGLPGPGQPAGPGAWAPPLDSPGTPSPDGPWCFSPEGAQGAGGVLFAPFGRAGAPGPGGGSDLRRREAARAEPRDARTGWPEEPAPETQFKRRSCQMEFEEGMVEGRARGEELAALGKQASFSGSVEVIEVS

SEQ ID NO: 25821 - protein, 625 aa, Homo sapiens; identical to SEQ ID NO: 25820
  Payload ID: 5119
  Gene Symbol: DUSP8
  Gene Name: dual specificity phosphatase 8
  Uniprot ID: Q13202
  ENSP ID: ENSP00000380530

SEQ ID NO: 25822 - protein, 625 aa, Homo sapiens; identical to SEQ ID NO: 25820
  Payload ID: 5119
  Gene Symbol: DUSP8
  Gene Name: dual specificity phosphatase 8
  Uniprot ID: Q13202
  ENSP ID: ENSP00000479946

SEQ ID NO: 25823 - protein, 625 aa, Homo sapiens; identical to SEQ ID NO: 25820
  Payload ID: 5119
  Gene Symbol: DUSP8
  Gene Name: dual specificity phosphatase 8
  Uniprot ID: Q13202
  ENSP ID: ENSP00000481775

SEQ ID NO: 25824 - protein, 625 aa, Homo sapiens; identical to SEQ ID NO: 25820
  Payload ID: 5119
  Gene Symbol: DUSP8
  Gene Name: dual specificity phosphatase 8
  Uniprot ID: Q13202
  ENSP ID: ENSP00000487017

SEQ ID NO: 25825 - protein, 625 aa, Homo sapiens; identical to SEQ ID NO: 25820
  Payload ID: 5119
  Gene Symbol: DUSP8
  Gene Name: dual specificity phosphatase 8
  Uniprot ID: Q13202
  ENSP ID: ENSP00000487093

SEQ ID NO: 25826 - protein, 384 aa, Homo sapiens
  Payload ID: 5120
  Gene Symbol: DUSP9
  Gene Name: dual specificity phosphatase 9
  Uniprot ID: Q99956
  ENSP ID: ENSP00000345853
MEGLGRSCLWLRRELSPPRPRLLLLDCRSRELYESARIGGALSVALPALLLRRLRRGSLSVRALLPGPPLQPPPPAPVLLYDQGGGRRRRGEAEAEAEEWEAESVLGTLLQKLREEGYLAYYLQGGFSRFQAECPHLCETSLAGRAGSSMAPVPGPVPVVGLGSLCLGSDCSDAESEADRDSMSCGLDSEGATPPPVGLRASFPVQILPNLYLGSARDSANLESLAKLGIRYILNVTPNLPNFFEKNGDFHYKQIPISDHWSQNLSRFFPEAIEFIDEALSQNCGVLVHCLAGVSRSVTVTVAYLMQKLHLSLNDAYDLVKRKKSNISPNFNFMGQLLDFERSLRLEERHSQEQGSGGQASAASNPPSFFTTPTSDGAFELAPT

SEQ ID NO: 25827 - protein, 384 aa, Homo sapiens; identical to SEQ ID NO: 25826
  Payload ID: 5120
  Gene Symbol: DUSP9
  Gene Name: dual specificity phosphatase 9
  Uniprot ID: Q99956
  ENSP ID: ENSP00000359186

SEQ ID NO: 25828 - protein, 220 aa, Homo sapiens
  Payload ID: 5121
  Gene Symbol: DUPD1
  Gene Name: dual specificity phosphatase and pro isomerase domain containing 1
  Uniprot ID: Q68J44
  ENSP ID: ENSP00000340609
MTSGEVKTSLKNAYSSAKRLSPKMEEEGEEEDYCTPGAFELERLFWKGSPQYTHVNEVWPKLYIGDEATALDRYRLQKAGFTHVLNAAHGRWNVDTGPDYYRDMDIQYHGVEADDLPTFDLSVFFYPAAAFIDRALSDDHSKILVHCVMGRSRSATLVLAYLMIHKDMTLVDAIQQVAKNRCVLPNRGFLKQLRELDKQLVQQRRRSQRQDGEEEDGREL

SEQ ID NO: 25829 - protein, 220 aa, Homo sapiens; identical to SEQ ID NO: 25828
  Payload ID: 5121
  Gene Symbol: DUPD1
  Gene Name: Dual specificity phosphatase and pro isomerase domain containing 1
  ENSP ID: ENSP00000487404

SEQ ID NO: 25830 - protein, 754 aa, Homo sapiens
  Payload ID: 5122
  Gene Symbol: DYRK1A
  Gene Name: dual-specificity tyrosine-(Y)-phosphorylation regulated kinase 1A
  Uniprot ID: Q13627
  ENSP ID: ENSP00000340373
MHTGGETSACKPSSVRLAPSFSFHAAGLQMAGQMPHSHQYSDRRQPNISDQQVSALSYSDQIQQPLTNQRRMPQTFRDPATAPLRKLSVDLIKTYKHINEVYYAKKKRRHQQGQGDDSSHKKERKVYNDGYDDDNYDYIVKNGEKWMDRYEIDSLIGKGSFGQVVKAYDRVEQEWVAIKIIKNKKAFLNQAQIEVRLLELMNKHDTEMKYYIVHLKRHFMFRNHLCLVFEMLSYNLYDLLRNTNFRGVSLNLTRKFAQQMCTALLFLATPELSIIHCDLKPENILLCNPKRSAIKIVDFGSSCQLGQRIYQYIQSRFYRSPEVLLGMPYDLAIDMWSLGCILVEMHTGEPLFSGANEVDQMNKIVEVLGIPPAHILDQAPKARKFFEKLPDGTWNLKKTKDGKREYKPPGTRKLHNILGVETGGPGGRRAGESGHTVADYLKFKDLILRMLDYDPKTRIQPYYALQHSFFKKTADEGTNTSNSVSTSPAMEQSQSSGTTSSTSSSSGGSSGTSNSGRARSDPTHQHRHSGGHFTAAVQAMDCETHSPQVRQQFPAPLGWSGTEAPTQVTVETHPVQETTFHVAPQQNALHHHHGNSSHHHHHHHHHHHHHGQQALGNRTRPRVYNSPTNSSSTQDSMEVGHSHHSMTSLSSSTTSSSTSSSSTGNQGNQAYQNRPVAANTLDFGQNGAMDVNLTVYSNPRQETGIAGHPTYQFSANTGPAHYMTEGHLTMRQGADREESPMTGVCVQQSPVASS

SEQ ID NO: 25831 - protein, 584 aa, Homo sapiens
  Payload ID: 5122
  Gene Symbol: DYRK1A
  Gene Name: dual-specificity tyrosine-(Y)-phosphorylation regulated kinase 1A
  Uniprot ID: Q13627
  ENSP ID: ENSP00000342690
MHTGGETSACKPSSVRLAPSFSFHAAGLQMAGQMPHSHQYSDRRQPNISDQQVSALSYSDQIQQPLTNQVMPDIVMLQRRMPQTFRDPATAPLRKLSVDLIKTYKHINEVYYAKKKRRHQQGQGDDSSHKKERKVYNDGYDDDNYDYIVKNGEKWMDRYEIDSLIGKGSFGQVVKAYDRVEQEWVAIKIIKNKKAFLNQAQIEVRLLELMNKHDTEMKYYIVHLKRHFMFRNHLCLVFEMLSYNLYDLLRNTNFRGVSLNLTRKFAQQMCTALLFLATPELSIIHCDLKPENILLCNPKRSAIKIVDFGSSCQLGQRIYQYIQSRFYRSPEVLLGMPYDLAIDMWSLGCILVEMHTGEPLFSGANEVDQMNKIVEVLGIPPAHILDQAPKARKFFEKLPDGTWNLKKTKDGKREYKPPGTRKLHNILGVETGGPGGRRAGESGHTVADYLKFKDLILRMLDYDPKTRIQPYYALQHSFFKKTADEGTNTSNSVSTSPAMEQSQSSGTTSSTSSSSGGSSGTSNSGRARSDPTHQHRHSGGHFTAAVQAMDCETHSPQVSSHVVHLLVSPAILRWSSTGCQVPLE

SEQ ID NO: 25832 - protein, 529 aa, Homo sapiens
  Payload ID: 5122
  Gene Symbol: DYRK1A
  Gene Name: dual-specificity tyrosine-(Y)-phosphorylation regulated kinase 1A
  Uniprot ID: Q13627
  ENSP ID: ENSP00000381929
MHTGGETSACKPSSVRLAPSFSFHAAGLQMAGQMPHSHQYSDRRQPNISDQQVSALSYSDQIQQPLTNQVMPDIVMLQRRMPQTFRDPATAPLRKLSVDLIKTYKHINEVYYAKKKRRHQQGQGDDSSHKKERKVYNDGYDDDNYDYIVKNGEKWMDRYEIDSLIGKGSFGQVVKAYDRVEQEWVAIKIIKNKKAFLNQAQIEVRLLELMNKHDTEMKYYIVHLKRHFMFRNHLCLVFEMLSYNLYDLLRNTNFRGVSLNLTRKFAQQMCTALLFLATPELSIIHCDLKPENILLCNPKRSAIKIVDFGSSCQLGQRIYQYIQSRFYRSPEVLLGMPYDLAIDMWSLGCILVEMHTGEPLFSGANEVDQMNKIVEVLGIPPAHILDQAPKARKFFEKLPDGTWNLKKTKDGKREYKPPGTRKLHNILGVETGGPGGRRAGESGHTVADYLKFKDLILRMLDYDPKTRIQPYYALQHSFFKKTADEGTNTSNSVSTSPAMEQSQSSGTTSSTSSSSGASAISCSSWLVRH

SEQ ID NO: 25833 - protein, 763 aa, Homo sapiens
  Payload ID: 5122
  Gene Symbol: DYRK1A
  Gene Name: dual-specificity tyrosine-(Y)-phosphorylation regulated kinase 1A
  Uniprot ID: Q13627
  ENSP ID: ENSP00000381932
MHTGGETSACKPSSVRLAPSFSFHAAGLQMAGQMPHSHQYSDRRQPNISDQQVSALSYSDQIQQPLTNQVMPDIVMLQRRMPQTFRDPATAPLRKLSVDLIKTYKHINEVYYAKKKRRHQQGQGDDSSHKKERKVYNDGYDDDNYDYIVKNGEKWMDRYEIDSLIGKGSFGQVVKAYDRVEQEWVAIKIIKNKKAFLNQAQIEVRLLELMNKHDTEMKYYIVHLKRHFMFRNHLCLVFEMLSYNLYDLLRNTNFRGVSLNLTRKFAQQMCTALLFLATPELSIIHCDLKPENILLCNPKRSAIKIVDFGSSCQLGQRIYQYIQSRFYRSPEVLLGMPYDLAIDMWSLGCILVEMHTGEPLFSGANEVDQMNKIVEVLGIPPAHILDQAPKARKFFEKLPDGTWNLKKTKDGKREYKPPGTRKLHNILGVETGGPGGRRAGESGHTVADYLKFKDLILRMLDYDPKTRIQPYYALQHSFFKKTADEGTNTSNSVSTSPAMEQSQSSGTTSSTSSSSGGSSGTSNSGRARSDPTHQHRHSGGHFTAAVQAMDCETHSPQVRQQFPAPLGWSGTEAPTQVTVETHPVQETTFHVAPQQNALHHHHGNSSHHHHHHHHHHHHHGQQALGNRTRPRVYNSPTNSSSTQDSMEVGHSHHSMTSLSSSTTSSSTSSSSTGNQGNQAYQNRPVAANTLDFGQNGAMDVNLTVYSNPRQETGIAGHPTYQFSANTGPAHYMTEGHLTMRQGADREESPMTGVCVQQSPVASS

SEQ ID NO: 25834 - protein, 46 aa, Homo sapiens
  Payload ID: 5122
  Gene Symbol: DYRK1A
  Gene Name: dual-specificity tyrosine-(Y)-phosphorylation regulated kinase 1A
  ENSP ID: ENSP00000398483
MHTGGETSACKPSSVRLAPSFSFHAAGLQMAGQMPHSHQYSDRRQP

SEQ ID NO: 25835 - protein, 131 aa, Homo sapiens
  Payload ID: 5122
  Gene Symbol: DYRK1A
  Gene Name: dual-specificity tyrosine-(Y)-phosphorylation regulated kinase 1A
  ENSP ID: ENSP00000412269
MHTGGETSACKPSSVRLAPSFSFHAAGLQMAGQMPHSHQYSDRRQPNISDQQVSALSYSDQIQQPLTNQVMPDIVMLQRRMPQTFRDPATAPLRKLSVDLIKTYKHINEVYYAKKKRRHQQGQGDDSSHKK

SEQ ID NO: 25836 - protein, 601 aa, Homo sapiens
  Payload ID: 5123
  Gene Symbol: DYRK1B
  Gene Name: dual-specificity tyrosine-(Y)-phosphorylation regulated kinase 1B
  Uniprot ID: Q9Y463
  ENSP ID: ENSP00000221803
MAVPPGHGPFSGFPGPQEHTQVLPDVRLLPRRLPLAFRDATSAPLRKLSVDLIKTYKHINEVYYAKKKRRAQQAPPQDSSNKKEKKVLNHGYDDDNHDYIVRSGERWLERYEIDSLIGKGSFGQVVKAYDHQTQELVAIKIIKNKKAFLNQAQIELRLLELMNQHDTEMKYYIVHLKRHFMFRNHLCLVFELLSYNLYDLLRNTHFRGVSLNLTRKLAQQLCTALLFLATPELSIIHCDLKPENILLCNPKRSAIKIVDFGSSCQLGQRIYQYIQSRFYRSPEVLLGTPYDLAIDMWSLGCILVEMHTGEPLFSGSNEVDQMNRIVEVLGIPPAAMLDQAPKARKYFERLPGGGWTLRRTKELRKDYQGPGTRRLQEDLVLRMLEYEPAARISPLGALQHGFFRRTADEATNTGPAGSSASTSPAPLDTCPSSSTASSISSSGGSSGSSSDNRTYRYSNRYCGGPGPPITDCEMNSPQVPPSQPLRPWAGGDVPHKTHQAPASASSLPGTGAQLPPQPRYLGRPPSPTSPPPPELMDVSLVGGPADCSPPHPAPAPQHPAASALRTRMTGGRPPLPPPDDPATLGPHLGLRGVPQSTAASS

SEQ ID NO: 25837 - protein, 629 aa, Homo sapiens
  Payload ID: 5123
  Gene Symbol: DYRK1B
  Gene Name: dual-specificity tyrosine-(Y)-phosphorylation regulated kinase 1B
  Uniprot ID: Q9Y463
  ENSP ID: ENSP00000312789
MAVPPGHGPFSGFPGPQEHTQVLPDVRLLPRRLPLAFRDATSAPLRKLSVDLIKTYKHINEVYYAKKKRRAQQAPPQDSSNKKEKKVLNHGYDDDNHDYIVRSGERWLERYEIDSLIGKGSFGQVVKAYDHQTQELVAIKIIKNKKAFLNQAQIELRLLELMNQHDTEMKYYIVHLKRHFMFRNHLCLVFELLSYNLYDLLRNTHFRGVSLNLTRKLAQQLCTALLFLATPELSIIHCDLKPENILLCNPKRSAIKIVDFGSSCQLGQRIYQYIQSRFYRSPEVLLGTPYDLAIDMWSLGCILVEMHTGEPLFSGSNEVDQMNRIVEVLGIPPAAMLDQAPKARKYFERLPGGGWTLRRTKELRKDYQGPGTRRLQEVLGVQTGGPGGRRAGEPGHSPADYLRFQDLVLRMLEYEPAARISPLGALQHGFFRRTADEATNTGPAGSSASTSPAPLDTCPSSSTASSISSSGGSSGSSSDNRTYRYSNRYCGGPGPPITDCEMNSPQVPPSQPLRPWAGGDVPHKTHQAPASASSLPGTGAQLPPQPRYLGRPPSPTSPPPPELMDVSLVGGPADCSPPHPAPAPQHPAASALRTRMTGGRPPLPPPDDPATLGPHLGLRGVPQSTAASS

SEQ ID NO: 25838 - protein, 589 aa, Homo sapiens
  Payload ID: 5123
  Gene Symbol: DYRK1B
  Gene Name: dual-specificity tyrosine-(Y)-phosphorylation regulated kinase 1B
  Uniprot ID: Q9Y463
  ENSP ID: ENSP00000403182
MAVPPGHGPFSGFPGPQEHTQVLPDVRLLPRRLPLAFRDATSAPLRKLSVDLIKTYKHINEVYYAKKKRRAQQAPPQDSSNKKEKKVLNHGYDDDNHDYIVRSGERWLERYEIDSLIGKGSFGQVVKAYDHQTQELVAIKIIKNKKAFLNQAQIELRLLELMNQHDTEMKYYIVHLKRHFMFRNHLCLVFELLSYNLYDLLRNTHFRGVSLNLTRKLAQQLCTALLFLATPELSIIHCDLKPENILLCNPKRSAIKIVDFGSSCQLGQRIYQYIQSRFYRSPEVLLGTPYDLAIDMWSLGCILVEMHTGEPLFSGSNEVDQMNRIVEVLGIPPAAMLDQAPKARKYFERLPGGGWTLRRTKELRKDLVLRMLEYEPAARISPLGALQHGFFRRTADEATNTGPAGSSASTSPAPLDTCPSSSTASSISSSGGSSGSSSDNRTYRYSNRYCGGPGPPITDCEMNSPQVPPSQPLRPWAGGDVPHKTHQAPASASSLPGTGAQLPPQPRYLGRPPSPTSPPPPELMDVSLVGGPADCSPPHPAPAPQHPAASALRTRMTGGRPPLPPPDDPATLGPHLGLRGVPQSTAASS

SEQ ID NO: 25839 - protein, 629 aa, Homo sapiens; identical to SEQ ID NO: 25837
  Payload ID: 5123
  Gene Symbol: DYRK1B
  Gene Name: dual-specificity tyrosine-(Y)-phosphorylation regulated kinase 1B
  Uniprot ID: Q9Y463
  ENSP ID: ENSP00000469863

SEQ ID NO: 25840 - protein, 172 aa, Homo sapiens
  Payload ID: 5123
  Gene Symbol: DYRK1B
  Gene Name: dual-specificity tyrosine-(Y)-phosphorylation regulated kinase 1B
  ENSP ID: ENSP00000471609
MAVPPGHGPFSGFPGPQEHTQVLPDVRLLPRRLPLAFRDATSAPLRKLSVDLIKTYKHINEVYYAKKKRRAQQAPPQDSSNKKEKKVLNHGYDDDNHDYIVRSGERWLERYEIDSLIGKGSFGQVVKAYDHQTQELVAIKIIKNKKAFLNQAQIELRLLELMNQHDTEMKYY

SEQ ID NO: 25841 - protein, 137 aa, Homo sapiens
  Payload ID: 5123
  Gene Symbol: DYRK1B
  Gene Name: dual-specificity tyrosine-(Y)-phosphorylation regulated kinase 1B
  ENSP ID: ENSP00000472861
MAVPPGHGPFSGFPGPQEHTQVLPDVRLLPRRLPLAFRDATSAPLRKLSVDLIKTYKHINEVYYAKKKRRAQQAPPQDSSNKKEKKVLNHGYDDDNHDYIVRSGERWLERYEIDSLIGKGSFGQVWDTPHHPDPRPH

SEQ ID NO: 25842 - protein, 601 aa, Homo sapiens; identical to SEQ ID NO: 25836
  Payload ID: 5123
  Gene Symbol: DYRK1B
  Gene Name: dual-specificity tyrosine-(Y)-phosphorylation regulated kinase 1B
  Uniprot ID: Q9Y463
  ENSP ID: ENSP00000472941

SEQ ID NO: 25843 - protein, 629 aa, Homo sapiens; identical to SEQ ID NO: 25837
  Payload ID: 5123
  Gene Symbol: DYRK1B
  Gene Name: dual-specificity tyrosine-(Y)-phosphorylation regulated kinase 1B
  Uniprot ID: Q9Y463
  ENSP ID: ENSP00000485915

SEQ ID NO: 25844 - protein, 137 aa, Homo sapiens; identical to SEQ ID NO: 25841
  Payload ID: 5123
  Gene Symbol: DYRK1B
  Gene Name: dual-specificity tyrosine-(Y)-phosphorylation regulated kinase 1B
  ENSP ID: ENSP00000486264

SEQ ID NO: 25845 - protein, 629 aa, Homo sapiens; identical to SEQ ID NO: 25837
  Payload ID: 5123
  Gene Symbol: DYRK1B
  Gene Name: dual-specificity tyrosine-(Y)-phosphorylation regulated kinase 1B
  Uniprot ID: Q9Y463
  ENSP ID: ENSP00000486377

SEQ ID NO: 25846 - protein, 601 aa, Homo sapiens; identical to SEQ ID NO: 25836
  Payload ID: 5123
  Gene Symbol: DYRK1B
  Gene Name: dual-specificity tyrosine-(Y)-phosphorylation regulated kinase 1B
  Uniprot ID: Q9Y463
  ENSP ID: ENSP00000486839

SEQ ID NO: 25847 - protein, 172 aa, Homo sapiens; identical to SEQ ID NO: 25840
  Payload ID: 5123
  Gene Symbol: DYRK1B
  Gene Name: dual-specificity tyrosine-(Y)-phosphorylation regulated kinase 1B
  ENSP ID: ENSP00000486913

SEQ ID NO: 25848 - protein, 601 aa, Homo sapiens; identical to SEQ ID NO: 25836
  Payload ID: 5123
  Gene Symbol: DYRK1B
  Gene Name: dual-specificity tyrosine-(Y)-phosphorylation regulated kinase 1B
  Uniprot ID: Q9Y463
  ENSP ID: ENSP00000487313

SEQ ID NO: 25849 - protein, 589 aa, Homo sapiens; identical to SEQ ID NO: 25838
  Payload ID: 5123
  Gene Symbol: DYRK1B
  Gene Name: dual-specificity tyrosine-(Y)-phosphorylation regulated kinase 1B
  Uniprot ID: Q9Y463
  ENSP ID: ENSP00000487539

SEQ ID NO: 25850 - protein, 93 aa, Homo sapiens
  Payload ID: 5124
  Gene Symbol: DYRK2
  Gene Name: dual-specificity tyrosine-(Y)-phosphorylation regulated kinase 2
  ENSP ID: ENSP00000324733
MNDHLHVGSHAHGQIQVQQLFEDNSNKRTVLTTQPNGLTTVGKTGLPVVPERQLDSIHRRQGSSTSLKSMEGMGKVKATPMTPEQAMKQYMQK

SEQ ID NO: 25851 - protein, 601 aa, Homo sapiens
  Payload ID: 5124
  Gene Symbol: DYRK2
  Gene Name: dual-specificity tyrosine-(Y)-phosphorylation regulated kinase 2
  Uniprot ID: Q92630
  ENSP ID: ENSP00000342105
MLTRKPSAAAPAAYPTGRGGDSAVRQLQASPGLGAGATRSGVGTGPPSPIALPPLRASNAAAAAHTIGGSKHTMNDHLHVGSHAHGQIQVQQLFEDNSNKRTVLTTQPNGLTTVGKTGLPVVPERQLDSIHRRQGSSTSLKSMEGMGKVKATPMTPEQAMKQYMQKLTAFEHHEIFSYPEIYFLGLNAKKRQGMTGGPNNGGYDDDQGSYVQVPHDHVAYRYEVLKVIGKGSFGQVVKAYDHKVHQHVALKMVRNEKRFHRQAAEEIRILEHLRKQDKDNTMNVIHMLENFTFRNHICMTFELLSMNLYELIKKNKFQGFSLPLVRKFAHSILQCLDALHKNRIIHCDLKPENILLKQQGRSGIKVIDFGSSCYEHQRVYTYIQSRFYRAPEVILGARYGMPIDMWSLGCILAELLTGYPLLPGEDEGDQLACMIELLGMPSQKLLDASKRAKNFVSSKGYPRYCTVTTLSDGSVVLNGGRSRRGKLRGPPESREWGNALKGCDDPLFLDFLKQCLEWDPAVRMTPGQALRHPWLRRRLPKPPTGEKTSVKRITESTGAITSISKLPPPSSSASKLRTNLAQMTDANGNIQQRTVLPKLVS

SEQ ID NO: 25852 - protein, 528 aa, Homo sapiens
  Payload ID: 5124
  Gene Symbol: DYRK2
  Gene Name: dual-specificity tyrosine-(Y)-phosphorylation regulated kinase 2
  Uniprot ID: Q92630
  ENSP ID: ENSP00000377186
MNDHLHVGSHAHGQIQVQQLFEDNSNKRTVLTTQPNGLTTVGKTGLPVVPERQLDSIHRRQGSSTSLKSMEGMGKVKATPMTPEQAMKQYMQKLTAFEHHEIFSYPEIYFLGLNAKKRQGMTGGPNNGGYDDDQGSYVQVPHDHVAYRYEVLKVIGKGSFGQVVKAYDHKVHQHVALKMVRNEKRFHRQAAEEIRILEHLRKQDKDNTMNVIHMLENFTFRNHICMTFELLSMNLYELIKKNKFQGFSLPLVRKFAHSILQCLDALHKNRIIHCDLKPENILLKQQGRSGIKVIDFGSSCYEHQRVYTYIQSRFYRAPEVILGARYGMPIDMWSLGCILAELLTGYPLLPGEDEGDQLACMIELLGMPSQKLLDASKRAKNFVSSKGYPRYCTVTTLSDGSVVLNGGRSRRGKLRGPPESREWGNALKGCDDPLFLDFLKQCLEWDPAVRMTPGQALRHPWLRRRLPKPPTGEKTSVKRITESTGAITSISKLPPPSSSASKLRTNLAQMTDANGNIQQRTVLPKLVS

SEQ ID NO: 25853 - protein, 156 aa, Homo sapiens
  Payload ID: 5124
  Gene Symbol: DYRK2
  Gene Name: dual-specificity tyrosine-(Y)-phosphorylation regulated kinase 2
  ENSP ID: ENSP00000440839
MNDHLHVGSHAHGQIQVQQLFEDNSNKRTVLTTQPNGLTTVGKTGLPVVPERQLDSIHRRQGSSTSLKSMEGMGKVKATPMTPEQAMKQYMQKLTAFEHHEIFSYPEIYFLGLNAKKRQGMTGGPNNGGYDDDQGSYVQVPHDHVAYRYEVLKVIG

SEQ ID NO: 25854 - protein, 167 aa, Homo sapiens
  Payload ID: 5124
  Gene Symbol: DYRK2
  Gene Name: dual-specificity tyrosine-(Y)-phosphorylation regulated kinase 2
  ENSP ID: ENSP00000443314
MRMCFSVLLIMEACILLWHMPDLLVFNVCVNFGMLLIIRCLTLKIGGSKHTMNDHLHVGSHAHGQIQVQQLFEDNSNKRTVLTTQPNGLTTVGKTGLPVVPERQLDSIHRRQGSSTSLKSMEGMGKVKATPMTPEQAMKQYMQKLTAFEHHEIFSYPEIYFLGLNAK

SEQ ID NO: 25855 - protein, 568 aa, Homo sapiens
  Payload ID: 5125
  Gene Symbol: DYRK3
  Gene Name: dual-specificity tyrosine-(Y)-phosphorylation regulated kinase 3
  Uniprot ID: O43781
  ENSP ID: ENSP00000356073
MKWKEKLGDGVYDTFMMIDETKCPPCSNVLCNPSEPPPPRRLNMTTEQFTGDHTQHFLDGGEMKVEQLFQEFGNRKSNTIQSDGISDSEKCSPTVSQGKSSDCLNTVKSNSSSKAPKVVPLTPEQALKQYKHHLTAYEKLEIINYPEIYFVGPNAKKRHGVIGGPNNGGYDDADGAYIHVPRDHLAYRYEVLKIIGKGSFGQVARVYDHKLRQYVALKMVRNEKRFHRQAAEEIRILEHLKKQDKTGSMNVIHMLESFTFRNHVCMAFELLSIDLYELIKKNKFQGFSVQLVRKFAQSILQSLDALHKNKIIHCDLKPENILLKHHGRSSTKVIDFGSSCFEYQKLYTYIQSRFYRAPEIILGSRYSTPIDIWSFGCILAELLTGQPLFPGEDEGDQLACMMELLGMPPPKLLEQSKRAKYFINSKGIPRYCSVTTQADGRVVLVGGRSRRGKKRGPPGSKDWGTALKGCDDYLFIEFLKRCLHWDPSARLTPAQALRHPWISKSVPRPLTTIDKVSGKRVVNPASAFQGLGSKLPPVVGIANKLKANLMSETNGSIPLCSVLPKLIS

SEQ ID NO: 25856 - protein, 568 aa, Homo sapiens; identical to SEQ ID NO: 25855
  Payload ID: 5125
  Gene Symbol: DYRK3
  Gene Name: dual-specificity tyrosine-(Y)-phosphorylation regulated kinase 3
  Uniprot ID: O43781
  ENSP ID: ENSP00000356075

SEQ ID NO: 25857 - protein, 588 aa, Homo sapiens
  Payload ID: 5125
  Gene Symbol: DYRK3
  Gene Name: dual-specificity tyrosine-(Y)-phosphorylation regulated kinase 3
  Uniprot ID: O43781
  ENSP ID: ENSP00000356076
MGGTARGPGRKDAGPPGAGLPPQQRRLGDGVYDTFMMIDETKCPPCSNVLCNPSEPPPPRRLNMTTEQFTGDHTQHFLDGGEMKVEQLFQEFGNRKSNTIQSDGISDSEKCSPTVSQGKSSDCLNTVKSNSSSKAPKVVPLTPEQALKQYKHHLTAYEKLEIINYPEIYFVGPNAKKRHGVIGGPNNGGYDDADGAYIHVPRDHLAYRYEVLKIIGKGSFGQVARVYDHKLRQYVALKMVRNEKRFHRQAAEEIRILEHLKKQDKTGSMNVIHMLESFTFRNHVCMAFELLSIDLYELIKKNKFQGFSVQLVRKFAQSILQSLDALHKNKIIHCDLKPENILLKHHGRSSTKVIDFGSSCFEYQKLYTYIQSRFYRAPEIILGSRYSTPIDIWSFGCILAELLTGQPLFPGEDEGDQLACMMELLGMPPPKLLEQSKRAKYFINSKGIPRYCSVTTQADGRVVLVGGRSRRGKKRGPPGSKDWGTALKGCDDYLFIEFLKRCLHWDPSARLTPAQALRHPWISKSVPRPLTTIDKVSGKRVVNPASAFQGLGSKLPPVVGIANKLKANLMSETNGSIPLCSVLPKLIS

SEQ ID NO: 25858 - protein, 243 aa, Homo sapiens
  Payload ID: 5125
  Gene Symbol: DYRK3
  Gene Name: dual-specificity tyrosine-(Y)-phosphorylation regulated kinase 3
  ENSP ID: ENSP00000410187
MKWKEKLGDGVYDTFMMIDETKCPPCSNVLCNPSEPPPPRRLNMTTEQFTGDHTQHFLDGGEMKVEQLFQEFGNRKSNTIQSDGISDSEKCSPTVSQGKSSDCLNTVKSNSSSKAPKVVPLTPEQALKQYKHHLTAYEKLEIINYPEIYFVGPNAKKRHGVIGGPNNGGYDDADGAYIHVPRDHLAYRYEVLKIIGKGSFGQVARVYDHKLRQYVALKMVRNEKRFHRQAAEEIRILEHLKKQ

SEQ ID NO: 25859 - protein, 520 aa, Homo sapiens
  Payload ID: 5126
  Gene Symbol: DYRK4
  Gene Name: dual-specificity tyrosine-(Y)-phosphorylation regulated kinase 4
  Uniprot ID: Q9NR20
  ENSP ID: ENSP00000010132
MPASELKASEIPFHPSIKTQDPKAEEKSPKKQKVTLTAAEALKLFKNQLSPYEQSEILGYAELWFLGLEAKKLDTAPEKFSKTSFDDEHGFYLKVLHDHIAYRYEVLETIGKGSFGQVAKCLDHKNNELVALKIIRNKKRFHQQALMELKILEALRKKDKDNTYNVVHMKDFFYFRNHFCITFELLGINLYELMKNNNFQGFSLSIVRRFTLSVLKCLQMLSVEKIIHCDLKPENIVLYQKGQASVKVIDFGSSCYEHQKVYTYIQSRFYRSPEVILGHPYDVAIDMWSLGCITAELYTGYPLFPGENEVEQLACIMEVLGLPPAGFIQTASRRQTFFDSKGFPKNITNNRGKKRYPDSKDLTMVLKTYDTSFLDFLRRCLVWEPSLRMTPDQALKHAWIHQSRNLKPQPRPQTLRKSNSFFPSETRKDKVQGCHHSSRKADEITKETTEKTKDSPTKHVQHSGDQQDCLQHGADTVQLPQLVDAPKKSEAAVGAEVSMTSPGQSKNFSLKNTNVLPPIV

SEQ ID NO: 25860 - protein, 120 aa, Homo sapiens
  Payload ID: 5126
  Gene Symbol: DYRK4
  Gene Name: dual-specificity tyrosine-(Y)-phosphorylation regulated kinase 4
  ENSP ID: ENSP00000438769
  MOD_RES (1)..(1): Any amino acid
XSKGFPKNITNNRGKKRYPDSKDLTMVLKTYDTSFLDFLRRCLVWEPSLRMTPDQALKHAWIHQSRNLKPQPRPQTLRKSNSFFPSETRKDKVQGCHHSSRKGTACQITSPSPTVRELIF

SEQ ID NO: 25861 - protein, 43 aa, Homo sapiens
  Payload ID: 5126
  Gene Symbol: DYRK4
  Gene Name: dual-specificity tyrosine-(Y)-phosphorylation regulated kinase 4
  ENSP ID: ENSP00000439168
MQLLPPPIRTGTKLKWRLGKSRRPFSGKVQTVETTNENVLCLA

SEQ ID NO: 25862 - protein, 634 aa, Homo sapiens
  Payload ID: 5126
  Gene Symbol: DYRK4
  Gene Name: dual-specificity tyrosine-(Y)-phosphorylation regulated kinase 4
  ENSP ID: ENSP00000439697
MQLLPPPIRTGTKTQMDAKKPRKCDLTPFLVLKARKKQKFTSAKVGSKLSVQIQKPPSNIKNSRMTQVFHKNTSVTSLPFVDTKGKKNTVSFPHISKKVLLKSSLLYQENQAHNQMPASELKASEIPFHPSIKTQDPKAEEKSPKKQKVTLTAAEALKLFKNQLSPYEQSEILGYAELWFLGLEAKKLDTAPEKFSKTSFDDEHGFYLKVLHDHIAYRYEVLETIGKGSFGQVAKCLDHKNNELVALKIIRNKKRFHQQALMELKILEALRKKDKDNTYNVVHMKDFFYFRNHFCITFELLGINLYELMKNNNFQGFSLSIVRRFTLSVLKCLQMLSVEKIIHCDLKPENIVLYQKGQASVKVIDFGSSCYEHQKVYTYIQSRFYRSPEVILGHPYDVAIDMWSLGCITAELYTGYPLFPGENEVEQLACIMEVLGLPPAGFIQTASRRQTFFDSKGFPKNITNNRGKKRYPDSKDLTMVLKTYDTSFLDFLRRCLVWEPSLRMTPDQALKHAWIHQSRNLKPQPRPQTLRKSNSFFPSETRKDKVQGCHHSSRKDEITKETTEKTKDSPTKHVQHSGDQQDCLQHGADTVQLPQLVDAPKKSEAAVGAEVSMTSPGQSKNFSLKNTNVLPPIV

SEQ ID NO: 25863 - protein, 520 aa, Homo sapiens; identical to SEQ ID NO: 25859
  Payload ID: 5126
  Gene Symbol: DYRK4
  Gene Name: dual-specificity tyrosine-(Y)-phosphorylation regulated kinase 4
  Uniprot ID: Q9NR20
  ENSP ID: ENSP00000441755

SEQ ID NO: 25864 - protein, 68 aa, Homo sapiens
  Payload ID: 5126
  Gene Symbol: DYRK4
  Gene Name: dual-specificity tyrosine-(Y)-phosphorylation regulated kinase 4
  ENSP ID: ENSP00000441996
MQLLPPPIRTGTKTQMDAKKPRKCDLTPFLVLKARKKQKFTSAKGPTLSEIYMEETRRSQLRKQENRL

SEQ ID NO: 25865 - protein, 59 aa, Homo sapiens
  Payload ID: 5126
  Gene Symbol: DYRK4
  Gene Name: dual-specificity tyrosine-(Y)-phosphorylation regulated kinase 4
  ENSP ID: ENSP00000444842
MQLLPPPIRTGTKTQMDAKKPRKCDLTPFLVLKARKKQKFTSAKEETRRSQLRKQENRL

SEQ ID NO: 25866 - protein, 669 aa, Homo sapiens
  Payload ID: 5127
  Gene Symbol: DYM
  Gene Name: dymeclin
  Uniprot ID: Q7RTS9
  ENSP ID: ENSP00000269445
MGSNSSRIGDLPKNEYLKKLSGTESISENDPFWNQLLSFSFPAPTSSSELKLLEEATISVCRSLVENNPRTGNLGALIKVFLSRTKELKLSAECQNHIFIWQTHNALFIICCLLKVFICQMSEEELQLHFTYEEKSPGNYSSDSEDLLEELLCCLMQLITDIPLLDITYEISVEAISTMVVFLSCQLFHKEVLRQSISHKYLMRGPCLPYTSKLVKTLLYNFIRQEKPPPPGAHVFPQQSDGGGLLYGLASGVATGLWTVFTLGGVGSKAAASPELSSPLANQSLLLLLVLANLTDASDAPNPYRQAIMSFKNTQDSSPFPSSIPHAFQINFNSLYTALCEQQTSDQATLLLYTLLHQNSNIRTYMLARTDMENLVLPILEILYHVEERNSHHVYMALIILLILTEDDGFNRSIHEVILKNITWYSERVLTEISLGSLLILVVIRTIQYNMTRTRDKYLHTNCLAALANMSAQFRSLHQYAAQRIISLFSLLSKKHNKVLEQATQSLRGSLSSNDVPLPDYAQDLNVIEEVIRMMLEIINSCLTNSLHHNPNLVYALLYKRDLFEQFRTHPSFQDIMQNIDLVISFFSSRLLQAGAELSVERVLEIIKQGVVALPKDRLKKFPELKFKYVEEEQPEEFFIPYVWSLVYNSAVGLYWNPQDIQLFTMDSD

SEQ ID NO: 25867 - protein, 479 aa, Homo sapiens
  Payload ID: 5127
  Gene Symbol: DYM
  Gene Name: dymeclin
  Uniprot ID: Q7RTS9
  ENSP ID: ENSP00000395942
MGSNSSRIGDLPKNEYLKKLSGTESISENDPFWNQLLSFSFPAPTSSSELKLLEEATISVCRSLAGLWTVFTLGGVGSKAAASPELSSPLANQSLLLLLVLANLTDASDAPNPYRQAIMSFKNTQDSSPFPSSIPHAFQINFNSLYTALCEQQTSDQATLLLYTLLHQNSNIRTYMLARTDMENLVLPILEILYHVEERNSHHVYMALIILLILTEDDGFNRSIHEVILKNITWYSERVLTEISLGSLLILVVIRTIQYNMTRTRDKYLHTNCLAALANMSAQFRSLHQYAAQRIISLFSLLSKKHNKVLEQATQSLRGSLSSNDVPLPDYAQDLNVIEEVIRMMLEIINSCLTNSLHHNPNLVYALLYKRDLFEQFRTHPSFQDIMQNIDLVISFFSSRLLQAGAELSVERVLEIIKQGVVALPKDRLKKFPELKFKYVEEEQPEEFFIPYVWSLVYNSAVGLYWNPQDIQLFTMDSD

SEQ ID NO: 25868 - protein, 39 aa, Homo sapiens
  Payload ID: 5127
  Gene Symbol: DYM
  Gene Name: dymeclin
  ENSP ID: ENSP00000415292
MSEPHLHLADTQCFVYYLLFAESVHLSDVRGGITTSFYL

SEQ ID NO: 25869 - protein, 163 aa, Homo sapiens
  Payload ID: 5127
  Gene Symbol: DYM
  Gene Name: dymeclin
  ENSP ID: ENSP00000461989
MQLITDIPLLDITYEISVEAISTMVVFLSCQLFHKEVLRQSISHKYLMRGPCLPYTSKLVKTLLYNFIRQEKPPPPGAHVFPQQSDGGGLLYGLASGVATGLWTVFTLGGVGSKAAASPELSSPLANQSLLLLLVLANLTDASDAPNPYRQAIMSFKNTQDSS

SEQ ID NO: 25870 - protein, 139 aa, Homo sapiens
  Payload ID: 5127
  Gene Symbol: DYM
  Gene Name: dymeclin
  ENSP ID: ENSP00000462466
MQLITDIPLLDITYEISVEAISTMVVFLSCQLFHKEVLRQSISHKYLMRGPCLPYTSKLVKTLLYNFIRQEKPPPPGAHVFPQQSDGGGLLYGLASGVATGLWTVFTLGGVGSKAAASPELSSPLANQSLLLLLVLANL

SEQ ID NO: 25871 - protein, 122 aa, Homo sapiens
  Payload ID: 5127
  Gene Symbol: DYM
  Gene Name: dymeclin
  ENSP ID: ENSP00000462657
  MOD_RES (1)..(1): Any amino acid
XIQYNMTRTRDKYLHTNCLAALANMSAQFRSLHQYAAQRIISYTCRHLRRYVYVLDKLYFPHSHCSTLQHCFSTLSDNGEELLSLTCSHILRSYASSLFSLLSKKHNKVLEQATQSLRGSLS

SEQ ID NO: 25872 - protein, 74 aa, Homo sapiens
  Payload ID: 5127
  Gene Symbol: DYM
  Gene Name: dymeclin
  ENSP ID: ENSP00000462954
MGSNSSRIGDLPKNEYLKKLSGTESISENDPFWNQLLSFSFPAPTSRQSFTLVAQAGVQWHDLGSPQPLPPGIK

SEQ ID NO: 25873 - protein, 116 aa, Homo sapiens
  Payload ID: 5127
  Gene Symbol: DYM
  Gene Name: dymeclin
  ENSP ID: ENSP00000463892
MQLITDIPLLDITYEISVEAISTMVVFLSCQLFHKEVLRQSISHKYLMRGPCLPYTSKLVKTLLYNFIRQEKPPPPGAHVFPQQSDGGGLLYGLASGVANLKGRLMASFMLQIVEE

SEQ ID NO: 25874 - protein, 109 aa, Homo sapiens
  Payload ID: 5127
  Gene Symbol: DYM
  Gene Name: dymeclin
  ENSP ID: ENSP00000464089
MGSNSSRIGDLPKNEYLKKLSGTESISENDPFWNQLLSFSFPAPTSSSELKLLEEATISVCRSLVENNPRTGNLGALIKVFLSRTKELKLSAECQNHIFIWQTHNALFI

SEQ ID NO: 25875 - protein, 67 aa, Homo sapiens
  Payload ID: 5127
  Gene Symbol: DYM
  Gene Name: dymeclin
  ENSP ID: ENSP00000464163
  MOD_RES (1)..(1): Any amino acid
XLLQAGAELSVERVLEIIKQGVVALPKDRLKPLADRQVDRVLACQAFVYAASGFSQFHGLSVRNFQN

SEQ ID NO: 25876 - protein, 142 aa, Homo sapiens
  Payload ID: 5127
  Gene Symbol: DYM
  Gene Name: dymeclin
  ENSP ID: ENSP00000464183
MQLITDIPLLDITYEISVEAISTMVVFLSCQLFHKEVLRQSISHKYLMRGPCLPYTSKLVKTLLYNFIRQEKPPPPGAHVFPQQSDGGGLLYGLASGVATGLWTVFTLGGVGSKAAASPELSSPLANQSLLLLLVLANLTDA

SEQ ID NO: 25877 - protein, 141 aa, Homo sapiens
  Payload ID: 5127
  Gene Symbol: DYM
  Gene Name: dymeclin
  ENSP ID: ENSP00000464653
MQLITDIPLLDITYEISVEAISTMVVFLSCQLFHKEVLRQSISHKYLMRGPCLPYTSKLVKTLLYNFIRQEKPPPPGAHVFPQQSDGGGLLYGLASGVARLWTVFTLGGVGSKAAASPELSSPLANQSLLLLLVLANLTDA

SEQ ID NO: 25878 - protein, 1278 aa, Homo sapiens
  Payload ID: 5128
  Gene Symbol: DCTN1
  Gene Name: dynactin 1
  Uniprot ID: Q14203
  ENSP ID: ENSP00000354791
MAQSKRHVYSRTPSGSRMSAEASARPLRVGSRVEVIGKGHRGTVAYVGATLFATGKWVGVILDEAKGKNDGTVQGRKYFTCDEGHGIFVRQSQIQVFEDGADTTSPETPDSSASKVLKREGTDTTAKTSKLRGLKPKKAPTARKTTTRRPKPTRPASTGVAGASSSLGPSGSASAGELSSSEPSTPAQTPLAAPIIPTPVLTSPGAVPPLPSPSKEEEGLRAQVRDLEEKLETLRLKRAEDKAKLKELEKHKIQLEQVQEWKSKMQEQQADLQRRLKEARKEAKEALEAKERYMEEMADTADAIEMATLDKEMAEERAESLQQEVEALKERVDELTTDLEILKAEIEEKGSDGAASSYQLKQLEEQNARLKDALVRMRDLSSSEKQEHVKLQKLMEKKNQELEVVRQQRERLQEELSQAESTIDELKEQVDAALGAEEMVEMLTDRNLNLEEKVRELRETVGDLEAMNEMNDELQENARETELELREQLDMAGARVREAQKRVEAAQETVADYQQTIKKYRQLTAHLQDVNRELTNQQEASVERQQQPPPETFDFKIKFAETKAHAKAIEMELRQMEVAQANRHMSLLTAFMPDSFLRPGGDHDCVLVLLLMPRLICKAELIRKQAQEKFELSENCSERPGLRGAAGEQLSFAAGLVYSLSLLQATLHRYEHALSQCSVDVYKKVGSLYPEMSAHERSLDFLIELLHKDQLDETVNVEPLTKAIKYYQHLYSIHLAEQPEDCTMQLADHIKFTQSALDCMSVEVGRLRAFLQGGQEATDIALLLRDLETSCSDIRQFCKKIRRRMPGTDAPGIPAALAFGPQVSDTLLDCRKHLTWVVAVLQEVAAAAAQLIAPLAENEGLLVAALEELAFKASEQIYGTPSSSPYECLRQSCNILISTMNKLATAMQEGEYDAERPPSKPPPVELRAAALRAEITDAEGLGLKLEDRETVIKELKKSLKIKGEELSEANVRLSLLEKKLDSAAKDADERIEKVQTRLEETQALLRKKEKEFEETMDALQADIDQLEAEKAELKQRLNSQSKRTIEGLRGPPPSGIATLVSGIAGEEQQRGAIPGQAPGSVPGPGLVKDSPLLLQQISAMRLHISQLQHENSILKGAQMKASLASLPPLHVAKLSHEGPGSELPAGALYRKTSQLLETLNQLSTHTHVVDITRTSPAAKSPSAQLMEQVAQLKSLSDTVEKLKDEVLKETVSQRPGATVPTDFATFPSSAFLRAKEEQQDDTVYMGKVTFSCAAGFGQRHRLVLTQEQLHQLHSRLIS

SEQ ID NO: 25879 - protein, 1271 aa, Homo sapiens
  Payload ID: 5128
  Gene Symbol: DCTN1
  Gene Name: dynactin 1
  Uniprot ID: Q14203
  ENSP ID: ENSP00000377571
MAQSKRHVYSRTPSGSRMSAEASARPLRVGSRVEVIGKGHRGTVAYVGATLFATGKWVGVILDEAKGKNDGTVQGRKYFTCDEGHGIFVRQSQIQVFEDGADTTSPETPDSSASKVLKREGTDTTAKTSKLAPTARKTTTRRPKPTRPASTGVAGASSSLGPSGSASAGELSSSEPSTPAQTPLAAPIIPTPVLTSPGAVPPLPSPSKEEEGLRAQVRDLEEKLETLRLKRAEDKAKLKELEKHKIQLEQVQEWKSKMQEQQADLQRRLKEARKEAKEALEAKERYMEEMADTADAIEMATLDKEMAEERAESLQQEVEALKERVDELTTDLEILKAEIEEKGSDGAASSYQLKQLEEQNARLKDALVRMRDLSSSEKQEHVKLQKLMEKKNQELEVVRQQRERLQEELSQAESTIDELKEQVDAALGAEEMVEMLTDRNLNLEEKVRELRETVGDLEAMNEMNDELQENARETELELREQLDMAGARVREAQKRVEAAQETVADYQQTIKKYRQLTAHLQDVNRELTNQQEASVERQQQPPPETFDFKIKFAETKAHAKAIEMELRQMEVAQANRHMSLLTAFMPDSFLRPGGDHDCVLVLLLMPRLICKAELIRKQAQEKFELSENCSERPGLRGAAGEQLSFAAGLVYSLSLLQATLHRYEHALSQCSVDVYKKVGSLYPEMSAHERSLDFLIELLHKDQLDETVNVEPLTKAIKYYQHLYSIHLAEQPEDCTMQLADHIKFTQSALDCMSVEVGRLRAFLQGGQEATDIALLLRDLETSCSDIRQFCKKIRRRMPGTDAPGIPAALAFGPQVSDTLLDCRKHLTWVVAVLQEVAAAAAQLIAPLAENEGLLVAALEELAFKASEQIYGTPSSSPYECLRQSCNILISTMNKLATAMQEGEYDAERPPSKPPPVELRAAALRAEITDAEGLGLKLEDRETVIKELKKSLKIKGEELSEANVRLSLLEKKLDSAAKDADERIEKVQTRLEETQALLRKKEKEFEETMDALQADIDQLEAEKAELKQRLNSQSKRTIEGLRGPPPSGIATLVSGIAGEEQQRGAIPGQAPGSVPGPGLVKDSPLLLQQISAMRLHISQLQHENSILKGAQMKASLASLPPLHVAKLSHEGPGSELPAGALYRKTSQLLETLNQLSTHTHVVDITRTSPAAKSPSAQLMEQVAQLKSLSDTVEKLKDEVLKETVSQRPGATVPTDFATFPSSAFLRAKEEQQDDTVYMGKVTFSCAAGFGQRHRLVLTQEQLHQLHSRLIS

SEQ ID NO: 25880 - protein, 1236 aa, Homo sapiens
  Payload ID: 5128
  Gene Symbol: DCTN1
  Gene Name: dynactin 1
  Uniprot ID: Q14203
  ENSP ID: ENSP00000386406
MSAEASARPLRVGSRVEVIGKGHRGTVAYVGATLFATGKWVGVILDEAKGKNDGTVQGRKYFTCDEGHGIFVRQSQIQVFEDGADTTSPETPDSSASKVLKREGTDTTAKTSKLPTRPASTGVAGASSSLGPSGSASAGELSSSEPSTPAQTPLAAPIIPTPVLTSPGAVPPLPSPSKEEEGLRAQVRDLEEKLETLRLKRAEDKAKLKELEKHKIQLEQVQEWKSKMQEQQADLQRRLKEARKEAKEALEAKERYMEEMADTADAIEMATLDKEMAEERAESLQQEVEALKERVDELTTDLEILKAEIEEKGSDGAASSYQLKQLEEQNARLKDALVRMRDLSSSEKQEHVKLQKLMEKKNQELEVVRQQRERLQEELSQAESTIDELKEQVDAALGAEEMVEMLTDRNLNLEEKVRELRETVGDLEAMNEMNDELQENARETELELREQLDMAGARVREAQKRVEAAQETVADYQQTIKKYRQLTAHLQDVNRELTNQQEASVERQQQPPPETFDFKIKFAETKAHAKAIEMELRQMEVAQANRHMSLLTAFMPDSFLRPGGDHDCVLVLLLMPRLICKAELIRKQAQEKFELSENCSERPGLRGAAGEQLSFAAGLVYSLSLLQATLHRYEHALSQCSVDVYKKVGSLYPEMSAHERSLDFLIELLHKDQLDETVNVEPLTKAIKYYQHLYSIHLAEQPEDCTMQLADHIKFTQSALDCMSVEVGRLRAFLQGGQEATDIALLLRDLETSCSDIRQFCKKIRRRMPGTDAPGIPAALAFGPQVSDTLLDCRKHLTWVVAVLQEVAAAAAQLIAPLAENEGLLVAALEELAFKASEQIYGTPSSSPYECLRQSCNILISTMNKLATAMQEGEYDAERPPSKPPPVELRAAALRAEITDAEGLGLKLEDRETVIKELKKSLKIKGEELSEANVRLSLLEKKLDSAAKDADERIEKVQTRLEETQALLRKKEKEFEETMDALQADIDQLEAEKAELKQRLNSQSKRTIEGLRGPPPSGIATLVSGIAGGAIPGQAPGSVPGPGLVKDSPLLLQQISAMRLHISQLQHENSILKGAQMKASLASLPPLHVAKLSHEGPGSELPAGALYRKTSQLLETLNQLSTHTHVVDITRTSPAAKSPSAQLMEQVAQLKSLSDTVEKLKDEVLKETVSQRPGATVPTDFATFPSSAFLRAKEEQQDDTVYMGKVTFSCAAGFGQRHRLVLTQEQLHQLHSRLIS

SEQ ID NO: 25881 - protein, 1253 aa, Homo sapiens
  Payload ID: 5128
  Gene Symbol: DCTN1
  Gene Name: dynactin 1
  Uniprot ID: Q14203
  ENSP ID: ENSP00000386843
MAQSKRHVYSRTPSGSRMSAEASARPLRVGSRVEVIGKGHRGTVAYVGATLFATGKWVGVILDEAKGKNDGTVQGRKYFTCDEGHGIFVRQSQIQVFEDGADTTSPETPDSSASKVLKREGTDTTAKTSKLPTRPASTGVAGASSSLGPSGSASAGELSSSEPSTPAQTPLAAPIIPTPVLTSPGAVPPLPSPSKEEEGLRAQVRDLEEKLETLRLKRAEDKAKLKELEKHKIQLEQVQEWKSKMQEQQADLQRRLKEARKEAKEALEAKERYMEEMADTADAIEMATLDKEMAEERAESLQQEVEALKERVDELTTDLEILKAEIEEKGSDGAASSYQLKQLEEQNARLKDALVRMRDLSSSEKQEHVKLQKLMEKKNQELEVVRQQRERLQEELSQAESTIDELKEQVDAALGAEEMVEMLTDRNLNLEEKVRELRETVGDLEAMNEMNDELQENARETELELREQLDMAGARVREAQKRVEAAQETVADYQQTIKKYRQLTAHLQDVNRELTNQQEASVERQQQPPPETFDFKIKFAETKAHAKAIEMELRQMEVAQANRHMSLLTAFMPDSFLRPGGDHDCVLVLLLMPRLICKAELIRKQAQEKFELSENCSERPGLRGAAGEQLSFAAGLVYSLSLLQATLHRYEHALSQCSVDVYKKVGSLYPEMSAHERSLDFLIELLHKDQLDETVNVEPLTKAIKYYQHLYSIHLAEQPEDCTMQLADHIKFTQSALDCMSVEVGRLRAFLQGGQEATDIALLLRDLETSCSDIRQFCKKIRRRMPGTDAPGIPAALAFGPQVSDTLLDCRKHLTWVVAVLQEVAAAAAQLIAPLAENEGLLVAALEELAFKASEQIYGTPSSSPYECLRQSCNILISTMNKLATAMQEGEYDAERPPSKPPPVELRAAALRAEITDAEGLGLKLEDRETVIKELKKSLKIKGEELSEANVRLSLLEKKLDSAAKDADERIEKVQTRLEETQALLRKKEKEFEETMDALQADIDQLEAEKAELKQRLNSQSKRTIEGLRGPPPSGIATLVSGIAGGAIPGQAPGSVPGPGLVKDSPLLLQQISAMRLHISQLQHENSILKGAQMKASLASLPPLHVAKLSHEGPGSELPAGALYRKTSQLLETLNQLSTHTHVVDITRTSPAAKSPSAQLMEQVAQLKSLSDTVEKLKDEVLKETVSQRPGATVPTDFATFPSSAFLRAKEEQQDDTVYMGKVTFSCAAGFGQRHRLVLTQEQLHQLHSRLIS

SEQ ID NO: 25882 - protein, 1139 aa, Homo sapiens
  Payload ID: 5128
  Gene Symbol: DCTN1
  Gene Name: dynactin 1
  Uniprot ID: Q14203
  ENSP ID: ENSP00000387270
MMRQAPTARKTTTRRPKPTRPASTGVAGASSSLGPSGSASAGELSSSEPSTPAQTPLAAPIIPTPVLTSPGAVPPLPSPSKEEEGLRAQVRDLEEKLETLRLKRAEDKAKLKELEKHKIQLEQVQEWKSKMQEQQADLQRRLKEARKEAKEALEAKERYMEEMADTADAIEMATLDKEMAEERAESLQQEVEALKERVDELTTDLEILKAEIEEKGSDGAASSYQLKQLEEQNARLKDALVRMRDLSSSEKQEHVKLQKLMEKKNQELEVVRQQRERLQEELSQAESTIDELKEQVDAALGAEEMVEMLTDRNLNLEEKVRELRETVGDLEAMNEMNDELQENARETELELREQLDMAGARVREAQKRVEAAQETVADYQQTIKKYRQLTAHLQDVNRELTNQQEASVERQQQPPPETFDFKIKFAETKAHAKAIEMELRQMEVAQANRHMSLLTAFMPDSFLRPGGDHDCVLVLLLMPRLICKAELIRKQAQEKFELSENCSERPGLRGAAGEQLSFAAGLVYSLSLLQATLHRYEHALSQCSVDVYKKVGSLYPEMSAHERSLDFLIELLHKDQLDETVNVEPLTKAIKYYQHLYSIHLAEQPEDCTMQLADHIKFTQSALDCMSVEVGRLRAFLQGGQEATDIALLLRDLETSCSDIRQFCKKIRRRMPGTDAPGIPAALAFGPQVSDTLLDCRKHLTWVVAVLQEVAAAAAQLIAPLAENEGLLVAALEELAFKASEQIYGTPSSSPYECLRQSCNILISTMNKLATAMQEGEYDAERPPSKPPPVELRAAALRAEITDAEGLGLKLEDRETVIKELKKSLKIKGEELSEANVRLSLLEKKLDSAAKDADERIEKVQTRLEETQALLRKKEKEFEETMDALQADIDQLEAEKAELKQRLNSQSKRTIEGLRGPPPSGIATLVSGIAGGAIPGQAPGSVPGPGLVKDSPLLLQQISAMRLHISQLQHENSILKGAQMKASLASLPPLHVAKLSHEGPGSELPAGALYRKTSQLLETLNQLSTHTHVVDITRTSPAAKSPSAQLMEQVAQLKSLSDTVEKLKDEVLKETVSQRPGATVPTDFATFPSSAFLRAKEEQQDDTVYMGKVTFSCAAGFGQRHRLVLTQEQLHQLHSRLIS

SEQ ID NO: 25883 - protein, 1256 aa, Homo sapiens
  Payload ID: 5128
  Gene Symbol: DCTN1
  Gene Name: dynactin 1
  ENSP ID: ENSP00000387327
MSAEASARPLRVGSRVEVIGKGHRGTVAYVGATLFATGKWVGVILDEAKGKNDGTVQGRKYFTCDEGHGIFVRQSQIQVFEDGADTTSPETPDSSASKVLKREGTDTTAKTSKLRGLKPKKAPTARKTTTRRPKPTRPASTGVAGASSSLGPSGSASAGELSSSEPSTPAQTPLAAPIIPTPVLTSPGAVPPLPSPSKEEEGLRAQVRDLEEKLETLRLKRAEDKAKLKELEKHKIQLEQVQEWKSKMQEQQADLQRRLKEARKEAKEALEAKERYMEEMADTADAIEMATLDKEMAEERAESLQQEVEALKERVDELTTDLEILKAEIEEKGSDGAASSYQLKQLEEQNARLKDALVRMRDLSSSEKQEHVKLQKLMEKKNQELEVVRQQRERLQEELSQAESTIDELKEQVDAALGAEEMVEMLTDRNLNLEEKVRELRETVGDLEAMNEMNDELQENARETELELREQLDMAGARVREAQKRVEAAQETVADYQQTIKKYRQLTAHLQDVNRELTNQQEASVERQQQPPPETFDFKIKFAETKAHAKAIEMELRQMEVAQANRHMSLLTAFMPDSFLRPGGDHDCVLVLLLMPRLICKAELIRKQAQEKFELSENCSERPGLRGAAGEQLSFAAGLVYSLSLLQATLHRYEHALSQCSVDVYKKVGSLYPEMSAHERSLDFLIELLHKDQLDETVNVEPLTKAIKYYQHLYSIHLAEQPEDCTMQLADHIKFTQSALDCMSVEVGRLRAFLQGGQEATDIALLLRDLETSCSDIRQFCKKIRRRMPGTDAPGIPAALAFGPQVSDTLLDCRKHLTWVVAVLQEVAAAAAQLIAPLAENEGLLVAALEELAFKASEQIYGTPSSSPYECLRQSCNILISTMNKLATAMQEGEYDAERPPSKPPPVELRAAALRAEITDAEGLGLKLEDRETVIKELKKSLKIKGEELSEANVRLSLLEKKLDSAAKDADERIEKVQTRLEETQALLRKKEKEFEETMDALQADIDQLEAEKAELKQRLNSQSKRTIEGLRGPPPSGIATLVSGIAGGAIPGQAPGSVPGPGLVKDSPLLLQQISAMRLHISQLQHENSILKGAQMKASLASLPPLHVAKLSHEGPGSELPAGALYRKTSQLLETLNQLSTHTHVVDITRTSPAAKSPSAQLMEQVAQLKSLSDTVEKLKDEVLKETVSQRPGATVPTDFATFPSSAFLRAKEEQQDDTVYMGKVTFSCAAGFGQRHRLVLTQEQLHQLHSRLIS

SEQ ID NO: 25884 - protein, 87 aa, Homo sapiens
  Payload ID: 5128
  Gene Symbol: DCTN1
  Gene Name: dynactin 1
  ENSP ID: ENSP00000395312
MSAEASARPLRVGSRVEVIGKGHRGTVAYVGATLFATGKWVGVILDEAKGKNDGTVQGRKYFTCDEGHGIFVRQSQIQVFEDGADTT

SEQ ID NO: 25885 - protein, 64 aa, Homo sapiens
  Payload ID: 5128
  Gene Symbol: DCTN1
  Gene Name: dynactin 1
  ENSP ID: ENSP00000400059
MSAEASARPLRVGSRVEVIGKGHRGTVAYVGATLFATGKWVGVILDEAKGKNDGTVQGRKYFTC

SEQ ID NO: 25886 - protein, 135 aa, Homo sapiens
  Payload ID: 5128
  Gene Symbol: DCTN1
  Gene Name: dynactin 1
  ENSP ID: ENSP00000402509
MCCLERVTLSVQAYKTPSGSRMSAEASARPLRVGSRVEVIGKGHRGTVAYVGATLFATGKWVGVILDEAKGKNDGTVQGRKYFTCDEGHGIFVRQSQIQVFEDGADTTSPETPDSSASKVLKREGTDTTAKTSKL

SEQ ID NO: 25887 - protein, 121 aa, Homo sapiens
  Payload ID: 5128
  Gene Symbol: DCTN1
  Gene Name: dynactin 1
  ENSP ID: ENSP00000404038
MSAEASARPLRVGSRVEVIGKGHRGTVAYVGATLFATGKWVGVILDEAKGKNDGTVQGRKYFTCDEGHGIFVRQSQIQVFEDGADTTSPETPDSSASKVLKREGTDTTAKTSKLRGLKPKK

SEQ ID NO: 25888 - protein, 13 aa, Homo sapiens
  Payload ID: 5128
  Gene Symbol: DCTN1
  Gene Name: dynactin 1
  ENSP ID: ENSP00000407484
MSAEASARPLRVG

SEQ ID NO: 25889 - protein, 76 aa, Homo sapiens
  Payload ID: 5128
  Gene Symbol: DCTN1
  Gene Name: dynactin 1
  ENSP ID: ENSP00000409363
MSAEASARPLRVGSRVEVIGKGHRGTVAYVGATLFATGKWVGVILDEAKGKNDGTVQGRKYFTCDEGHGIFVRQSQ

SEQ ID NO: 25890 - protein, 76 aa, Homo sapiens; identical to SEQ ID NO: 25889
  Payload ID: 5128
  Gene Symbol: DCTN1
  Gene Name: dynactin 1
  ENSP ID: ENSP00000413268

SEQ ID NO: 25891 - protein, 186 aa, Homo sapiens
  Payload ID: 5128
  Gene Symbol: DCTN1
  Gene Name: dynactin 1
  ENSP ID: ENSP00000414315
MLMGLLRPYILGERGTVMTPSGSRMSAEASARPLRVGSRVEVIGKGHRGTVAYVGATLFATGKWVGVILDEAKGKNDGTVQGRKYFTCDEGHGIFVRQSQIQVFEDGADTTSPETPDSSASKVLKREGTDTTAKTSKLRGLKPKKAPTARKTTTRRPKPTRPASTGVAGASSSLGPSGSASAGELS

SEQ ID NO: 25892 - protein, 890 aa, Homo sapiens
  Payload ID: 5128
  Gene Symbol: DCTN1
  Gene Name: dynactin 1
  ENSP ID: ENSP00000416711
MSAEASARPLRVGSRVEVIGKGHRGTVAYVGATLFATGKWVGVILDEAKGKNDGTVQGRKYFTCDEGHGIFVRQSQIQVFEDGADTTSPETPDSSASKVLKREGTDTTAKTSKLPTRPASTGVAGASSSLGPSGSASAGELSSSEPSTPAQTPLAAPIIPTPVLTSPGAVPPLPSPSKEEEGLRAQVRDLEEKLETLRLKRAEDKAKLKELEKHKIQLEQVQEWKSKMQEQQADLQRRLKEARKEAKEALEAKERYMEEMADTADAIEMATLDKEMAEERAESLQQEVEALKERVDELTTDLEILKAEIEEKGSDGAASSYQLKQLEEQNARLKDALVRMRDLSSSEKQEHVKLQKLMEKKNQELEVVRQQRERLQEELSQAESTIDELKEQVDAALGAEEMVEMLTDRNLNLEEKVRELRETVGDLEAMNEMNDELQENARETELELREQLDMAGARVREAQKRVEAAQETVADYQQTIKKYRQLTAHLQDVNRELTNQQEASVERQQQPPPETFDFKIKFAETKAHAKAIEMELRQMEVAQANRHMSLLTAFMPDSFLRPGGDHDCVLVLLLMPRLICKAELIRKQAQEKFELSENCSERPGLRGAAGEQLSFAAGLVYSLSLLQATLHRYEHALSQCSVDVYKKVGSLYPEMSAHERSLDFLIELLHKDQLDETVNVEPLTKAIKYYQHLYSIHLAEQPEDCTMQLADHIKFTQSALDCMSVEVGRLRAFLQGGQEATDIALLLRDLETSCSDIRQFCKKIRRRMPGTDAPGIPAALAFGPQVSDTLLDCRKHLTWVVAVLQEVAAAAAQLIAPLAENEGLLVAALEELAFKASEQVGLDGWVEGVGRVSDQCGAFTSALGSCRSMGPPPAAPMSVCASHATSSSVP

SEQ ID NO: 25893 - protein, 1256 aa, Homo sapiens; identical to SEQ ID NO: 25883
  Payload ID: 5128
  Gene Symbol: DCTN1
  Gene Name: dynactin 1
  ENSP ID: ENSP00000487279

SEQ ID NO: 25894 - protein, 1144 aa, Homo sapiens
  Payload ID: 5128
  Gene Symbol: DCTN1
  Gene Name: dynactin 1
  Uniprot ID: Q14203
  ENSP ID: ENSP00000487724
MMRQAPTARKTTTRRPKPTRPASTGVAGASSSLGPSGSASAGELSSSEPSTPAQTPLAAPIIPTPVLTSPGAVPPLPSPSKEEEGLRAQVRDLEEKLETLRLKRAEDKAKLKELEKHKIQLEQVQEWKSKMQEQQADLQRRLKEARKEAKEALEAKERYMEEMADTADAIEMATLDKEMAEERAESLQQEVEALKERVDELTTDLEILKAEIEEKGSDGAASSYQLKQLEEQNARLKDALVRMRDLSSSEKQEHVKLQKLMEKKNQELEVVRQQRERLQEELSQAESTIDELKEQVDAALGAEEMVEMLTDRNLNLEEKVRELRETVGDLEAMNEMNDELQENARETELELREQLDMAGARVREAQKRVEAAQETVADYQQTIKKYRQLTAHLQDVNRELTNQQEASVERQQQPPPETFDFKIKFAETKAHAKAIEMELRQMEVAQANRHMSLLTAFMPDSFLRPGGDHDCVLVLLLMPRLICKAELIRKQAQEKFELSENCSERPGLRGAAGEQLSFAAGLVYSLSLLQATLHRYEHALSQCSVDVYKKVGSLYPEMSAHERSLDFLIELLHKDQLDETVNVEPLTKAIKYYQHLYSIHLAEQPEDCTMQLADHIKFTQSALDCMSVEVGRLRAFLQGGQEATDIALLLRDLETSCSDIRQFCKKIRRRMPGTDAPGIPAALAFGPQVSDTLLDCRKHLTWVVAVLQEVAAAAAQLIAPLAENEGLLVAALEELAFKASEQIYGTPSSSPYECLRQSCNILISTMNKLATAMQEGEYDAERPPSKPPPVELRAAALRAEITDAEGLGLKLEDRETVIKELKKSLKIKGEELSEANVRLSLLEKKLDSAAKDADERIEKVQTRLEETQALLRKKEKEFEETMDALQADIDQLEAEKAELKQRLNSQSKRTIEGLRGPPPSGIATLVSGIAGEEQQRGAIPGQAPGSVPGPGLVKDSPLLLQQISAMRLHISQLQHENSILKGAQMKASLASLPPLHVAKLSHEGPGSELPAGALYRKTSQLLETLNQLSTHTHVVDITRTSPAAKSPSAQLMEQVAQLKSLSDTVEKLKDEVLKETVSQRPGATVPTDFATFPSSAFLRAKEEQQDDTVYMGKVTFSCAAGFGQRHRLVLTQEQLHQLHSRLIS

SEQ ID NO: 25895 - protein, 406 aa, Homo sapiens
  Payload ID: 5129
  Gene Symbol: DCTN2
  Gene Name: dynactin 2 (p50)
  Uniprot ID: Q13561
  ENSP ID: ENSP00000408910
MADPKYADLPGIARNEPDVYETSDLPEDDQAEFDAFAQELEELTSTSVEHIIVNPNAAYDKFKDKRVGTKGLDFSDRIGKTKRTGYESGEYEMLGEGLGVKETPQQKYQRLLHEVQELTTEVEKIKTTVKESATEEKLTPVLLAKQLAALKQQLVASHLEKLLGPDAAINLTDPDGALAKRLLLQLEATKNSKGGSGGKTTGTPPDSSLVTYELHSRPEQDKFSQAAKVAELEKRLTELETAVRCDQDAQNPLSAGLQGACLMETVELLQAKVSALDLAVLDQVEARLQSVLGKVNEIAKHKASVEDADTQSKVHQLYETIQRWSPIASTLPELVQRLVTIKQLHEQAMQFGQLLTHLDTTQQMIANSLKDNTTLLTQVQTTMRENLATVEGNFASIDERMKKLGK

SEQ ID NO: 25896 - protein, 403 aa, Homo sapiens
  Payload ID: 5129
  Gene Symbol: DCTN2
  Gene Name: dynactin 2 (p50)
  Uniprot ID: Q13561
  ENSP ID: ENSP00000439376
MADPKYADLPGIARNEPDVYETSDLPEDDQAEFDAELEELTSTSVEHIIVNPNAAYDKFKDKRVGTKGLDFSDRIGKTKRTGYESGEYEMLGEGLGVKETPQQKYQRLLHEVQELTTEVEKIKTTVKESATEEKLTPVLLAKQLAALKQQLVASHLEKLLGPDAAINLTDPDGALAKRLLLQLEATKNSKGGSGGKTTGTPPDSSLVTYELHSRPEQDKFSQAAKVAELEKRLTELETAVRCDQDAQNPLSAGLQGACLMETVELLQAKVSALDLAVLDQVEARLQSVLGKVNEIAKHKASVEDADTQSKVHQLYETIQRWSPIASTLPELVQRLVTIKQLHEQAMQFGQLLTHLDTTQQMIANSLKDNTTLLTQVQTTMRENLATVEGNFASIDERMKKLGK

SEQ ID NO: 25897 - protein, 315 aa, Homo sapiens
  Payload ID: 5129
  Gene Symbol: DCTN2
  Gene Name: dynactin 2 (p50)
  ENSP ID: ENSP00000446964
MADPKYADLPGIARNEPDVYETSDLPEDDQAEFDAEELTSTSVEHIIVNPNAAYDKFKDKRVGTKGLDFSDRIGKTKRTGYESGEYEMLGEGLGVKETPQQKYQRLLHEVQELTTEVEKIKTTVKESATEEKLTPVLLAKQLAALKQQLVASHLEKLLGPDAAINLTDPDGALAKRLLLQLEATKNSKGGSGGKTTGTPPDSSLVTYELHSRPEQDKFSQAAKVAELEKRLTELETAVRCDQDAQNPLSAGLQGACLMETVELLQAKVSALDLAVLDQVEARLQSVLGKVNEIAKHKASVEDADTQSKPCSLVSS

SEQ ID NO: 25898 - protein, 128 aa, Homo sapiens
  Payload ID: 5129
  Gene Symbol: DCTN2
  Gene Name: dynactin 2 (p50)
  ENSP ID: ENSP00000447308
EELTSTSVEHIIVNPNAAYDKFKDKRVGTKGLDFSDRIGKTKRTGYESGEYEMLGEGLGVKETPQQKYQRLLHEVQELTTEVEKIKNPLSAGLQGACLMETVELLQAKVSALDLAVLDQVEARLQSVL

SEQ ID NO: 25899 - protein, 45 aa, Homo sapiens
  Payload ID: 5129
  Gene Symbol: DCTN2
  Gene Name: dynactin 2 (p50)
  ENSP ID: ENSP00000447553
MADPKYADLPGIARNEPDVYETSDLPEDDQAEFDAFAQIFKTLLE

SEQ ID NO: 25900 - protein, 401 aa, Homo sapiens
  Payload ID: 5129
  Gene Symbol: DCTN2
  Gene Name: dynactin 2 (p50)
  Uniprot ID: Q13561
  ENSP ID: ENSP00000447824
MADPKYADLPGIARNEPDVYETSDLPEDDQAEFDAEELTSTSVEHIIVNPNAAYDKFKDKRVGTKGLDFSDRIGKTKRTGYESGEYEMLGEGLGVKETPQQKYQRLLHEVQELTTEVEKIKTTVKESATEEKLTPVLLAKQLAALKQQLVASHLEKLLGPDAAINLTDPDGALAKRLLLQLEATKNSKGGSGGKTTGTPPDSSLVTYELHSRPEQDKFSQAAKVAELEKRLTELETAVRCDQDAQNPLSAGLQGACLMETVELLQAKVSALDLAVLDQVEARLQSVLGKVNEIAKHKASVEDADTQSKVHQLYETIQRWSPIASTLPELVQRLVTIKQLHEQAMQFGQLLTHLDTTQQMIANSLKDNTTLLTQVQTTMRENLATVEGNFASIDERMKKLGK

SEQ ID NO: 25901 - protein, 152 aa, Homo sapiens
  Payload ID: 5129
  Gene Symbol: DCTN2
  Gene Name: dynactin 2 (p50)
  ENSP ID: ENSP00000448606
MADPKYADLPGIARNEPDVYETSDLPEDDQAEFDAEELTSTSVEHIIVNPNAAYDKFKDKRVGTKGLDFSDRIGKTKRTGYESGEYEMLGEGLGVKETPQQKYQRLLHEVQELTTEVEKIKVAELEKRLTELETAVRCDQDAQNPLSAGLQG

SEQ ID NO: 25902 - protein, 268 aa, Homo sapiens
  Payload ID: 5129
  Gene Symbol: DCTN2
  Gene Name: dynactin 2 (p50)
  ENSP ID: ENSP00000448937
VEKIKTTVKESATEEKLTPVLLAKQLAALKQQLVASHLEKLLGPDAAINLTDPDGALAKRLLLQLEATKNSKGGSGGKTTGTPPDSSLVTYELHSRPEQDKFSQAAKVAELEKRLTELETAVRCDQDAQNPLSAGLQGACLMETVELLQAKSVLGKVNEIAKHKASVEDADTQSKVHQLYETIQRWSPIASTLPELVQRLVTIKQLHEQAMQFGQLLTHLDTTQQMIANSLKDNTTLLTQVQTTMRENLATVEGNFASIDERMKKLGK

SEQ ID NO: 25903 - protein, 135 aa, Homo sapiens
  Payload ID: 5129
  Gene Symbol: DCTN2
  Gene Name: dynactin 2 (p50)
  ENSP ID: ENSP00000449710
MADPKYADLPGIEELTSTSVEHIIVNPNAAYDKFKDKRVGTKGLDFSDRIGKTKRTGYESGEYEMLGEGLGVKETPQQKYQRLLHEVQELTTEVEKIKTTVKESATEEKLTPVLLAKQLAALKQQLVASHLEKLL

SEQ ID NO: 25904 - protein, 278 aa, Homo sapiens
  Payload ID: 5129
  Gene Symbol: DCTN2
  Gene Name: dynactin 2 (p50)
  ENSP ID: ENSP00000449855
MADPKYADLPGIARNEPDVYETSDLPEDDQAEFDAELVRSLTFHLLFNGEELTSTSVEHIIVNPNAAYDKFKDKRVGTKGLDFSDRIGKTKRTGYESGEYEMLGEGLGVKETPQQKYQRLLHEVQELTTEVEKIKTTVKESATEEKLTPVLLAKQLAALKQQLVASHLEKLLGPDAAINLTDPDGALAKRLLLQLEATKNSKGGSGGKTTGTPPDSSLVTYELHSRPEQDKFSQAAKVAELEKRLTELETAVRCDQDAQNPLSAGLQGACLMETVELL

SEQ ID NO: 25905 - protein, 186 aa, Homo sapiens
  Payload ID: 5130
  Gene Symbol: DCTN3
  Gene Name: dynactin 3 (p22)
  Uniprot ID: O75935
  ENSP ID: ENSP00000259632
MAGLTDLQRLQARVEELERWVYGPGGARGSRKVADGLVKVQVALGNISSKRERVKILYKKIEDLIKYLDPEYIDRIAIPDASKLQFILAEEQFILSQVALLEQVNALVPMLDSAHIKAVPEHAARLQRLAQIHIQQQDQCVEITEESKALLEEYNKTTMLLSKQFVQWDELLCQLEAATQVKPAEE

SEQ ID NO: 25906 - protein, 176 aa, Homo sapiens
  Payload ID: 5130
  Gene Symbol: DCTN3
  Gene Name: dynactin 3 (p22)
  Uniprot ID: O75935
  ENSP ID: ENSP00000343986
MAGLTDLQRLQARVEELERWVYGPGGARGSRKVADGLVKVQVALGNISSKRERVKILYKKIEDLIKYLDPEYIDRIAIPDASKLQFILAEEQFILSQVALLEQVNALVPMLDSAHIKAVPEHAARLQRLAQIHIQQQAPWGVGVRDEAGSLVEDVGFAQFLSVLHFGPTGPVCGNH

SEQ ID NO: 25907 - protein, 160 aa, Homo sapiens
  Payload ID: 5130
  Gene Symbol: DCTN3
  Gene Name: dynactin 3 (p22)
  ENSP ID: ENSP00000368191
MAGLTDLQRLQARVEELERWVYGPGGARGSRKVADGLVKVQVALGNISSKRERVKILYKKIEDLIKYLDPEYIDRIAIPDASKLQFILAGNAGLHVYMHLRMWVVGEVKHRDGLSIQSSGGYKPWMLLSGIVAWFWVEDPMDPLVDIEYSIPLHQLQAMV

SEQ ID NO: 25908 - protein, 142 aa, Homo sapiens
  Payload ID: 5130
  Gene Symbol: DCTN3
  Gene Name: dynactin 3 (p22)
  ENSP ID: ENSP00000368193
MAGLTDLQRLQARVEELERWVYGPGGARGSRKVADGLVKVQVALGNISSKRERVKILYKKIEDLIKYLDPEYIDRIAIPDASKLQFILAEEQFILSQVALLEQVNALVPMLDSAHIKAVPEHAARLQRLAQIHIQQQVWEGR

SEQ ID NO: 25909 - protein, 158 aa, Homo sapiens
  Payload ID: 5130
  Gene Symbol: DCTN3
  Gene Name: dynactin 3 (p22)
  Uniprot ID: O75935
  ENSP ID: ENSP00000368196
MAGLTDLQRLQARVEELERWVYGPGGARGSRKVADGLVKVQVALGNISSKRERVKILYKKIEDLIKYLDPEYIDRIAIPDASKLQFILAAVPEHAARLQRLAQIHIQQQDQCVEITEESKALLEEYNKTTMLLSKQFVQWDELLCQLEAATQVKPAEE

SEQ ID NO: 25910 - protein, 151 aa, Homo sapiens
  Payload ID: 5130
  Gene Symbol: DCTN3
  Gene Name: dynactin 3 (p22)
  ENSP ID: ENSP00000390842
QRLQARVEELERWVYGPGGARGSRKVADGLVKVQVALGNISSKRERVKILYKKIEDLIKYLDPEYIDRIAIPDASKLQFILAAVPEHAARLQRLAQIHIQQQDQCVEITEESKALLEEYNKTTMLLSKQFVQWDELLCQLEAATQVKPAEE

SEQ ID NO: 25911 - protein, 176 aa, Homo sapiens
  Payload ID: 5130
  Gene Symbol: DCTN3
  Gene Name: dynactin 3 (p22)
  ENSP ID: ENSP00000432915
MAGLTDLQRLQARVEELERWVYGPGGARGSRKVADGLVKVQVALGNISSKRERVKILYKKIEDLIKYLDPEYIDRIAIPDASKLQFILAEEQFILSQVALLEQVNALVPMLDSAHIKAVPEHAARLQRLAQIHIQQQIPILTLTYNQTMLLSKQFVQWDELLCQLEAATQVKPAEE

SEQ ID NO: 25912 - protein, 403 aa, Homo sapiens
  Payload ID: 5131
  Gene Symbol: DCTN4
  Gene Name: dynactin 4 (p62)
  Uniprot ID: Q9UJW0
  ENSP ID: ENSP00000411251
MPSAEAKLKKNRCANCFDCPGCMHTLSTRATSISTQLPDDPAKTTMKKAYYLACGFCRWTSRDVGMADKSVASGGWQEPENPHTQRMNKLIEYYQQLAQKEKVERDRKKLARRRNYMPLAFSDKYGLGTRLQRPRAGASISTLAGLSLKEGEDQKEIKIEPAQAVDEVEPLPEDYYTRPVNLTEVTTLQQRLLQPDFQPVCASQLYPRHKHLLIKRSLRCRKCEHNLSKPEFNPTSIKFKIQLVAVNYIPEVRIMSIPNLRYMKESQVLLTLTNPVENLTHVTLFECEEGDPDDINSTAKVVVPPKELVLAGKDAAAEYDELAEPQDFQDDPDIIAFRKANKVGIFIKVTPQREEGEVTVCFKMKHDFKNLAAPIRPIEESDQGTEVIWLTQHVELSLGPLLP

SEQ ID NO: 25913 - protein, 467 aa, Homo sapiens
  Payload ID: 5131
  Gene Symbol: DCTN4
  Gene Name: dynactin 4 (p62)
  Uniprot ID: Q9UJW0
  ENSP ID: ENSP00000414906
MASLLQSDRVLYLVQGEKKVRAPLSQLYFCRYCSELRSLECVSHEVDSHYCPSCLENMPSAEAKLKKNRCANCFDCPGCMHTLSTRATSISTQLPDDPAKTTMKKAYYLACGFCRWTSRDVGMADKSVASGGWQEPENPHTQRMNKLIEYYQQLAQKEKVERDRKKLARRRNYMPLAFSQHTIHVVDKYGLGTRLQRPRAGASISTLAGLSLKEGEDQKEIKIEPAQAVDEVEPLPEDYYTRPVNLTEVTTLQQRLLQPDFQPVCASQLYPRHKHLLIKRSLRCRKCEHNLSKPEFNPTSIKFKIQLVAVNYIPEVRIMSIPNLRYMKESQVLLTLTNPVENLTHVTLFECEEGDPDDINSTAKVVVPPKELVLAGKDAAAEYDELAEPQDFQDDPDIIAFRKANKVGIFIKVTPQREEGEVTVCFKMKHDFKNLAAPIRPIEESDQGTEVIWLTQHVELSLGPLLP

SEQ ID NO: 25914 - protein, 460 aa, Homo sapiens
  Payload ID: 5131
  Gene Symbol: DCTN4
  Gene Name: dynactin 4 (p62)
  Uniprot ID: Q9UJW0
  ENSP ID: ENSP00000416968
MASLLQSDRVLYLVQGEKKVRAPLSQLYFCRYCSELRSLECVSHEVDSHYCPSCLENMPSAEAKLKKNRCANCFDCPGCMHTLSTRATSISTQLPDDPAKTTMKKAYYLACGFCRWTSRDVGMADKSVASGGWQEPENPHTQRMNKLIEYYQQLAQKEKVERDRKKLARRRNYMPLAFSDKYGLGTRLQRPRAGASISTLAGLSLKEGEDQKEIKIEPAQAVDEVEPLPEDYYTRPVNLTEVTTLQQRLLQPDFQPVCASQLYPRHKHLLIKRSLRCRKCEHNLSKPEFNPTSIKFKIQLVAVNYIPEVRIMSIPNLRYMKESQVLLTLTNPVENLTHVTLFECEEGDPDDINSTAKVVVPPKELVLAGKDAAAEYDELAEPQDFQDDPDIIAFRKANKVGIFIKVTPQREEGEVTVCFKMKHDFKNLAAPIRPIEESDQGTEVIWLTQHVELSLGPLLP

SEQ ID NO: 25915 - protein, 91 aa, Homo sapiens
  Payload ID: 5131
  Gene Symbol: DCTN4
  Gene Name: dynactin 4 (p62)
  ENSP ID: ENSP00000428987
MNKLIEYYQQLAQKEKVERDRKKLARRRNYMPLAFSDKYGLGTRLQRPRAGASISTLAGLSLKEGEDQKEIKIEPAQAVDEVEPLPEDYYT

SEQ ID NO: 25916 - protein, 86 aa, Homo sapiens
  Payload ID: 5131
  Gene Symbol: DCTN4
  Gene Name: dynactin 4 (p62)
  ENSP ID: ENSP00000429489
MASLLQSDRVLYLVQGEKKVRAPLSQLYFCRYCSELRSLECVSHEVDSHYCPSCLENMPSAEAKLKKNRLGECILRRRTTEMCQLF

SEQ ID NO: 25917 - protein, 114 aa, Homo sapiens
  Payload ID: 5131
  Gene Symbol: DCTN4
  Gene Name: dynactin 4 (p62)
  ENSP ID: ENSP00000430183
MPSAEAKLKKNRCANCFDCPGCMHTLSTRATSISTQLPDDPAKTTMKKAYYLACGFCRWTSRDVGMADKSVASGGWQEPENPHTQRMNKLIEYYQQLAQKEKVERDRKKLARRR

SEQ ID NO: 25918 - protein, 134 aa, Homo sapiens
  Payload ID: 5131
  Gene Symbol: DCTN4
  Gene Name: dynactin 4 (p62)
  ENSP ID: ENSP00000430993
MPSAEAKLKKNRCANCFDCPGCMHTLSTRATSISTQLPDDPAKTTMKKAYYLACGFCRWTSRDVGMADKSVASGGWQEPENPHTQRMNKLIEYYQQLAQKEKVERDRKKLARRRNYMPLAFSDKYGLGTRLQRP

SEQ ID NO: 25919 - protein, 86 aa, Homo sapiens; identical to SEQ ID NO: 25916
  Payload ID: 5131
  Gene Symbol: DCTN4
  Gene Name: dynactin 4 (p62)
  ENSP ID: ENSP00000431042

SEQ ID NO: 25920 - protein, 86 aa, Homo sapiens; identical to SEQ ID NO: 25916
  Payload ID: 5131
  Gene Symbol: DCTN4
  Gene Name: dynactin 4 (p62)
  ENSP ID: ENSP00000487323

SEQ ID NO: 25921 - protein, 182 aa, Homo sapiens
  Payload ID: 5132
  Gene Symbol: DCTN5
  Gene Name: dynactin 5 (p25)
  Uniprot ID: Q9BTE1
  ENSP ID: ENSP00000300087
MELGELLYNKSEYIETASGNKVSRQSVLCGSQNIVLNGKTIVMNDCIIRGDLANVRVGRHCVVKSRSVIRPPFKKFSKGVAFFPLHIGDHVFIEEDCVVNAAQIGSYVHVGKNCVIGRRCVLKDCCKILDNTVLPPETVVPPFTVFSGCPGLFSGELPECTQELMIDVTKSYYQKFLPLTQV

SEQ ID NO: 25922 - protein, 152 aa, Homo sapiens
  Payload ID: 5132
  Gene Symbol: DCTN5
  Gene Name: dynactin 5 (p25)
  Uniprot ID: Q9BTE1
  ENSP ID: ENSP00000454691
MELGELLYNKSEYIETASGNKVSRQSVLCGSQNIVLNGKTIVMNDCIIRGDLANVRVGRHCVVKSRSVIRPPFKKFSKGVAFFPLHIGDHVFIEEDCVVNAAQIGSYVHVGKNCVIGRRCVLKDCCKILDNTVLPPETVVPPFTVFSGCPAP

SEQ ID NO: 25923 - protein, 84 aa, Homo sapiens
  Payload ID: 5132
  Gene Symbol: DCTN5
  Gene Name: dynactin 5 (p25)
  Uniprot ID: Q9BTE1
  ENSP ID: ENSP00000455685
MELGELLYNKSEYIETASGNKVSRQSVLCGSQNIVLNGKNFVISVFLSPYIRCHSACRDRKRSDESVRLSVNNREWWGLVNWRM

SEQ ID NO: 25924 - protein, 155 aa, Homo sapiens
  Payload ID: 5132
  Gene Symbol: DCTN5
  Gene Name: dynactin 5 (p25)
  ENSP ID: ENSP00000456137
MELGELLYNKSEYIETASGNKVSRQSVLCGSQNIVLNGKTIVMNDCIIRGDLANVRVGRHCVVKSRSVIRPPFKKFSKGVAFFPLHIGDHVFIEEDCVVNAAQIGSYVHVGKNCVIGRRCVLKDCCKILDNTVLPPETVVPPFTVFSGCPGNLGC

SEQ ID NO: 25925 - protein, 75 aa, Homo sapiens
  Payload ID: 5132
  Gene Symbol: DCTN5
  Gene Name: dynactin 5 (p25)
  ENSP ID: ENSP00000456483
MELGELLYNKSEYIETASGNKVSRQSVLCGSQNIVLNGKAGVQWRDLGSLQPPPPRFKRFSCLSLPSSWDYCRPL

SEQ ID NO: 25926 - protein, 53 aa, Homo sapiens
  Payload ID: 5132
  Gene Symbol: DCTN5
  Gene Name: dynactin 5 (p25)
  ENSP ID: ENSP00000457585
MELGELLYNKSEYIETASGNKVSRQSVLCGSQNIVLNGKCCILSFTYWRPCLY

SEQ ID NO: 25927 - protein, 99 aa, Homo sapiens
  Payload ID: 5132
  Gene Symbol: DCTN5
  Gene Name: dynactin 5 (p25)
  ENSP ID: ENSP00000458354
MNDCIIRGDLANVRVGRHCVVKSRSVIRPPFKKFSKGVAFFPLHIGDHVFIEEDCVVNAAQIGSYVHVGKNCVIGRRCVLKDCCKILDNTVLPPETVVP

SEQ ID NO: 25928 - protein, 190 aa, Homo sapiens
  Payload ID: 5133
  Gene Symbol: DCTN6
  Gene Name: dynactin 6
  Uniprot ID: O00399
  ENSP ID: ENSP00000221114
MAEKTQKSVKIAPGAVVCVESEIRGDVTIGPRTVIHPKARIIAEAGPIVIGEGNLIEEQALIINAYPDNITPDTEDPEPKPMIIGTNNVFEVGCYSQAMKMGDNNVIESKAYVGRNVILTSGCIIGACCNLNTFEVIPENTVIYGADCLRRVQTERPQPQTLQLDFLMKILPNYHHLKKTMKGSSTPVKN

SEQ ID NO: 25929 - protein, 73 aa, Homo sapiens
  Payload ID: 5133
  Gene Symbol: DCTN6
  Gene Name: dynactin 6
  ENSP ID: ENSP00000427955
MAEKTQKSVKIAPGAVVCVESEIRGDVTIGPRTVIHPKARIIAEAGPIVIGEGNLIEEQALIINAFPSHEDGR

SEQ ID NO: 25930 - protein, 37 aa, Homo sapiens
  Payload ID: 5133
  Gene Symbol: DCTN6
  Gene Name: dynactin 6
  ENSP ID: ENSP00000429408
MAEKTQKSVKIAPGAVVCVESEIRGDVTIAGHGGACL

SEQ ID NO: 25931 - protein, 46 aa, Homo sapiens
  Payload ID: 5133
  Gene Symbol: DCTN6
  Gene Name: dynactin 6
  ENSP ID: ENSP00000430109
MAEKTQKSVKIAPGAVVCVESEIRGDVTIVTQIISLLTLKIQNQNL

SEQ ID NO: 25932 - protein, 170 aa, Homo sapiens
  Payload ID: 5133
  Gene Symbol: DCTN6
  Gene Name: dynactin 6
  ENSP ID: ENSP00000431017
MAEKTQKSVKIAPGAVVCVESEIRGDVTIGPRTVIHPKARIIAEAGPIVIGEGNLIEEQALIINAYPDNITPDTEDPEPKPMIIGTNNVFEVGCYSQAMKMGDNNVIESKAYVGRNVILTSGCIIGACCNLNTFEVIPENTVIYGADCLRRVQTERPQVLEPLFKKSSIC

SEQ ID NO: 25933 - protein, 210 aa, Homo sapiens
  Payload ID: 5134
  Gene Symbol: DYNAP
  Gene Name: dynactin associated protein
  Uniprot ID: Q8N1N2
  ENSP ID: ENSP00000315265
MVADIKGNEQIEKYSWREACDTGSSRMDRKHGKYILNVEHSENQPPITHPNDQEAHSSICWCLPSNDITSDVSPNLTGVCVNPGILAHSRCLQSESCNTQVKEYCRNDWSMWKVFLACLLACVIMTAIGVLIICLVNNKGSANSSIVIQLSTNDGECVTVKPGTPSPACPPTMTTTSTVPASTATESTTSTATAATTSTEPITVAPTDHL

SEQ ID NO: 25934 - protein, 158 aa, Homo sapiens
  Payload ID: 5134
  Gene Symbol: DYNAP
  Gene Name: dynactin associated protein
  ENSP ID: ENSP00000466577
MEYQLLDIKGNEQIEKYSWREACDTGSSRMDRKHGKYILNVEHSENQPVKEYCRNDWSMWKVFLACLLACVIMTAIGVLIICLVNNKGSANSSIVIQLSTNDGECVTVKPGTPSPACPPTMTTTSTVPASTATESTTSTATAATTSTEPITVAPTDHL

SEQ ID NO: 25935 - protein, 851 aa, Homo sapiens
  Payload ID: 5135
  Gene Symbol: DNM1
  Gene Name: dynamin 1
  Uniprot ID: Q05193
  ENSP ID: ENSP00000345680
MGNRGMEDLIPLVNRLQDAFSAIGQNADLDLPQIAVVGGQSAGKSSVLENFVGRDFLPRGSGIVTRRPLVLQLVNATTEYAEFLHCKGKKFTDFEEVRLEIEAETDRVTGTNKGISPVPINLRVYSPHVLNLTLVDLPGMTKVPVGDQPPDIEFQIRDMLMQFVTKENCLILAVSPANSDLANSDALKVAKEVDPQGQRTIGVITKLDLMDEGTDARDVLENKLLPLRRGYIGVVNRSQKDIDGKKDITAALAAERKFFLSHPSYRHLADRMGTPYLQKVLNQQLTNHIRDTLPGLRNKLQSQLLSIEKEVEEYKNFRPDDPARKTKALLQMVQQFAVDFEKRIEGSGDQIDTYELSGGARINRIFHERFPFELVKMEFDEKELRREISYAIKNIHGIRTGLFTPDMAFETIVKKQVKKIREPCLKCVDMVISELISTVRQCTKKLQQYPRLREEMERIVTTHIREREGRTKEQVMLLIDIELAYMNTNHEDFIGFANAQQRSNQMNKKKTSGNQDEILVIRKGWLTINNIGIMKGGSKEYWFVLTAENLSWYKDDEEKEKKYMLSVDNLKLRDVEKGFMSSKHIFALFNTEQRNVYKDYRQLELACETQEEVDSWKASFLRAGVYPERVGDKEKASETEENGSDSFMHSMDPQLERQVETIRNLVDSYMAIVNKTVRDLMPKTIMHLMINNTKEFIFSELLANLYSCGDQNTLMEESAEQAQRRDEMLRMYHALKEALSIIGDINTTTVSTPMPPPVDDSWLQVQSVPAGRRSPTSSPTPQRRAPAVPPARPGSRGPAPGPPPAGSALGGAPPVPSRPGASPDPFGPPPQVPSRPNRAPPGVPRITISDP

SEQ ID NO: 25936 - protein, 864 aa, Homo sapiens
  Payload ID: 5135
  Gene Symbol: DNM1
  Gene Name: dynamin 1
  Uniprot ID: Q05193
  ENSP ID: ENSP00000362014
MGNRGMEDLIPLVNRLQDAFSAIGQNADLDLPQIAVVGGQSAGKSSVLENFVGRDFLPRGSGIVTRRPLVLQLVNATTEYAEFLHCKGKKFTDFEEVRLEIEAETDRVTGTNKGISPVPINLRVYSPHVLNLTLVDLPGMTKVPVGDQPPDIEFQIRDMLMQFVTKENCLILAVSPANSDLANSDALKVAKEVDPQGQRTIGVITKLDLMDEGTDARDVLENKLLPLRRGYIGVVNRSQKDIDGKKDITAALAAERKFFLSHPSYRHLADRMGTPYLQKVLNQQLTNHIRDTLPGLRNKLQSQLLSIEKEVEEYKNFRPDDPARKTKALLQMVQQFAVDFEKRIEGSGDQIDTYELSGGARINRIFHERFPFELVKMEFDEKELRREISYAIKNIHGIRTGLFTPDMAFETIVKKQVKKIREPCLKCVDMVISELISTVRQCTKKLQQYPRLREEMERIVTTHIREREGRTKEQVMLLIDIELAYMNTNHEDFIGFANAQQRSNQMNKKKTSGNQDEILVIRKGWLTINNIGIMKGGSKEYWFVLTAENLSWYKDDEEKEKKYMLSVDNLKLRDVEKGFMSSKHIFALFNTEQRNVYKDYRQLELACETQEEVDSWKASFLRAGVYPERVGDKEKASETEENGSDSFMHSMDPQLERQVETIRNLVDSYMAIVNKTVRDLMPKTIMHLMINNTKEFIFSELLANLYSCGDQNTLMEESAEQAQRRDEMLRMYHALKEALSIIGDINTTTVSTPMPPPVDDSWLQVQSVPAGRRSPTSSPTPQRRAPAVPPARPGSRGPAPGPPPAGSALGGAPPVPSRPGASPDPFGPPPQVPSRPNRAPPGVPSRSGQASPSRPESPRPPFDL

SEQ ID NO: 25937 - protein, 851 aa, Homo sapiens
  Payload ID: 5135
  Gene Symbol: DNM1
  Gene Name: dynamin 1
  Uniprot ID: Q05193
  ENSP ID: ENSP00000377219
MGNRGMEDLIPLVNRLQDAFSAIGQNADLDLPQIAVVGGQSAGKSSVLENFVGRDFLPRGSGIVTRRPLVLQLVNATTEYAEFLHCKGKKFTDFEEVRLEIEAETDRVTGTNKGISPVPINLRVYSPHVLNLTLVDLPGMTKVPVGDQPPDIEFQIRDMLMQFVTKENCLILAVSPANSDLANSDALKVAKEVDPQGQRTIGVITKLDLMDEGTDARDVLENKLLPLRRGYIGVVNRSQKDIDGKKDITAALAAERKFFLSHPSYRHLADRMGTPYLQKVLNQQLTNHIRDTLPGLRNKLQSQLLSIEKEVEEYKNFRPDDPARKTKALLQMVQQFAVDFEKRIEGSGDQIDTYELSGGARINRIFHERFPFELVKMEFDEKELRREISYAIKNIHGIRTGLFTPDLAFEATVKKQVQKLKEPSIKCVDMVVSELTATIRKCSEKLQQYPRLREEMERIVTTHIREREGRTKEQVMLLIDIELAYMNTNHEDFIGFANAQQRSNQMNKKKTSGNQDEILVIRKGWLTINNIGIMKGGSKEYWFVLTAENLSWYKDDEEKEKKYMLSVDNLKLRDVEKGFMSSKHIFALFNTEQRNVYKDYRQLELACETQEEVDSWKASFLRAGVYPERVGDKEKASETEENGSDSFMHSMDPQLERQVETIRNLVDSYMAIVNKTVRDLMPKTIMHLMINNTKEFIFSELLANLYSCGDQNTLMEESAEQAQRRDEMLRMYHALKEALSIIGDINTTTVSTPMPPPVDDSWLQVQSVPAGRRSPTSSPTPQRRAPAVPPARPGSRGPAPGPPPAGSALGGAPPVPSRPGASPDPFGPPPQVPSRPNRAPPGVPRITISDP

SEQ ID NO: 25938 - protein, 851 aa, Homo sapiens; identical to SEQ ID NO: 25937
  Payload ID: 5135
  Gene Symbol: DNM1
  Gene Name: dynamin 1
  Uniprot ID: Q05193
  ENSP ID: ENSP00000419225

SEQ ID NO: 25939 - protein, 864 aa, Homo sapiens
  Payload ID: 5135
  Gene Symbol: DNM1
  Gene Name: dynamin 1
  Uniprot ID: Q05193
  ENSP ID: ENSP00000420045
MGNRGMEDLIPLVNRLQDAFSAIGQNADLDLPQIAVVGGQSAGKSSVLENFVGRDFLPRGSGIVTRRPLVLQLVNATTEYAEFLHCKGKKFTDFEEVRLEIEAETDRVTGTNKGISPVPINLRVYSPHVLNLTLVDLPGMTKVPVGDQPPDIEFQIRDMLMQFVTKENCLILAVSPANSDLANSDALKVAKEVDPQGQRTIGVITKLDLMDEGTDARDVLENKLLPLRRGYIGVVNRSQKDIDGKKDITAALAAERKFFLSHPSYRHLADRMGTPYLQKVLNQQLTNHIRDTLPGLRNKLQSQLLSIEKEVEEYKNFRPDDPARKTKALLQMVQQFAVDFEKRIEGSGDQIDTYELSGGARINRIFHERFPFELVKMEFDEKELRREISYAIKNIHGIRTGLFTPDLAFEATVKKQVQKLKEPSIKCVDMVVSELTATIRKCSEKLQQYPRLREEMERIVTTHIREREGRTKEQVMLLIDIELAYMNTNHEDFIGFANAQQRSNQMNKKKTSGNQDEILVIRKGWLTINNIGIMKGGSKEYWFVLTAENLSWYKDDEEKEKKYMLSVDNLKLRDVEKGFMSSKHIFALFNTEQRNVYKDYRQLELACETQEEVDSWKASFLRAGVYPERVGDKEKASETEENGSDSFMHSMDPQLERQVETIRNLVDSYMAIVNKTVRDLMPKTIMHLMINNTKEFIFSELLANLYSCGDQNTLMEESAEQAQRRDEMLRMYHALKEALSIIGDINTTTVSTPMPPPVDDSWLQVQSVPAGRRSPTSSPTPQRRAPAVPPARPGSRGPAPGPPPAGSALGGAPPVPSRPGASPDPFGPPPQVPSRPNRAPPGVPSRSGQASPSRPESPRPPFDL

SEQ ID NO: 25940 - protein, 131 aa, Homo sapiens
  Payload ID: 5135
  Gene Symbol: DNM1
  Gene Name: dynamin 1
  ENSP ID: ENSP00000420808
  MOD_RES (1)..(1): Any amino acid
XELSGGARINRIFHERFPFELVKMEFDEKELRREISYAIKNIHGIRTGLFTPDLAFEATVKKQVQKLKEPSIKCVDMVVSELTATIRKCSEKLAEHPGNVQRQPEWKKMLKGDRTSQRGGGCPAMGDTWKT

SEQ ID NO: 25941 - protein, 835 aa, Homo sapiens
  Payload ID: 5135
  Gene Symbol: DNM1
  Gene Name: dynamin 1
  ENSP ID: ENSP00000486437
MGNRGMEDLIPLVNRLQDAFSAIGQNADLDLPQIAVVGGQSAGKSSVLENFVGRDFLPRGSGIVTRRPLVLQLVNATTEYAEFLHCKGKKFTDFEEVRLEIEAETDRVTGTNKGISPVPINLRVYSPHVLNLTLVDLPGMTKVPVGDQPPDIEFQIRDMLMQFVTKENCLILAVSPANSDLANSDALKVAKEVDPQGQRTIGVITKLDLMDEGTDARDVLENKLLPLRRGYIGVVNRSQKDIDGKKDITAALAAERKFFLSHPSYRHLADRMGTPYLQKVLNQQLTNHIRDTLPGLRNKLQSQLLSIEKEVEEYKNFRPDDPARKTKALLQMVQQFAVDFEKRIEGSGDQIDTYELSGGARINRIFHERFPFELVKMEFDEKELRREISYAIKNIHGIRTGLFTPDLAFEATVKKQLQQYPRLREEMERIVTTHIREREGRTKEQVMLLIDIELAYMNTNHEDFIGFANAQQRSNQMNKKKTSGNQDEILVIRKGWLTINNIGIMKGGSKEYWFVLTAENLSWYKDDEEKEKKYMLSVDNLKLRDVEKGFMSSKHIFALFNTEQRNVYKDYRQLELACETQEEVDSWKASFLRAGVYPERVGDKEKASETEENGSDSFMHSMDPQLERQVETIRNLVDSYMAIVNKTVRDLMPKTIMHLMINNTKEFIFSELLANLYSCGDQNTLMEESAEQAQRRDEMLRMYHALKEALSIIGDINTTTVSTPMPPPVDDSWLQVQSVPAGRRSPTSSPTPQRRAPAVPPARPGSRGPAPGPPPAGSALGGAPPVPSRPGASPDPFGPPPQVPSRPNRAPPGVPSRSGQASPSRPESPRPPFDL

SEQ ID NO: 25942 - protein, 864 aa, Homo sapiens
  Payload ID: 5135
  Gene Symbol: DNM1
  Gene Name: dynamin 1
  ENSP ID: ENSP00000486525
MGNRGMEDLIPLVNRLQDAFSAIGQNADLDLPQIAVVGGQSAGKSSVLENFVGRDFLPRGSGIVTRRPLVLQLVNATTEYAEFLHCKGKKFTDFEEVRLEIEAETDRVTGTNKGISPVPINLRVYSPHVLNLTLVDLPGMTKVPVGDQPPDIEFQIRDMLMQFVTKENCLILAVSPANSDLANSDALKVAKEVDPQGQRTIGVITKLDLMDEGTDARDVLENKLLPLRRGYIGVVNRSQKDIDGKKDITAALAAERKFFLSHPSYRHLADRMGTPYLQKVLNQQLTNHIRDTLPGLRNKLQSQLLSIEKEVEEYKNFRPDDPARKTKALLQMVQQFAVDFEKRIEGSGDQIDTYELSGGARINRIFHERFPFELVKMEFDEKELRREISYAIKNIHGIRTGLFTPDMAFETIVKKQVKKIREPCLKCVDMVISELISTVRQCTKKLQQYPRLREEMERIVTTHIREREGRTKEQVMLLIDIELAYMNTNHEDFIGFANAQQRSNQMNKKKTSGNQVIRKGWLTINNIGIMKGGSKEYWFVLTAENLSWYKDDEEKEKKYMLSVDNLKLRDVEKGFMSSKHIFALFNTEQRNVYKDYRQLELACETQEEVDSWKASFLRAGVYPERVGDKEKASETEENGSDSFMHSMDPQLERQVETIRNLVDSYMAIVNKTVRDLMPKTIMHLMINNTKEFIFSELLANLYSCGDQNTLMEESAEQAQRRDEMLRMYHALKEALSIIGDINTTTVSTPMPPPVDDSWLQVQSVPAGRRSPTSSPTPQRRAPAVPPARPGSRGPAPGPPPAGSALGGAPPVPSRPGASPDPFGPPPQVPSRPNRAPPGVPSRKGPASPTRPAAPRPAEAPLLDL

SEQ ID NO: 25943 - protein, 53 aa, Homo sapiens
  Payload ID: 5135
  Gene Symbol: DNM1
  Gene Name: dynamin 1
  ENSP ID: ENSP00000486770
  MOD_RES (1)..(1): Any amino acid
XPGPPPAGSALGGAPPVPSRPGASPDPFGPPPQVPSRPNRAPPGVPRITISDP

SEQ ID NO: 25944 - protein, 851 aa, Homo sapiens; identical to SEQ ID NO: 25935
  Payload ID: 5135
  Gene Symbol: DNM1
  Gene Name: dynamin 1
  Uniprot ID: Q05193
  ENSP ID: ENSP00000487310

SEQ ID NO: 25945 - protein, 856 aa, Homo sapiens
  Payload ID: 5135
  Gene Symbol: DNM1
  Gene Name: dynamin 1
  ENSP ID: ENSP00000489096
MGNRGMEDLIPLVNRLQDAFSAIGQNADLDLPQIAVVGGQSAGKSSVLENFVGRDFLPRGSGIVTRRPLVLQLVNATTEYAEFLHCKGKKFTDFEEVRLEIEAETDRVTGTNKGISPVPINLRVYSPHVLNLTLVDLPGMTKVPVGDQPPDIEFQIRDMLMQFVTKENCLILAVSPANSDLANSDALKVAKEVDPQGQRTIGVITKLDLMDEGTDARDVLENKLLPLRRGYIGVVNRSQKDIDGKKDITAALAAERKFFLSHPSYRHLADRMGTPYLQKVLNQQLTNHIRDTLPGLRNKLQSQLLSIEKEVEEYKNFRPDDPARKTKALLQMVQQFAVDFEKRIEGSGDQIDTYELSGGARINRIFHERFPFELVKMEFDEKELRREISYAIKNIHGIRTGLFTPDMAFETIVKKQVKKIREPCLKCVDMVISELISTVRQCTKKLQQYPRLREEMERIVTTHIREREGRTKEQVMLLIDIELAYMNTNHEDFIGFANAQQRSNQMNKKKTSGNQDEILVIRKGWLTINNIGIMKGGSKEYWFVLTAENLSWYKDDEEKEKKYMLSVDNLKLRDVEKGFMSSKHIFALFNTEQRNVYKDYRQLELACETQEEVDSWKASFLRAGVYPERVGDKEKASETEENGSDSFMHSMDPQLERQVETIRNLVDSYMAIVNKTVRDLMPKTIMHLMINNTKEFIFSELLANLYSCGDQNTLMEESAEQAQRRDEMLRMYHALKEALSIIGDINTTTVSTPMPPPVDDSWLQVQSVPAGRRSPTSSPTPQRRAPAVPPARPGSRGPAPGPPPAGSALGGAPPVPSRPGASPDPFGPPPQVPSRPNRAPPGVPSQPIGSGKSIPS

SEQ ID NO: 25946 - protein, 699 aa, Homo sapiens
  Payload ID: 5136
  Gene Symbol: DNM1L
  Gene Name: dynamin 1-like
  Uniprot ID: O00429
  ENSP ID: ENSP00000266481
MEALIPVINKLQDVFNTVGADIIQLPQIVVVGTQSSGKSSVLESLVGRDLLPRGTGIVTRRPLILQLVHVSQEDKRKTTGEENGVEAEEWGKFLHTKNKLYTDFDEIRQEIENETERISGNNKGVSPEPIHLKIFSPNVVNLTLVDLPGMTKVPVGDQPKDIELQIRELILRFISNPNSIILAVTAANTDMATSEALKISREVDPDGRRTLAVITKLDLMDAGTDAMDVLMGRVIPVKLGIIGVVNRSQLDINNKKSVTDSIRDEYAFLQKKYPSLANRNGTKYLARTLNRLLMHHIRDCLPELKTRINVLAAQYQSLLNSYGEPVDDKSATLLQLITKFATEYCNTIEGTAKYIETSELCGGARICYIFHETFGRTLESVDPLGGLNTIDILTAIRNATGPRPALFVPEVSFELLVKRQIKRLEEPSLRCVELVHEEMQRIIQHCSNYSTQELLRFPKLHDAIVEVVTCLLRKRLPVTNEMVHNLVAIELAYINTKHPDFADACGLMNNNIEEQRRNRLARELPSAVSRDKVASGGGGVGDGVQEPTTGNWRGMLKTSKAEELLAEEKSKPIPIMPASPQKGHAVNLLDVPVPVARKLSAREQRDCEVIERLIKSYFLIVRKNIQDSVPKAVMHFLVNHVKDTLQSELVGQLYKSSLLDDLLTESEDMAQRRKEAADMLKALQGASQIIAEIRETHLW

SEQ ID NO: 25947 - protein, 712 aa, Homo sapiens
  Payload ID: 5136
  Gene Symbol: DNM1L
  Gene Name: dynamin 1-like
  ENSP ID: ENSP00000350948
MEALIPVINKLQDVFNTVGADIIQLPQIVVVGTQSSGKSSVLESLVGRDLLPRGTGIVTRRPLILQLVHVSQEDKRKTTGEENDPATWKNSRHLSKGVEAEEWGKFLHTKNKLYTDFDEIRQEIENETERISGNNKGVSPEPIHLKIFSPNVVNLTLVDLPGMTKVPVGDQPKDIELQIRELILRFISNPNSIILAVTAANTDMATSEALKISREVDPDGRRTLAVITKLDLMDAGTDAMDVLMGRVIPVKLGIIGVVNRSQLDINNKKSVTDSIRDEYAFLQKKYPSLANRNGTKYLARTLNRLLMHHIRDCLPELKTRINVLAAQYQSLLNSYGEPVDDKSATLLQLITKFATEYCNTIEGTAKYIETSELCGGARICYIFHETFGRTLESVDPLGGLNTIDILTAIRNATGPRPALFVPEVSFELLVKRQIKRLEEPSLRCVELVHEEMQRIIQHCSNYSTQELLRFPKLHDAIVEVVTCLLRKRLPVTNEMVHNLVAIELAYINTKHPDFADACGLMNNNIEEQRRNRLARELPSAVSRDKVASGGGGVGDGVQEPTTGNWRGMLKTSKAEELLAEEKSKPIPIMPASPQKGHAVNLLDVPVPVARKLSAREQRDCEVIERLIKSYFLIVRKNIQDSVPKAVMHFLVNHVKDTLQSELVGQLYKSSLLDDLLTESEDMAQRRKEAADMLKALQGASQIIAEIRETHLW

SEQ ID NO: 25948 - protein, 738 aa, Homo sapiens
  Payload ID: 5136
  Gene Symbol: DNM1L
  Gene Name: dynamin 1-like
  Uniprot ID: O00429
  ENSP ID: ENSP00000370388
MEALIPVINKLQDVFNTVGADIIQLPQIVVVGTQSSGKSSVLESLVGRDLLPRGTGIVTRRPLILQLVHVSQEDKRKTTGEENDPATWKNSRHLSKGVEAEEWGKFLHTKNKLYTDFDEIRQEIENETERISGNNKGVSPEPIHLKIFSPNVVNLTLVDLPGMTKVPVGDQPKDIELQIRELILRFISNPNSIILAVTAANTDMATSEALKISREVDPDGRRTLAVITKLDLMDAGTDAMDVLMGRVIPVKLGIIGVVNRSQLDINNKKSVTDSIRDEYAFLQKKYPSLANRNGTKYLARTLNRLLMHHIRDCLPELKTRINVLAAQYQSLLNSYGEPVDDKSATLLQLITKFATEYCNTIEGTAKYIETSELCGGARICYIFHETFGRTLESVDPLGGLNTIDILTAIRNATGPRPALFVPEVSFELLVKRQIKRLEEPSLRCVELVHEEMQRIIQHCSNYSTQELLRFPKLHDAIVEVVTCLLRKRLPVTNEMVHNLVAIELAYINTKHPDFADACGLMNNNIEEQRRNRLARELPSAVSRDKSSKVPSALAPASQEPSPAASAEADGKVASGGGGVGDGVQEPTTGNWRGMLKTSKAEELLAEEKSKPIPIMPASPQKGHAVNLLDVPVPVARKLSAREQRDCEVIERLIKSYFLIVRKNIQDSVPKAVMHFLVNHVKDTLQSELVGQLYKSSLLDDLLTESEDMAQRRKEAADMLKALQGASQIIAEIRETHLW

SEQ ID NO: 25949 - protein, 156 aa, Homo sapiens
  Payload ID: 5136
  Gene Symbol: DNM1L
  Gene Name: dynamin 1-like
  ENSP ID: ENSP00000390090
MEALIPVINKLQDVFNTVGADIIQLPQIVVVGTQSSGKSSVLESLVGRDLLPRGTGIVTRRPLILQLVHVSQEDKRKTTGEENGVEAEEWGKFLHTKNKLYTDFDEIRQEIENETERISGNNKGVSPEPIHLKIFSPNVVNLTLVDLPGMTKVAEP

SEQ ID NO: 25950 - protein, 180 aa, Homo sapiens
  Payload ID: 5136
  Gene Symbol: DNM1L
  Gene Name: dynamin 1-like
  ENSP ID: ENSP00000396030
MEALIPVINKLQDVFNTVGADIIQLPQIVVVGTQSSGKSSVLESLVGRDLLPRGTGIVTRRPLILQLVHVSQEDKRKTTGEENGVEAEEWGKFLHTKNKLYTDFDEIRQEIENETERISGNNKVPVGDQPKDIELQIRELILRFISNPNSIILAVTAANTDMATSEALKISREVDPDGAS

SEQ ID NO: 25951 - protein, 533 aa, Homo sapiens
  Payload ID: 5136
  Gene Symbol: DNM1L
  Gene Name: dynamin 1-like
  Uniprot ID: O00429
  ENSP ID: ENSP00000404160
MFHKKINGKQQEKKMTLLHGKTQDTFLKGWKQKNGVNFFTPKIRSQLDINNKKSVTDSIRDEYAFLQKKYPSLANRNGTKYLARTLNRLLMHHIRDCLPELKTRINVLAAQYQSLLNSYGEPVDDKSATLLQLITKFATEYCNTIEGTAKYIETSELCGGARICYIFHETFGRTLESVDPLGGLNTIDILTAIRNATGPRPALFVPEVSFELLVKRQIKRLEEPSLRCVELVHEEMQRIIQHCSNYSTQELLRFPKLHDAIVEVVTCLLRKRLPVTNEMVHNLVAIELAYINTKHPDFADACGLMNNNIEEQRRNRLARELPSAVSRDKSSKVPSALAPASQEPSPAASAEADGKLIQDSRRETKNVASGGGGVGDGVQEPTTGNWRGMLKTSKAEELLAEEKSKPIPIMPASPQKGHAVNLLDVPVPVARKLSAREQRDCEVIERLIKSYFLIVRKNIQDSVPKAVMHFLVNHVKDTLQSELVGQLYKSSLLDDLLTESEDMAQRRKEAADMLKALQGASQIIAEIRETHLW

SEQ ID NO: 25952 - protein, 710 aa, Homo sapiens
  Payload ID: 5136
  Gene Symbol: DNM1L
  Gene Name: dynamin 1-like
  Uniprot ID: O00429
  ENSP ID: ENSP00000415131
MEALIPVINKLQDVFNTVGADIIQLPQIVVVGTQSSGKSSVLESLVGRDLLPRGTGIVTRRPLILQLVHVSQEDKRKTTGEENGVEAEEWGKFLHTKNKLYTDFDEIRQEIENETERISGNNKGVSPEPIHLKIFSPNVVNLTLVDLPGMTKVPVGDQPKDIELQIRELILRFISNPNSIILAVTAANTDMATSEALKISREVDPDGRRTLAVITKLDLMDAGTDAMDVLMGRVIPVKLGIIGVVNRSQLDINNKKSVTDSIRDEYAFLQKKYPSLANRNGTKYLARTLNRLLMHHIRDCLPELKTRINVLAAQYQSLLNSYGEPVDDKSATLLQLITKFATEYCNTIEGTAKYIETSELCGGARICYIFHETFGRTLESVDPLGGLNTIDILTAIRNATGPRPALFVPEVSFELLVKRQIKRLEEPSLRCVELVHEEMQRIIQHCSNYSTQELLRFPKLHDAIVEVVTCLLRKRLPVTNEMVHNLVAIELAYINTKHPDFADACGLMNNNIEEQRRNRLARELPSAVSRDKLIQDSRRETKNVASGGGGVGDGVQEPTTGNWRGMLKTSKAEELLAEEKSKPIPIMPASPQKGHAVNLLDVPVPVARKLSAREQRDCEVIERLIKSYFLIVRKNIQDSVPKAVMHFLVNHVKDTLQSELVGQLYKSSLLDDLLTESEDMAQRRKEAADMLKALQGASQIIAEIRETHLW

SEQ ID NO: 25953 - protein, 168 aa, Homo sapiens
  Payload ID: 5136
  Gene Symbol: DNM1L
  Gene Name: dynamin 1-like
  ENSP ID: ENSP00000447013
MEALIPVINKLQDVFNTVGADIIQLPQIVVVGTQSSGKSSVLESLVGRDLLPRGTGIVTRRPLILQLVHVSQEDKRKTTGEENGVEAEEWGKFLHTKNKGVSPEPIHLKIFSPNVVNLTLVDLPGMTKVPVGDQPKDIELQIRELILRFISNPNSIILAVTAANTDMA

SEQ ID NO: 25954 - protein, 261 aa, Homo sapiens
  Payload ID: 5136
  Gene Symbol: DNM1L
  Gene Name: dynamin 1-like
  ENSP ID: ENSP00000447788
MEALIPVINKLQDVFNTVGADIIQLPQIVVVGTQSSGKSSVLESLVGRDLLPRGTGIVTRRPLILQLVHVSQEDKRKTTGEENGVEAEEWGKFLHTKNKLYTDFDEIRQEIENETERISGNNKVPVGDQPKDIELQIRELILRFISNPNSIILAVTAANTDMATSEALKISREVDPDGRRTLAVITKLDLMDAGTDAMDVLMGRVIPVKLGIIGVVNRSQLDINNKKSVTDSIRDEYAFLQKKYPSLANRNGTKYLARTLN

SEQ ID NO: 25955 - protein, 172 aa, Homo sapiens
  Payload ID: 5136
  Gene Symbol: DNM1L
  Gene Name: dynamin 1-like
  ENSP ID: ENSP00000447845
MEALIPVINKLQDVFNTVGADIIQLPQIVVVGTQSSGKSSVLESLVGRDLLPRDPATWKNSRHLSKGVEAEEWGKFLHTKNKLYTDFDEIRQEIENETERISGNNKGVSPEPIHLKIFSPNVVNLTLVDLPGMTKVPVGDQPKDIELQIRELILRFISNPNSIILAVTAANT

SEQ ID NO: 25956 - protein, 54 aa, Homo sapiens
  Payload ID: 5136
  Gene Symbol: DNM1L
  Gene Name: dynamin 1-like
  ENSP ID: ENSP00000448105
SSGKSSVLESLVGRDLLPRGTGIVTRRPLILQLVHVSQEDKRKTTGEENALHGF

SEQ ID NO: 25957 - protein, 725 aa, Homo sapiens
  Payload ID: 5136
  Gene Symbol: DNM1L
  Gene Name: dynamin 1-like
  Uniprot ID: O00429
  ENSP ID: ENSP00000448610
MEALIPVINKLQDVFNTVGADIIQLPQIVVVGTQSSGKSSVLESLVGRDLLPRGTGIVTRRPLILQLVHVSQEDKRKTTGEENGVEAEEWGKFLHTKNKLYTDFDEIRQEIENETERISGNNKGVSPEPIHLKIFSPNVVNLTLVDLPGMTKVPVGDQPKDIELQIRELILRFISNPNSIILAVTAANTDMATSEALKISREVDPDGRRTLAVITKLDLMDAGTDAMDVLMGRVIPVKLGIIGVVNRSQLDINNKKSVTDSIRDEYAFLQKKYPSLANRNGTKYLARTLNRLLMHHIRDCLPELKTRINVLAAQYQSLLNSYGEPVDDKSATLLQLITKFATEYCNTIEGTAKYIETSELCGGARICYIFHETFGRTLESVDPLGGLNTIDILTAIRNATGPRPALFVPEVSFELLVKRQIKRLEEPSLRCVELVHEEMQRIIQHCSNYSTQELLRFPKLHDAIVEVVTCLLRKRLPVTNEMVHNLVAIELAYINTKHPDFADACGLMNNNIEEQRRNRLARELPSAVSRDKSSKVPSALAPASQEPSPAASAEADGKVASGGGGVGDGVQEPTTGNWRGMLKTSKAEELLAEEKSKPIPIMPASPQKGHAVNLLDVPVPVARKLSAREQRDCEVIERLIKSYFLIVRKNIQDSVPKAVMHFLVNHVKDTLQSELVGQLYKSSLLDDLLTESEDMAQRRKEAADMLKALQGASQIIAEIRETHLW

SEQ ID NO: 25958 - protein, 48 aa, Homo sapiens
  Payload ID: 5136
  Gene Symbol: DNM1L
  Gene Name: dynamin 1-like
  ENSP ID: ENSP00000448802
  MOD_RES (1)..(1): Any amino acid
XHCSNYSTQELLRFPKLHDAIVEVVTCLLRKRLPVTNEMCIWVLGSGW

SEQ ID NO: 25959 - protein, 117 aa, Homo sapiens
  Payload ID: 5136
  Gene Symbol: DNM1L
  Gene Name: dynamin 1-like
  ENSP ID: ENSP00000448936
MEALIPVINKLQDVFNTVGADIIQLPQIVVVGTQSSGKSSVLESLVGRDLLPRGTGIVTRRPLILQLVHVSQEDKRKTTGEENDPATWKNSRHLSKGVEAEEWGKFLHTKNKEPARY

SEQ ID NO: 25960 - protein, 749 aa, Homo sapiens
  Payload ID: 5136
  Gene Symbol: DNM1L
  Gene Name: dynamin 1-like
  Uniprot ID: O00429
  ENSP ID: ENSP00000449089
MEALIPVINKLQDVFNTVGADIIQLPQIVVVGTQSSGKSSVLESLVGRDLLPRGTGIVTRRPLILQLVHVSQEDKRKTTGEENDPATWKNSRHLSKGVEAEEWGKFLHTKNKLYTDFDEIRQEIENETERISGNNKGVSPEPIHLKIFSPNVVNLTLVDLPGMTKVPVGDQPKDIELQIRELILRFISNPNSIILAVTAANTDMATSEALKISREVDPDGRRTLAVITKLDLMDAGTDAMDVLMGRVIPVKLGIIGVVNRSQLDINNKKSVTDSIRDEYAFLQKKYPSLANRNGTKYLARTLNRLLMHHIRDCLPELKTRINVLAAQYQSLLNSYGEPVDDKSATLLQLITKFATEYCNTIEGTAKYIETSELCGGARICYIFHETFGRTLESVDPLGGLNTIDILTAIRNATGPRPALFVPEVSFELLVKRQIKRLEEPSLRCVELVHEEMQRIIQHCSNYSTQELLRFPKLHDAIVEVVTCLLRKRLPVTNEMVHNLVAIELAYINTKHPDFADACGLMNNNIEEQRRNRLARELPSAVSRDKSSKVPSALAPASQEPSPAASAEADGKLIQDSRRETKNVASGGGGVGDGVQEPTTGNWRGMLKTSKAEELLAEEKSKPIPIMPASPQKGHAVNLLDVPVPVARKLSAREQRDCEVIERLIKSYFLIVRKNIQDSVPKAVMHFLVNHVKDTLQSELVGQLYKSSLLDDLLTESEDMAQRRKEAADMLKALQGASQIIAEIRETHLW

SEQ ID NO: 25961 - protein, 736 aa, Homo sapiens
  Payload ID: 5136
  Gene Symbol: DNM1L
  Gene Name: dynamin 1-like
  Uniprot ID: O00429
  ENSP ID: ENSP00000450399
MEALIPVINKLQDVFNTVGADIIQLPQIVVVGTQSSGKSSVLESLVGRDLLPRGTGIVTRRPLILQLVHVSQEDKRKTTGEENGVEAEEWGKFLHTKNKLYTDFDEIRQEIENETERISGNNKGVSPEPIHLKIFSPNVVNLTLVDLPGMTKVPVGDQPKDIELQIRELILRFISNPNSIILAVTAANTDMATSEALKISREVDPDGRRTLAVITKLDLMDAGTDAMDVLMGRVIPVKLGIIGVVNRSQLDINNKKSVTDSIRDEYAFLQKKYPSLANRNGTKYLARTLNRLLMHHIRDCLPELKTRINVLAAQYQSLLNSYGEPVDDKSATLLQLITKFATEYCNTIEGTAKYIETSELCGGARICYIFHETFGRTLESVDPLGGLNTIDILTAIRNATGPRPALFVPEVSFELLVKRQIKRLEEPSLRCVELVHEEMQRIIQHCSNYSTQELLRFPKLHDAIVEVVTCLLRKRLPVTNEMVHNLVAIELAYINTKHPDFADACGLMNNNIEEQRRNRLARELPSAVSRDKSSKVPSALAPASQEPSPAASAEADGKLIQDSRRETKNVASGGGGVGDGVQEPTTGNWRGMLKTSKAEELLAEEKSKPIPIMPASPQKGHAVNLLDVPVPVARKLSAREQRDCEVIERLIKSYFLIVRKNIQDSVPKAVMHFLVNHVKDTLQSELVGQLYKSSLLDDLLTESEDMAQRRKEAADMLKALQGASQIIAEIRETHLW

SEQ ID NO: 25962 - protein, 97 aa, Homo sapiens
  Payload ID: 5136
  Gene Symbol: DNM1L
  Gene Name: dynamin 1-like
  ENSP ID: ENSP00000450401
MEALIPVINKLQDVFNTVGADIIQLPQIVVVGTQSSGKSSVLESLVGRDLLPRGTGIVTRRPLILQLVHVSQEDKRKTTGEENVPRENSLDPGGKSP

SEQ ID NO: 25963 - protein, 870 aa, Homo sapiens
  Payload ID: 5137
  Gene Symbol: DNM2
  Gene Name: dynamin 2
  Uniprot ID: P50570
  ENSP ID: ENSP00000347890
MGNRGMEELIPLVNKLQDAFSSIGQSCHLDLPQIAVVGGQSAGKSSVLENFVGRDFLPRGSGIVTRRPLILQLIFSKTEHAEFLHCKSKKFTDFDEVRQEIEAETDRVTGTNKGISPVPINLRVYSPHVLNLTLIDLPGITKVPVGDQPPDIEYQIKDMILQFISRESSLILAVTPANMDLANSDALKLAKEVDPQGLRTIGVITKLDLMDEGTDARDVLENKLLPLRRGYIGVVNRSQKDIEGKKDIRAALAAERKFFLSHPAYRHMADRMGTPHLQKTLNQQLTNHIRESLPALRSKLQSQLLSLEKEVEEYKNFRPDDPTRKTKALLQMVQQFGVDFEKRIEGSGDQVDTLELSGGARINRIFHERFPFELVKMEFDEKDLRREISYAIKNIHGVRTGLFTPDLAFEAIVKKQVVKLKEPCLKCVDLVIQELINTVRQCTSKLSSYPRLREETERIVTTYIREREGRTKDQILLLIDIEQSYINTNHEDFIGFANAQQRSTQLNKKRAIPNQGEILVIRRGWLTINNISLMKGGSKEYWFVLTAESLSWYKDEEEKEKKYMLPLDNLKIRDVEKGFMSNKHVFAIFNTEQRNVYKDLRQIELACDSQEDVDSWKASFLRAGVYPEKDQAENEDGAQENTFSMDPQLERQVETIRNLVDSYVAIINKSIRDLMPKTIMHLMINNTKAFIHHELLAYLYSSADQSSLMEESADQAQRRDDMLRMYHALKEALNIIGDISTSTVSTPVPPPVDDTWLQSASSHSPTPQRRPVSSIHPPGRPPAVRGPTPGPPLIPVPVGAAASFSAPPIPSRPGPQSVFANSDLFPAPPQIPSRPVRIPPGIPPGVPSRRPPAAPSRPTIIRPAEPSLLD

SEQ ID NO: 25964 - protein, 866 aa, Homo sapiens
  Payload ID: 5137
  Gene Symbol: DNM2
  Gene Name: dynamin 2
  Uniprot ID: P50570
  ENSP ID: ENSP00000352721
MGNRGMEELIPLVNKLQDAFSSIGQSCHLDLPQIAVVGGQSAGKSSVLENFVGRDFLPRGSGIVTRRPLILQLIFSKTEHAEFLHCKSKKFTDFDEVRQEIEAETDRVTGTNKGISPVPINLRVYSPHVLNLTLIDLPGITKVPVGDQPPDIEYQIKDMILQFISRESSLILAVTPANMDLANSDALKLAKEVDPQGLRTIGVITKLDLMDEGTDARDVLENKLLPLRRGYIGVVNRSQKDIEGKKDIRAALAAERKFFLSHPAYRHMADRMGTPHLQKTLNQQLTNHIRESLPALRSKLQSQLLSLEKEVEEYKNFRPDDPTRKTKALLQMVQQFGVDFEKRIEGSGDQVDTLELSGGARINRIFHERFPFELVKMEFDEKDLRREISYAIKNIHGVRTGLFTPDLAFEAIVKKQVVKLKEPCLKCVDLVIQELINTVRQCTSKLSSYPRLREETERIVTTYIREREGRTKDQILLLIDIEQSYINTNHEDFIGFANAQQRSTQLNKKRAIPNQVIRRGWLTINNISLMKGGSKEYWFVLTAESLSWYKDEEEKEKKYMLPLDNLKIRDVEKGFMSNKHVFAIFNTEQRNVYKDLRQIELACDSQEDVDSWKASFLRAGVYPEKDQAENEDGAQENTFSMDPQLERQVETIRNLVDSYVAIINKSIRDLMPKTIMHLMINNTKAFIHHELLAYLYSSADQSSLMEESADQAQRRDDMLRMYHALKEALNIIGDISTSTVSTPVPPPVDDTWLQSASSHSPTPQRRPVSSIHPPGRPPAVRGPTPGPPLIPVPVGAAASFSAPPIPSRPGPQSVFANSDLFPAPPQIPSRPVRIPPGIPPGVPSRRPPAAPSRPTIIRPAEPSLLD

SEQ ID NO: 25965 - protein, 870 aa, Homo sapiens
  Payload ID: 5137
  Gene Symbol: DNM2
  Gene Name: dynamin 2
  Uniprot ID: P50570
  ENSP ID: ENSP00000373905
MGNRGMEELIPLVNKLQDAFSSIGQSCHLDLPQIAVVGGQSAGKSSVLENFVGRDFLPRGSGIVTRRPLILQLIFSKTEHAEFLHCKSKKFTDFDEVRQEIEAETDRVTGTNKGISPVPINLRVYSPHVLNLTLIDLPGITKVPVGDQPPDIEYQIKDMILQFISRESSLILAVTPANMDLANSDALKLAKEVDPQGLRTIGVITKLDLMDEGTDARDVLENKLLPLRRGYIGVVNRSQKDIEGKKDIRAALAAERKFFLSHPAYRHMADRMGTPHLQKTLNQQLTNHIRESLPALRSKLQSQLLSLEKEVEEYKNFRPDDPTRKTKALLQMVQQFGVDFEKRIEGSGDQVDTLELSGGARINRIFHERFPFELVKMEFDEKDLRREISYAIKNIHGVRTGLFTPDMAFEAIVKKQIVKLKEPSLKCVDLVVSELATVIKKCAEKLSSYPRLREETERIVTTYIREREGRTKDQILLLIDIEQSYINTNHEDFIGFANAQQRSTQLNKKRAIPNQGEILVIRRGWLTINNISLMKGGSKEYWFVLTAESLSWYKDEEEKEKKYMLPLDNLKIRDVEKGFMSNKHVFAIFNTEQRNVYKDLRQIELACDSQEDVDSWKASFLRAGVYPEKDQAENEDGAQENTFSMDPQLERQVETIRNLVDSYVAIINKSIRDLMPKTIMHLMINNTKAFIHHELLAYLYSSADQSSLMEESADQAQRRDDMLRMYHALKEALNIIGDISTSTVSTPVPPPVDDTWLQSASSHSPTPQRRPVSSIHPPGRPPAVRGPTPGPPLIPVPVGAAASFSAPPIPSRPGPQSVFANSDLFPAPPQIPSRPVRIPPGIPPGVPSRRPPAAPSRPTIIRPAEPSLLD

SEQ ID NO: 25966 - protein, 866 aa, Homo sapiens
  Payload ID: 5137
  Gene Symbol: DNM2
  Gene Name: dynamin 2
  Uniprot ID: P50570
  ENSP ID: ENSP00000386192
MGNRGMEELIPLVNKLQDAFSSIGQSCHLDLPQIAVVGGQSAGKSSVLENFVGRDFLPRGSGIVTRRPLILQLIFSKTEHAEFLHCKSKKFTDFDEVRQEIEAETDRVTGTNKGISPVPINLRVYSPHVLNLTLIDLPGITKVPVGDQPPDIEYQIKDMILQFISRESSLILAVTPANMDLANSDALKLAKEVDPQGLRTIGVITKLDLMDEGTDARDVLENKLLPLRRGYIGVVNRSQKDIEGKKDIRAALAAERKFFLSHPAYRHMADRMGTPHLQKTLNQQLTNHIRESLPALRSKLQSQLLSLEKEVEEYKNFRPDDPTRKTKALLQMVQQFGVDFEKRIEGSGDQVDTLELSGGARINRIFHERFPFELVKMEFDEKDLRREISYAIKNIHGVRTGLFTPDMAFEAIVKKQIVKLKEPSLKCVDLVVSELATVIKKCAEKLSSYPRLREETERIVTTYIREREGRTKDQILLLIDIEQSYINTNHEDFIGFANAQQRSTQLNKKRAIPNQVIRRGWLTINNISLMKGGSKEYWFVLTAESLSWYKDEEEKEKKYMLPLDNLKIRDVEKGFMSNKHVFAIFNTEQRNVYKDLRQIELACDSQEDVDSWKASFLRAGVYPEKDQAENEDGAQENTFSMDPQLERQVETIRNLVDSYVAIINKSIRDLMPKTIMHLMINNTKAFIHHELLAYLYSSADQSSLMEESADQAQRRDDMLRMYHALKEALNIIGDISTSTVSTPVPPPVDDTWLQSASSHSPTPQRRPVSSIHPPGRPPAVRGPTPGPPLIPVPVGAAASFSAPPIPSRPGPQSVFANSDLFPAPPQIPSRPVRIPPGIPPGVPSRRPPAAPSRPTIIRPAEPSLLD

SEQ ID NO: 25967 - protein, 289 aa, Homo sapiens
  Payload ID: 5137
  Gene Symbol: DNM2
  Gene Name: dynamin 2
  ENSP ID: ENSP00000466603
RAALAAERKFFLSHPAYRHMADRMGTPHLQKTLNQQLTNHIRESLPALRSKLQSQLLSLEKEVEEYKNFRPDDPTRKTKALLQMVQQFGVDFEKRIEGSGDQVDTLELSGGARINRIFHERFPFELVKMEFDEKDLRREISYAIKNIHGVRTGLFTPDMAFEAIVKKQIVKLKEPSLKCVDLVVSELATVIKKCAEKLSSYPRLREETERIVTTYIREREGRTKDQILLLIDIEQSYINTNHEDFIGFANCYYTEQLVTCAQQRSTQLNKKRAIPNQVIRRGWLTINNI

SEQ ID NO: 25968 - protein, 169 aa, Homo sapiens
  Payload ID: 5137
  Gene Symbol: DNM2
  Gene Name: dynamin 2
  ENSP ID: ENSP00000466621
PVRIPPGIPPGVPRGYVGTGRLSWKKRLSVQTCSTATSSSTATLTADQKLTRSKLPSCRLRSRASKARSSVSIWMLRSSRVRMVSMDSYRAAGGEGSGLPPPIREQRPKKPGDTEGGCINPGRYSCKHRLVQAKFKSSPCHSLAVTMSNLINLSEPVSSSISFQIAVNI

SEQ ID NO: 25969 - protein, 137 aa, Homo sapiens
  Payload ID: 5137
  Gene Symbol: DNM2
  Gene Name: dynamin 2
  ENSP ID: ENSP00000466914
  MOD_RES (1)..(1): Any amino acid
XADQAQRRDDMLRMYHALKEALNIIGDISTSTVSTPVPPPVDDTWLQSASSHSPTPQRRPVSSIHPPGRPPAVRGPTPGPPLIPVPVGAAASFSAPPIPSRPGPQSVFANSDLFPAPPQIPSRPVRIPPGIPPGVPR

SEQ ID NO: 25970 - protein, 50 aa, Homo sapiens
  Payload ID: 5137
  Gene Symbol: DNM2
  Gene Name: dynamin 2
  ENSP ID: ENSP00000467430
MILQFISRESSLILAVTPANMDLANSDALKLAKEVDPQGLRTIGVITKLD

SEQ ID NO: 25971 - protein, 869 aa, Homo sapiens
  Payload ID: 5137
  Gene Symbol: DNM2
  Gene Name: dynamin 2
  Uniprot ID: P50570
  ENSP ID: ENSP00000468734
MGNRGMEELIPLVNKLQDAFSSIGQSCHLDLPQIAVVGGQSAGKSSVLENFVGRDFLPRGSGIVTRRPLILQLIFSKTEHAEFLHCKSKKFTDFDEVRQEIEAETDRVTGTNKGISPVPINLRVYSPHVLNLTLIDLPGITKVPVGDQPPDIEYQIKDMILQFISRESSLILAVTPANMDLANSDALKLAKEVDPQGLRTIGVITKLDLMDEGTDARDVLENKLLPLRRGYIGVVNRSQKDIEGKKDIRAALAAERKFFLSHPAYRHMADRMGTPHLQKTLNQQLTNHIRESLPALRSKLQSQLLSLEKEVEEYKNFRPDDPTRKTKALLQMVQQFGVDFEKRIEGSGDQVDTLELSGGARINRIFHERFPFELVKMEFDEKDLRREISYAIKNIHGVRTGLFTPDLAFEAIVKKQVVKLKEPCLKCVDLVIQELINTVRQCTSKLSSYPRLREETERIVTTYIREREGRTKDQILLLIDIEQSYINTNHEDFIGFANAQQRSTQLNKKRAIPNQGEILVIRRGWLTINNISLMKGGSKEYWFVLTAESLSWYKDEEEKEKKYMLPLDNLKIRDVEKGFMSNKHVFAIFNTEQRNVYKDLRQIELACDSQEDVDSWKASFLRAGVYPEKDQAENEDGAQENTFSMDPQLERQVETIRNLVDSYVAIINKSIRDLMPKTIMHLMINNTKAFIHHELLAYLYSSADQSSLMEESADQAQRRDDMLRMYHALKEALNIIGDISTSTVSTPVPPPVDDTWLQSASSHSPTPQRRPVSSIHPPGRPPAVRGPTPGPPLIPVPVGAAASFSAPPIPSRPGPQSVFANSDLFPAPPQIPSRPVRIPPGIPPGVPRRPPAAPSRPTIIRPAEPSLLD

SEQ ID NO: 25972 - protein, 869 aa, Homo sapiens
  Payload ID: 5138
  Gene Symbol: DNM3
  Gene Name: dynamin 3
  Uniprot ID: Q9UQ16
  ENSP ID: ENSP00000347457
MGNREMEELIPLVNRLQDAFSALGQSCLLELPQIAVVGGQSAGKSSVLENFVGRDFLPRGSGIVTRRPLVLQLVTSKAEYAEFLHCKGKKFTDFDEVRLEIEAETDRVTGMNKGISSIPINLRVYSPHVLNLTLIDLPGITKVPVGDQPPDIEYQIREMIMQFITRENCLILAVTPANTDLANSDALKLAKEVDPQGLRTIGVITKLDLMDEGTDARDVLENKLLPLRRGYVGVVNRSQKDIDGKKDIKAAMLAERKFFLSHPAYRHIADRMGTPHLQKVLNQQLTNHIRDTLPNFRNKLQGQLLSIEHEVEAYKNFKPEDPTRKTKALLQMVQQFAVDFEKRIEGSGDQVDTLELSGGAKINRIFHERFPFEIVKMEFNEKELRREISYAIKNIHGIRTGLFTPDMAFEAIVKKQIVKLKGPSLKSVDLVIQELINTVKKCTKKLANFPRLCEETERIVANHIREREGKTKDQVLLLIDIQVSYINTNHEDFIGFANAQQRSSQVHKKTTVGNQGTNLPPSRQIVIRKGWLTISNIGIMKGGSKGYWFVLTAESLSWYKDDEEKEKKYMLPLDNLKVRDVEKSFMSSKHIFALFNTEQRNVYKDYRFLELACDSQEDVDSWKASLLRAGVYPDKSVAENDENGQAENFSMDPQLERQVETIRNLVDSYMSIINKCIRDLIPKTIMHLMINNVKDFINSELLAQLYSSEDQNTLMEESAEQAQRRDEMLRMYQALKEALGIIGDISTATVSTPAPPPVDDSWIQHSRRSPPPSPTTQRRPTLSAPLARPTSGRGPAPAIPSPGPHSGAPPVPFRPGPLPPFPSSSDSFGAPPQVPSRPTRAPPSVPSRRPPPSPTRPTIIRPLESSLLD

SEQ ID NO: 25973 - protein, 859 aa, Homo sapiens
  Payload ID: 5138
  Gene Symbol: DNM3
  Gene Name: dynamin 3
  Uniprot ID: Q9UQ16
  ENSP ID: ENSP00000356705
MGNREMEELIPLVNRLQDAFSALGQSCLLELPQIAVVGGQSAGKSSVLENFVGRDFLPRGSGIVTRRPLVLQLVTSKAEYAEFLHCKGKKFTDFDEVRLEIEAETDRVTGMNKGISSIPINLRVYSPHVLNLTLIDLPGITKVPVGDQPPDIEYQIREMIMQFITRENCLILAVTPANTDLANSDALKLAKEVDPQGLRTIGVITKLDLMDEGTDARDVLENKLLPLRRGYVGVVNRSQKDIDGKKDIKAAMLAERKFFLSHPAYRHIADRMGTPHLQKVLNQQLTNHIRDTLPNFRNKLQGQLLSIEHEVEAYKNFKPEDPTRKTKALLQMVQQFAVDFEKRIEGSGDQVDTLELSGGAKINRIFHERFPFEIVKMEFNEKELRREISYAIKNIHGIRTGLFTPDMAFEAIVKKQIVKLKGPSLKSVDLVIQELINTVKKCTKKLANFPRLCEETERIVANHIREREGKTKDQVLLLIDIQVSYINTNHEDFIGFANAQQRSSQVHKKTTVGNQVIRKGWLTISNIGIMKGGSKGYWFVLTAESLSWYKDDEEKEKKYMLPLDNLKVRDVEKSFMSSKHIFALFNTEQRNVYKDYRFLELACDSQEDVDSWKASLLRAGVYPDKSVAENDENGQAENFSMDPQLERQVETIRNLVDSYMSIINKCIRDLIPKTIMHLMINNVKDFINSELLAQLYSSEDQNTLMEESAEQAQRRDEMLRMYQALKEALGIIGDISTATVSTPAPPPVDDSWIQHSRRSPPPSPTTQRRPTLSAPLARPTSGRGPAPAIPSPGPHSGAPPVPFRPGPLPPFPSSSDSFGAPPQVPSRPTRAPPSVPSRRPPPSPTRPTIIRPLESSLLD

SEQ ID NO: 25974 - protein, 555 aa, Homo sapiens
  Payload ID: 5138
  Gene Symbol: DNM3
  Gene Name: dynamin 3
  Uniprot ID: Q9UQ16
  ENSP ID: ENSP00000356707
MGNREMEELIPLVNRLQDAFSALGQSCLLELPQIAVVGGQSAGKSSVLENFVGRDFLPRGSGIVTRRPLVLQLVTSKAEYAEFLHCKGKKFTDFDEVRLEIEAETDRVTGMNKGISSIPINLRVYSPHVLNLTLIDLPGITKVPVGDQPPDIEYQIREMIMQFITRENCLILAVTPANTDLANSDALKLAKEVDPQGLRTIGVITKLDLMDEGTDARDVLENKLLPLRRGYVGVVNRSQKDIDGKKDIKAAMLAERKFFLSHPAYRHIADRMGTPHLQKVLNQQLTNHIRDTLPNFRNKLQGQLLSIEHEVEAYKNFKPEDPTRKTKALLQMVQQFAVDFEKRIEGSGDQVDTLELSGGAKINRIFHERFPFEIVKMEFNEKELRREISYAIKNIHGIRTGLFTPDMAFEAIVKKQIVKLKGPSLKSVDLVIQELINTVKKCTKKLANFPRLCEETERIVANHIREREGKTKDQVLLLIDIQVSYINTNHEDFIGFANAQQRSSQVHKKTTVGNQVIRKGWLTISNIGIMKGGSKGYWFVLTAESLSWYKDDENI

SEQ ID NO: 25975 - protein, 221 aa, Homo sapiens
  Payload ID: 5138
  Gene Symbol: DNM3
  Gene Name: dynamin 3
  ENSP ID: ENSP00000429165
AENDENGQAENFSMDPQLERQVETIRNLVDSYMSIINKCIRDLIPKTIMHLMINNVKDFINSELLAQLYSSEDQNTLMEESAEQAQRRDEMLRMYQALKEALGIIGDISTATVSTPAPPPVDDSWIQHSRRSPPPSPTTQRRPTLSAPLARPTSGRGPAPAIPSPGPHSGAPPVPFRPGPLPPFPSSSDSFGAPPQVPSRPTRAPPSVPRRPPPAVPGRPS

SEQ ID NO: 25976 - protein, 445 aa, Homo sapiens
  Payload ID: 5138
  Gene Symbol: DNM3
  Gene Name: dynamin 3
  ENSP ID: ENSP00000429416
MNKGISSIPINLRVYSPHVLNLTLIDLPGITKVPVGDQPPDIEYQIREMIMQFITRENCLILAVTPANTDLANSDALKLAKEVDPQGLRTIGVITKLDLMDEGTDARDVLENKLLPLRRGYVGVVNRSQKDIDGKKDIKAAMLAERKFFLSHPAYRHIADRMGTPHLQKVLNQQLTNHIRDTLPNFRNKLQGQLLSIEHEVEAYKNFKPEDPTRKTKALLQMVQQFAVDFEKRIEGSGDQVDTLELSGGAKINRIFHERFPFEIVKMEFNEKELRREISYAIKNIHGIRTGLFTPDMAFEAIVKKQIVKLKGPSLKSVDLVIQELINTVKKCTKKLANFPRLCEETERIVANHIREREGKTKDQVLLLIDIQVSYINTNHEDFIGFANAQQRSSQVHKKTTVGNQVIRKGWLTISNIGIMKGGSKGYWFVLTAESLSWYKDDEEK

SEQ ID NO: 25977 - protein, 639 aa, Homo sapiens
  Payload ID: 5138
  Gene Symbol: DNM3
  Gene Name: dynamin 3
  ENSP ID: ENSP00000429701
MGNREMEELIPLVNRLQDAFSALGQSCLLELPQIAVVGGQSAGKSSVLENFVGRDFLPRGSGIVTRRPLVLQLVTSKAEYAEFLHCKGKKFTDFDEVRLEIEAETDRVTGMNKGISSIPINLRVYSPHVLNLTLIDLPGITKVPVGDQPPDIEYQIREMIMQFITRENCLILAVTPANTDLANSDALKLAKEVDPQGLRTIGVITKLDLMDEGTDARDVLENKLLPLRRGYVGVVNRSQKDIDGKKDIKAAMLAERKFFLSHPAYRHIADRMGTPHLQKVLNQQLTNHIRDTLPNFRNKLQGQLLSIEHEVEAYKNFKPEDPTRKTKALLQMVQQFAVDFEKRIEGSGDQVDTLELSGGAKINRIFHERFPFEIVKMEFNEKELRREISYAIKNIHGIRTGLFTPDMAFEAIVKKQIVKLKGPSLKSVDLVIQELINTVKKCTKKLANFPRLCEETERIVANHIREREGKTKDQVLLLIDIQVSYINTNHEDFIGFANAQQRSSQVHKKTTVGNQVIRKGWLTISNIGIMKGGSKGYWFVLTAESLSWYKDDEEKEKKYMLPLDNLKVRDVEKSFMSSKHIFALFNTEQRNVYKDYRFLELACDSQEDVDSWKASLLRAGVYPDKSVVSWIYLLCKNYY

SEQ ID NO: 25978 - protein, 863 aa, Homo sapiens
  Payload ID: 5138
  Gene Symbol: DNM3
  Gene Name: dynamin 3
  Uniprot ID: Q9UQ16
  ENSP ID: ENSP00000486701
MGNREMEELIPLVNRLQDAFSALGQSCLLELPQIAVVGGQSAGKSSVLENFVGRDFLPRGSGIVTRRPLVLQLVTSKAEYAEFLHCKGKKFTDFDEVRLEIEAETDRVTGMNKGISSIPINLRVYSPHVLNLTLIDLPGITKVPVGDQPPDIEYQIREMIMQFITRENCLILAVTPANTDLANSDALKLAKEVDPQGLRTIGVITKLDLMDEGTDARDVLENKLLPLRRGYVGVVNRSQKDIDGKKDIKAAMLAERKFFLSHPAYRHIADRMGTPHLQKVLNQQLTNHIRDTLPNFRNKLQGQLLSIEHEVEAYKNFKPEDPTRKTKALLQMVQQFAVDFEKRIEGSGDQVDTLELSGGAKINRIFHERFPFEIVKMEFNEKELRREISYAIKNIHGIRTGLFTPDMAFEAIVKKQIVKLKGPSLKSVDLVIQELINTVKKCTKKLANFPRLCEETERIVANHIREREGKTKDQVLLLIDIQVSYINTNHEDFIGFANAQQRSSQVHKKTTVGNQVIRKGWLTISNIGIMKGGSKGYWFVLTAESLSWYKDDEEKEKKYMLPLDNLKVRDVEKSFMSSKHIFALFNTEQRNVYKDYRFLELACDSQEDVDSWKASLLRAGVYPDKSVGNNKAENDENGQAENFSMDPQLERQVETIRNLVDSYMSIINKCIRDLIPKTIMHLMINNVKDFINSELLAQLYSSEDQNTLMEESAEQAQRRDEMLRMYQALKEALGIIGDISTATVSTPAPPPVDDSWIQHSRRSPPPSPTTQRRPTLSAPLARPTSGRGPAPAIPSPGPHSGAPPVPFRPGPLPPFPSSSDSFGAPPQVPSRPTRAPPSVPSRRPPPSPTRPTIIRPLESSLLD

SEQ ID NO: 25979 - protein, 1577 aa, Homo sapiens
  Payload ID: 5139
  Gene Symbol: DNMBP
  Gene Name: dynamin binding protein
  Uniprot ID: Q6XZF7
  ENSP ID: ENSP00000315659
MEAGSVVRAIFDFCPSVSEELPLFVGDIIEVLAVVDEFWLLGKKEDVTGQFPSSFVEIVTIPSLKEGERLFVCICEFTSQELDNLPLHRGDLVILDGIPTAGWLQGRSCWGARGFFPSSCVRELCLSSQSRQWHSQSALFQIPEYSMGQARALMGLSAQLDEELDFREGDVITIIGVPEPGWFEGELEGRRGIFPEGFVELLGPLRTVDESVSSGNQDDCIVNGEVDTPVGEEEIGPDEDEEEPGTYGVALYRFQALEPNELDFEVGDKIRILATLEDGWLEGSLKGRTGIFPYRFVKLCPDTRVEETMALPQEGSLARIPETSLDCLENTLGVEEQRHETSDHEAEEPDCIISEAPTSPLGHLTSEYDTDRNSYQDEDTAGGPPRSPGVEWEMPLATDSPTSDPTEVVNGISSQPQVPFHPNLQKSQYYSTVGGSHPHSEQYPDLLPLEARTRDYASLPPKRMYSQLKTLQKPVLPLYRGSSVSASRVVKPRQSSPQLHNLASYTKKHHTSSVYSISERLEMKPGPQAQGLVMEAATHSQGDGSTDLDSKLTQQLIEFEKSLAGPGTEPDKILRHFSIMDFNSEKDIVRGSSKLITEQELPERRKALRPPPPRPCTPVSTSPHLLVDQNLKPAPPLVVRPSRPAPLPPSAQQRTNAVSPKLLSRHRPTCETLEKEGPGHMGRSLDQTSPCPLVLVRIEEMERDLDMYSRAQEELNLMLEEKQDESSRAETLEDLKFCESNIESLNMELQQLREMTLLSSQSSSLVAPSGSVSAENPEQRMLEKRAKVIEELLQTERDYIRDLEMCIERIMVPMQQAQVPNIDFEGLFGNMQMVIKVSKQLLAALEISDAVGPVFLGHRDELEGTYKIYCQNHDEAIALLEIYEKDEKIQKHLQDSLADLKSLYNEWGCTNYINLGSFLIKPVQRVMRYPLLLMELLNSTPESHPDKVPLTNAVLAVKEINVNINEYKRRKDLVLKYRKGDEDSLMEKISKLNIHSIIKKSNRVSSHLKHLTGFAPQIKDEVFEETEKNFRMQERLIKSFIRDLSLYLQHIRESACVKVVAAVSMWDVCMERGHRDLEQFERVHRYISDQLFTNFKERTERLVISPLNQLLSMFTGPHKLVQKRFDKLLDFYNCTERAEKLKDKKTLEELQSARNNYEALNAQLLDELPKFHQYAQGLFTNCVHGYAEAHCDFVHQALEQLKPLLSLLKVAGREGNLIAIFHEEHSRVLQQLQVFTFFPESLPATKKPFERKTIDRQSARKPLLGLPSYMLQSEELRASLLARYPPEKLFQAERNFNAAQDLDVSLLEGDLVGVIKKKDPMGSQNRWLIDNGVTKGFVYSSFLKPYNPRRSHSDASVGSHSSTESEHGSSSPRFPRQNSGSTLTFNPSSMAVSFTSGSCQKQPQDASPPPKECDQGTLSASLNPSNSESSPSRCPSDPDSTSQPRSGDSADVARDVKQPTATPRSYRNFRHPEIVGYSVPGRNGQSQDLVKGCARTAQAPEDRSTEPDGSEAEGNQVYFAVYTFKARNPNELSVSANQKLKILEFKDVTGNTEWWLAEVNGKKGYVPSNYIRKTEYT

SEQ ID NO: 25980 - protein, 224 aa, Homo sapiens
  Payload ID: 5139
  Gene Symbol: DNMBP
  Gene Name: dynamin binding protein
  ENSP ID: ENSP00000409476
MPTLFKGVWGVVEHSRALGRFCPACLPSGPHLHTQPALGTAEMTLLSSQSSSLVAPSGSVSAENPEQRMLEKRAKVIEELLQTERDYIRDLEMCIERIMVPMQQAQVPNIDFEGLFGNMQMVIKVSKQLLAALEISDAVGPVFLGHRDELEGTYKIYCQNHDEAIALLEIYEKDEKIQKHLQDSLADLKSLYNEWGCTNYINLGSFLIKPVQRVMRYPLLLMEL

SEQ ID NO: 25981 - protein, 823 aa, Homo sapiens
  Payload ID: 5139
  Gene Symbol: DNMBP
  Gene Name: dynamin binding protein
  Uniprot ID: Q6XZF7
  ENSP ID: ENSP00000443657
MTLLSSQSSSLVAPSGSVSAENPEQRMLEKRAKVIEELLQTERDYIRDLEMCIERIMVPMQQAQVPNIDFEGLFGNMQMVIKVSKQLLAALEISDAVGPVFLGHRDELEGTYKIYCQNHDEAIALLEIYEKDEKIQKHLQDSLADLKSLYNEWGCTNYINLGSFLIKPVQRVMRYPLLLMELLNSTPESHPDKVPLTNAVLAVKEINVNINEYKRRKDLVLKYRKGDEDSLMEKISKLNIHSIIKKSNRVSSHLKHLTGFAPQIKDEVFEETEKNFRMQERLIKSFIRDLSLYLQHIRESACVKVVAAVSMWDVCMERGHRDLEQFERVHRYISDQLFTNFKERTERLVISPLNQLLSMFTGPHKLVQKRFDKLLDFYNCTERAEKLKDKKTLEELQSARNNYEALNAQLLDELPKFHQYAQGLFTNCVHGYAEAHCDFVHQALEQLKPLLSLLKVAGREGNLIAIFHEEHSRVLQQLQVFTFFPESLPATKKPFERKTIDRQSARKPLLGLPSYMLQSEELRASLLARYPPEKLFQAERNFNAAQDLDVSLLEGDLVGVIKKKDPMGSQNRWLIDNGVTKGFVYSSFLKPYNPRRSHSDASVGSHSSTESEHGSSSPRFPRQNSGSTLTFNPSSMAVSFTSGSCQKQPQDASPPPKECDQGTLSASLNPSNSESSPSRCPSDPDSTSQPRSGDSADVARDVKQPTATPRSYRNFRHPEIVGYSVPGRNGQSQDLVKGCARTAQAPEDRSTEPDGSEAEGNQVYFAVYTFKARNPNELSVSANQKLKILEFKDVTGNTEWWLAEVNGKKGYVPSNYIRKTEYT

SEQ ID NO: 25982 - protein, 415 aa, Homo sapiens
  Payload ID: 5140
  Gene Symbol: DAW1
  Gene Name: dynein assembly factor with WDR repeat domains 1
  Uniprot ID: Q8N136
  ENSP ID: ENSP00000311899
MKLKSLLLRYYPPGIMLEYEKHGELKTKSIDLLDLGPSTDVSALVEEIQKAEPLLTASRTEQVKLLIQRLQEKLGQNSNHTFYLFKVLKAHILPLTNVALNKSGSCFITGSYDRTCKLWDTASGEELNTLEGHRNVVYAIAFNNPYGDKIATGSFDKTCKLWSVETGKCYHTFRGHTAEIVCLSFNPQSTLVATGSMDTTAKLWDIQNGEEVYTLRGHSAEIISLSFNTSGDRIITGSFDHTVVVWDADTGRKVNILIGHCAEISSASFNWDCSLILTGSMDKTCKLWDATNGKCVATLTGHDDEILDSCFDYTGKLIATASADGTARIFSAATRKCIAKLEGHEGEISKISFNPQGNHLLTGSSDKTARIWDAQTGQCLQVLEGHTDEIFSCAFNYKGNIVITGSKDNTCRIWR

SEQ ID NO: 25983 - protein, 369 aa, Homo sapiens
  Payload ID: 5140
  Gene Symbol: DAW1
  Gene Name: dynein assembly factor with WDR repeat domains 1
  ENSP ID: ENSP00000362770
MKLKSLLLRYYPPGIMLEYEKHGELKTKSIDLLDLGPSTDVSALVEEIQKAEPLLTASRTEQVKLLIQRLQEKLGQNSNHTFYLFKVLKAHILPLTNVALNKSGSCFITGSYDRTCKLWDTASGEELNTLEGHRNVVYAIAFNNPYGDKIATGSFDKTCKLWSVETGKCYHTFRGHTAEIVCLSFNPQSTLVATGSMDTTAKLWDIQNGEEVYTLRGHSAEIISLSFNTSGDRIITGSFDHTVVVWDADTGRKVNILIGHCAEISSASFNWDCSLILTGSMDKTCKLWDATNGKCVATLTGHDDEILDSCFDYTGKLIATASADDGVSLCRPGWSAVARSWLTATCASQVQAILLPQPPELCHVLGNHV

SEQ ID NO: 25984 - protein, 71 aa, Homo sapiens
  Payload ID: 5140
  Gene Symbol: DAW1
  Gene Name: dynein assembly factor with WDR repeat domains 1
  ENSP ID: ENSP00000394853
MLEYEKHGELKTKSIDLLDLGPSTDVSALVEEIQKAEPLLTASRTEQVKLLIQRLQEKLGQNSNHTFYLFK

SEQ ID NO: 25985 - protein, 36 aa, Homo sapiens
  Payload ID: 5140
  Gene Symbol: DAW1
  Gene Name: dynein assembly factor with WDR repeat domains 1
  ENSP ID: ENSP00000403670
MKLKSLLLRYYPPVFGEPNHMQVSKILLNSRNYVGI

SEQ ID NO: 25986 - protein, 4753 aa, Homo sapiens
  Payload ID: 5141
  Gene Symbol: DNHD1
  Gene Name: dynein heavy chain domain 1
  Uniprot ID: Q96M86
  ENSP ID: ENSP00000254579
MVPEERRVGLSSDETSSDSLKSWHSICVLDSKEQPLACQQKQRQFVKPVTESEQPTVLELLLAELRTLFSAVLQDSSPAAWRYLHAVLGLLPPYRELLVGHLDLLPFLEQLYCWAPWVQTHLHLDLLGAIVQAFPPDSSLLDSASHADCCPQKRRLHHRPPCPACPFVQAQWSRQQVKEELATWLRPLTLPELQRCLGIVGAQVALEEAVWLDGLSLLPLALAADIPVRYESSDTDNAEVEPVGRKETRSQLDYEVPREKAFQKSSTGFSPETSFLDSQVMTALKMERYLKKIHFLYLNVAPSRYFRPYSLMVVPPDKVNPEHYIFSPFGILHVHPVEGSETMTLGTWHHHCVLWQQLQFIPFFKYCLLRKSFTCWKKNVRLQGLHRLQKFLENHLLLAVPHFGAGLLHISRLLQELHSVSWLPQELDRCYELLDLQTALAEEKHKALRLLHRCLNLCTSILRLVHEDTYHMQQCLQERVQNCDRIRTGQGSIYLQRVQHKQLEQKLKQAEAWWLQLGKFARLVDYMICQSLISVLEEQITSFVANILQAPRQKPFLSSQLVFDDHGQLSHVPCVENMIQTLTGGLQSVKTSALQVVQSADLKTSSDSLYSEEEDEEEDSKDEFLMPKFQGQPSDAVSIFCGPNVGLVWPWKSHPIAGILEVRGCRLRGQYFPHNYKQLEEDLDNNPKIQQALNIQQVLLEGVLCKVQEFCREHHWITGIYEFLQSWGPQKLEDMRGGPIKNYVTLVSRLNVWQARVSSMPIELLTKGGLLLLSCHDVQAEMESKLNSIRKDILAHVQNECWNLSQQLMTELTDFMHIFRTINSDIHAIAQCTQKLNEANEQYVELEERMEYVRALHELIRNHFSLFSAENEALDISVRRQFGESPIPPCPPPPQPHLLHCPLLAPQLLDMWEAFQFEKSQASEFLLSKRHAIMPKLQQLMAAALAELEGLLAKALSGPFMDPTQDQRSTEHQLVSLERQFQNTVSDLSELHHAYAIFTEDETPVPLPICGTRPIVQQQRIWHLYRVISENISEWKCMAFAKFSPAMAQEKTEGWLTEAARMSTTLELHSPVLQHCMRILGEFRSYLPLLTKLGSLHPQSLNCQCLLRALGLGSLQTIELLTLGQLLTYPLLEFADRINQVWQNENERIHAQETIRRLQRYWEARQLRLLNFILHVPYEPPASERSKRQVLRSPQWEVVDKDSGTFILSDYSNLQDSIQESLQVLSKILAIEKSGDLNKIALEWVAIMHGLGALLEVWLTFQQKWIFLNKVLHEMKIQFPNADLNSRFKVMDDQYRTLMRISVADPMVLSLVVPSAERSPYFQGQQLQQLLQAGSVELEGIIMSLESVLYGVCAHFPRLFFLSDSELVALLAARLESCEAQLWVRRCFPHVHAVSFRSCPTGEKNTDDWESSPNTQTQVEALAVLGAGGEEVKLQGPLPLHPDLPKWLASLEKCLRLALVHMLQGCVAARLARGPSLGEALKQLPKQNKLYLQLYVQHWIDLVQAFPWQCVLVAEEVVWRAEMEEALLEWGTLAMVSMHMRKLEVLVNFMRAQRASQGGQSLPSVRQTSLLSALLVMAVTHRDIAQLLEQHQVSDLTDFHWVRQLKYHLGSPHIIPKSPLQSLKTIASSEPSLSPAACWIDVLGRSFLYNYEYLGPRLGPLPSLLPERPALVLLLALEEVACGTVLGPNGVGKRAIVNSLAQALGRQLVMLPCSPQIEAQCLSNYLNGALQGGAWLLLEKVHQLPPGLLSALGQRLGELHHLYAPLYQEASRNTSTIDPTQPQLLGSSFFEKHHVSVRLGYGCLLVLRALSSAVPANLHLLLRPVALALPDLRQVAELTLLGAGMRDAFQMATRLSKFFSLERELVSGPLPCRLPLLKQILEDTIRTLNVTKEEPKCQKPRSLAAIEEAALLRSPLFSILNGLHLHNLRGLLCALFPSASQVLAEPMTYKLMKPLVVEELQQVGLDPSPDILGSLEQLSQALSRASGILLLGPAGSGKTTCWHSLFKIQNRLAAMEDTSTQGCQPVEITHLYPSGLSPQEFLGWLEGSCWHHGIFPKVLRAAGQCNNMGQKRQTEESIGIQHWIICDGASNGAWLDSITCLLSELPQLSLPSGQQIARPPGTFLLMEVADTTGISPTVVGCCALVWCGGEQTWQCILSALMASLPYEYRLQHRTVAELNHMAEVLVPATLRFLTCQGVSSLLQVHGQQAVCAGVAEVTSMARILHSLLDLHLRLKEEKAPGPEDLSYSDPVAQSFRSSKSSFLNRSQVDSDDVPDKCREHLLAVSSFLFALIWGFGAHLPSRFWPIFDTFIRDSISRLSNYPEPPPSALVFDLHVSPEDGTLVPFTGQYLSSHIKGTLGTFHPSIQTERLLYVVDLLLSGGQPVLLAGEAATGKSAFVEVLVEPHHPYIYSPIHPAFSSSHLRLLLSRGIQGQTQASPQPGHHQDSKPSLLFLLEDLHLATSDPEKSCQPVLETLRQAMDGTVYAHSTLELQTLQPTVNFLATVTVPGYCERPLCPRLFRLFTVLALESMTQATLLERHVPIIQAWLERFPSVERERALARGLVRASVEAWEAVCNCFMPSPLHPHYHFSLHSVSHLLSSLQLLPNRTGSRGFVDYPNHQEHLRRVSGLRGTCLTVMMATRNVVRLWLHEAQRTFCDRLDSPRERSYCAKLLLVVAQSVFCCGPGPQHLGKDHQESEEEEEEERVPEVESEGELAQWEDFSNSNSETEEEEEPYGLQVARVSNSRDPSLTPSIGPVSRGMKESISHKIRQEKGTRASNYRLQVRRSFKTWWQKKPQMDLISPLLLPVLLLHPQEKPSDLVFSQELILGPNSETPNLYLERQWEKLEEQLATSAAQLKLSPHLARCHSMAQHVARLVRVLARPRQHGLLLSGALGTGRHTAITLASSICQAHFFHLPSGSEEAILQCLRDASWHAGMLSQPVALLVPSGVDLTTLHRLLALATSGSFPGQYTEADLDRIGEHLPRENLGVKQNIKKEMVLQRFHQQVCSHLHLFFLIGDKQAHKQLPSTLFLRLLQLATASIDRYEPWDQAALAKVAQHHLEGAQSVPLDDGSWKYPDLQASIPSVAKAMALIHLSATHYHEHLCPALPLVTPKTFLDFLDTFLMLQQQTILKIKNKAQRVQNALENLRMLIKEHGTHANLIFDLEQQLKDSGKSLSMFQQQLEQSKLLYKQQLEECRHQENLIENLARQRDALQAQREAFLEQMSKAFLEPLSQLQVADFEEIRSYRAPPESVVRVTDAMCDLFHHETGWASAKQLLCTEDFYQELVFFPKEKITDSELIKLHLILKAPGMDDAALRAVSRPAASLAAWLWAVLHYGLAHCRGLPTDLLLQQVEATLTREQARLGYYQFQAQETLEHNLALAKMVEDAQASHNCVAKTLSQAQCGQYHKWPMKAALLTPMRAWTTQLQKLKGRCMTVFGDTLLCSAAIIYLGPFPPLRRQELLDEWLALCRGFQEALGPDDVAQALKRKQKSVSIPPKNPLLATHSPFSILSLLSSESEQYQWDGNLKPQAKSAHLAGLLLRSPTHYSSCRWPLLLDPSNEALIWLDPLPLEENRSFAPALTEGRGKGLMRNQKRESKTDMKEEDDESEESNEAEDQTKEQKAEERKNEQEKEQEENEEKEEEKTESQGSKPAYETQLPSLPYLSVLSGADPELGSQLQEAAACGLPVLLTNVELGLGCEELQWLLQREQLSPPQVQPGFCLYLSTTLSLCAMEKVLGCELLKGLNVLDLGLNMEILEEQMLHEILCREYPELETRWQDLKIRALDTCKAVEAAEERLLTMLLFQNPKRQKPAKFLRNIVRAQGKLCQLRAHCEELEGQKLQEMVLWAPYRPVVWHGMAMVKALSQLQNLLPLFCMSPENWLAVTKQALDSMKPREINHGEDLASHLLQLRAHLTRQLLGSTVTALGLTQVPLVGALGALALLQATGKASELERLALWPGLAASPSTVHSKPVSDVARPAWLGPKAWHECEMLELLPPFVGLCASLAGHSSAWQAYLSLSSTVLGPAPGPGPEPLSLLQKLILWRVLRPECLAGALADFTTSLLGRPLDENTYAPTMPFKHSQATQPMLILLPPPGHPSATLHPLTVIQKLAAKYQQGQKQLQVIALGSEAWDPVSVVVSTLSQAMYEGHWLVLDNCHLMPHWPKELLQLLLELLGRAKVVADLESEQLLDQPESRNVSTVHRDFRLWLIVPAESSASLPAVLTQHSMPVFWNQSLELGHVLIDSVELAQQVLYMQPPTQALPLLLLHGLLLHRQLYGTRLQAHRGRWSQVTLTQVLQTQDQLWASLSNPRAAMQELAASVFYGGPLGDTEDREALISLTQACLSPSSGSWVQPHTPQSLLATLMPLPELRELDAMAECKAQMHLLPSPPEPRLCGLSEGPQAWLLRRQSRALLSALQRSSPVWVPESRRGAQLAERRLRQRLVQVNRRLESLQDLLTHVIRQDESDAPWSVLGPNARRPLEGVLETEALELSQLVGTLQRDLDCLLQQLKGAPPCPSRRCAAVAHALWTGRLPLPWRPHAPAGPQPPWHWLRQLSRRGQLLVRYLGVGADASSDVPERVFHLSAFRHPRRLLLALRGEAALDQNVPSSNFPGSRGSVSSQLQYKRLEMNSNPLHFRVENGPNPTVPERGLLLIGLQVLHAEWDPIAGALQDSPSSQPSPLPPVSISTQAPGTSDLPAPADLTVYSCPVYMGGPLGTAKLQSRNIVMHLPLPTKLTPNTCVQRRVHVCSPPLS

SEQ ID NO: 25987 - protein, 597 aa, Homo sapiens
  Payload ID: 5141
  Gene Symbol: DNHD1
  Gene Name: dynein heavy chain domain 1
  Uniprot ID: Q96M86
  ENSP ID: ENSP00000346716
MVPEERRVGLSSDETSSDSLKSWHSICVLDSKEQPLACQQKQRQFVKPVTESEQPTVLELLLAELRTLFSAVLQDSSPAAWRYLHAVLGLLPPYRELLVGHLDLLPFLEQLYCWAPWVQTHLHLDLLGAIVQAFPPDSSLLDSASHADCCPQKRRLHHRPPCPACPFVQAQWSRQQVKEELATWLRPLTLPELQRCLGIVGAQVALEEAVWLDGLSLLPLALAADIPVRYESSDTDNAEVEPVGRKETRSQLDYEVPREKAFQKSSTGFSPETSFLDSQVMTALKMERYLKKIHFLYLNVAPSRYFRPYSLMVVPPDKVNPEHYIFSPFGILHVHPVEGSETMTLGTWHHHCVLWQQLQFIPFFKYCLLRKSFTCWKKNVRLQGLHRLQKFLENHLLLAVPHFGAGLLHISRLLQELHSVSWLPQELDRCYELLDLQTALAEEKHKALRLLHRCLNLCTSILRLVHEDTYHMQQCLQERVQNCDRIRTGQGSIYLQRVQHKQLEQKLKQAEAWWLQLGKFARLVDYMICQSLISVLEEQITSFVANILQAPRQKPFLSSQLVFDDHGQLSHVPCVENMIQTLTGGLQSVKTSALQVF

SEQ ID NO: 25988 - protein, 360 aa, Homo sapiens
  Payload ID: 5141
  Gene Symbol: DNHD1
  Gene Name: dynein heavy chain domain 1
  ENSP ID: ENSP00000433105
  MOD_RES (1)..(1): Any amino acid
XEAILQCLRDASWHAGMLSQPVALLVPSGVDLTTLHRLLALATSGSFPGQYTEADLDRIGEHLPRENLGVKQNIKKEMVLQRFHQQVCSHLHLFFLIGDKQAHKQLPSTLFLRLLQLATASIDRYEPWDQAALAKVAQHHLEGAQSVPLDDGSWKYPDLQASIPSVAKAMALIHLSATHYHEHLCPALPLVTPKTFLDFLDTFLMLQQQTILKIKNKAQRVQNALENLRMLIKEHGTHANLIFDLEQQLKDSGKSLSMFQQQLEQSKLLYKQQLEECRHQENLIENLARQRDALQAQREAFLEQVGSSCRLPCTAPLSKEGNPSKDTKRRGWSDSSWNLLGGGDKDEQGISGASEPAAGG

SEQ ID NO: 25989 - protein, 158 aa, Homo sapiens
  Payload ID: 5141
  Gene Symbol: DNHD1
  Gene Name: dynein heavy chain domain 1
  ENSP ID: ENSP00000435493
FEKSQASEFLLSKRHAIMPKLQQLMAAALAELEGLLAKALSGPFMDPTQDQRSTEHQLVSLERQFQNTVSDLSELHHAYAIFTGTEDPCTLHYHSVIDPSTERMRLLCPCQSVGHVLLCSSSAYGTCTESSPKTSASGSAWLLPSSAQLWPRRRQRAG

SEQ ID NO: 25990 - protein, 4753 aa, Homo sapiens; identical to SEQ ID NO: 25986
  Payload ID: 5141
  Gene Symbol: DNHD1
  Gene Name: dynein heavy chain domain 1
  Uniprot ID: Q96M86
  ENSP ID: ENSP00000436180

SEQ ID NO: 25991 - protein, 195 aa, Homo sapiens
  Payload ID: 5141
  Gene Symbol: DNHD1
  Gene Name: dynein heavy chain domain 1
  ENSP ID: ENSP00000462936
KGLNVLDLGLNMEILEEQMLHEILCREYPELETRWQDLKIRALDTCKAVEAAENPKRQKPAKFLRNIVRAQGKLCQLRAHCEELEGQKLQEMVLWAPYRPVVWHGMAMVKALSQLQNLLPLFCMSPENWLAVTKQALDSMKPREINHGEDLASHLLQLRAHLTRQLLGSTVTALGLTQVPLVGALGALALLQATG

SEQ ID NO: 25992 - protein, 142 aa, Homo sapiens
  Payload ID: 5141
  Gene Symbol: DNHD1
  Gene Name: dynein heavy chain domain 1
  ENSP ID: ENSP00000464173
  MOD_RES (1)..(1): Any amino acid
XSLELGHVLIDSVELAQQVLYMQPPTQALPLLLLHGLLLHRQLYGTRLQAHRGRWSQVTLTQVLQTQDQLWASLSNPRAAMQELAGGEWSKSHGSRERAAADRATGPTCGVGPNSWSLAGQSFQPTQPSASRQHQHTGPGHQ

SEQ ID NO: 25993 - protein, 5 aa, Homo sapiens
  Payload ID: 5141
  Gene Symbol: DNHD1
  Gene Name: dynein heavy chain domain 1
  ENSP ID: ENSP00000464390
MVPEE

SEQ ID NO: 25994 - protein, 740 aa, Homo sapiens
  Payload ID: 5142
  Gene Symbol: DRC1
  Gene Name: dynein regulatory complex subunit 1
  Uniprot ID: Q96MC2
  ENSP ID: ENSP00000288710
MNPPGSLEALDPNVDEHLSTQILAPSVHSDNSQERIQARRLRIAARLEARRREALGEYLDGKKESEEDQSKSYKQKEESRLKLAKLLLCGTELVTNIQVAIDIREIHRRVEEEEIKRQRIEKLENEVKTSQDKFDEITSKWEEGKQKRIPQELWEMLNTQQLHCAGLLEDKNKLISELQQELKTKDDQYVKDLKKQSDDICLLLERMEEQVKNVMKTFREELYNIEKAFEVERQELLASNKKKWEQALQAHNAKELEYLNNRMKKVEDYEKQLNRQRIWDCEEYNMIKIKLEQDVQILEQQLQQRKAIYQLNQEKLEYNLQVLKKRDEESTVIKSQQKRKINRLHDILNNLRSKYAKQIKQFQEENQSLTSDYKRLVMQFKELQKAMRHFALIDDEKFWEIWLMNEEEAKDLIARAFDVDRIIHTHHLGLPWAAPDFWFLNNVGPISQQPQKSATQIVEEMLMRSEEEEAEEAAAEPESYLDLPKQISEKTTKRILMLLCDESGFLIESKLLSLLLPLEQNECYLLRLDAIFSALGIESEDDLYKLVNFFLKYRAHRLSSSLQIKPCSQASMEKASMEETSTRSELELAEQTEMEGEKEESLVEGEKEEEEETPPSPWVIHPNDVLKILEAFVMGLKKPRDSRAPLRVQKNVRDNSKDSEYWQALTTVIPSSKQNLWDALYTALEKYHLVLTQRAKLLLENSSLEQQNTELQALLQQYLNSKINSELQVPPTQVLRVPTK

SEQ ID NO: 25995 - protein, 120 aa, Homo sapiens
  Payload ID: 5142
  Gene Symbol: DRC1
  Gene Name: dynein regulatory complex subunit 1
  ENSP ID: ENSP00000414375
MNPPGSLEALDPNVDEHLSTQILAPSVHSDNSQERIQARRLRIAARLEARRREALGEYLDGKKESEEDQSKSYKQKEESRLKLAKLLLCGTELVTNIQVAIDIREIHRRVEEEEIKRQRS

SEQ ID NO: 25996 - protein, 523 aa, Homo sapiens
  Payload ID: 5143
  Gene Symbol: DRC3
  Gene Name: dynein regulatory complex subunit 3
  Uniprot ID: Q9H069
  ENSP ID: ENSP00000326870
MNQPCNSMEPRVMDDDMLKLAVGDQGPQEEAGQLAKQEGILFKDVLSLQLDFRNILRIDNLWQFENLRKLQLDNNIIEKIEGLENLAHLVWLDLSFNNIETIEGLDTLVNLEDLSLFNNRISKIDSLDALVKLQVLSLGNNRIDNMMNIIYLRRFKCLRTLSLSRNPISEAEDYKMFICAYLPDLMYLDYRRIDDHTKKLAEAKHQYSIDELKHQENLMQAQLEDEQAQREELEKHKTAFVEHLNGSFLFDSMYAEDSEGNNLSYLPGVGELLETYKDKFVIICVNIFEYGLKQQEKRKTELDTFSECVREAIQENQEQGKRKIAKFEEKHLSSLSAIREELELPNIEKMILECSADISELFDALMTLEMQLVEQLEETINMFERNIVDMVGLFIENVQSLMAQCRDLENHHHEKLLEISISTLEKIVEGDLDEDLPNDLRALFVDKDTIVNAVGASHDIHLLKIDNREDELVTRINSWCTRLIDRIHKDEIMRNRKRVKEINQYIDHMQSELDNLECGDILD

SEQ ID NO: 25997 - protein, 457 aa, Homo sapiens
  Payload ID: 5143
  Gene Symbol: DRC3
  Gene Name: dynein regulatory complex subunit 3
  Uniprot ID: Q9H069
  ENSP ID: ENSP00000382136
MNQPCNSMEPRVMDDDMLKLAVGDQGPQEEAGQLAKQEGILFKDVLSLQLDFRNILRIDNLWQFENLRKLQLDNNIIEKIEGLENLAHLVWLDLSFNNIETIEGLDTLVNLEDLSLFNNRISKIDSLDALVKLQVLSLGNNRIDNMMNIIYLRRFKCLRTLSLSRNPISEAEDYKMFICAYLPDLMYLDYRRIDDHTKKLAEAKHQYSIDELKHQENLMQAQLEDEQAQREELEKHKTAFVEHLNGSFLFDSMYAEDSEGNNLSYLPGVGELLETYKDKFVIICVNIFEYGLKQQEKRKTELDTFSECVREAIQENQEQGKRKIAKFEEKHLSSLSAIREELELPNIEKMILECSADISELFDALMTLEMQLVEQLEETINMFERNIVDMVGLFIENVQSLMAQCRDLENHHHEKLLEISISTLEKIVEGDLDEDLPNDLRAGRFQKFNYVEASGTF

SEQ ID NO: 25998 - protein, 523 aa, Homo sapiens; identical to SEQ ID NO: 25996
  Payload ID: 5143
  Gene Symbol: DRC3
  Gene Name: dynein regulatory complex subunit 3
  Uniprot ID: Q9H069
  ENSP ID: ENSP00000382140

SEQ ID NO: 25999 - protein, 131 aa, Homo sapiens
  Payload ID: 5143
  Gene Symbol: DRC3
  Gene Name: dynein regulatory complex subunit 3
  ENSP ID: ENSP00000461917
MNQPCNSMEPRVMDDDMLKLAVGDQGPQEEAGQLAKQEGILFKDVLSLQLDFRNILRIDNLWQFENLRKLQLDNNIIEKIEGLENLAHLVWLDLSFNNIETIEGLDTLVNLEDLSLFNNRISKIDSLDALV

SEQ ID NO: 26000 - protein, 67 aa, Homo sapiens
  Payload ID: 5143
  Gene Symbol: DRC3
  Gene Name: dynein regulatory complex subunit 3
  ENSP ID: ENSP00000462091
  MOD_RES (1)..(1): Any amino acid
XNLMQAQLEDEQAQREELEKHKTAFVEHLNGSFLFDSMYAEDSEGNNLSYLPGVVAWSPEDVVGTCH

SEQ ID NO: 26001 - protein, 457 aa, Homo sapiens; identical to SEQ ID NO: 25997
  Payload ID: 5143
  Gene Symbol: DRC3
  Gene Name: dynein regulatory complex subunit 3
  Uniprot ID: Q9H069
  ENSP ID: ENSP00000462661

SEQ ID NO: 26002 - protein, 77 aa, Homo sapiens
  Payload ID: 5143
  Gene Symbol: DRC3
  Gene Name: dynein regulatory complex subunit 3
  ENSP ID: ENSP00000464101
IIYLRRFKCLRTLSLSRNPISEAEDYKMFICAYLPDLMYLDYRRIDDHTASVSLSVSQPCETDSSSPQVSWKRGIEE

SEQ ID NO: 26003 - protein, 51 aa, Homo sapiens
  Payload ID: 5143
  Gene Symbol: DRC3
  Gene Name: dynein regulatory complex subunit 3
  ENSP ID: ENSP00000464150
MNQPCNSMEPRVMDDDMLKLAVGDQGPQEEAGQLAKQEGILFKDVLSLQLD

SEQ ID NO: 26004 - protein, 138 aa, Homo sapiens
  Payload ID: 5143
  Gene Symbol: DRC3
  Gene Name: dynein regulatory complex subunit 3
  ENSP ID: ENSP00000464224
MNQPCNSMEPRVMDDDMLKLAVGDQGPQEEAGQLAKQEGILFKDVLSLQLDFRNILRIDNLWQFENLRKLQLDNNIIEKIEGLENLAHLVWLDLSFNNIETIEGLDTLVNLEDLSLFNNRISKIDSLDALVKLQVLSL

SEQ ID NO: 26005 - protein, 102 aa, Homo sapiens
  Payload ID: 5143
  Gene Symbol: DRC3
  Gene Name: dynein regulatory complex subunit 3
  ENSP ID: ENSP00000464476
MNQPCNSMEPRVMDDDMLKLAVGDQGPQEEAGQLAKQEGILFKDVLSLQLDFRNILRIDNLWQFENLRKLQLDNNIIEKIEGLENLAHLVWLDLSFNNIETI

SEQ ID NO: 26006 - protein, 83 aa, Homo sapiens
  Payload ID: 5143
  Gene Symbol: DRC3
  Gene Name: dynein regulatory complex subunit 3
  ENSP ID: ENSP00000464676
MNQPCNSMEPRVMDDDMLKLAVGDQGPQEEAGQLAKQEGILFKDVLSLQLDFRRKTADEPKGEQDDGQEDSQEDILRIDNLWQ

SEQ ID NO: 26007 - protein, 57 aa, Homo sapiens
  Payload ID: 5143
  Gene Symbol: DRC3
  Gene Name: dynein regulatory complex subunit 3
  ENSP ID: ENSP00000465314
  MOD_RES (1)..(1): Any amino acid
XMAQCRDLENHHHEKLLEISISTLEKIVEGDLDEDLPNDLRAGRFQKFNYVEASGTF

SEQ ID NO: 26008 - protein, 809 aa, Homo sapiens
  Payload ID: 5144
  Gene Symbol: DRC7
  Gene Name: dynein regulatory complex subunit 7
  Uniprot ID: Q8IY82
  ENSP ID: ENSP00000338938
MEVLREKVEEEEEAEREEAAEWAEWARMEKMMRPVEVRKEEITLKQETLRDLEKKLSEIQITVSAELPAFTKDTIDISKLPISYKTNTPKEEHLLQVADNFSRQYSHLCPDRVPLFLHPLNECEVPKFVSTTLRPTLMPYPELYNWDSCAQFVSDFLTMVPLPDPLKPTIKKEEKVLPKKYTIKPPRDLCSRFEQEQEVKKQQEIRAQEKKRLREEEERLMEAEKAKPDALHGLRVHSWVLVLSGKREVPENFFIDPFTGHSYSTQDEHFLGIESLWNHKNYWINMQDCWNCCKDLIFDLGDPVRWEYMLLGTDKSQLSLTEEDDSGINDEDDVENLGKEDEDKSFDMPHSWVEQIEISPEAFETRCPNGKKVIQYKRAKLEKWAPYLNSNGLVSRLTTYEDLQCTNILEIKEWYQNREDMLELKHINKTTDLKTDYFKPGHPQALRVHSYKSMQPEMDRVIEFYETARVDGLMKREETPRTMTEYYQGRPDFLSYRHASFGPRVKKLTLSSAESNPRPIVKITERFFRNPAKPAEEDVAERVFLVAEERIQLRYHCREDHITASKREFLRRTEVDSKGNKIIMTPDMCISFEVEPMEHTKKLLYQYEAMMHLKREEKLSRHQVWESELEVLEILKLREEEEAAHTLTISIYDTKRNEKSKEYREAMERMMHEEHLRQVETQLDYLAPFLAQLPPGEKLTCWQAVRLKDECLSDFKQRLINKANLIQARFEKETQELQKKQQWYQENQVTLTPEDEDLYLSYCSQAMFRIRILEQRLNRHKELAPLKYLALEEKLYKDPRLGELQKIFA

SEQ ID NO: 26009 - protein, 874 aa, Homo sapiens
  Payload ID: 5144
  Gene Symbol: DRC7
  Gene Name: dynein regulatory complex subunit 7
  Uniprot ID: Q8IY82
  ENSP ID: ENSP00000353942
MEVLREKVEEEEEAEREEAAEWAEWARMEKMMRPVEVRKEEITLKQETLRDLEKKLSEIQITVSAELPAFTKDTIDISKLPISYKTNTPKEEHLLQVADNFSRQYSHLCPDRVPLFLHPLNECEVPKFVSTTLRPTLMPYPELYNWDSCAQFVSDFLTMVPLPDPLKPPSHLYSSTTVLKYQKGNCFDFSTLLCSMLIGSGYDAYCVNGYGSLDLCHMDLTREVCPLTVKPKETIKKEEKVLPKKYTIKPPRDLCSRFEQEQEVKKQQEIRAQEKKRLREEEERLMEAEKAKPDALHGLRVHSWVLVLSGKREVPENFFIDPFTGHSYSTQDEHFLGIESLWNHKNYWINMQDCWNCCKDLIFDLGDPVRWEYMLLGTDKSQLSLTEEDDSGINDEDDVENLGKEDEDKSFDMPHSWVEQIEISPEAFETRCPNGKKVIQYKRAKLEKWAPYLNSNGLVSRLTTYEDLQCTNILEIKEWYQNREDMLELKHINKTTDLKTDYFKPGHPQALRVHSYKSMQPEMDRVIEFYETARVDGLMKREETPRTMTEYYQGRPDFLSYRHASFGPRVKKLTLSSAESNPRPIVKITERFFRNPAKPAEEDVAERVFLVAEERIQLRYHCREDHITASKREFLRRTEVDSKGNKIIMTPDMCISFEVEPMEHTKKLLYQYEAMMHLKREEKLSRHQVWESELEVLEILKLREEEEAAHTLTISIYDTKRNEKSKEYREAMERMMHEEHLRQVETQLDYLAPFLAQLPPGEKLTCWQAVRLKDECLSDFKQRLINKANLIQARFEKETQELQKKQQWYQENQVTLTPEDEDLYLSYCSQAMFRIRILEQRLNRHKELAPLKYLALEEKLYKDPRLGELQKIFA

SEQ ID NO: 26010 - protein, 874 aa, Homo sapiens; identical to SEQ ID NO: 26009
  Payload ID: 5144
  Gene Symbol: DRC7
  Gene Name: dynein regulatory complex subunit 7
  Uniprot ID: Q8IY82
  ENSP ID: ENSP00000377869

SEQ ID NO: 26011 - protein, 70 aa, Homo sapiens
  Payload ID: 5144
  Gene Symbol: DRC7
  Gene Name: dynein regulatory complex subunit 7
  ENSP ID: ENSP00000454722
MEVLREKVEEEEEAEREEAAEWAEWARMEKMMRPVEVRKEEITLKQETLRDLEKKLSEIQITVSAELPSS

SEQ ID NO: 26012 - protein, 53 aa, Homo sapiens
  Payload ID: 5144
  Gene Symbol: DRC7
  Gene Name: dynein regulatory complex subunit 7
  ENSP ID: ENSP00000455994
MPYPELYNWDSCAQFVSDFLTMVPLPDPLKPPSHLYSSTTVLKYQKGNCFDFS

SEQ ID NO: 26013 - protein, 427 aa, Homo sapiens
  Payload ID: 5144
  Gene Symbol: DRC7
  Gene Name: dynein regulatory complex subunit 7
  ENSP ID: ENSP00000456323
  MOD_RES (1)..(1): Any amino acid
XDMPHSWVEQIEISPEAFETRCPNGKKVIQYKRAKLEKWAPYLNSNGLVSRLTTYEDLQCTNILEIKEWYQNREDMLELKHINKTTDLKTDYFKPGHPQALRVHSYKSMQPEMDRVIEFYETARVDGLMKREETPRTMTEYYQGRPDFLSYRHASFGPRVKKLTLSSAESNPRPIVKITERFFRNPAKPAEEDVAERVFLVAEERIQLRYHCREDHITASKREFLRRTEVDSKGNKIIMTPDMCISFEVLEILKLREEEEAAHTLTISIYDTKRNEKSKEYREAMERMMHEEHLRQVETQLDYLAPFLAQLPPGEKLTCWQAVRLKDECLSDFKQRLINKANLIQARFEKETQELQKKQQWYQENQVTLTPEDEDLYLSYCSQAMFRIRILEQRLNRHKELAPLKYLALEEKLYKDPRLGELQKIFA

SEQ ID NO: 26014 - protein, 159 aa, Homo sapiens
  Payload ID: 5144
  Gene Symbol: DRC7
  Gene Name: dynein regulatory complex subunit 7
  ENSP ID: ENSP00000456374
  MOD_RES (1)..(1): Any amino acid
XKYTIKPPRDLCSRFEQEQEVKKQQEIRAQEKKRLREEEERLMEAEKAKPDALHGLRVHSWVLVLSGKREVPENFFIDPFTGHSYSTQDEHFLGIESLWNHKNYWINMQDCWNCCKVPREGELGGCGRHSAGDRNRGKQWQPDLGESETPGHEGFEPSP

SEQ ID NO: 26015 - protein, 94 aa, Homo sapiens
  Payload ID: 5144
  Gene Symbol: DRC7
  Gene Name: dynein regulatory complex subunit 7
  ENSP ID: ENSP00000456441
MEVLREKVEEEEEAEREEAAEWAEWARMEKMMRPVEVRKEEITLKQETLRDLEKKLSEIQITVSAELPAFTKDTIDISKLPISYKTNTPKEEHL

SEQ ID NO: 26016 - protein, 170 aa, Homo sapiens
  Payload ID: 5144
  Gene Symbol: DRC7
  Gene Name: dynein regulatory complex subunit 7
  ENSP ID: ENSP00000457676
MEVLREKVEEEEEAEREEAAEWAEWARMEKMMRPVEVRKEEITLKQETLRDLEKKLSEIQITVSAELPAFTKDTIDISKLPISYKTNTPKEEHLLQVADNFSRQYSHLCPDRVPLFLHPLNECEVPVRLKFVSTTLRPTLMPYPELYNWDSCAQFVSDFLTMVPLPDPLK

SEQ ID NO: 26017 - protein, 725 aa, Homo sapiens
  Payload ID: 5145
  Gene Symbol: DNAAF1
  Gene Name: dynein, axonemal, assembly factor 1
  Uniprot ID: Q8NEP3
  ENSP ID: ENSP00000367815
MHPEPSEPATGGAAELDCAQEPGVEESAGDHGSAGRGGCKEEINDPKEICVGSSDTSYHSQQKQSGDNGSGGHFAHPREDREDRGPRMTKSSLQKLCKQHKLYITPALNDTLYLHFKGFDRIENLEEYTGLRCLWLQSNGIQKIENLEAQTELRCLFLQMNLLRKIENLEPLQKLDALNLSNNYIKTIENLSCLPVLNTLQMAHNHLETVEDIQHLQECLRLCVLDLSHNKLSDPEILSILESMPDLRVLNLMGNPVIRQIPNYRRTVTVRLKHLTYLDDRPVFPKDRACAEAWARGGYAAEKEERQQWESRERKKITDSIEALAMIKQRAEERKRQRESQERGEMTSSDDGENVPASAEGKEEPPGDRETRQKMELFVKESFEAKDELCPEKPSGEEPPVEAKREDGGPEPEGTLPAETLLLSSPVEVKGEDGDGEPEGTLPAEAPPPPPPVEVKGEDGDQEPEGTLPAETLLLSPPVKVKGEDGDREPEGTLPAEAPPPPPLGAAREEPTPQAVATEGVFVTELDGTRTEDLETIRLETKETFCIDDLPDLEDDDETGKSLEDQNMCFPKIEVISSLSDDSDPELDYTSLPVLENLPTDTLSNIFAVSKDTSKAARVPFTDIFKKEAKRDLEIRKQDTKSPRPLIQELSDEDPSGQLLMPPTCQRDAAPLTSSGDRDSDFLAASSPVPTESAATPPETCVGVAQPSQALPTWDLTAFPAPKAS

SEQ ID NO: 26018 - protein, 190 aa, Homo sapiens
  Payload ID: 5145
  Gene Symbol: DNAAF1
  Gene Name: dynein, axonemal, assembly factor 1
  ENSP ID: ENSP00000454960
NMCFPKIEVISSLSDDSDPELDYTSLPVLENLPTDTLSNIFAVSKDTSKAARVPFTDIFKKEAKRDLEIRKQDTKSPRPLIQELSDEDPSGQLLMPPTCQRDAAPLTSSGDRDSDFLAASSPEMGFHHVDQAGLELLTSGDLFASASQSAGITVPTESAATPPETCVGVAQPSQALPTWDLTAFPAPKAS

SEQ ID NO: 26019 - protein, 247 aa, Homo sapiens
  Payload ID: 5145
  Gene Symbol: DNAAF1
  Gene Name: dynein, axonemal, assembly factor 1
  ENSP ID: ENSP00000455154
MHPEPSEPATGGAAELDCAQEPGVEESAGDHGSAGRGGCKEEINDPKEICVGSSDTSYHSQQKQSGDNGSGGHFAHPREDREDRGPRMTKSSLQKLCKQHKLYITPALNDTLYLHFKGFDRIENLEEYTGLRCLWLQSNGIQKIENLEAQTELRCLFLQMNLLRKIENLEPLQKLDALNLSNNYIKTIENLSCLPVLNTLQMAHNHLETVEDIQHLQECLRLCVLDLSHNKLSDPEILSILESMPDL

SEQ ID NO: 26020 - protein, 418 aa, Homo sapiens
  Payload ID: 5145
  Gene Symbol: DNAAF1
  Gene Name: dynein, axonemal, assembly factor 1
  Uniprot ID: Q8NEP3
  ENSP ID: ENSP00000457373
MHPEPSEPATGGAAELDCAQEPGVEESAGDHGSAGRGGCKEEINDPKEICVGSSDTSYHSQQKQSGDNGSGGHFAHPREDREDRGPRMTKSSLQKLCKQHKLYITPALNDTLYLHFKGFDRIENLEEYTGLRCLWLQSNGIQKIENLEAQTELRCLFLQMNLLRKIENLEPLQKLDALNLSNNYIKTIENLSCLPVLNTLQMAHNHLETVEDIQHLQECLRLCVLDLSHNKLSDPEILSILESMPDLRVLNLMGNPVIRQIPNYRRTVTVRLKHLTYLDDRPVFPKDRACAEAWARGGYAAEKEERQQWESRERKKITDSIEALAMIKQRAEERKRQRESQERGEMTSSDDGENVPASAEGKEEPPGDRETRQKMELFVKESFEAKDELCPEKPSGEEPPVEAKREDGDPATVTACEG

SEQ ID NO: 26021 - protein, 58 aa, Homo sapiens
  Payload ID: 5145
  Gene Symbol: DNAAF1
  Gene Name: dynein, axonemal, assembly factor 1
  ENSP ID: ENSP00000457899
  MOD_RES (1)..(1): Any amino acid
XKQDTKSPRPLIQELSDEDPSGQLLMPPTCQRDAAPLTSSGDRDSDFLAASSPAAKCI

SEQ ID NO: 26022 - protein, 837 aa, Homo sapiens
  Payload ID: 5146
  Gene Symbol: DNAAF2
  Gene Name: dynein, axonemal, assembly factor 2
  Uniprot ID: Q9NVR5
  ENSP ID: ENSP00000298292
MAKAAASSSLEDLDLSGEEVQRLTSAFQDPEFRRMFSQYAEELTDPENRRRYEAEITALERERGVEVRFVHPEPGHVLRTSLDGARRCFVNVCSNALVGAPSSRPGSGGDRGAAPGSHWSLPYSLAPGREYAGRSSSRYMVYDVVFHPDALALARRHEGFRQMLDATALEAVEKQFGVKLDRRNAKTLKAKYKGTPEAAVLRTPLPGVIPARPDGEPKGPLPDFPYPYQYPAAPGPRAPSPPEAALQPAPTEPRYSVVQRHHVDLQDYRCSRDSAPSPVPHELVITIELPLLRSAEQAALEVTRKLLCLDSRKPDYRLRLSLPYPVDDGRGKAQFNKARRQLVVTLPVVLPAARREPAVAVAAAAPEESADRSGTDGQACASAREGEAGPARSRAEDGGHDTCVAGAAGSGVTTLGDPEVAPPPAAAGEERVPKPGEQDLSRHAGSPPGSVEEPSPGGENSPGGGGSPCLSSRSLAWGSSAGRESARGDSSVETREESEGTGGQRSACAMGGPGTKSGEPLCPPLLCNQDKETLTLLIQVPRIQPQSLQGDLNPLWYKLRFSAQDLVYSFFLQFAPENKLSTTEPVISISSNNAVIELAKSPESHGHWREWYYGVNNDSLEERLFVNEENVNEFLEEVLSSPFKQSMSLTPPLIEVLQVTDNKIQINAKLQECSNSDQLQGKEERVNEESHLTEKEYIEHCNTPTTDSDSSIAVKALQIDSFGLVTCFQQESLDVSQMILGKSQQPESKMQSEFIKEKSATCSNEEKDNLNESVITEEKETDGDHLSSLLNKTTVHNIPGFDSIKETNMQDGSVQVIKDHVTNCAFSFQNSLLYDLD

SEQ ID NO: 26023 - protein, 789 aa, Homo sapiens
  Payload ID: 5146
  Gene Symbol: DNAAF2
  Gene Name: dynein, axonemal, assembly factor 2
  Uniprot ID: Q9NVR5
  ENSP ID: ENSP00000384862
MAKAAASSSLEDLDLSGEEVQRLTSAFQDPEFRRMFSQYAEELTDPENRRRYEAEITALERERGVEVRFVHPEPGHVLRTSLDGARRCFVNVCSNALVGAPSSRPGSGGDRGAAPGSHWSLPYSLAPGREYAGRSSSRYMVYDVVFHPDALALARRHEGFRQMLDATALEAVEKQFGVKLDRRNAKTLKAKYKGTPEAAVLRTPLPGVIPARPDGEPKGPLPDFPYPYQYPAAPGPRAPSPPEAALQPAPTEPRYSVVQRHHVDLQDYRCSRDSAPSPVPHELVITIELPLLRSAEQAALEVTRKLLCLDSRKPDYRLRLSLPYPVDDGRGKAQFNKARRQLVVTLPVVLPAARREPAVAVAAAAPEESADRSGTDGQACASAREGEAGPARSRAEDGGHDTCVAGAAGSGVTTLGDPEVAPPPAAAGEERVPKPGEQDLSRHAGSPPGSVEEPSPGGENSPGGGGSPCLSSRSLAWGSSAGRESARGDSSVETREESEGTGGQRSACAMGGPGTKSGEPLCPPLLCNQDKETLTLLIQVPRIQPQSLQGDLNPLWYKLRFSAQDLVYSFFLQFAPENKLSTTEPVISISSNNAVIELAKSPESHGHWREWYYGVNNDSLELQECSNSDQLQGKEERVNEESHLTEKEYIEHCNTPTTDSDSSIAVKALQIDSFGLVTCFQQESLDVSQMILGKSQQPESKMQSEFIKEKSATCSNEEKDNLNESVITEEKETDGDHLSSLLNKTTVHNIPGFDSIKETNMQDGSVQVIKDHVTNCAFSFQNSLLYDLD

SEQ ID NO: 26024 - protein, 588 aa, Homo sapiens
  Payload ID: 5147
  Gene Symbol: DNAAF3
  Gene Name: dynein, axonemal, assembly factor 3
  ENSP ID: ENSP00000375600
MLPLLDSSKRAGTLGSGCGVPRVHSAALSREEGASRDIWRIKVWARVMTTPAGSGSGFGSVSWWGLSPALDLQAESPPVDPDSQADTVHSNPELDVLLLGSVDGRHLLRTLSRAKFWPRRRFNFFVLENNLEAVARHMLIFSLALEEPEKMGLQERSETFLEVWGNALLRPPVAAFVRAQADLLAHLVPEPDRLEEQLPWLSLRALKFRERDALEAVFRFWAGGEKGPQAFPMSRLWDSRLRHYLGSRYDARRGVSDWDLRMKLHDRGAQVIHPQEFRRWRDTGVAFELRDSSAYHVPNRTLASGRLLSYRGERVAARGYWGDIATGPFVAFGIEADDESLLRTSNGQPVKTAGEITQHNVTELLRDVAAWGRARATGGDLEEQQHAEGSPEPGTPAAPTPESFTVHFLPLNSAQTLHHKSCYNGRFQLLYVACGMVHLLIPELGACVAPGGNLIVELARYLVDVRQEQLQGFNTRVRELAQAAGFAPQTGARPSETFARFCKSQESALGNTVPAVEPGTPPLDILAQPLEASNPALEGLTQPLQGGTPHCEPCQLPSESPGSLSEVLAQPQGALAPPNCESDSKTGV

SEQ ID NO: 26025 - protein, 487 aa, Homo sapiens
  Payload ID: 5147
  Gene Symbol: DNAAF3
  Gene Name: dynein, axonemal, assembly factor 3
  ENSP ID: ENSP00000394343
MKMRAQIPESLREEGIEILKPQFFVLENNLEAVARHMLIFSLALEEPEKMGLQERSETFLEVWGNALLRPPVAAFVRAQADLLAHLVPEPDRLEEQLPWLSLRALKFRERDALEAVFRFWAGGEKGPQAFPMSRLWDSRLRHYLGSRYDARRGVSDWDLRMKLHDRGAQVIHPQEFRRWRDTGVAFELRDSSAYHVPNRTLASGRLLSYRGERVAARGYWGDIATGPFVAFGIEADDESLLRTSNGQPVKTAGEITQHNVTELLRDVAAWGRARATGGDLEEQQHAEGSPEPGTPAAPTPESFTVHFLPLNSAQTLHHKSCYNGRFQLLYVACGMVHLLIPELGACVAPGGNLIVELARYLVDVRQEQLQGFNTRVRELAQAAGFAPQTGARPSETFARFCKSQESALGNTVPAVEPGTPPLDILAQPLEASNPALEGLTQPLQGGTPHCEPCQLPSESPGSLSEVLAQPQGALAPPNCESDSKTGV

SEQ ID NO: 26026 - protein, 541 aa, Homo sapiens
  Payload ID: 5147
  Gene Symbol: DNAAF3
  Gene Name: dynein, axonemal, assembly factor 3
  ENSP ID: ENSP00000432046
MTTPAGSGSGFGSVSWWGLSPALDLQAESPPVDPDSQADTVHSNPELDVLLLGSVDGRHLLRTLSRAKFWPRRRFNFFVLENNLEAVARHMLIFSLALEEPEKMGLQERSETFLEVWGNALLRPPVAAFVRAQADLLAHLVPEPDRLEEQLPWLSLRALKFRERDALEAVFRFWAGGEKGPQAFPMSRLWDSRLRHYLGSRYDARRGVSDWDLRMKLHDRGAQVIHPQEFRRWRDTGVAFELRDSSAYHVPNRTLASGRLLSYRGERVAARGYWGDIATGPFVAFGIEADDESLLRTSNGQPVKTAGEITQHNVTELLRDVAAWGRARATGGDLEEQQHAEGSPEPGTPAAPTPESFTVHFLPLNSAQTLHHKSCYNGRFQLLYVACGMVHLLIPELGACVAPGGNLIVELARYLVDVRQEQLQGFNTRVRELAQAAGFAPQTGARPSETFARFCKSQESALGNTVPAVEPGTPPLDILAQPLEASNPALEGLTQPLQGGTPHCEPCQLPSESPGSLSEVLAQPQGALAPPNCESDSKTGV

SEQ ID NO: 26027 - protein, 112 aa, Homo sapiens
  Payload ID: 5147
  Gene Symbol: DNAAF3
  Gene Name: dynein, axonemal, assembly factor 3
  ENSP ID: ENSP00000432360
MVPQPAVILPGPPVDPDSQADTVHSNPELDVLLLGSVDGRHLLRTLSRAKFWPRRRFNFFVLENNLEAVARHMLIFSLALEEPEKMGLQERSETFLEVWGNALLRPPVAAFV

SEQ ID NO: 26028 - protein, 105 aa, Homo sapiens
  Payload ID: 5147
  Gene Symbol: DNAAF3
  Gene Name: dynein, axonemal, assembly factor 3
  ENSP ID: ENSP00000432838
MVPQPAVILPGPPVDPDSQADTVHSNPELDVLLLGSVDGRHLLRTLSRAKFWPRRRFNFFVLENNLEAVARHMLIFSLALEEPEKMGLQERSETFLEVWGNALLR

SEQ ID NO: 26029 - protein, 95 aa, Homo sapiens
  Payload ID: 5147
  Gene Symbol: DNAAF3
  Gene Name: dynein, axonemal, assembly factor 3
  Uniprot ID: Q8N9W5
  ENSP ID: ENSP00000433247
MTTPAGSGSGFGSVSWWGLSPALDLQAESPPVDPDSQADTVHSNPELDVLLLGSVDGRHLLRTLSRAKFWPRRRFNVSWDEDESPDSRVLEGGRD

SEQ ID NO: 26030 - protein, 95 aa, Homo sapiens; identical to SEQ ID NO: 26029
  Payload ID: 5147
  Gene Symbol: DNAAF3
  Gene Name: dynein, axonemal, assembly factor 3
  Uniprot ID: Q8N9W5
  ENSP ID: ENSP00000433826

SEQ ID NO: 26031 - protein, 608 aa, Homo sapiens
  Payload ID: 5147
  Gene Symbol: DNAAF3
  Gene Name: dynein, axonemal, assembly factor 3
  ENSP ID: ENSP00000436975
MLPLLDSSKRAGTLGSGCGVPRVHSAALSREEGASRDIWRIKVWARVMTTPAGSGSGFGSVSWWGLSPALDLQAERDATVDALPTTMVPQPAVILPGPPVDPDSQADTVHSNPELDVLLLGSVDGRHLLRTLSRAKFWPRRRFNFFVLENNLEAVARHMLIFSLALEEPEKMGLQERSETFLEVWGNALLRPPVAAFVRAQADLLAHLVPEPDRLEEQLPWLSLRALKFRERDALEAVFRFWAGGEKGPQAFPMSRLWDSRLRHYLGSRYDARRGVSDWDLRMKLHDRGAQVIHPQEFRRWRDTGVAFELRDSSAYHVPNRTLASGRLLSYRGERVAARGYWGDIATGPFVAFGIEADDESLLRTSNGQPVKTAGEITQHNVTELLRDVAAWGRARATGGDLEEQQHAEGSPEPGTPAPTPESFTVHFLPLNSAQTLHHKSCYNGRFQLLYVACGMVHLLIPELGACVAPGGNLIVELARYLVDVRQEQLQGFNTRVRELAQAAGFAPQTGARPSETFARFCKSQESALGNTVPAVEPGTPPLDILAQPLEASNPALEGLTQPLQGGTPHCEPCQLPSESPGSLSEVLAQPQGALAPPNCESDSKTGV

SEQ ID NO: 26032 - protein, 208 aa, Homo sapiens
  Payload ID: 5147
  Gene Symbol: DNAAF3
  Gene Name: dynein, axonemal, assembly factor 3
  ENSP ID: ENSP00000472645
  MOD_RES (1)..(1): Any amino acid
XLEEQQHAEGSPEPGTPAPTPESFTVHFLPLNSAQTLHHKSCYNGRFQLLYVACGMVHLLIPELGACVAPGGNLIVELARYLVDVRQEQLQGFNTRVRELAQAAGFAPQTGARPSETFARFCKSQESALGNTVPAVEPGTPPLDILAQPLEASNPALEGLTQPLQGGTPHCEPCQLPSESPGSLSEVLAQPQGALAPPNCESDSKTGV

SEQ ID NO: 26033 - protein, 160 aa, Homo sapiens
  Payload ID: 5147
  Gene Symbol: DNAAF3
  Gene Name: dynein, axonemal, assembly factor 3
  ENSP ID: ENSP00000473009
MTTPAGSGSGFGSVSWWGLSPALDLQAESPPVDPDSQADTVHSNPELDVLLLGSVDGRHLLRTLSRAKFWPRRRFNFFVLENNLEAVARHMLIFSLALEEPEKMGLQERSETFLEVWGNALLRPPVAAFVRAQADLLAHLVPEPDRLEEQLPWLSLRALK

SEQ ID NO: 26034 - protein, 855 aa, Homo sapiens
  Payload ID: 5148
  Gene Symbol: DNAAF5
  Gene Name: dynein, axonemal, assembly factor 5
  Uniprot ID: Q86Y56
  ENSP ID: ENSP00000297440
MAALGVAEAVAAPHPAEGAETAEAVELSRALSRLLPGLEADSKPGRRRALEALRRALEEPGPAADPTAFQGPWARLLLPRLLRCLSDPAEGCRALAVHLLDLGLRRAARPRDALPRLLPALAARLAGPVPARRPPEACEELRLALVQLLGLAVDLCGAALAPHLDDALRALRCSLLDPFAAVRRESCSCAAALAQATPDHFHMQSESLIGPLMQTISHQHWKVRVAAIEATGAVIHFGNGKSVDDVLSHFAQRLFDDVPQVRRAVASVVGGWLLCLRDRYSFFHKLIPLLLSSLNDEVPEVRQLAASLWEDVGLQWQKENEEDLKDKLDFAPPTPPHYPPHERRPVLGCRELVFRNLSKILPALCHDITDWVVGTRVKSAQLLPVLLLHAEDHATQHLEVVLRTLFQACTDEEAAVVQSCTRSAELVGTFVSPEVFLKLILSTLKKTPSASGLLVLASAMRGCPREALQPHLAAIATELAQAHICQASENDLYLERLLLCVQALVSVCHEDCGVASLQLLDVLLTIVALAGATGLRDKAQETMDSLAMVEGVSSCQDLYRKHIGPLLERVTASHLDWTAHSPELLQFSVIVAQSGPALGEALPHVVPTLRACLQPSQDPQMRLKLFSILSTVLLRATDTINSQGQFPSYLETVTKDILAPNLQWHAGRTAAAIRTAAVSCLWALTSSEVLSAEQIRDVQETLMPQVLTTLEEDSKMTRLISCRIINTFLKTSGGMTDPEKLIRIYPELLKRLDDVSNDVRMAAASTLVTWLQCVKGANAKSYYQSSVQYLYRELLVHLDDPERAIQDAILEVLKEGSGLFPDLLVRETEAVIHKHRSATYCEQLLQHVQAVPATQ

SEQ ID NO: 26035 - protein, 280 aa, Homo sapiens
  Payload ID: 5148
  Gene Symbol: DNAAF5
  Gene Name: dynein, axonemal, assembly factor 5
  ENSP ID: ENSP00000384884
MTGGAREKAHIARSPATAQGPALGEALPHVVPTLRACLQPSQDPQMRLKLFSILSTVLLRATDTINSQGQFPSYLETVTKDILAPNLQWHAGRTAAAIRTAAVSCLWALTSSEVLSAEQIRDVQETLMPQVLTTLEEDSKMTRLISCRIINTFLKTSGGMTDPEKLIRIYPELLKRLDDVSNDVRMAAASTLVTWLQCVKGANAKSYYQSSVQYLYRELLVHLDDPERAIQDAILEVLKEGSGLFPDLLVRETEAVIHKHRSATYCEQLLQHVQAVPATQ

SEQ ID NO: 26036 - protein, 657 aa, Homo sapiens
  Payload ID: 5148
  Gene Symbol: DNAAF5
  Gene Name: dynein, axonemal, assembly factor 5
  ENSP ID: ENSP00000403165
  MOD_RES (1)..(1): Any amino acid
XSPPCAARAAAAPPPWRRPRPHWKVRVAAIEATGAVIHFGNGKSVDDVLSHFAQRLFDDVPQVRRAVASVVGGWLLCLRDRYSFFHKLIPLLLSSLNDEVPEVRQLAASLWEDVGLQWQKENEEDLKDKLDFAPPTPPHYPPHERRPVLGCRELVFRNLSKILPALCHDITDWVVGTRVKSAQLLPVLLLHAEDHATQHLEVVLRTLFQACTDEEAAVVQSCTRSAELVGTFVSPEVFLKLILSTLKKTPSASGLLVLASAMRGCPREALQPHLAAIATELAQAHICQASENDLYLERLLLCVQALVSVCHEDCGVASLQLLDVLLTIVALAGATGLRDKAQETMDSLAMVEGVSSCQDLYRKHIGPLLERVTASHLDWTAHSPELLQFSVIVAQSGPALGEALPHVVPTLRACLQPSQDPQMRLKLFSILSTVLLRATDTINSQGQFPSYLETVTKDILAPNLQWHAGRTAAAIRTAAVSCLWALTSSEVLSAEQIRDVQETLMPQVLTTLEEDSKMTRLISCRIINTFLKTSGGMTDPEKLIRIYPELLKRLDDVSNDVRMAAASTLVTWLQCVKGANAKSYYQSSVQYLYRELLVHLDDPERAIQDAILEVLKEGSGLFPDLLVRETEAVIHKHRSATYCEQLLQHVQAVPATQ

SEQ ID NO: 26037 - protein, 195 aa, Homo sapiens
  Payload ID: 5148
  Gene Symbol: DNAAF5
  Gene Name: dynein, axonemal, assembly factor 5
  ENSP ID: ENSP00000410788
  MOD_RES (1)..(1): Any amino acid
XLCARCAAPCSTPSPPCAARAAAAPPPWRRPRPVRRAVASVVGGWLLCLRDRYSFFHKLIPLLLSSLNDEVPEVRQLAASLWEDVGLQWQKENEEDLKDKLDFAPPTPPHYPPHERRPVLGCRELVFRNLSKILPALCHDITDWVVGTRVKSAQLLPVLLLHAEDHATQHLEVVLRTLFQACTDEEAAVVQSCTR

SEQ ID NO: 26038 - protein, 4265 aa, Homo sapiens
  Payload ID: 5149
  Gene Symbol: DNAH1
  Gene Name: dynein, axonemal, heavy chain 1
  Uniprot ID: Q9P2D7
  ENSP ID: ENSP00000401514
MEQPNSKGYSLGRTPQGPECSSAPAVQVGTHRGLEYNPGKILPGSDYGLGNPPALDPKLPHLPLPPAPPTLSDLGQPRKSPLTGTDKKYPLMKQRGFYSDILSPGTLDQLGEVCRGPRMSQNLLRQADLDKFTPRVGSFEVPEDFQERMEQQCIGSTTRLLAQTDFPLQAYEPKMQVPFQVLPGQHPRKIEIERRKQQYLSLDIEQLLFSQGIDSNKLMPRHLDHQHPQTIEQGHDPIFPIYLPLKVFDNEDFDCRTPREWINMGLEPGSLDRKPVPGKALLPTDDFLGHEDPKSQKLKYKWCEVGVLDYDEEKKLYLVHKTDEKGLVRDEMGRPILNAGVTTEGRPPLQVCQYWVPRIQLLFCAEDPCMFAQRVVQANALRKNTEALLLYNLYVDCMPSDGQHVISEQSLSKIKQWALSTPRMRKGPSVLEHLSSLAREVSLDYERSMNKINFDHVVSSKPETFSYVTLPKKEEEQVPERGLVSVPKYHFWEQKEDFTFVSLLTRPEVITALSKVRAECNKVTAMSLFHSSLSKYSHLEEFEQIQSQTFSQVQMFLKDSWISSLKVAMRSSLRDMSKGWYNLYETNWEVYLMSKLRKLMELVKYMLQDTLRFLVQDSLASFSQFISDTCCSVLNCTDDMVWGDDLINSPYRPRKNPLFIMDLVLDSSGVHYSTPLEQFEASLLNLFDKGILATHAVPQLEKLVMEDIFISGDPLLESVGLHEPLVEELRATIASAVSKAMIPLQAYAKEYRKYLELNNNDIASFLKTYQTQGLLAQEVREVVLTHLREKEILDSSLPSSIIIGPFYINTDNVKQSLSKKRKALATSVLDILAKNLHKEVDSICEEFRSISRKIYEKPNSIEELAELREWMKGIPERLVGLEERIVKVMDDYQVMDEFLYNLSSDDFNDKWIASNWPSKILGQIELVQQQHVEDEEKFRKIQIMDQNNFQEKLEGLQLVVAGFSIHVEISRAHEIANEVRRVKKQLKDCQQLAMLYNNRERIFSLPITNYDKLSRMVKEFQPYLDLWTTASDWLRWSESWMNDPLSAIDAEQLEKNVVEAFKTMHKCVKQFKDMPACQEVALDIRARIEEFKPYIPLIQGLRNPGMRIRHWETLSNQININVRPKANLTFARCLEMNLQDHIESISKVAEVAGKEYAIEQALDKMEKEWSTILFNVLPYKATDTYILKSPDEASQLLDDHIVMTQNMSFSPYKKPFEQRINSWENKLKLTQEVLEEWLNCQRSWLYLEPIFSSEDINQQLPVESKRYQTMERIWKKIMKNAYENREVINVCSDLRMLDSLRDCNKILDLVQKGLSEYLETKRSAFPRFYFLSDDELLEILSQTKDPTAVQPHLRKCFENIARLLFQEDLEITHMYSAEGEEVQLCFSIYPSSNVEDWLREVERSMKASVHDIIEKAIRAYPTMPRTQWVLNWPGQVTIAGCQTYWTMEVAEALEAGNLRSQLFPQLCQQLSDLVALVRGKLSRMQRAVLSALIVIEVHAKDVVSKLIQENVVSVNDFQWISQLRYYWTNNDLYIRAVNAEFIYGYEYLGNSGRLVITPLTDRCYLTLTGALHLKFGGAPAGPAGTGKTETTKDLGKALAIQTVVFNCSDQLDFMAMGKFFKGLASAGAWACFDEFNRIDIEVLSVVAQQITTIQKAQQQRVERFMFEGVEIPLVPSCAVFITMNPGYAGRTELPDNLKALFRPVAMMVPDYAMITEISLYSFGFNEASVLAKKITTTFKLSSEQLSSQDHYDFGMRAVKTVISAAGNLKRENPSMNEELICLRAIRDVNVPKFLQEDLKLFSGIVSDLFPTIKEEDTDYGILDEAIREACRNSNLKDVEGFLTKCIQLYETTVVRHGLMLVGPTGSGKSTCYRVLAAAMTSLKGQPSISGGMYEAVNYYVLNPKSITMGQLYGEFDLLTHEWTDGIFSSFIRAGAITSDTNKKWYMFDGPVDAIWIENMNTVLDDNKKLCLSSGEIIKLTEAMTMMFEVQDLAVASPATVSRCGMVYLEPSILGLMPFIECWLRKLPPLLKPYEEHFKALFVSFLEESISFVRSSVKEVIASTNCNLTMSLLKLLDCFFKPFLPREGLKKIPSEKLSRIVELIEPWFIFSLIWSVGATGDSSGRTSFSHWLRLKMENEQLTLLFPEEGLVFDYRLEDAGISGTNDSEDEEEEYKQVAWVKWMDSSAPFTMVPDTNYCNIIVPTMDTVQMSHLLDMLLTNKKPVLCIGPTGTGKTLTISDKLLKNLALDYISHFLTFSARTSANQTQDFIDSKLDKRRKGVFGPPLGRNFIFFIDDLNMPALETYGAQPPIELLRQWMDHGGWYDRKIIGAFKNLVDINFVCAMGPPGGGRNTVTPRLMRHFNYLSFAEMDEVSKKRIFSTILGNWLDGLLGEKSYRERVPGAPHIAHFTEPLVEATIMVYATITSQLLPTPAKSHYTFNLRDLSKVFQGMLMADPAKVEDQVQLLRLWYHENCRVFRDRLVNEEDRSWFDQLLKRCMEQWEVTFNKVCPFQPILYGDFMSPGSDVKSYELITSESKMMQVIEEYIEDYNQINTAKLKLVLFMDAMSHICRISRTLRQALGNALLLGVGGSGRSSLTRLASHMAEYECFQIELSKNYGMSEWRDDVKKVLLKAGLQNLPITFLFSDTQIKNESFLEDINNVLNSGDIPNLYTADEQDQIVSTMRPYIQEQGLQPTKANLMAAYTGRVRSNIHMVLCMSPIGEVFRARLRQFPSLVNCCTIDWFNEWPAEALKSVATVFLNEIPELESSQEEIQGLIQVCVYIHQSVSKKCIEYLAELTRHNYVTPKSYLELLHIFSILIGQKKLELKTAKNRMKSGLDKLLRTSEDVAKMQEDLESMHPLLEEAAKDTMLTMEQIKVDTAIAEETRNSVQTEEIKANEKAKKAQAIADDAQKDLDEALPALDAALASLRNLNKNDVTEVRAMQRPPPGVKLVIEAVCIMKGIKPKKVPGEKPGTKVDDYWEPGKGLLQDPGHFLESLFKFDKDNIGDVVIKAIQPYIDNEEFQPATIAKVSKACTSICQWVRAMHKYHFVAKAVEPKRQALLEAQDDLGVTQRILDEAKQRLREVEDGIATMQAKYRECITKKEELELKCEQCEQRLGRAGKLINGLSDEKVRWQETVENLQYMLNNISGDVLVAAGFVAYLGPFTGQYRTVLYDSWVKQLRSHNVPHTSEPTLIGTLGNPVKIRSWQIAGLPNDTLSVENGVINQFSQRWTHFIDPQSQANKWIKNMEKDNGLDVFKLSDRDFLRSMENAIRFGKPCLLENVGEELDPALEPVLLKQTYKQQGNTVLKLGDTVIPYHEDFRMYITTKLPNPHYTPEISTKLTLINFTLSPSGLEDQLLGQVVAEERPDLEEAKNQLIISNAKMRQELKDIEDQILYRLSSSEGNPVDDMELIKVLEASKMKAAEIQAKVRIAEQTEKDIDLTRMEYIPVAIRTQILFFCVSDLANVDPMYQYSLEWFLNIFLSGIANSERADNLKKRISNINRYLTYSLYSNVCRSLFEKHKLMFAFLLCVRIMMNEGKINQSEWRYLLSGGSISIMTENPAPDWLSDRAWRDILALSNLPTFSSFSSDFVKHLSEFRVIFDSLEPHREPLPGIWDQYLDQFQKLLVLRCLRGDKVTNAMQDFVATNLEPRFIEPQTANLSVVFKDSNSTTPLIFVLSPGTDPAADLYKFAEEMKFSKKLSAISLGQGQGPRAEAMMRSSIERGKWVFFQNCHLAPSWMPALERLIEHINPDKVHRDFRLWLTSLPSNKFPVSILQNGSKMTIEPPRGVRANLLKSYSSLGEDFLNSCHKVMEFKSLLLSLCLFHGNALERRKFGPLGFNIPYEFTDGDLRICISQLKMFLDEYDDIPYKVLKYTAGEINYGGRVTDDWDRRCIMNILEDFYNPDVLSPEHSYSASGIYHQIPPTYDLHGYLSYIKSLPLNDMPEIFGLHDNANITFAQNETFALLGTIIQLQPKSSSAGSQGREEIVEDVTQNILLKVPEPINLQWVMAKYPVLYEESMNTVLVQEVIRYNRLLQVITQTLQDLLKALKGLVVMSSQLELMAASLYNNTVPELWSAKAYPSLKPLSSWVMDLLQRLDFLQAWIQDGIPAVFWISGFFFPQAFLTGTLQNFARKFVISIDTISFDFKVMFEAPSELTQRPQVGCYIHGLFLEGARWDPEAFQLAESQPKELYTEMAVIWLLPTPNRKAQDQDFYLCPIYKTLTRAGTLSTTGHSTNYVIAVEIPTHQPQRHWIKRGVALICALDY

SEQ ID NO: 26039 - protein, 193 aa, Homo sapiens
  Payload ID: 5149
  Gene Symbol: DNAH1
  Gene Name: dynein, axonemal, heavy chain 1
  ENSP ID: ENSP00000418688
  MOD_RES (1)..(1): Any amino acid
XSGDVLVAAGFVAYLGPFTIAGLPNDTLSVENGVINQFSQRWTHFIDPQSQANKWIKNMEKDNGLDVFKLSDRDFLRSMENAIRFGKPCLLENVGEELDPALEPVLLKQTYKQQGNTVLKLGDTVIPYHEDFRMYITTKLPNPHYTPEISTKLTLINFTLSPSGLEDQLLGQVVAEERPDLEEAKNQLIISNA

SEQ ID NO: 26040 - protein, 928 aa, Homo sapiens
  Payload ID: 5149
  Gene Symbol: DNAH1
  Gene Name: dynein, axonemal, heavy chain 1
  ENSP ID: ENSP00000419071
KKEELELKCEQCEQRLGRAGKLINGLSDEKVRWQETVENLQYMLNNISGDVLVAAGFVAYLGPFTGQYRTVLYDSWVKQLRSHNVPHTSEPTLIGTLGNPVKIRSWQIAGLPNDTLSVENGVINQFSQRWTHFIDPQSQANKWIKNMEKDNGLDVFKLSDRDFLRSMENAIRFGKPCLLENVGEELDPALEPVLLKQTYKQQGNTVLKLGDTVIPYHEDFRMYITTKLPNPHYTPEISTKLTLINFTLSPSGLEDQLLGQVVAEERPDLEEAKNQLIISNAKMRQELKDIEDQILYRLSSSEGNPVDDMELIKVLEASKMKAAEIQAKVRIAEQTEKDIDLTRMEYIPVAIRTQILFFCVSDLANVDPMYQYSLEWFLNIFLSGIANSERADNLKKRISNINRYLTYSLYSNVCRSLFEKHKLMFAFLLCVRIMMNEGKINQSEWRYLLSGGSISIMTENPAPDWLSDRAWRDILALSNLPTFSSFSSDFVKHLSEFRVIFDSLEPHREPLPGIWDQYLDQFQKLLVLRCLRGDKVTNAMQDFVATNLEPRFIEPQTANLSVVFKDSNSTTPLIFVLSPGTDPAADLYKFAEEMKFSKKLSAISLGQGQGPRAEAMMRSSIERGKWVFFQNCHLAPSWMPALERLIEHINPDKVHRDFRLWLTSLPSNKFPVSILQNGSKMTIEPPRGVRANLLKSYSSLGEDFLNSCHKVMEFKSLLLSLCLFHGNALERRKFGPLGFNIPYEFTDGDLRICISQLKMFLDEYDDIPYKVLKYTAGEINYGGRVTDDWDRRCIMNILEDFYNPDVLSPEHSYSASGIYHQIPPTYDLHGYLSYIKSLPLNDMPEIFGLHDNANITFAQNETFALLGTIIQLQPKSSSAGSQGREEVQSAAAGDHTDTARPTQGTQGAGSDVLSAGADGCQPVQQYCA

SEQ ID NO: 26041 - protein, 4471 aa, Homo sapiens
  Payload ID: 5150
  Gene Symbol: DNAH10
  Gene Name: dynein, axonemal, heavy chain 10
  Uniprot ID: Q8IVF4
  ENSP ID: ENSP00000386770
MVPEEVEVEIDEIPVLSEEGEEEEETYSQKVESVDKVRAKRVSLRTESLGQPLNREDEEMDKEISEKLPSKRTAKHIMEKMHLHMLCTPLPEEFLDQNVVFFLRNTKEAISEATDMKEAMEIMPETLEYGIINANVLHFLKNIICQVFLPALSFNQHRTSTTVGVTSGEVSNSSEHESDLPPMPGEAVEYHSIQLIRDEFLMNVQKFASNIQRTMQQLEGEIKLEMPIISVEGEVSDLAADPETVDILEQCVINWLNQISTAVEAQLKKTPQGKGPLAEIEFWRERNATLSALHEQTKLPIVRKVLDVIKESDSMLVANLQPVFTELFKFHTEASDNVRFLSTVERYFKNITHGSGFHVVLDTIPAMMSALRMVWIISRHYNKDERMIPLMERIAWEIAERVCRVVNLRTLFKENRASAQSKTLEARNTLRLWKKAYFDTRAKIEASGREDRWEFDRKRLFERTDYMATICQDLSDVLQILEEFYNIFGPELKAVTGDPKRIDDVLCRVDGLVTPMENLTFDPFSIKSSQFWKYVMDEFKIEVLIDIINKIFVQNLENPPLYKNHPPVAGAIYWERSLFFRIKHTILRFQEVQEILDSDRGQEVKQKYLEVGRTMKEYEDRKYEQWMEVTEQVLPALMKKSLLTKSSIATEEPSTLERGAVFAINFSPALREIINETKYLEQLGFTVPELARNVALQEDKFLRYTAGIQRMLDHYHMLIGTLNDAESVLLKDHSQELLRVFRSGYKRLNWNSLGIGDYITGCKQAIGKFESLVHQIHKNADDISSRLTLIEAINLFKYPAAKSEEELPGVKEFFEHIERERASDVDHMVRWYLAIGPLLTKVEGLVVHTNTGKAPKLASYYKYWEKKIYEVLTKLILKNLQSFNSLILGNVPLFHTETILTAPEIILHPNTNEIDKMCFHCVRNCVEITKHFVRWMNGSCIECPPQKGEEEEVVIINFYNDISLNPQIIEQAVMIPQNVHRILINLMKYLQKWKRYRPLWKLDKAIVMEKFAAKKPPCVAYDEKLQFYSKIAYEVMRHPLIKDEHCIRLQLRHLANTVQENAKSWVISLGKLLNESAKEELYNLHEEMEHLAKNLRKIPNTLEDLKFVLATIAEIRSKSLVMELRYRDVQERYRTMAMYNLFPPDAEKELVDKIESIWSNLFNDSVNVEHALGDIKRTFTELTRGEIMNYRVQIEEFAKRFYSEGPGSVGDDLDKGVELLGVYERELARHEKSRQELANAEKLFDLPITMYPELLKVQKEMSGLRMIYELYEGLKVAKEEWSQTLWINLNVQILQEGIEGFLRALRKLPRPVRGLSVTYYLEAKMKAFKDSIPLLLDLKNEALRDRHWKELMEKTSVFFEMTETFTLENMFAMELHKHTDVLNEIVTAAIKEVAIEKAVKEILDTWENMKFTVVKYCKGTQERGYILGSVDEIIQSLDDNTFNLQSISGSRFVGPFLQTVHKWEKTLSLIGEVIEIWMLVQRKWMYLESIFIGGDIRSQLPEEAKKFDNIDKVFKRIMGETLKDPVIKRCCEAPNRLSDLQNVSEGLEKCQKSLNDYLDSKRNAFPRFFFISDDELLSILGSSDPLCVQEHMIKMYDNIASLRFNDGDSGEKLVSAMISAEGEVMEFRKILRAEGRVEDWMTAVLNEMRRTNRLITKEAIFRYCEDRSRVDWMLLYQGMVVLAASQVWWTWEVEDVFHKAQKGEKQAMKNYGRKMHRQIDELVTRITMPLSKNDRKKYNTVLIIDVHARDIVDSFIRGSILEAREFDWESQLRFYWDREPDELNIRQCTGTFGYGYEYMGLNGRLVITPLTDRIYLTLTQALSMYLGGAPAGPAGTGKTETTKDLAKALGLLCVVTNCGEGMDYRAVGKIFSGLAQCGAWGCFDEFNRIDASVLSVISSQIQTIRNALIHQLTTFQFEGQEISLDSRMGIFITMNPGYAGRTELPESVKALFRPVVVIVPDLQQICEIMLFSEGFLEAKTLAKKMTVLYKLAREQLSKQYHYDFGLRALKSVLVMAGELKRGSSDLREDVVLMRALRDMNLPKFVFEDVPLFLGLISDLFPGLDCPRVRYPDFNDAVEQVLEENGYAVLPIQVDKVVQMFETMLTRHTTMVVGPTRGGKSVVINTLCQAQTKLGLTTKLYILNPKAVSVIELYGILDPTTRDWTDGVLSNIFREINKPTDKKERKYILFDGDVDALWVENMNSVMDDNRLLTLANGERIRLQAHCALLFEVGDLQYASPATVSRCGMVYVDPKNLKYRPYWKKWVNQIPNKVEQYNLNSLFEKYVPYLMDVIVEGIVDGRQAEKLKTIVPQTDLNMVTQLAKMLDALLEGEIEDLDLLECYFLEALYCSLGASLLEDGRMKFDEYIKRLASLSTVDTEGVWANPGELPGQLPTLYDFHFDNKRNQWVPWSKLVPEYIHAPERKFINILVHTVDTTRTTWILEQMVKIKQPVIFVGESGTSKTATTQNFLKNLSEETNIVLMVNFSSRTTSMDIQRNLEANVEKRTKDTYGPPMGKRLLVFMDDMNMPRVDEYGTQQPIALLKLLLEKGYLYDRGKELNCKSIRDLGFIAAMGKAGGGRNEVDPRFISLFSVFNVPFPSEESLHLIYSSILKGHTSTFHESIVAVSGKLTFCTLALYKNIVQDLPPTPSKFHYIFNLRDLSRVFNGLVLTNPERFQTVAQMVRVWRNECLRVFHDRLISETDKQLVQQHIGSLVVEHFKDDVEVVMRDPILFGDFQMALHEGEPRIYEDIQDYEAAKALFQEILEEYNESNTKMNLVLFDDALEHLTRVHRIIRMDRGHALLVGVGGSGKQSLSRLAAFTASCEVFEILLSRGYSENSFREDLKSLYLKLGIENKAMIFLFTDAHVAEEGFLELINNMLTSGIVPALFSEEEKESILSQIGQEALKQGMGPAKESVWQYFVNKSANNLHIVLGMSPVGDTLRTWCRNFPGMVNNTGIDWFMPWPPQALHAVAKSFLGYNPMIPAENIENVVKHVVLVHQSVDHYSQQFLQKLRRSNYVTPKNYLDFINTYSKLLDEKTQCNIAQCKRLDGGLDKLKEATIQLDELNQKLAEQKIVLAEKSAACEALLEEIAVNTAVAEEKKKLAEEKAMEIEEQNKVIAMEKAEAETTLAEVMPILEAAKLELQKLDKSDVTEIRSFAKPPKQVQTVCECILIMKGYKELNWKTAKGVMSDPNFLRSLMEIDFDSITQSQVKNIKGLLKTLNTTTEEMEAVSKAGLGMLKFVEAVMGYCDVFREIKPKREKVARLERNFYLTKRELERIQNELAAIQKELETLGAKYEAAILEKQKLQEEAEIMERRLIAADKLISGLGSENIRWLNDLDELMHRRVKLLGDCLLCAAFLSYEGAFTWEFRDEMVNRIWQNDILEREIPLSQPFRLESLLTDDVEISRWGSQGLPPDELSVQNGILTTRASRFPLCIDPQQQALNWIKRKEEKNNLRVASFNDPDFLKQLEMSIKYGTPFLFRDVDEYIDPVIDNVLEKNIKVSQGRQFIILGDKEVDYDSNFRLYLNTKLANPRYSPSVFGKAMVINYTVTLKGLEDQLLSVLVAYERRELEEQREHLIQETSENKNLLKDLEDSLLRELATSTGNMLDNVDLVHTLEETKSKATEVSEKLKLAEKTALDIDRLRDGYRPAARRGAILFFVLSEMALVNSMYQYSLIAFLEVFRLSLKKSLPDSILMKRLRNIMDTLTFSIYNHGCTGLFERHKLLFSFNMTIKIEQAEGRVPQEELDFFLKGNISLEKSKRKKPCAWLSDQGWEDIILLSEMFSDNFGQLPDDVENNQTVWQEWYDLDSLEQFPVPLGYDNNITPFQKLLILRCFRVDRVYRAVTDYVTVTMGEKYVQPPMISFEAIFEQSTPHSPIVFILSPGSDPATDLMKLAERSGFGGNRLKFLAMGQGQEKVALQLLETAVARGQWLMLQNCHLLVKWLKDLEKSLERITKPHPDFRLWLTTDPTKGFPIGILQKSLKVVTEPPNGLKLNMRATYFKISHEMLDQCPHPAFKPLVYVLAFFHAVVQERRKFGKIGWNVYYDFNESDFQVCMEILNTYLTKAFQQRDPRIPWGSLKYLIGEVMYGGRAIDSFDRRILTIYMDEYLGDFIFDTFQPFHFFRNKEVDYKIPVGDEKEKFVEAIEALPLANTPEVFGLHPNAEIGYYTQAARDMWAHLLELQPQTGESSSGISRDDYIGQVAKEIENKMPKVFDLDQVRKRLGTGLSPTSVVLLQELERFNKLVVRMTKSLAELQRALAGEVGMSNELDDVARSLFIGHIPNIWRRLAPDTLKSLGNWMVYFLRRFSQYMLWVTESEPSVMWLSGLHIPESYLTALVQATCRKNGWPLDRSTLFTQVTKFQDADEVNERAGQGCFVSGLYLEGADWDIEKGCLIKSKPKVLVVDLPILKIIPIEAHRLKLQNTFRTPVYTTSMRRNAMGVGLVFEADLFTTRHISHWVLQGVCLTLNSD

SEQ ID NO: 26042 - protein, 648 aa, Homo sapiens
  Payload ID: 5150
  Gene Symbol: DNAH10
  Gene Name: dynein, axonemal, heavy chain 10
  ENSP ID: ENSP00000444761
LESIFIGGDIRSQLPEEAKKFDNIDKVFKRIMGETLKDPVIKRCCEAPNRLSDLQNVSEGLEKCQKSLNDYLDSKRNAFPRFFFISDDELLSILGSSDPLCVQEHMIKMYDNIASLRFNDGDSGEKLVSAMISAEGEVMEFRKILRAEGRVEDWMTAVLNEMRRTNRLITKEAIFRYCEDRSRVDWMLLYQGMVVLAASQVWWTWEVEDVFHKAQKGEKQAMKNYGRKMHRQIDELVTRITMPLSKNDRKKYNTVLIIDVHARDIVDSFIRGSILEAREFDWESQLRFYWDREPDELNIRQCTGTFGYGYEYMGLNGRLVITPLTDRIYLTLTQALSMYLGGAPAGPAGTGKTETTKDLAKALGLLCVVTNCGEGMDYRAVGKIFSGLAQCGAWGCFDEFNRIDASVLSVISSQIQTIRNALIHQLTTFQFEGQEISLDSRMGIFITMNPGYAGRTELPESVKALFRPVVVIVPDLQQICEIMLFSEGFLEAKTLAKKMTVLYKLAREQLSKQYHYDFGLRALKSVLVMAGELKRGSSDLREDVVLMRALRDMNLPKFVFEDVPLFLGLISDLFPGLDCPRVRYPDFNDAVEQVLEENGYAVLPIQVDKVVQMFETMLTRHTTMVVGPTRGGKSVVINTLCQAQTNLS

SEQ ID NO: 26043 - protein, 319 aa, Homo sapiens
  Payload ID: 5150
  Gene Symbol: DNAH10
  Gene Name: dynein, axonemal, heavy chain 10
  ENSP ID: ENSP00000445308
MPGPLPGRPHTASMPSGTSVSCSSLLLFLPLLLCLVCAVLFHFCLSMAWSGRLLWLSLTLPGSGMPRSFAKPPKQVQTVCECILIMKGYKELNWKTAKGVMSDPNFLRSLMEIDFDSITQSQVKNIKGLLKTLNTTTEEMEAVSKAGLGMLKFVEAVMGYCDVFREIKPKREKVARLERNFYLTKRELERIQNELAAIQKELETLGAKYEAAILEKQKLQEEAEIMERRLIAADKLISGLGSENIRWLNDLDELMHRRVKLLGDCLLCAAFLSYEGAFTWEFRDEMVNRIWQNDILEREIPLSQPFRLESLLTDDVEIS

SEQ ID NO: 26044 - protein, 970 aa, Homo sapiens
  Payload ID: 5150
  Gene Symbol: DNAH10
  Gene Name: dynein, axonemal, heavy chain 10
  ENSP ID: ENSP00000479072
MPGEAVEYHSIQLIRDEFLMNVQKFASNIQRTMQQLEGEIKLEMPIISVEGEVSDLAADPETVDILEQCVINWLNQISTAVEAQLKKTPQGKGPLAEIEFWRERNATLSALHEQTKLPIVRKVLDVIKESDSMLVANLQPVFTELFKFHTEASDNVRFLSTVERYFKNITHGSGFHVVLDTIPAMMSALRMVWIISRHYNKDERMIPLMERIAWEIAERVCRVVNLRTLFKENRASAQSKTLEARNTLRLWKKAYFDTRAKIEASGREDRWEFDRKRLFERTDYMATICQDLSDVLQILEEFYNIFGPELKAVTGDPKRIDDVLCRVDGLVTPMENLTFDPFSIKSSQFWKYVMDEFKIEVLVIEKEAKHFIDESFKTLRSAEAAFDMLLKFKHIRSREAVNRQMMMKFNDILAQYCKEIDIINKIFVQNLENPPLYKNHPPVAGAIYWERSLFFRIKHTILRFQEVQEILDSDRGQEVKQKYLEVGRTMKEYEDRKYEQWMEVTEQVLPALMKKSLLTKSSIATEEPSTLERGAVFAINFSPALREIINETKYLEQLGFTVPELARNVALQEDKFLRYTAGIQRMLDHYHMLIGTLNDAESVLLKDHSQELLRVFRSGYKRLNWNSLGIGDYITGCKQAIGKFESLVHQIHKNADDISSRLTLIEAINLFKYPAAKSEEELPGVKEFFEHIERERASDVDHMVRWYLAIGPLLTKVEGLVVHTNTGKAPKLASYYKYWEKKIYEVLTKLILKNLQSFNSLILGNVPLFHTETILTAPEIILHPNTNEIDKMCFHCVRNCVEITKHFVRWMNGSCIECPPQKGEEEEVVIINFYNDISLNPQIIEQAVMIPQNVHRILINLMKYLQKWKRYRPLWKLDKAIVMEKFAAKKPPCVAYDEKLQFYSKIAYEVMRHPLIKDEHCIRLQLRHLANTVQENAKSWVISLGKLLNESAKEELYNLHEEMEVLNRCV

SEQ ID NO: 26045 - protein, 81 aa, Homo sapiens
  Payload ID: 5150
  Gene Symbol: DNAH10
  Gene Name: dynein, axonemal, heavy chain 10
  ENSP ID: ENSP00000485079
ERFNKLVVRMTKSLAELQRALAGEVGMSNELDDVARSLFIGHIPNIWRRLAPDTLKSLGNWMVYFLRRFSQYMLWLLLDGS

SEQ ID NO: 26046 - protein, 319 aa, Homo sapiens; identical to SEQ ID NO: 26043
  Payload ID: 5150
  Gene Symbol: DNAH10
  Gene Name: dynein, axonemal, heavy chain 10
  ENSP ID: ENSP00000487927

SEQ ID NO: 26047 - protein, 84 aa, Homo sapiens
  Payload ID: 5150
  Gene Symbol: DNAH10
  Gene Name: dynein, axonemal, heavy chain 10
  ENSP ID: ENSP00000487958
ERFNKLVVRMTKSLAELQRALAGEVGMSNELDDVARSLFIGHIPNIWRRLAPDTLKSLGNWMVYFLRRFSQYMLWLLLDGSWKG

SEQ ID NO: 26048 - protein, 3196 aa, Homo sapiens
  Payload ID: 5150
  Gene Symbol: DNAH10
  Gene Name: dynein, axonemal, heavy chain 10
  ENSP ID: ENSP00000488646
VAKEEWSQTLWINLNVQILQEGIEGFLRALRKLPRPVRGLSVTYYLEAKMKAFKDSIPLLLDLKNEALRDRHWKELMEKTSVFFEMTETFTLENMFAMELHKHTDVLNEIVTAAIKEVAIEKAVKEILDTWENMKFTVVKYCKGTQERGYILGSVDEIIQSLDDNTFNLQSISGSRFVGPFLQTVHKWEKTLSLIGEVIEIWMLVQRKWMYLESIFIGGDIRSQLPEEAKKFDNIDKVFKRIMGETLKDPVIKRCCEAPNRLSDLQNVSEGLEKCQKSLNDYLDSKRNAFPRFFFISDDELLSILGSSDPLCVQEHMIKMYDNIASLRFNDGDSGEKLVSAMISAEGEVMEFRKILRAEGRVEDWMTAVLNEMRRTNRLITKEAIFRYCEDRSRVDWMLLYQGMVVLAASQVWWTWEVEDVFHKAQKGEKQAMKNYGRKMHRQIDELVTRITMPLSKNDRKKYNTVLIIDVHARDIVDSFIRGSILEAREFDWESQLRFYWDREPDELNIRQCTGTFGYGYEYMGLNGRLVITPLTDRIYLTLTQALSMYLGGAPAGPAGTGKTETTKDLAKALGLLCVVTNCGEGMDYRAVGKIFSGLAQCGAWGCFDEFNRIDASVLSVISSQIQTIRNALIHQLTTFQFEGQEISLDSRMGIFITMNPGYAGRTELPESVKALFRPVVVIVPDLQQICEIMLFSEGFLEAKTLAKKMTVLYKLAREQLSKQYHYDFGLRALKSVLVMAGELKRGSSDLREDVVLMRALRDMNLPKFVFEDVPLFLGLISDLFPGLDCPRVRYPDFNDAVEQVLEENGYAVLPIQVDKVVQMFETMLTRHTTMVVGPTRGGKSVVINTLCQAQTKLGLTTKLYILNPKAVSVIELYGILDPTTRDWTDGVLSNIFREINKPTDKKERKYILFDGDVDALWVENMNSVMDDNRLLTLANGERIRLQAHCALLFEVGDLQYASPATVSRCGMVYVDPKNLKYRPYWKKWVNQIPNKVEQYNLNSLFEKYVPYLMDVIVEGIVDGRQAEKLKTIVPQTDLNMVTQLAKMLDALLEGEIEDLDLLECYFLEALYCSLGASLLEDGRMKFDEYIKRLASLSTVDTEGVWANPGELPGQLPTLYDFHFDNKRNQWVPWSKLVPEYIHAPERKFINILVHTVDTTRTTWILEQMVKIKQPVIFVGESGTSKTATTQNFLKNLSEETNIVLMVNFSSRTTSMDIQRNLEANVEKRTKDTYGPPMGKRLLVFMDDMNMPRVDEYGTQQPIALLKLLLEKGYLYDRGKELNCKSIRDLGFIAAMGKAGGGRNEVDPRFISLFSVFNVPFPSEESLHLIYSSILKGHTSTFHESIVAVSGKLTFCTLALYKNIVQDLPPTPSKFHYIFNLRDLSRVFNGLVLTNPERFQTVAQMVRVWRNECLRVFHDRLISETDKQLVQQHIGSLVVEHFKDDVEVVMRDPILFGDFQMALHEGEPRIYEDIQDYEAAKALFQEILEEYNESNTKMNLVLFDDALEHLTRVHRIIRMDRGHALLVGVGGSGKQSLSRLAAFTASCEVFEILLSRGYSENSFREDLKSLYLKLGIENKAMIFLFTDAHVAEEGFLELINNMLTSGIVPALFSEEEKESILSQIGQEALKQGMGPAKESVWQYFVNKSANNLHIVLGMSPVGDTLRTWCRNFPGMVNNTGIDWFMPWPPQALHAVAKSFLGYNPMIPAENIENVVKHVVLVHQSVDHYSQQFLQKLRRSNYVTPKNYLDFINTYSKLLDEKTQCNIAQCKRLDGGLDKLKEATIQLDELNQKLAEQKIVLAEKSAACEALLEEIAVNTAVAEEKKKLAEEKAMEIEEQNKVIAMEKAEAETTLAEVMPILEAAKLELQKLDKSDVTEIRSFAKPPKQVQTVCECILIMKGYKELNWKTAKGVMSDPNFLRSLMEIDFDSITQSQVKNIKGLLKTLNTTTEEMEAVSKAGLGMLKFVEAVMGYCDVFREIKPKREKVARLERNFYLTKRELERIQNELAAIQKELETLGAKYEAAILEKQKLQEEAEIMERRLIAADKLISGLGSENIRWLNDLDELMHRRVKLLGDCLLCAAFLSYEGAFTWEFRDEMVNRIWQNDILEREIPLSQPFRLESLLTDDVEISRWGSQGLPPDELSVQNGILTTRASRFPLCIDPQQQALNWIKRKEEKNNLRVASFNDPDFLKQLEMSIKYGTPFLFRDVDEYIDPVIDNVLEKNIKVSQGRQFIILGDKEVDYDSNFRLYLNTKLANPRYSPSVFGKAMVINYTVTLKGLEDQLLSVLVAYERRELEEQREHLIQETSENKNLLKDLEDSLLRELATSTGNMLDNVDLVHTLEETKSKATEVSEKLKLAEKTALDIDRLRDGYRPAARRGAILFFVLSEMALVNSMYQYSLIAFLEVFRLSLKKSLPDSILMKRLRNIMDTLTFSIYNHGCTGLFERHKLLFSFNMTIKIEQAEGRVPQEELDFFLKGNISLEKSKRKKPCAWLSDQGWEDIILLSEMFSDNFGQLPDDVENNQTVWQEWYDLDSLEQFPVPLGYDNNITPFQKLLILRCFRVDRVYRAVTDYVTVTMGEKYVQPPMISFEAIFEQSTPHSPIVFILSPGSDPATDLMKLAERSGFGGNRLKFLAMGQGQEKVALQLLETAVARGQWLMLQNCHLLVKWLKDLEKSLERITKPHPDFRLWLTTDPTKGFPIGILQKSLKVVTEPPNGLKLNMRATYFKISHEMLDQCPHPAFKPLVYVLAFFHAVVQERRKFGKIGWNVYYDFNESDFQVCMEILNTYLTKAFQQRDPRIPWGSLKYLIGEVMYGGRAIDSFDRRILTIYMDEYLGDFIFDTFQPFHFFRNKEVDYKIPVGDEKEKFVEAIEALPLANTPEVFGLHPNAEIGYYTQAARDMWAHLLELQPQTGESSSGISRDDYIGQVAKEIENKMPKVFDLDQVRKRLGTGLSPTSVVLLQELERFNKLVVRMTKSLAELQRALAGEVGMSNELDDVARSLFIGHIPNIWRRLAPDTLKSLGNWMVYFLRRFSQYMLWVTESEPSVMWLSGLHIPESYLTALVQATCRKNGWPLDRSTLFTQVTKFQDADEVNERAGQGCFVSGLYLEGADWDIEKGCLIKSKPKVLVVDLPILKIIPIEAHRLKLQNTFRTPVYTTSMRRNAMGVGLVFEADLFTTRHISHWVLQGVCLTLNSD

SEQ ID NO: 26049 - protein, 648 aa, Homo sapiens; identical to SEQ ID NO: 26042
  Payload ID: 5150
  Gene Symbol: DNAH10
  Gene Name: dynein, axonemal, heavy chain 10
  ENSP ID: ENSP00000488833

SEQ ID NO: 26050 - protein, 163 aa, Homo sapiens
  Payload ID: 5151
  Gene Symbol: DNAH10OS
  Gene Name: dynein, axonemal, heavy chain 10 opposite strand
  Uniprot ID: P0CZ25
  ENSP ID: ENSP00000422769
MHSLPRSGSIRRTHSDTQATGWPPPQRIGDSPGPSPAFLSCPPSLCGGAAQTGDPVALPHGPEKWVWGGGLSPRNPHSWGIKAHGLRPPWAPRLERCMVPESEWAPWQPQLPCEPKWLGSRKSKPHRESGLRGGGPSRCAKRGTHSCGPRESGGPDTCHLPCH

SEQ ID NO: 26051 - protein, 4523 aa, Homo sapiens
  Payload ID: 5152
  Gene Symbol: DNAH11
  Gene Name: dynein, axonemal, heavy chain 11
  ENSP ID: ENSP00000330671
MAAQVAAREARDFREAPTLRLTSGAGLEAVGAVELEEEEENEEEAAARRARSFAQDARVRFLGGRLAMMLGFTEEKWSQYLESEDNRQVLGEFLESTSPACLVFSFAASGRLAASQEIPRDANHKLVFISKKITESIGVNDFSQVVLFGELPALSLGHVSAFLDEILVPVLSNKNNHKSWSCFTSQDMEYHIEVMKKKMYIFRGKMSRRTLLPIPTVAGKMDLDQNCSENKPPSNERIILHAIESVVIEWSHQIQEIIERDSVQRLLNGLHLSPQAELDFWMMRRENLSCIYDQLQAPVVLKMVKILTTKQSSYFPTLKDIFLAVENALLEAQDVELYLRPLRRHIQCLQETEFPQTRILIAPLFHTICLIWSHSKFYNTPARVIVLLQEFCNLFINQATAYLSPEDLLRGEIEESLEKVQVAVNILKTFKNSFFNYRKKLASYFMGRKLRPWDFQSHLVFCRFDKFLDRLIKIEDIFATTLEFEKLERLEFGGTKGAILNGQVHEMSEELMELCKLFKQSTYDPSDCTNMEFESDYVAFKSKTLEFDRRLGTIICEAFFNCNGLEAAFKLLTIFGNFLEKPVVMEIFSLHYSTLVHMFNTELDVCKQLYNEHMKQIECGHVVLNKNMPFTSGNMKWAQQVLQRLQMFWSNFASLRYLFLGNPDHALVYQKYVEMTTLLDQFESRIYNEWKSNVDEICEFNLNQPLVKFSAINGLLCVNFDPKLVAVLREVKYLLMLKKQDIPDSALAIFKKRNTILKYIGNLDLLVQGYNKLKQTLLEVEYPLIEDELRAIDEQLTAATTWLTWQDDCWGYIERVRAATSELEHRVERTQKNVKVIQQTMRGWARCVLPPRREHRREAAFTLEDKGDLFTKKYKLIQGDGCKIHNLVEENRKLFKANPSLDTWKIYVEFIDDIVVEGFFQAIMHDLDFFLKNTEKQLKPAPFFQAQMILLPPEIVFKPSLDREAGDGFYDLVEEMLCNSFRMSAQMNRIATHLEIKNYQNDMDNMLGLAEVRQEIMNRVVNVINKVLDFRNTLETHTYLWVDDRAEFMKHFLLYGHAVSSDEMDAHANEEIPEQPPTLEQFKEQIDIYEALYVQMSKFEDFRVFDSWFKVDMKPFKVSLLTIIKKWSWMFQEHLLRFVIDSLNELQEFIKETDSGLQRELNEGDHDGLVDIMVHLLAVRSRQRATDELFEPLKETITLLESYGQKMPEQVYIQLEELPERWETTKKIAATVRHEVSPLHNAEVTLIRKKCILFDAKQAEFRERFRHYAPLGFNAENPYTALDKANEELEALEEEMLQMQESTRLFEVALPEYKQMKQCRKEIKLLKGLWDVIIYVRRSIDNWTKTQWRQIHVEQMDVELRRFAKASSITEIWSLNKEVRVWDAYTGLEGTVKDMTASLRAITELQSPALRDRHWHQLMKAIGVKFLINEATTLADLLALRLHRVEDDVRRIVDKAVKELGTEKVITEISQTWATMKFSYEVHYRTGIPLLKSDEQLFETLEHNQVQLQTLLQSKYVEYFIEQVLSWQNKLNIADLVIFTWMEVQRTWSHLESIFVCSEDIRIQLVKDARRFDGVDAEFKELMFKTAKVENVLEATCRPNLYEKLKDLQSRLSLCEKALAEYLETKRIAFPRFYFVSSADLLDILSKGAQPKQVTCHLAKLFDSIADLQFEDNQDVSAHRAVGMYSKEKEYVPFQAECECVGHVETWLLQLEQTMQETVRHSITEAIVAYEEKPRELWIFDFPAQVALTSSQIWWTTDVGIAFSRLEEGYETALKDFHKKQISQLNTLITLLLGELPPGDRQKIMTICTIDVHARDVVAKLISQKKVVVSPQAFTWLSQLRHRWEDTQKHCFVNICDAQFQYFYEYLGNSPRLVITPLTDRCYITLTQSLHLTMSGAPAGPAGTGKTETTKDLGRALGMMVYVFNCSEQMDYKSIGNIYKGLVQTGAWGCFDEFNRISVEVLSVVAVQVKMIHDAIRNRKKRFVFLGEAITLKPSVGIFITMNPGYAGRTELPENLKALFRPCAMVAPDIELICEILLVAEGFVDARALARKFITLYTLCKELLSKQDHYDWGLRAIKSVLVVAGSLKRGDKNRPEDQVLMRALRDFNMPKIVTDDIPVFLGLVGDLFPALDVPRRRKLHFEQMVRQSTLELRLQPEESFILKVVQLEELLAVRHSVFVVGNAGTGKSKILRTLNRTYVNMKQKPVWNDLNPKAVTTDELFGFIHHATREWKDGKIVYSYFIGLFSSILREQANLKHDGPKWIVLDGDIDPMWIESLNTVMDDNKVLTLASNERIALTPFMRLLFEIHHLRSATPATVSRAGILYVNPQDLGWNPYVASWIDRRRHQSEKANLTILFDKYVPACLDKLRTSFKTITSIPESSLVQTLCVLLECLLTPENVPSDSPKEVYEVYFVFACIWAFGGTLLQDQISDYQADFSRWWQKEMKAVKFPSQGTIFDYYVDHKTKKLLPWADKIAQFTMDPDVPLQTVLVHTTETARLRYFMELLLEKGKPLMLVGNAGVGKTVFVGDTLASLSEDYIVSRVPFNYYTTSTALQKILEKPLEKKAGHNYGPGGNKKLIYFIDDMNMPEVDLYGTVQPHTLIRQHIDYGHWYDRQKVMLKEIHNCQYVACMNPMVGSFTINPRLQRHFTVFAFNFPSLDALNTIYGQIFSFHFQQQAFAPSILRSGPTLIQATIAFHQTMMCNFLPTAIKFHYIFNLRDLSNVFQGILFASPECLKGPLDLIHLWLHESARVYGDKLIDKKDCDLFQRRMLETAYKYFEGIDSHMLLQQPLIYCHFADRGKDPHYMPVKDWEVLKTILTETLDNYNELNAAMHLVLFEDAMQHVCRISRILRTPQGCALLVGVGGSGKQSLSRLAAYLRGLEVFQITLTEGYGIQELRVDLANLYIRTGAKNMPTVFLLTDAQVLDESFLVLINDLLASGEIPDLFSDEDVDKIISGIHNEVHALGMVDSRENCWKFFMARVRLQLKIILCFSPVGRTLRVRARKFPAIVNCTAIDWFHAWPQEALVSVSRRFIEETKGIEPVHKDSISLFMAHVHTTVNEMSTRYYQNERRHNYTTPKSFLEQISLFKNLLKKKQNEVSEKKERLVNGIQKLKTTASQVGDLKARLASQEAELQLRNHDAEALITKIGLQTEKVSREKTIADAEERKVTAIQTEVFQKQRECEADLLKAEPALVAATAALNTLNRVNLSELKAFPNPPIAVTNVTAAVMVLLAPRGRVPKDRSWKAAKVFMGKVDDFLQALINYDKEHIPENCLKVVNEHYLKDPEFNPNLIRTKSFAAAGLCAWVINIIKFYEVYCDVEPKRQALAQANLELAAATEKLEAIRKKLVDLDRNLSRLTASFEKATAEKVRCQEEVNQTNKTIKLANRLVKELEAKKIRWGQSIKSFEAQEKTLCGDVLLTAAFVSYVGPFTRQYRQELVHCKWVPFLQQKVSIPLTEGLDLISMLTDDATIAAWNNEGLPSDRMSTENAAILTHCERWPLVIDPQQQGIKWIKNKYGMDLKVTHLGQKGFLNAIETALAFGDVILIENLEETIDPVLDPLLGRNTIKKGKYIRIGDKECEFNKNFRLILHTKLANPHYKPELQAQTTLLNFTVTEDGLEAQLLAEVVSIERPDLEKLKLVLTKHQNDFKIELKYLEDDLLLRLSAAEGSFLDDTKLVERLEATKTTVAEIEHKVIEAKENERKINEARECYRPVAARASLLYFVINDLQKINPLYQFSLKAFNVLFHRAIEQADKVEDMQGRISILMESITHAVFLYTSQALFEKDKLTFLSQMAFQILLRKKEIDPLELDFLLRFTVEHTHLSPVDFLTSQSWSAIKAIAVMEEFRGIDRDVEGSAKQWRKWVESECPEKEKLPQEWKKKSLIQKLILLRAMRPDRMTYALRNFVEEKLGAKYVERTRLDLVKAFEESSPATPIFFILSPGVDALKDLEILGKRLGFTIDSGKFHNVSLGQGQETVAEVALEKASKGGHWVILQNVHLVAKWLGTLEKLLERFSQGSHRDYRVFMSAESAPTPDEHIIPQGLLENSIKITNEPPTGMLANLHAALYNFDQDTLEICSKEQEFKSILFSLCYFHACVAGRLRFGPQGWSRSYPFNPGDLTICASVLYNYLEANSKVPWEDLRYLFGEIMYGGHITDDWDRKLCRVYLEEFMNPSLTEDELMLAPGFAAPPYLDYAGYHQYIEEMLPPESPALYGLHPNAEIEFLTVTSNTLFRTLLEMQPRNALSGDELGQSTEEKVKNVLDDILEKLPEEFNMAEIMQKNSNRSPYVLVCFQECERMNILIREIRISLEQLDLSLKGELALSPAVEAQQFALSYDTVPDTWSKLAYPSTYGLAQWFNDLLLRCRELDTWTQDLTLPAVVWLSGFFNPQSFLTAIMQTMARKNEWPLDKTRLTADVTKKTKEDYGHPPREGAYLHGLFMEGARWDTQAGTIVEARLKELACPMPVIFAKATPVDRQETKQTYECPVYRTKLRGPSYIWTFRLKSEEKTAKWVLAGVALLLEA

SEQ ID NO: 26052 - protein, 4516 aa, Homo sapiens
  Payload ID: 5152
  Gene Symbol: DNAH11
  Gene Name: dynein, axonemal, heavy chain 11
  Uniprot ID: Q96DT5
  ENSP ID: ENSP00000475939
MAAQVAAREARDFREAPTLRLTSGAGLEAVGAVELEEEEENEEEAAARRARSFAQDARVRFLGGRLAMMLGFTEEKWSQYLESEDNRQVLGEFLESTSPACLVFSFAASGRLAASQEIPRDANHKLVFISKKITESIGVNDFSQVVLFGELPALSLGHVSAFLDEILVPVLSNKNNHKSWSCFTSQDMEYHIEVMKKKMYIFRGKMSRRTLLPIPTVAGKMDLDQNCSENKPPSNERIILHAIESVVIEWSHQIQEIIERDSVQRLLNGLHLSPQAELDFWMMRRENLSCIYDQLQAPVVLKMVKILTTKQSSYFPTLKDIFLAVENALLEAQDVELYLRPLRRHIQCLQETEFPQTRILIAPLFHTICLIWSHSKFYNTPARVIVLLQEFCNLFINQATAYLSPEDLLRGEIEESLEKVQVAVNILKTFKNSFFNYRKKLASYFMGRKLRPWDFQSHLVFCRFDKFLDRLIKIEDIFATTLEFEKLERLEFGGTKGAILNGQVHEMSEELMELCKLFKQSTYDPSDCTNMEFESDYVAFKSKTLEFDRRLGTIICEAFFNCNGLEAAFKLLTIFGNFLEKPVVMEIFSLHYSTLVHMFNTELDVCKQLYNEHMKQIECGHVVLNKNMPFTSGNMKWAQQVLQRLQMFWSNFASLRYLFLGNPDHALVYQKYVEMTTLLDQFESRIYNEWKSNVDEICEFNLNQPLVKFSAINGLLCVNFDPKLVAVLREVKYLLMLKKQDIPDSALAIFKKRNTILKYIGNLDLLVQGYNKLKQTLLEVEYPLIEDELRAIDEQLTAATTWLTWQDDCWGYIERVRAATSELEHRVERTQKNVKVIQQTMRGWARCVLPPRREHRREAAFTLEDKGDLFTKKYKLIQGDGCKIHNLVEENRKLFKANPSLDTWKIYVEFIDDIVVEGFFQAIMHDLDFFLKNTEKQLKPAPFFQAQMILLPPEIVFKPSLDREAGDGFYDLVEEMLCNSFRMSAQMNRIATHLEIKNYQNDMDNMLGLAEVRQEIMNRVVNVINKVLDFRNTLETHTYLWVDDRAEFMKHFLLYGHAVSSDEMDAHANEEIPEQPPTLEQFKEQIDIYEALYVQMSKFEDFRVFDSWFKVDMKPFKVSLLTIIKKWSWMFQEHLLRFVIDSLNELQEFIKETDSGLQRELNEGDHDGLVDIMVHLLAVRSRQRATDELFEPLKETITLLESYGQKMPEQVYIQLEELPERWETTKKIAATVRHEVSPLHNAEVTLIRKKCILFDAKQAEFRERFRHYAPLGFNAENPYTALDKANEELEALEEEMLQMQESTRLFEVALPEYKQMKQCRKEIKLLKGLWDVIIYVRRSIDNWTKTQWRQIHVEQMDVELRRFAKEIWSLNKEVRVWDAYTGLEGTVKDMTASLRAITELQSPALRDRHWHQLMKAIGVKFLINEATTLADLLALRLHRVEDDVRRIVDKAVKELGTEKVITEISQTWATMKFSYEVHYRTGIPLLKSDEQLFETLEHNQVQLQTLLQSKYVEYFIEQVLSWQNKLNIADLVIFTWMEVQRTWSHLESIFVCSEDIRIQLVKDARRFDGVDAEFKELMFKTAKVENVLEATCRPNLYEKLKDLQSRLSLCEKALAEYLETKRIAFPRFYFVSSADLLDILSKGAQPKQVTCHLAKLFDSIADLQFEDNQDVSAHRAVGMYSKEKEYVPFQAECECVGHVETWLLQLEQTMQETVRHSITEAIVAYEEKPRELWIFDFPAQVALTSSQIWWTTDVGIAFSRLEEGYETALKDFHKKQISQLNTLITLLLGELPPGDRQKIMTICTIDVHARDVVAKLISQKVVSPQAFTWLSQLRHRWEDTQKHCFVNICDAQFQYFYEYLGNSPRLVITPLTDRCYITLTQSLHLTMSGAPAGPAGTGKTETTKDLGRALGMMVYVFNCSEQMDYKSIGNIYKGLVQTGAWGCFDEFNRISVEVLSVVAVQVKMIHDAIRNRKKRFVFLGEAITLKPSVGIFITMNPGYAGRTELPENLKALFRPCAMVAPDIELICEILLVAEGFVDARALARKFITLYTLCKELLSKQDHYDWGLRAIKSVLVVAGSLKRGDKNRPEDQVLMRALRDFNMPKIVTDDIPVFLGLVGDLFPALDVPRRRKLHFEQMVRQSTLELRLQPEESFILKVVQLEELLAVRHSVFVVGNAGTGKSKILRTLNRTYVNMKQKPVWNDLNPKAVTTDELFGFIHHATREWKDGKIVYSYFIGLFSSILREQANLKHDGPKWIVLDGDIDPMWIESLNTVMDDNKVLTLASNERIALTPFMRLLFEIHHLRSATPATVSRAGILYVNPQDLGWNPYVASWIDRRRHQSEKANLTILFDKYVPACLDKLRTSFKTITSIPESSLVQTLCVLLECLLTPENVPSDSPKEVYEVYFVFACIWAFGGTLLQDQISDYQADFSRWWQKEMKAVKFPSQGTIFDYYVDHKTKKLLPWADKIAQFTMDPDVPLQTVLVHTTETARLRYFMELLLEKGKPLMLVGNAGVGKTVFVGDTLASLSEDYIVSRVPFNYYTTSTALQKILEKPLEKKAGHNYGPGGNKKLIYFIDDMNMPEVDLYGTVQPHTLIRQHIDYGHWYDRQKVMLKEIHNCQYVACMNPMVGSFTINPRLQRHFTVFAFNFPSLDALNTIYGQIFSFHFQQQAFAPSILRSGPTLIQATIAFHQTMMCNFLPTAIKFHYIFNLRDLSNVFQGILFASPECLKGPLDLIHLWLHESARVYGDKLIDKKDCDLFQRRMLETAYKYFEGIDSHMLLQQPLIYCHFADRGKDPHYMPVKDWEVLKTILTETLDNYNELNAAMHLVLFEDAMQHVCRISRILRTPQGCALLVGVGGSGKQSLSRLAAYLRGLEVFQITLTEGYGIQELRVDLANLYIRTGAKNMPTVFLLTDAQVLDESFLVLINDLLASGEIPDLFSDEDVDKIISGIHNEVHALGMVDSRENCWKFFMARVRLQLKIILCFSPVGRTLRVRARKFPAIVNCTAIDWFHAWPQEALVSVSRRFIEETKGIEPVHKDSISLFMAHVHTTVNEMSTRYYQNERRHNYTTPKSFLEQISLFKNLLKKKQNEVSEKKERLVNGIQKLKTTASQVGDLKARLASQEAELQLRNHDAEALITKIGLQTEKVSREKTIADAEERKVTAIQTEVFQKQRECEADLLKAEPALVAATAALNTLNRVNLSELKAFPNPPIAVTNVTAAVMVLLAPRGRVPKDRSWKAAKVFMGKVDDFLQALINYDKEHIPENCLKVVNEHYLKDPEFNPNLIRTKSFAAAGLCAWVINIIKFYEVYCDVEPKRQALAQANLELAAATEKLEAIRKKLVDLDRNLSRLTASFEKATAEKVRCQEEVNQTNKTIKLANRLVKELEAKKIRWGQSIKSFEAQEKTLCGDVLLTAAFVSYVGPFTRQYRQELVHCKWVPFLQQKVSIPLTEGLDLISMLTDDATIAAWNNEGLPSDRMSTENAAILTHCERWPLVIDPQQQGIKWIKNKYGMDLKVTHLGQKGFLNAIETALAFGDVILIENLEETIDPVLDPLLGRNTIKKGKYIRIGDKECEFNKNFRLILHTKLANPHYKPELQAQTTLLNFTVTEDGLEAQLLAEVVSIERPDLEKLKLVLTKHQNDFKIELKYLEDDLLLRLSAAEGSFLDDTKLVERLEATKTTVAEIEHKVIEAKENERKINEARECYRPVAARASLLYFVINDLQKINPLYQFSLKAFNVLFHRAIEQADKVEDMQGRISILMESITHAVFLYTSQALFEKDKLTFLSQMAFQILLRKKEIDPLELDFLLRFTVEHTHLSPVDFLTSQSWSAIKAIAVMEEFRGIDRDVEGSAKQWRKWVESECPEKEKLPQEWKKKSLIQKLILLRAMRPDRMTYALRNFVEEKLGAKYVERTRLDLVKAFEESSPATPIFFILSPGVDALKDLEILGKRLGFTIDSGKFHNVSLGQGQETVAEVALEKASKGGHWVILQNVHLVAKWLGTLEKLLERFSQGSHRDYRVFMSAESAPTPDEHIIPQGLLENSIKITNEPPTGMLANLHAALYNFDQDTLEICSKEQEFKSILFSLCYFHACVAGRLRFGPQGWSRSYPFNPGDLTICASVLYNYLEANSKVPWEDLRYLFGEIMYGGHITDDWDRKLCRVYLEEFMNPSLTEDELMLAPGFAAPPYLDYAGYHQYIEEMLPPESPALYGLHPNAEIEFLTVTSNTLFRTLLEMQPRNALSGDELGQSTEEKVKNVLDDILEKLPEEFNMAEIMQKNSNRSPYVLVCFQECERMNILIREIRISLEQLDLSLKGELALSPAVEAQQFALSYDTVPDTWSKLAYPSTYGLAQWFNDLLLRCRELDTWTQDLTLPAVVWLSGFFNPQSFLTAIMQTMARKNEWPLDKTRLTADVTKKTKEDYGHPPREGAYLHGLFMEGARWDTQAGTIVEARLKELACPMPVIFAKATPVDRQETKQTYECPVYRTKLRGPSYIWTFRLKSEEKTAKWVLAGVALLLEA

SEQ ID NO: 26053 - protein, 174 aa, Homo sapiens
  Payload ID: 5152
  Gene Symbol: DNAH11
  Gene Name: dynein, axonemal, heavy chain 11
  ENSP ID: ENSP00000476068
TVLVHTTETARLRYFMELLLEKGKPLMLVGNAGVGKTVFVGDTLASLSEDYIVSRVPFNYYTTSTALQKILEKPLEKKAGHNYGPGGNKKLIYFIDDMNMPEVDLYGTVQPHTLIRQHIDYGHWYDRQKVMLKEIHNCQYVACMNPMVGSFTINPRLQGIDSHMLLQQPLIYCH

SEQ ID NO: 26054 - protein, 4523 aa, Homo sapiens
  Payload ID: 5152
  Gene Symbol: DNAH11
  Gene Name: dynein, axonemal, heavy chain 11
  ENSP ID: ENSP00000481693
MAAQVAAREARDFREAPTLRLTSGAGLEAVGAVELEEEEENEEEAAARRARSFAQDARVRFLGGRLAMMLGFTEEKWSQYLESEDNRQVLGEFLESTSPACLVFSFAASGRLAASQEIPRDANHKLVFISKKITESIGVNDFSQVVLFGELPALSLGHVSAFLDEILVPVLSNKNNHKSWSCFTSQDMEYHIEVMKKKMYIFRGKMSRRTLLPIPTVAGKMDLDQNCSENKPPSNERIILHAIESVVIEWSHQIQEIIERDSVQRLLNGLHLSPQAELDFWMMRRENLSCIYDQLQAPVVLKMVKILTTKQSSYFPTLKDIFLAVENALLEAQDVELYLRPLRRHIQCLQETEFPQTRILIAPLFHTICLIWSHSKFYNTPARVIVLLQEFCNLFINQATAYLSPEDLLRGEIEESLEKVQVAVNILKTFKNSFFNYRKKLASYFMGRKLRPWDFQSHLVFCRFDKFLDRLIKIEDIFATTLEFEKLERLEFGGTKGAILNGQVHEMSEELMELCKLFKQSTYDPSDCTNMEFESDYVAFKSKTLEFDRRLGTIICEAFFNCNGLEAAFKLLTIFGNFLEKPVVMEIFSLHYSTLVHMFNTELDVCKQLYNEHMKQIECGHVVLNKNMPFTSGNMKWAQQVLQRLQMFWSNFASLRYLFLGNPDHALVYQKYVEMTTLLDQFESRIYNEWKSNVDEICEFNLNQPLVKFSAINGLLCVNFDPKLVAVLREVKYLLMLKKQDIPDSALAIFKKRNTILKYIGNLDLLVQGYNKLKQTLLEVEYPLIEDELRAIDEQLTAATTWLTWQDDCWGYIERVRAATSELEHRVERTQKNVKVIQQTMRGWARCVLPPRREHRREAAFTLEDKGDLFTKKYKLIQGDGCKIHNLVEENRKLFKANPSLDTWKIYVEFIDDIVVEGFFQAIMHDLDFFLKNTEKQLKPAPFFQAQMILLPPEIVFKPSLDREAGDGFYDLVEEMLCNSFRMSAQMNRIATHLEIKNYQNDMDNMLGLAEVRQEIMNRVVNVINKVLDFRNTLETHTYLWVDDRAEFMKHFLLYGHAVSSDEMDAHANEEIPEQPPTLEQFKEQIDIYEALYVQMSKFEDFRVFDSWFKVDMKPFKVSLLTIIKKWSWMFQEHLLRFVIDSLNELQEFIKETDSGLQRELNEGDHDGLVDIMVHLLAVRSRQRATDELFEPLKETITLLESYGQKMPEQVYIQLEELPERWETTKKIAATVRHEVSPLHNAEVTLIRKKCILFDAKQAEFRERFRHYAPLGFNAENPYTALDKANEELEALEEEMLQMQESTRLFEVALPEYKQMKQCRKEIKLLKGLWDVIIYVRRSIDNWTKTQWRQIHVEQMDVELRRFAKASSITEIWSLNKEVRVWDAYTGLEGTVKDMTASLRAITELQSPALRDRHWHQLMKAIGVKFLINEATTLADLLALRLHRVEDDVRRIVDKAVKELGTEKVITEISQTWATMKFSYEVHYRTGIPLLKSDEQLFETLEHNQVQLQTLLQSKYVEYFIEQVLSWQNKLNIADLVIFTWMEVQRTWSHLESIFVCSEDIRIQLVKDARRFDGVDAEFKELMFKTAKVENVLEATCRPNLYEKLKDLQSRLSLCEKALAEYLETKRIAFPRFYFVSSADLLDILSKGAQPKQVTCHLAKLFDSIADLQFEDNQDVSAHRAVGMYSKEKEYVPFQAECECVGHVETWLLQLEQTMQETVRHSITEAIVAYEEKPRELWIFDFPAQVALTSSQIWWTTDVGIAFSRLEEGYETALKDFHKKQISQLNTLITLLLGELPPGDRQKIMTICTIDVHARDVVAKLISQKQVVVSPQAFTWLSQLRHRWEDTQKHCFVNICDAQFQYFYEYLGNSPRLVITPLTDRCYITLTQSLHLTMSGAPAGPAGTGKTETTKDLGRALGMMVYVFNCSEQMDYKSIGNIYKGLVQTGAWGCFDEFNRISVEVLSVVAVQVKMIHDAIRNRKKRFVFLGEAITLKPSVGIFITMNPGYAGRTELPENLKALFRPCAMVAPDIELICEILLVAEGFVDARALARKFITLYTLCKELLSKQDHYDWGLRAIKSVLVVAGSLKRGDKNRPEDQVLMRALRDFNMPKIVTDDIPVFLGLVGDLFPALDVPRRRKLHFEQMVRQSTLELRLQPEESFILKVVQLEELLAVRHSVFVVGNAGTGKSKILRTLNRTYVNMKQKPVWNDLNPKAVTTDELFGFIHHATREWKDGKIVYSYFIGLFSSILREQANLKHDGPKWIVLDGDIDPMWIESLNTVMDDNKVLTLASNERIALTPFMRLLFEIHHLRSATPATVSRAGILYVNPQDLGWNPYVASWIDRRRHQSEKANLTILFDKYVPACLDKLRTSFKTITSIPESSLVQTLCVLLECLLTPENVPSDSPKEVYEVYFVFACIWAFGGTLLQDQISDYQADFSRWWQKEMKAVKFPSQGTIFDYYVDHKTKKLLPWADKIAQFTMDPDVPLQTVLVHTTETARLRYFMELLLEKGKPLMLVGNAGVGKTVFVGDTLASLSEDYIVSRVPFNYYTTSTALQKILEKPLEKKAGHNYGPGGNKKLIYFIDDMNMPEVDLYGTVQPHTLIRQHIDYGHWYDRQKVMLKEIHNCQYVACMNPMVGSFTINPRLQRHFTVFAFNFPSLDALNTIYGQIFSFHFQQQAFAPSILRSGPTLIQATIAFHQTMMCNFLPTAIKFHYIFNLRDLSNVFQGILFASPECLKGPLDLIHLWLHESARVYGDKLIDKKDCDLFQRRMLETAYKYFEGIDSHMLLQQPLIYCHFADRGKDPHYMPVKDWEVLKTILTETLDNYNELNAAMHLVLFEDAMQHVCRISRILRTPQGCALLVGVGGSGKQSLSRLAAYLRGLEVFQITLTEGYGIQELRVDLANLYIRTGAKNMPTVFLLTDAQVLDESFLVLINDLLASGEIPDLFSDEDVDKIISGIHNEVHALGMVDSRENCWKFFMARVRLQLKIILCFSPVGRTLRVRARKFPAIVNCTAIDWFHAWPQEALVSVSRRFIEETKGIEPVHKDSISLFMAHVHTTVNEMSTRYYQNERRHNYTTPKSFLEQISLFKNLLKKKQNEVSEKKERLVNGIQKLKTTASQVGDLKARLASQEAELQLRNHDAEALITKIGLQTEKVSREKTIADAEERKVTAIQTEVFQKQRECEADLLKAEPALVAATAALNTLNRVNLSELKAFPNPPIAVTNVTAAVMVLLAPRGRVPKDRSWKAAKVFMGKVDDFLQALINYDKEHIPENCLKVVNEHYLKDPEFNPNLIRTKSFAAAGLCAWVINIIKFYEVYCDVEPKRQALAQANLELAAATEKLEAIRKKLVDLDRNLSRLTASFEKATAEKVRCQEEVNQTNKTIKLANRLVKELEAKKIRWGQSIKSFEAQEKTLCGDVLLTAAFVSYVGPFTRQYRQELVHCKWVPFLQQKVSIPLTEGLDLISMLTDDATIAAWNNEGLPSDRMSTENAAILTHCERWPLVIDPQQQGIKWIKNKYGMDLKVTHLGQKGFLNAIETALAFGDVILIENLEETIDPVLDPLLGRNTIKKGKYIRIGDKECEFNKNFRLILHTKLANPHYKPELQAQTTLLNFTVTEDGLEAQLLAEVVSIERPDLEKLKLVLTKHQNDFKIELKYLEDDLLLRLSAAEGSFLDDTKLVERLEATKTTVAEIEHKVIEAKENERKINEARECYRPVAARASLLYFVINDLQKINPLYQFSLKAFNVLFHRAIEQADKVEDMQGRISILMESITHAVFLYTSQALFEKDKLTFLSQMAFQILLRKKEIDPLELDFLLRFTVEHTHLSPVDFLTSQSWSAIKAIAVMEEFRGIDRDVEGSAKQWRKWVESECPEKEKLPQEWKKKSLIQKLILLRAMRPDRMTYALRNFVEEKLGAKYVERTRLDLVKAFEESSPATPIFFILSPGVDALKDLEILGKRLGFTIDSGKFHNVSLGQGQETVAEVALEKASKGGHWVILQNVHLVAKWLGTLEKLLERFSQGSHRDYRVFMSAESAPTPDEHIIPQGLLENSIKITNEPPTGMLANLHAALYNFDQDTLEICSKEQEFKSILFSLCYFHACVAGRLRFGPQGWSRSYPFNPGDLTICASVLYNYLEANSKVPWEDLRYLFGEIMYGGHITDDWDRKLCRVYLEEFMNPSLTEDELMLAPGFAAPPYLDYAGYHQYIEEMLPPESPALYGLHPNAEIEFLTVTSNTLFRTLLEMQPRNALSGDELGQSTEEKVKNVLDDILEKLPEEFNMAEIMQKNSNRSPYVLVCFQECERMNILIREIRISLEQLDLSLKGELALSPAVEAQQFALSYDTVPDTWSKLAYPSTYGLAQWFNDLLLRCRELDTWTQDLTLPAVVWLSGFFNPQSFLTAIMQTMARKNEWPLDKTRLTADVTKKTKEDYGHPPREGAYLHGLFMEGARWDTQAGTIVEARLKELACPMPVIFAKATPVDRQETKQTYECPVYRTKLRGPSYIWTFRLKSEEKTAKWVLAGVALLLEA

SEQ ID NO: 26055 - protein, 3092 aa, Homo sapiens
  Payload ID: 5153
  Gene Symbol: DNAH12
  Gene Name: dynein, axonemal, heavy chain 12
  Uniprot ID: Q6ZR08
  ENSP ID: ENSP00000295937
MSDANKAAIAAEKEALNLKLPPIVHLPENIGVDTPTQSKLLKYRRSKEQQQKINQLVIDGAKRNLDRTLGKRTPLLPPPDYPQTMTSEMKKKGFNYIYMKQCVESSPLVPIQQEWLDHMLRLIPESLKEGKEREELLESLINEVSSDFENSMKRYLVQSVLVKPPVKSLEDEGGPLPESPVGLDYSNPWHSSYVQARNQIFSNLHIIHPTMKMLLDLGYTTFADTVLLDFTGIRAKGPIDCESLKTDLSIQTRNAEEKIMNTWYPKVINLFTKKEALEGVKPEKLDAFYSCVSTLMSNQLKDLLRRTVEGFVKLFDPKDQQRLPIFKIELTFDDDKMEFYPTFQDLEDNVLSLVERIAEALQNVQTIPSWLSGTSTPVNLDTELPEHVLHWAVDTLKAAVHRNLEGARKHYETYVEKYNWLLDGTAVENIETFQTEDHTFDEYTEFIEKFLSLASEIMLLPQWIHYTMVRLDCEDLKTGLTNKAKAFANILLNDIASKYRKENECICSEFEAIKEHALKVPETTEEMMDLISYVEKARTVGIEELILRIQESKRQMSYFLDVFLFPQEDLALNATVLMWPRKINPIFDENDELIENAKHKKENELMAKREKLILEIEKESRRMEEFTEFAELERMQQYVTDVRQLQKRIQESEEAVQFINKEEELFKWELTKYPELDKLKVNIEPYQKFFNFVLKWQRSEKRWMDGGFLDLNGESMEADVEEFSREIFKTLKFFQTKLKKELQEKRKAARKRSLEEEKIEEEPKDNATITMCRMRARHWKQISEIVGYDLTPDSGTTLRKVLKLNLTPYLEQFEVISAGASKEFSLEKAMNTMIGTWEDIAFHISLYRDTGVCILSSVDEIQAILDDQIIKTQTMRGSPFIKPFEHEIKAWEDRLIRIQETIDEWLKVQAQWLYLEPIFCSEDIMQQMPEEGRQFQTVDRHWRDIMKFCAKDPKVLAATSLTGLLEKLQNCNELLEKIMKGLNAYLEKKRLFFPRFFFLSNDEMLEILSETKDPLRVQPHLKKCFEGIAKLEFLPNLDIKAMYSSEGERVELIALISTSAARGAVEKWLIQVEDLMLRSVHDVIAAARLAYPESARRDWVREWPGQVVLCISQMFWTSETQEVISGGTEGLKKYYKELQNQLNEIVELVRGKLSKQTRTTLGALVTIDVHARDVVMDMIKMGVSHDTDFLWLAQLRYYWENENARVRIINCNVKYAYEYLGNSPRLVITPLTDRCYRTLIGAFYLNLGGAPEGPAGTGKTETTKDLAKALAVQCVVFNCSDGLDYLAMGKFFKGLASSGAWACFDEFNRIELEVLSVVAQQILCIQRAIQQKLVVFVFEGTELKLNPNCFVAITMNPGYAGRSELPDNLKVLFRTVAMMVPNYALIAEISLYSYGFLNARPLSVKIVMTYRLCSEQLSSQFHYDYGMRAVKAVLVAAGNLKLKYPNENEDILLLRSIKDVNEPKFLSHDIPLFNGITSDLFPGIKLPEADYHEFLECAHEACNVHNLQPVKFFLEKIIQTYEMMIVRHGFMLVGEPFAAKTKVLHVLADTLTLMNEHGYGEEEKVIYRTVNPKSITMGQLFGQFDPVSHEWTDGIVANTFREFALSETPDRKWVVFDGPIDTLWIESMNTVLDDNKKLCLMSGEIIQMSPQMSLIFETMDLSQASPATVSRCGMIYLEPSQLGWEPLVSSWLNSLKGPLCEPEYQALLRGLFAWLIPPSLNQRVELFQLNYLYTTIVSKILKILITFRISNYFKYVPLKTQCTFIKFFLHQQACFIFSLIWSIGGSCDTDGRRVFDTFIRLIILGKDDENPVPDSVGKWECPFDEKGLVYDYMYELKNKGRWVHWNELIKNTNLGDKQIKIQDIIVPTMDTIRYTFLMDLSITYAKPLLFVGPTGTGKSVYVKDKLMNHLEKDQYFPFYINLSARTSANQVQNIIMARLDKRRKGVFGPPMGKKCIIFIDDMNMPALEKYGAQPPIELLRQFFDCGHWYDLKDTSKITLVDIELIAAMGPPGGGRNPVTPRCIRHFNICSINSFSDETMVRIFSSIVAFYLRTHEFPPEYFVIGNQIVNGTMEIYKQSVENLLPTPTKSHYTFNLRDFSRVIRGCLLIERDAVANKHTMIRLFVHEVLRVFYDRLINDDDRRWLFQLTKTVIKDHFKESFHSIFSHLRKQNAPVTEEDLRNLMFGDYMNPDLEGDDRVYIEIPNIHHFSDVVDQCLDEYNQTHKTRMNLVIFRYVLEHLSRICRVLKQSGGNALLVGLGGSGRQSLTRLATSMAKMHIFQPEISKSYGMNEWREDMKSFIAVPVTNRIVDNKSKILEKRLRYLNDHFTYNLYCNICRSLFEKDKLLFSFLLCANLLLARKEIEYQELMFLLTGGVSLKSAEKNPDPTWLQDKSWEEICRASEFPAFRGLRQHFCEHIYEWREIYDSKEPHNAKFPAPMDKNLNELQKIIILRCLRPDKITPAITNYVTDKLGKKFVEPPPFDLTKSYLDSNCTIPLIFVLSPGADPMASLLKFANDKSMSGNKFQAISLGQGQGPIAAKMIKAAIEEGTWVCLQNCHLAVSWMPMLEKICEDFTSETCNSSFRLWLTSYPSSKFPVTILQNGVKMTNEPPTGLRLNLLQSYLTDPVSDPEFFKGCRGKELAWEKLLFGVCFFHALVQERKKFGPLGWNIPYGFNESDLRISIRQLQLFINEYDTIPFEAISYLTGECNYGGRVTDDWDRRLLLTMLADFYNLYIVENPHYKFSPSGNYFAPPKGTYEDYIEFIKKLPFTQHPEIFGLHENVDISKDLQQTKTLFESLLLTQGGSKQTGASGSTDQILLEITKDILNKLPSDFDIEMALRKYPVRYEESMNTVLVQEMERFNNLIITIRNTLRDLEKAIKGVVVMDSALEALSGSLLVGKVPEIWAKRSYPSLKPLGSYITDFLARLNFLQDWYNSGKPCVFWLSGFFFTQAFLTGAMQNYARKYTTPIDLLGYEFEVIPSDTSDTSPEDGVYIHGLYLDGARWDRESGLLAEQYPKLLFDLMPIIWIKPTQKSRIIKSDAYVCPLYKTSERKGTLSTTGHSTNFVIAMLLKTDQPTRHWIKRGVALLCQLDD

SEQ ID NO: 26056 - protein, 457 aa, Homo sapiens
  Payload ID: 5153
  Gene Symbol: DNAH12
  Gene Name: dynein, axonemal, heavy chain 12
  Uniprot ID: Q6ZR08
  ENSP ID: ENSP00000312554
MSDANKAAIAAEKEALNLKLPPIVHLPENIGVDTPTQSKLLKYRRSKEQQQKINQLVIDGAKRNLDRTLGKRTPLLPPPDYPQTMTSEMKKKGFNYIYMKQCVESSPLVPIQQEWLDHMLRLIPESLKEGKEREELLESLINEVSSDFENSMKRYLVQSVLVKPPVKSLEDEGGPLPESPVGLDYSNPWHSSYVQARNQIFSNLHIIHPTMKMLLDLGYTTFADTVLLDFTGIRAKGPIDCESLKTDLSIQTRNAEEKIMNTWYPKVINLFTKKEALEGVKPEKLDAFYSCVSTLMSNQLKDLLRRTVEGFVKLFDPKDQQRLPIFKIELTFDDDKMEFYPTFQDLEDNVLSLVERIAEALQNVQTIPSWLSGTSTPVNLDTELPEHVLHWAVDTLKAAVHRNLEGARKHYETYVEKYNWLLDGTAVENIETFQTEDHTFDEYTEELDCWVVWEVYF

SEQ ID NO: 26057 - protein, 784 aa, Homo sapiens
  Payload ID: 5153
  Gene Symbol: DNAH12
  Gene Name: dynein, axonemal, heavy chain 12
  ENSP ID: ENSP00000374187
MSDANKAAIAAEKEALNLKLPPIVHLPENIGVDTPTQSKLLKYRRSKEQQQKINQLVIDGAKRNLDRTLGKRTPLLPPPDYPQTMTSEMKKKGFNYIYMKQCVESSPLVPIQQEWLDHMLRLIPESLKEGKEREELLESLINEVSSDFENSMKRYLVQSVLVKPPVKSLEDEGGPLPESPVGLDYSNPWHSSYVQARNQIFSNLHIIHPTMKMLLDLGYTTFADTVLLDFTGIRAKGPIDCESLKTDLSIQTRNAEEKIMNTWYPKVINLFTKKEALEGVKPEKLDAFYSCVSTLMSNQLKDLLRRTVEGFVKLFDPKDQQRLPIFKIELTFDDDKMEFYPTFQDLEDNVLSLVERIAEALQNVQTIPSWLSGTSTPVNLDTELPEHVLHWAVDTLKAAVHRNLEGARKHYETYVEKYNWLLDGTAVENIETFQTEDHTFDEYTEFIEKFLSLASEIMLLPQWIHYTMVRLDCEDLKTGLTNKAKAFANILLNDIASKYRKENECICSEFEAIKEHALKVPETTEEMMDLISYVEKARTVGIEELILRIQESKRQMSYFLDVFLFPQEDLALNATVLMWPRKINPIFDENDELIENAKHKKENELMAKREKLILEIEKESRRMEEFTEFAELERMQQYVTDVRQLQKRIQESEEAVQFINKEEELFKWELTKYPELDKLKVNIEPYQKFFNFVLKWQRSEKRWMDGGFLDLNGESMEADVEEFSREIFKTLKFFQTKLKKELQEKRKAARKRSLEEEKIEEEPKDNATITMCSTVMEQIKAFKV

SEQ ID NO: 26058 - protein, 3960 aa, Homo sapiens
  Payload ID: 5153
  Gene Symbol: DNAH12
  Gene Name: dynein, axonemal, heavy chain 12
  ENSP ID: ENSP00000418137
MSDANKAAIAAEKEALNLKLPPIVHLPENIGVDTPTQSKLLKYRRSKEQQQKINQLVIDGAKRNLDRTLGKRTPLLPPPDYPQTMTSEMKKKGFNYIYMKQCVESSPLVPIQQEWLDHMLRLIPESLKEGKEREELLESLINEVSSDFENSMKRYLVQSVLVKPPVKSLEDEGGPLPESPVGLDYSNPWHSSYVQARNQIFSNLHIIHPTMKMLLDLGYTTFADTVLLDFTGIRAKGPIDCESLKTDLSIQTRNAEEKIMNTWYPKVINLFTKKEALEGVKPEKLDAFYSCVSTLMSNQLKDLLRRTVEGFVKLFDPKDQQRLPIFKIELTFDDDKMEFYPTFQDLEDNVLSLVERIAEALQNVQTIPSWLSGTSTPVNLDTELPEHVLHWAVDTLKAAVHRNLEGARKHYETYVEKYNWLLDGTAVENIETFQTEDHTFDEYTEFIEKFLSLASEIMLLPQWIHYTMVRLDCEDLKTGLTNKAKAFANILLNDIASKYRKENECICSEFEAIKEHALKVPETTEEMMDLISYVEKARTVGIEELILRIQESKRQMSYFLDVFLFPQEDLALNATVLMWPRKINPIFDENDELIENAKHKKENELMAKREKLILEIEKESRRMEEFTEFAELERMQQYVTDVRQLQKRIQESEEAVQFINKEEELFKWELTKYPELDKLKVNIEPYQKFFNFVLKWQRSEKRWMDGGFLDLNGESMEADVEEFSREIFKTLKFFQTKLKKELQEKRKAARKRSLEEEKIEEEPKDNATITMCSTVMEQIKAFKEYIPTVSILCNPGMRARHWKQISEIVGYDLTPDSGTTLRKVLKLNLTPYLEQFEVISAGASKEFSLEKAMNTMIGTWEDIAFHISLYRDTGVCILSSVDEIQAILDDQIIKTQTMRGSPFIKPFEHEIKAWEDRLIRIQETIDEWLKVQAQWLYLEPIFCSEDIMQQMPEEGRQFQTVDRHWRDIMKFCAKDPKVLAATSLTGLLEKLQNCNELLEKIMKGLNAYLEKKRLFFPRFFFLSNDEMLEILSETKDPLRVQPHLKKCFEGIAKLEFLPNLDIKAMYSSEGERVELIALISTSAARGAVEKWLIQVEDLMLRSVHDVIAAARLAYPESARRDWVREWPGQVVLCISQMFWTSETQEVISGGTEGLKKYYKELQNQLNEIVELVRGKLSKQTRTTLGALVTIDVHARDVVMDMIKMGVSHDTDFLWLAQLRYYWENENARVRIINCNVKYAYEYLGNSPRLVITPLTDRCYRTLIGAFYLNLGGAPEGPAGTGKTETTKDLAKALAVQCVVFNCSDGLDYLAMGKFFKGLASSGAWACFDEFNRIELEVLSVVAQQILCIQRAIQQKLVVFVFEGTELKLNPNCFVAITMNPGYAGRSELPDNLKVLFRTVAMMVPNYALIAEISLYSYGFLNARPLSVKIVMTYRLCSEQLSSQFHYDYGMRAVKAVLVAAGNLKLKYPNENEDILLLRSIKDVNEPKFLSHDIPLFNGITSDLFPGIKLPEADYHEFLECAHEACNVHNLQPVKFFLEKIIQTYEMMIVRHGFMLVGEPFAAKTKVLHVLADTLTLMNEHGYGEEEKVIYRTVNPKSITMGQLFGQFDPVSHEWTDGIVANTFREFALSETPDRKWVVFDGPIDTLWIESMNTVLDDNKKLCLMSGEIIQMSPQMSLIFETMDLSQASPATVSRCGMIYLEPSQLGWEPLVSSWLNSLKGPLCEPEYQALLRGLFAWLIPPSLNQRKKKCKELIPTSNSNVVVSLTRLFEVLLCNVVENDPTSKHIRVWIMACFIFSLIWSIGGSCDTDGRRVFDTFIRLIILGKDDENPVPDSVGKWECPFDEKGLVYDYMYELKNKGRWVHWNELIKNTNLGDKQIKIQDIIVPTMDTIRYTFLMDLSITYAKPLLFVGPTGTGKSVYVKDKLMNHLEKDQYFPFYINLSARTSANQVQNIIMARLDKRRKGVFGPPMGKKCIIFIDDMNMPALEKYGAQPPIELLRQFFDCGHWYDLKDTSKITLVDIELIAAMGPPGGGRNPVTPRCIRHFNICSINSFSDETMVRIFSSIVAFYLRTHEFPPEYFVIGNQIVNGTMEIYKQSVENLLPTPTKSHYTFNLRDFSRVIRGCLLIERDAVANKHTMIRLFVHEVLRVFYDRLINDDDRRWLFQLTKTVIKDHFKESFHSIFSHLRKQNAPVTEEDLRNLMFGDYMNPDLEGDDRVYIEIPNIHHFSDVVDQCLDEYNQTHKTRMNLVIFRYVLEHLSRICRVLKQSGGNALLVGLGGSGRQSLTRLATSMAKMHIFQPEISKSYGMNEWREDMKGLLRNVGMKGQKTVFLITDTQIKEEAFLEDIDSVLNTGEVPNIFAADEKQEVMEGVRPVAQAGNKHDELSPLALFAFFVNRCKDNLHVVVAFSPIGDAFRNRLRQFPSLINCCTIDWFQSWPEDALERVAVKFLETLELTEVEQQEIVPICKHFHTSIMDLSERFLHELGRHNYVTATSYLELIGSFRQLLTQKRQAVMEAKQRYMNGLDKLAFAESQVGEMQMELVELQPKLEEAKIENANMMQVIEIESVQVEAKRQFVKLDEEIASGKAEEAQALKNECESDLAEAIPALEAALSALDTLKPADITIVKSMKNPPSGVKLVMAAVCVMKDIKPEKISDPSGTGGKILDYWGPSKKLLGDMNFLRDLKEYDKDNIPVTVMQKIRSEYLMNPEFDPPKVAKASSAAEGLCKWIMAMEVYDRVAKVVAPKKARLSEAQKSLAETMELLNQKRAELAEVEHHLENLQMTFLEKTEEKAALEDQVELCAKKLERASQLIGGLGGEKSRWAQAADDLQITYENLTGDVLVSAGVIAYLGAFTSGFRQTCTKDWSMLCKKKKIPCSEEFLLSKTLGDPVKIRAWNIAGLPTDTFSIDNGVIVNNCRRWPLMIDPQGQANKWIKNSEKENQLSVIKLSDSDYMRTLENCIQFGTPLLLENVGEELDPSLEPLLLRQTFKQGGIDCIRLGEVIIEYSFDFKFYITTKLRNPHYMPELATKVSLLNFMITPEGLEDQLLGIVVAKERPELEEERNALILQSAANKKQLKDIEKKILETLSSSEGNILEDESAIKVLDSAKMMSNEITKKQQIAEKTELKIAESREGYRPIAKHSSVLFFSIADLANIDPMYQYSLTWFVNLYINSIHDSNKSKILEKRLRYLNDHFTYNLYCNICRSLFEKDKLLFSFLLCANLLLARKEIEYQELMFLLTGGVSLKSAEKNPDPTWLQDKSWEEICRASEFPAFRGLRQHFCEHIYEWREIYDSKEPHNAKFPAPMDKNLNELQKIIILRCLRPDKITPAITNYVTDKLGKKFVEPPPFDLTKSYLDSNCTIPLIFVLSPGADPMASLLKFANDKSMSGNKFQAISLGQGQGPIAAKMIKAAIEEGTWVCLQNCHLAVSWMPMLEKICEDFTSETCNSSFRLWLTSYPSSKFPVTILQNGVKMTNEPPTGLRLNLLQSYLTDPVSDPEFFKGCRGKELAWEKLLFGVCFFHALVQERKKFGPLGWNIPYGFNESDLRISIRQLQLFINEYDTIPFEAISYLTGECNYGGRVTDDWDRRLLLTMLADFYNLYIVENPHYKFSPSGNYFAPPKGTYEDYIEFIKKLPFTQHPEIFGLHENVDISKDLQQTKTLFESLLLTQGGSKQTGASGSTDQILLEITKDILNKLPSDFDIEMALRKYPVRYEESMNTVLVQEMERFNNLIITIRNTLRDLEKAIKGVVVMDSALEALSGSLLVGKVPEIWAKRSYPSLKPLGSYITDFLARLNFLQDWYNSGKPCVFWLSGFFFTQAFLTGAMQNYARKYTTPIDLLGYEFEVIPSDTSDTSPEDGVYIHGLYLDGARWDRESGLLAEQYPKLLFDLMPIIWIKPTQKSRIIKSDAYVCPLYKTSERKGTLSTTGHSTNFVIAMLLKTDQPTRHWIKRGVALLCQLDD

SEQ ID NO: 26059 - protein, 740 aa, Homo sapiens
  Payload ID: 5153
  Gene Symbol: DNAH12
  Gene Name: dynein, axonemal, heavy chain 12
  ENSP ID: ENSP00000420359
  MOD_RES (1)..(1): Any amino acid
XHDSNKSKILEKRLRYLNDHFTYNLYCNICRSLFEKDKLLFSFLLCANLLLARKEIEYQELMFLLTGGVSLKSAEKNPDPTWLQDKSWEEICRASEFPAFRGLRQHFCEHIYEWREIYDSKEPHNAKFPAPMDKNLNELQKIIILRCLRPDKITPAITNYVTDKLGKKFVEPPPFDLTKSYLDSNCTIPLIFVLSPGADPMASLLKFANDKSMSGNKFQAISLGQGQGPIAAKMIKAAIEEGTWVCLQNCHLAVSWMPMLEKICEDFTSETCNSSFRLWLTSYPSSKFPVTILQNGVKMTNEPPTGLRLNLLQSYLTDPVSDPEFFKGCRGKELLFINEYDTIPFEAISYLTGECNYGGRVTDDWDRRLLLTMLADFYNLYIVENPHYKFSPSGNYFAPPKGTYEDYIEFIKKLPFTQHPEIFGLHENVDISKDLQQTKTLFESLLLTQGGSKQTGASGSTDQILLEITKDILNKLPSDFDIEMALRKYPVRYEESMNTVLVQEMERFNNLIITIRNTLRDLEKAIKGVVVMDSALEALSGSLLVGKVPEIWAKRSYPSLKPLGSYITDFLARLNFLQDWYNSGKPCVFWLSGFFFTQAFLTGAMQNYARKYTTPIDLLGYEFEVIPSDTSDTSPEDGVYIHGLYLDGARWDRESGLLAEQYPKLLFDLMPIIWIKPTQKSRIIKSDAYVCPLYKTSERKGTLSTTGHSTNFVIAMLLKTDQPTRHWIKRGVALLCQLDD

SEQ ID NO: 26060 - protein, 54 aa, Homo sapiens
  Payload ID: 5153
  Gene Symbol: DNAH12
  Gene Name: dynein, axonemal, heavy chain 12
  ENSP ID: ENSP00000420717
DFDIEMALRKYPVRYEESMNTVLVQEMERFNKTGIIQENLVCFGCQVSFSLRPF

SEQ ID NO: 26061 - protein, 1481 aa, Homo sapiens
  Payload ID: 5154
  Gene Symbol: DNAH14
  Gene Name: dynein, axonemal, heavy chain 14
  ENSP ID: ENSP00000328980
  MOD_RES (1)..(1): Any amino acid
XELFGNSSQVGINLPTGECSIFGYFVDIEQCEFIPWSDLVPNDQTLIQRGTSLLTNLQRSGGNFLKITECGECINYTATRDTTCLSFLMSLLLKNSCPVLLTGESGVGKTAAINQMLEKLEGPGAFDIKHGSILGDTLLYSEIKKSSSLKQNITILIPETHKTATGSSDNPTKKPEVRTNKKLLKNNDHKGVVVSTINFSTNVTAAKTKEMILKKLIRRTKDTLGAPKNNRILIFIDDMNMPVSDMYGAQPPLELIRQLLDLGGVYDTEKNTWKNIQDLSIVAACVPVVNDISPRLLKHFSMLVLPHPSQDILCTIFQLLLGLLQADRTVVNSKEMAALLFVHEATRVFHDRLIDFTDKSLFYRLLSRELENCFQIQWTQENLMNHSTVFLDFLDINKTHRKKIYQNTSDYNKLASVLDEFQMKLGSISLELSHSMVFFKEAIEHIIRATRVLRQPGSHMLLIGIDGCGKKTCATLACYLTDNKLYRVPISHKCAYIEFKEVFKKVFIHAGLKGKPTVLMVPNLNIEQDSFLEDLNYIISSGRIPDLFENVELDSIAMKIRYLTEQSGHMDNRQSLLSFFQKRIYKNLHIFVIMSPEGPSFRQNCRVYPSMISSCTIDWYERWPEEALLIVANSFLKEKVNFENRENLKEKLAPTCVQIHKSMKDLNRKYFEETGRFYYTTPNSYLQFMETFAHILRAREEEMQTKRDRFHMGLSTILEATTLVTEMQEELLILGPQVEQKTKETETLMEKLRKDSQVVEKVQMLVKQDEEIVAEEVRIVEDYAQKTANELKSVLPAFDKAIVALNALDKADVAELRVYTRPPFLVLTVMNAVCILLQKKPNWATAKLLLSETGFLKKLINLDKDSIPDKVFVKLKKIVTLPDFNPHKISLVSVACCSLCQWVIALNNYHEVQKVVGPKQIQVAEAQNVLKIARQRLAEKQRGLQLVEEHLLFLQAAYKDTVAEKQLLANRKTMASRRFQCASVLLTVLEDEKISRWHNQGLPHGQYSVENAILIKNGQQWPLLIDPHRQAHKWIRQMEGSRLQKLSIEDSNYTKKIENAMKTGGSVLLQNLLETLAPGLKAILKKDIYQKKGHYFIRVGDAEFEYNSNFRLYLSTEIDNPHFLPSVYNFVTMINFTVTFQGLQDQLLSTVVTHEVPHLEDQRSKLLESISLDAITLEELEEKTLNLLQKALGSILDDDKIVDTLRKSKMTSNEISKRIEATKKAESEIQAIRKNYLPIATRGALLYFLVADLTQINYMYQFSLDWFHQVFVSSVVSKSKEQEHSFKREKVSPKEVHEFISISKEPNLENEKNLLDKHIKSAIDMLTKSIFKVVSSALFNEDKLCFSFRLCTVIMQNNANGNLIQDDIGFLPEEEWNIFLYSGILINIKSALSQSRLTSTFEIGESQHLQWLSDSRWRQCQYVSTHLEPFSLLCKSLLSNVSQWDTFKNSKAVYSLISTPFSSENASLEENTKPPEESKSS

SEQ ID NO: 26062 - protein, 204 aa, Homo sapiens
  Payload ID: 5154
  Gene Symbol: DNAH14
  Gene Name: dynein, axonemal, heavy chain 14
  ENSP ID: ENSP00000332424
  MOD_RES (1)..(1): Any amino acid
XMLISAEGEGLVLPKKIRVRSAVEQWLVNVEKSMFDVLKKFLSQGIEDWNCQMFSQWVLSHPGQVVLTVSQIMFYNDCVKSFVSSYSREKLEKVHAGLMCHLEEVADLVVLDTSNSRTKAILGALLILYVHCRDIVINLLLKNIFNAEDFEWTRHLQYKWNEKQKLCYVSQGNASFTYGYEYLGCTSRLVITPLTDRCWLTLME

SEQ ID NO: 26063 - protein, 228 aa, Homo sapiens
  Payload ID: 5154
  Gene Symbol: DNAH14
  Gene Name: dynein, axonemal, heavy chain 14
  Uniprot ID: Q0VDD8
  ENSP ID: ENSP00000355813
METFIPIDLTTENQEMDKEETKTKPRLLRYEEKKYEDVKPLETQPAEIAEKETLEYKTVRTFSESLKSEKTEDYLRESIIQQHMVSPEPASLKEKGKSRRKKDQTHACPNVRKARPVSYDRTEPKDDDVIRNIIRLREKLGWQTILPQHSLKYGSSKIAIQKITLKKPLEDDGEFVYCLPRKSPKSLYNPYDLQVVSAHTAKHCKEFWVITASFISKRYLVICGAVYI

SEQ ID NO: 26064 - protein, 430 aa, Homo sapiens
  Payload ID: 5154
  Gene Symbol: DNAH14
  Gene Name: dynein, axonemal, heavy chain 14
  ENSP ID: ENSP00000355814
METFIPIDLTTENQEMDKEETKTKPRLLRYEEKKYEDVKPLETQPAEIAEKETLEYKTVRTFSESLKSEKTEDYLRESIIQQHMVSPEPASLKEKGKSRRKKDQTHACPNVRKARPVSYDRTEPKDDDVIRNIIRLREKLGWQTILPQHSLKYGSSKIAIQKITLKKPLEDDGEFVYCLPRKSPKSLYNPYDLQVINIVGSVKEVELIPTLEWLSERRHYYLLRQFKIFSDFRMNKAFVTWKLNVKRIKTEKSRSFLYHHLFLADDLFQTCLVYIRGLCEDAINLKNYNDHENNLSAICLVKLDSSRTYSLDEFCEEQLQQATQALKQLEDIRNKAISEMKSTFLKVAEKNEIKEYFESKLSEDDTTHFKLPKYRRLLETFFKFVMLVDYIFQELIRQLMNTAVTLLLELFNGSAGMPFSVEKKNENLIR

SEQ ID NO: 26065 - protein, 228 aa, Homo sapiens; identical to SEQ ID NO: 26063
  Payload ID: 5154
  Gene Symbol: DNAH14
  Gene Name: dynein, axonemal, heavy chain 14
  Uniprot ID: Q0VDD8
  ENSP ID: ENSP00000355815

SEQ ID NO: 26066 - protein, 453 aa, Homo sapiens
  Payload ID: 5154
  Gene Symbol: DNAH14
  Gene Name: dynein, axonemal, heavy chain 14
  Uniprot ID: Q0VDD8
  ENSP ID: ENSP00000383737
METFIPIDLTTENQEMDKEETKTKPRLLRYEEKKYEDVKPLETQPAEIAEKETLEYKTVRTFSESLKSEKTEDYLRESIIQQHMVSPEPASLKEKGKSRRKKDQTHACPNVRKARPVSYDRTEPKDDDVIRNIIRLREKLGWQTILPQHSLKYGSSKIAIQKITLKKPLEDDGEFVYCLPRKSPKSLYNPYDLQVVSAHTAKHCKEFWVITASFISKVINIVGSVKEVELIPTLEWLSERRHYYLLRQFKIFSDFRMNKAFVTWKLNVKRIKTEKSRSFLYHHLFLADDLFQTCLVYIRGLCEDAINLKNYNDHENNLSAICLVKLDSSRTYSLDEFCEEQLQQATQALKQLEDIRNKAISEMKSTFLKVAEKNEIKEYFESKLSEDDTTHFKLPKYRRLLETFFKFVMLVDYIFQELIRQLMNTAVTLLLELFNGSAGMPFSVEKKNENLIR

SEQ ID NO: 26067 - protein, 4515 aa, Homo sapiens
  Payload ID: 5154
  Gene Symbol: DNAH14
  Gene Name: dynein, axonemal, heavy chain 14
  Uniprot ID: Q0VDD8
  ENSP ID: ENSP00000392061
METFIPIDLTTENQEMDKEETKTKPRLLRYEEKKYEDVKPLETQPAEIAEKETLEYKTVRTFSESLKSEKTEDYLRESIIQQHMVSPEPASLKEKGKSRRKKDQTHACPNVRKARPVSYDRTEPKDDDVIRNIIRLREKLGWQTILPQHSLKYGSSKIAIQKITLKKPLEDDGEFVYCLPRKSPKSLYNPYDLQVVSAHTAKHCKEFWVITASFISKVINIVGSVKEVELIPTLEWLSERRHYYLLRQFKIFSDFRMNKAFVTWKLNVKRIKTEKSRSFLYHHLFLADDLFQTCLVYIRGLCEDAINLKNYNDHENNLSAICLVKLDSSRTYSLDEFCEEQLQQATQALKQLEDIRNKAISEMKSTFLKVAEKNEIKEYFESKLSEDDTTHFKLPKYRRLLETFFKFVMLVDYIFQELIRQLMNTAVTLLLELFNGSAGMPFSVEKKNENLIRTFKDNSFPTGKTTNDCEELVDNSKLHAISVQKSEVKTDTDINEILNSVEVGKDLRKTYAPIFEVNLCLRIPAESDSSENSKENFHESDQCPEECVMFEDEMSENKDNCVKKHSSEELLPKAKKSKEISYNLEDIISDTEIETEFENKYMYYEFPEFPTNLFIDPNRLEFSVKIQNMLTNMEKCITTITPLCQDPQLSIFIDLVSIMDLPNKTGSIIHYKEQTRWPDCHILFETDPAYQNIIVNLLTIIGNSMGLVNAYSHKFIKYCTMTEKAKIMSMKISSMGELTSKEFEAILNRFRNYFRHIVNMAIEKRIGIFNVVSLDYQSECLLYIDNVIHMSHTLIQSVIEKKNKNLLEVVESSLQQLECDPTEIEEFLEHFIFLNAISSKISKLEKEFLTMSQLYSVAKHHQIHISEEQIAIFQVLLLKFSQLKSSMKLSKINKDTAITKFRDNLEACISGLHVDVGNLKAKIRTPLLLCAGTQVSTAMEMIQTLSGEAASLTNKAKAYSHYQDCFSDSQSHMHSVNVEEITQIVLSEISDIEGDLTLRKKLWEAQEEWKRASWEWRNSSLQSIDVESVQRNVSKLMHIISVLEKGLPKSDMVTHLKQVVTEFKQELPIIIALGNPCLKPRHWEALQEIIGKSVPLDKNCKVENLLALKMFQYENEINDMSTSATNEAALEKMLFKIIDFWNTTPLPLILHHTEIYSIFIIPSIDDISAQLEESQVILATIKGSPHIGPIKDLVNEWDQNLTLFSYTLEEWMNCQRNWLYLEPVFHSSEIRRQLPAETELFSQVISMWKKIMSKIQNKQNALQITTSAGVLEILQNCNIHLEHIKKSLEDYLEVKRLIFPRFYFLSNAELLDILADSRNPESVQPHLVKCFENIKQLLIWKQDIGPPAVKMLISAEGEGLVLPKKIRVRSAVEQWLVNVEKSMFDVLKKERYIYNIILLFQSQIMFYNDCVKSFVSSYSREKLEKVHAGLMCHLEEVADLVVLDTSNSRTKAILGALLILYVHCRDIVINLLLKNIFNAEDFEWTRHLQYKWNEKQKLCYVSQGNASFTYGYEYLGCTSRLVITPLTDRCWLTLMEALHLNLGGCPAGPAGTGKTETVKDLAKSLGKHCVVFNCFEDLDYKIVRKFFFGLVQSGAWSCFDEFNLIDLEVLSVIASQILTIKAAKDNYSARFVLEGKEIRINMSCAVFITMNPRYGGGVELPDNLKSLFRPVAMMVPHYQMIAEIILFSFGFKSANSLSGKLTNLYELARKQLSQQDHYNFGLRSLKIVLIMAGTKKREFKCLSEADETLIVIEAIREASLPKCPPEDVPLFENIIGDIFPEVTVLKVNQLALEKVIYTATQQLGLQNWSSQKEKIIQFYNQLQVCVGVMLVGPTGGGKTTVRRILEKALTLLPIADFLSVAERKSASKISERKGKVDICVLNPKCVTLSELYGQLDPNTMEWTDGLLSATIRSYVYFNTPKNTKKDIDLRLKSRISDLSNVFKLDSSDTTETDDNIFEEIEKVVKIPENHNFDWQWIILDGPVDTFWVENLNSVLDDTRTLCLANSERIALTNKIRVIFEVDNLSQASPATVSRCAMVYMDPVDLGWEPYVKSWLLKTSKIISQSGVDCLEFMIKNSVTDGLQFIRNRQKFQPYPMEDITVVITLCRILDAFFDFMGKNGGFEQSDDLNDTSSKEANSQRESVTFKDIEKRDENTWYPEKNPDKLTKIIQKLFVFAFTWAFGGALNREDEHRENIPFCPSLEPDSLAKVTYDFDKLVHELFGNSSQVGWKHWGQSQGRRRKGNCINLPTGECSIFGYFVDIEQCEFIPWSDLVPNDQTLIQRGTSLLTNLQRSGGNFLKITECGECINYTATRDTTCLSFLMSLLLKNSCPVLLTGESGVGKTAAINQMLEKLEGPGAFDIKHGSILGDTLLYSEIKKSSSLKQNITILIPETHKTATGSSDNPTKKPEVRTNKKLLKNNDHKGVVVSTINFSTNVTAAKTKEMILKKLIRRTKDTLGAPKNNRILIFIDDMNMPVSDMYGAQPPLELIRQLLDLGGVYDTEKNTWKNIQDLSIVAACVPVVNDISPRLLKHFSMLVLPHPSQDILCTIFQAHLGIYFSINNFTPEVQKSKDQIISCSLAIYHQVRQNMLPTPTKCHYMFNLRDMFKLLLGLLQADRTVVNSKEMAALLFVHEATRVFHDRLIDFTDKSLFYRLLSRELENCFQIGIDGCGKKTCATLACYLTDNKLYRVPISHKCAYIEFKEVFKKVFIHAGLKGKPTVLMVPNLNIEQDSFLEDLNYIISSGRIPDLFENVELDSIAMKIRYLTEQSGHMDNRQSLLSFFQKRIYKNLHIFVIMSPEGPSFRQNCRVYPSMISSCTIDWYERWPEEALLIVANSFLKEKVNFENRENLKEKLAPTCVQIHKSMKDLNRKYFEETGRFYYTTPNSYLQFMETFAHILRAREEEMQTKRDRFHMGLSTILEATTLVTEMQEELLILGPQVEQKTKETETLMEKLRKDSQVVEKVQMLVKQDEEIVAEEVRIVEDYAQKTANELKSVLPAFDKAIVALNALDKADVAELRVYTRPPFLVLTVMNAVCILLQKKPNWATAKLLLSETGFLKKLINLDKDSIPDKVFVKLKKIVTLPDFNPHKISLVSVACCSLCQWVIALNNYHEVQKVVGPKQIQVAEAQNVLKIARQRLAEKQRGLQLVEEHLLFLQAAYKDTVAEKQLLANRKTMASRRFQCASVLLTVLEDEKTRWQETINQIDNKLEGILGDILLSAACIVYSGILTPEFRQLIVNKWETFCIENGISLSSKFSLIKVMAQKYEISRWHNQGLPHGQYSVENAILIKNGQQWPLLIDPHRQAHKWIRQMEGSRLQKLSIEDSNYTKKIENAMKTGGSVLLQNLLETLAPGLKAILKKDIYQKKGHYFIRVGDAEFEYNSNFRLYLSTEIDNPHFLPSVYNFVTMINFTVTFQGLQDQLLSTVVTHEVPHLEDQRSKLLESISLDAITLEELEEKTLNLLQKALGSILDDDKIVDTLRKSKMTSNEISKRIEATKKAESEIQAIRKNYLPIATRGALLYFLVADLTQINYMYQFSLDWFHQVFVSSVVSKSKEQEHSFKREKVSPKEVHEFISISKEPNLENEKNLLDKHIKSAIDMLTKSIFKVVSSALFNEDKLCFSFRLCTVIMQNNANGNLIQDDIGFLPEEEWNIFLYSGILINIKSALSQSRLTSTFEIGESQHLQWLSDSRWRQCQYVSTHLEPFSLLCKSLLSNVSQWDTFKNSKAVYSLISTPFSSENASLEENTKPPEETELLNENKETCNPINFPWEKLTSFQRLILVKVLRPESLNNSVRKFITEKMGNKYLQRTGVNLKDAYKGSNARTPLILIQTHGIDLTNILLRFAQELKGTTHHVTIISLGRDQAAKAEDLILKALTKTQQWVFLQNCHLATSFMPRLCTIVESFNSPNVTIDPEFRLWLSSKSYSSFPIPVLKKGLKIAVESPQGLKSNLLQTFGCTGSGEVTEEIFENPDCGQWWKKLLFSLCFFNAVINERKNYGILGWNIAYKFNSSDLGVAIKVLENSLRGQPSISWQALRYLIGEVIYGGRVIDNWDKRCLKTLLYKFCNPEVLKDDFSFSRSASIKDYIHIIQSLPDDDLPEVLGIHPEAIRSCWETQGEKFIENLIAMQPKTTTANLMIRPEQSKDELVMEILSDLLKRLPLTVEKEEIAVGTPSTLKSMMSSSIWESLSKNLKDHDPLIHCVLLTFLKQEIKRFDKLLFVIHKSLKDLQLAIKGEIILTQELEEIFNSFLNMRVPTLWQKHAYRSCKPLSSWIDDLIQRLNFFNTWAKVAYTAIQRRYMRFVTVWKQSIPSTSQKCKHPEDSENNFFEGFPSRYWLPAFFFPQAFLAAVLQDYGRSRGIAVDALTFTHHVISNTTDKDEKFSVFMPKKLNIVRRAFKGSASSHTGVYIFGLFIEGARWNREQKILEDSLPLEMCCDFPDIYFLPTKISTKTPNASNQTDSELYAFECPVYQTPERSRILATTGLPTNFLTSVYLSTKKPPSHWITMRVALLCEKNEK

SEQ ID NO: 26068 - protein, 299 aa, Homo sapiens
  Payload ID: 5154
  Gene Symbol: DNAH14
  Gene Name: dynein, axonemal, heavy chain 14
  ENSP ID: ENSP00000398678
  MOD_RES (1)..(1): Any amino acid
XTGVSHRADGERGTVGINLPTGECSIFGYFVDIEQCEFIPWSDLVPNDQTLIQRGTSLLTNLQRSGGNFLKITECGECINYTATRDTTCLSFLMSLLLKNSCPVLLTGESGVGKTAAINQMLEKLEGPGAFDIKHGSILGDTLLYSEIKKSSSLKQNITILIPETHKTATGSSDNPTKKPEVRTNKKLLKNNDHKGVVVSTINFSTNVTAAKTKEMILKKLIRRTKDTLGAPKNNRILIFIDDMNMPVSDMYGAQPPLELIRQLLDLGGVYDTEKNTWKNIQDLSIVAACVPVVNDISP

SEQ ID NO: 26069 - protein, 3507 aa, Homo sapiens
  Payload ID: 5154
  Gene Symbol: DNAH14
  Gene Name: dynein, axonemal, heavy chain 14
  Uniprot ID: Q0VDD8
  ENSP ID: ENSP00000409472
MGRRSQWIWAMRCQMLVPVLSLHIGLARALGCGCIASKIECLIRCNAPFPLLDAVGSVASQELQSLTGTVGVTSGAAAYPRWNLARARAPPHLPGTQDPLRRVRDPTPIVASSPGRRRGSWSGGYGQEASEPGVVGLCCAVLPIHPSLALAGVGGPDLRRFQEGPQRPSDHGAAEKHMETFIPIDLTTENQEMDKEETKTKPRLLRYEEKKYEDVKPLETQPAEIAEKETLEYKTVRTFSESLKSEKTEEPKDDDVIRNIIRLREKLGWQTILPQHSLKYGSSKIAIQKITLKKPLEDDGEFVYCLPRKSPKSLYNPYDLQVVSAHTAKHCKEFWVITASFISKLDSSRTYSLDEFCEEQLQQATQALKQLEDIRNKAISEMKSTFLKVAEKNEIKEYFESKLSEDDTTHFKLPKYRRLLETFFKFVMLVDYIFQELIRQLMNTAVTLLLELFNGSAGMPFSVEKKNENLIRTFKDNSFPTGKTTNDCEELVDNSKLHAISVQKSEVKTDTDINEILNSVEVGKDLRKTYAPIFEVNLCLRIPAESDSSENSKENFHESDQCPEECVMFEDEMSENKDNCVKKHSSEELLPKAKKSKEISYNLEDIISATITPLCQDPQLSIFIDLVSIMDLPNKTGSIIHYKEQTRWPDCHILFETDPAYQNIIVNLLTIIGNSMGLVNAYSHKFIKYCTMTEKAKIMSMKISSMGELTSKEFEAILNRFRNYFRHIVNMAIEKRIGIFNVVVESSLQQLECDPTEIEEFLEHFIFLNAISSKISKLEKEFLTMSQLYSVAKHHQIHISEEQIAIFQVLLLKFSQLKSSMKLSKINKDTAITKFRDNLEACISGLHVDVGNLKAKIRTPLLLCAGTQVSTAMEMIQTLSGEAASLTNKAKAYSHYQDCFSDSQSHMHSVNVEEITQIVLSEISDIEGDLTLRKKLWEAQEEWKRASWEWRNSSLQSIDVESVQRNVSKLMHIISVLEKEIYSIFIIPSIDDISAQLEESQVILATIKGSPHIGPIKSQIMFYNDCVKSFVSSYSREKLEKVHAGLMCHLEEVADLVVLDTSNSRTKAILGALLILYVHCRDIVINLLLKNIFNAEDFEWTRHLQYKWNEKQKLCYVSQGNASFTYGYEYLGCTSRLVITPLTDRCWLTLMEALHLNLGGCPAGPAGTGKTETVKDLAKCALFAFKCNTALIKLPNSLIVLTCFGLEKTVLVMNTVMSFRFVLEGKEIRINMSCAVFITMNPRYGGGVELPDNLKSLFRPVAMMVPHYQMIAEIILFSFGFKSANSLSGKLTNLYELARKQLSQQDHYNFGLRSLKIVLIMAGTKKREFKCDTSDSLSEADETLIVIEAIREASLPKCPPEDVPLFENIIGDIFPEVTVLKVNQLALEKVIYTATQQLGLQNWSSQKEKIIQFYNQLQVCVGVMLVGPTGGGKTTVRRILEKALTLLPIADFLSVAERKSASKISERKGKVDICVLNPKCVTLSELYGQLDPNTMEWTDGLLSATIRSYVYFNTPKNTKKDIDLRLKSRISDLSNVFKLDSSDTTETDDNIFEEIEKVVKIPENHNFDWQWIILDGPVDTFWVENLNSVLDDTRTLCLANSERIALTNKIRVIFEVDNLSQASPATVSRCAMVYMDPVDLGWEPYVKSWLLKTSKIISQSGVDCLEFMIKNSVTDGLQFIRNRQKFQPYPMEDITVVITLCRILDAFFDFMGKNGGFEQSDDLNDTSSKEANSQRESVTFKDIEKRDENTWYPEKNPDKLTKIIQKLFVFAFTWAFGGALNREDEHRENIPFCPSLEPDSLAKVTYDFDKLVHELFGNSSQVGINLPTGECSIFGYFVDIEQCEFIPWSDLVPNDQTLIQRDNPTKKPEVRTNKKLLKNNDHKGVVVSTINFSTNVTAAKTKEMILKKLIRRTKDTLGAPKNNRILIFIDDMNMPVSDMYGAQPPLELIRQLLDLGGVYDTEKNTWKNIQDLSIVAACVPVVNDISPRLLKHFSMLVLPHPSQDILCTIFQIGIDGCGKKTCATLACYLTDNKLYRVPISHKCAYIEFKEVFKKVFIHAGLKGKPTVLMVPNLNIEQDSFLEDLNYIISSGRIPDLFENVELDSIAMKIRYLTEQSGHMDNRQSLLSFFQKRIYKNLHIFVIMSPEGPSFRQNCRVYPSMISSCTIDWYERWPEEALLIVANSFLKEKVNFENRENLKEKLAPTCVQIHKSMKDLNRKYFEETGRFYYTTPNSYLQFMETFAHILRAREEEMQTKRDRFHMGLSTILEATTLVTEMQEELLILGPQVEQKTKETETLMEKLRKDSQVVEKVQMLVKQDEEIVAEEVRIVEDYAQKTANELKSVLPAFDKAIVALNALDKADVAELRVYTRPPFLVLTVMNAVCILLQKKPNWATAKLLLSETGFLKKLINLDKDSIPDKVFVKLKKIVTLPDFNPHKISLVSVACCSLCQWVIALNNYHEVQKVVGPKQIQVAEAQNVLKIARQRLAEKQRGLQLISRWHNQGLPHGQYSVENAILIKNGQQWPLLIDPHRQAHKWIRQMEGSRLQKLSIEDSNYTKKIENAMKTGGSVLLQSCQASTWRKKLYLSTEIDNPHFLPSVYNFVTMINFTVTFQGLQDQLLSTVVTHEVPHLEDQRSKLLESISLDAITLEELEEKTLNLLQKALGSILDDDKIVDTLRKSKMTSNEISKRIEATKKAESEIQAIRKNYLPIATRGALLYFLVADLTQINYMYQFSLDWFHQVFVSSVVSKSKEQEHSFKREKVSPKEVHEFISISKEPNLENEKNLLDKHIKSAIDMLTKSIFKVVSSALFNEDKLCFSFRLCTVIMQNNANGNLIQDDIGFLPEEEWNIFLYSGILINIKSALSQSRLTSTFEIGESQHLQWLSDSRWRQCQYVSTHLEPFSLLCKSLLSNVSQWDTFKNSKAVYSLISTPFSSENASLEENTKPPEEKHTFCLLLRAINHTGTDLGPVGRGQWLTSTACDRHTDVCSFSFALNDGVPDVEHVQDIFYGHCVDKYHVKVLRPESLNNSVRKFITEKMGNKYLQRTGVNLKDAYKGSNARTPLILIQTHGSASIKDYIHIIQSLPDDDLPEVLGIHPEAIRSCWETQGEKFIENLIAMQPKTTTANLMIRPEQSKDELVMEILSDLLKRLPLTVEKEEIAVGTPSTLKSMMSSSIWESLSKNLKDHDPLIHCVLLTFLKQEIKRFDKLLFVIHKSLKDLQLAIKGEIILTQELEEIFNSFLNMRVPTLWQKHAYRSCKPLSSWIDDLIQRLNFFNTWAKVAYTAIQRRYMRFVTVWKQSIPSTSQKCKHPEDSENNFFEGFPSRYWLPAFFFPQAFLAAVLQDYGRSRGIAVDALTFTHHVISNTTDKDEKFSVFMPKKLNIVRRAFKGSASSHTGVYIFGLFIEGARWNREQKILEDSLPLEMCCDFPDIYFLPTKISTKTPNASNQTDSELYAFECPVYQTPERSRILATTGLPTNFLTSVYLSTKKPPSHWITMRVALLCEKNEK

SEQ ID NO: 26070 - protein, 126 aa, Homo sapiens
  Payload ID: 5154
  Gene Symbol: DNAH14
  Gene Name: dynein, axonemal, heavy chain 14
  ENSP ID: ENSP00000409971
  MOD_RES (1)..(1): Any amino acid
XLEYKTVRTFSESLKSEKTEEPKDDDVIRNIIRLREKLGWQTILPQHSLKYGSSKIAIQKITLKKPLEDDGEFVYCLPRKSPKSLYNPYDLQVVSAHTAKHCKEFWVITASFISKRYLVICGAVYI

SEQ ID NO: 26071 - protein, 4515 aa, Homo sapiens; identical to SEQ ID NO: 26067
  Payload ID: 5154
  Gene Symbol: DNAH14
  Gene Name: dynein, axonemal, heavy chain 14
  Uniprot ID: Q0VDD8
  ENSP ID: ENSP00000414402

SEQ ID NO: 26072 - protein, 219 aa, Homo sapiens
  Payload ID: 5154
  Gene Symbol: DNAH14
  Gene Name: dynein, axonemal, heavy chain 14
  ENSP ID: ENSP00000414699
  MOD_RES (1)..(1): Any amino acid
XRFVTVWKQSIPSTSQKCKHPEDSENNFFEGFPSRYWLPAFFFPQAFLAAVLQDYGRSRGIAVDALTFTHHVISNTTDKDEKFSVFMPKKLNIVRRAFKGSASSHTGVYIFGLFIEGARWNREQKILEDSLPLEMCCDFPDIYFLPTKISTKTPNASNQTDSELYAFECPVYQTPERSRILATTGLPTNFLTSVYLSTKKPPSHWITMRVALLCEKNEK

SEQ ID NO: 26073 - protein, 68 aa, Homo sapiens
  Payload ID: 5154
  Gene Symbol: DNAH14
  Gene Name: dynein, axonemal, heavy chain 14
  ENSP ID: ENSP00000429122
AEGEGLVLPKKIRVRSAVEQWLVNVEKSMFDVLKKFLSQGIEDWNCQMFSQWVLSHPGQVVLTVTFAI

SEQ ID NO: 26074 - protein, 130 aa, Homo sapiens
  Payload ID: 5154
  Gene Symbol: DNAH14
  Gene Name: dynein, axonemal, heavy chain 14
  ENSP ID: ENSP00000429568
DYLEVKRLIFPRFYFLSNAELLDILADSRNPESVQPHLVKCFENIKQLLIWKQDIGPPAVKMLISAEGEGLVLPKYDKCYKLFRFCTTSLFKISALKFLIYYKSALSKLFLQRLYPYVNILLPFHIPYNT

SEQ ID NO: 26075 - protein, 4462 aa, Homo sapiens
  Payload ID: 5155
  Gene Symbol: DNAH17
  Gene Name: dynein, axonemal, heavy chain 17
  Uniprot ID: Q9UFH2
  ENSP ID: ENSP00000374490
MTMAPDVRLEYLEEVASIVLKFKPDKWSKLIGAEENVALFTEFFEKPDVQVLVLTLNAAGMIIPCLGFPQSLKSKGVYFIKTKSENINKDNYRARLLYGDISPTPVDQLIAVVEEVLSSLLNQSENMAGWPQVVSEDIVKQVHRLKNEMFVMSGKIKGKTLLPIPEHLGSLDGTLESMERIPSSLDNLLLHAIETTIIDWSHQIRDVLSKDSAQALLDGLHPLPQVEFEFWDTRLLNLKCIHEQLNRPKVNKIVEILEKAKSCYWPALQNVYTNVTEGLKEANDIVLYLKPLRILLEEMEQADFTMLPTFIAKVLDTICFIWATSEYYNTPARIIVILQEFCNQIIEMTRTFLSPEEVLKGLQGEIEEVLSGISLAVNVLKELYQTYDFCCVNMKLFFKDKEPVPWEFPSSLAFSRINSFFQRIQTIEELYKTAIEFLKLEKIELGGVRGNLLGSLVTRIYDEVFELVKVFADCKYDPLDPGDSNFDRDYADFEIKIQDLDRRLATIFCQGFDDCSCIKSSAKLLYMCGGLMERPLILAEVAPRYSVMLELFDAELDNAKILYDAQMAASEEGNIPLIHKNMPPVAGQLKWSLELQERLEVSMKHLKHVEHPVMSGAEAKLTYQKYDEMMELLRCHREKIYQQWVAGVDQDCHFNLGQPLILRDAASNLIHVNFSKALVAVLREVKYLNFQQQKEIPDSAESLFSENETFRKFVGNLELIVGWYNEIKTIVKAVEFLLIKSELEAIDVKLLSAETTLFWNGEGVFQYIQEVREILHNLQNRMQKAKQNIEGISQAMKDWSANPLFERKDNKKEALLDLDGRIANLNKRYAAVRDAGVKIQAMVAENAELFRADTLSLPWKDYVIYIDDMVLDEFDQFIRKSLSFLMDNMVIDESIAPLFEIRMELDEDGLTFNPTLEVGSDRGFLALIEGLVNDIYNVARLIPRLAKDRMNYKMDLEDNTDLIEMREEVSSLVINAMKEAEEYQDSFERYSYLWTDNLQEFMKNFLIYGCAVTAEDLDTWTDDTIPKTPPTLAQFQEQIDSYEKLYEEVSKCENTKVFHGWLQCDCRPFKQALLSTIRRWGFMFKRHLSNHVTNSLADLEAFMKVARMGLTKPLKEGDYDGLVEVMGHLMKVKERQAATDNMFEPLKQTIELLKTYGEEMPEEIHLKLQELPEHWANTKKLAIQVKLTVAPLQANEVSILRRKCQQFELKQHEFRERFRREAPFSFSDPNPYKSLNKQQKSISAMEGIMEALSKSGGLFEVPVPDYKQLKACHREVRLLKELWDMVVVVNTSIEDWKTTKWKDINVEQMDIDCKKFAKDMRSLDKEMKTWDAFVGLDNTVKNVITSLRAVSELQNPAIRERHWQQLMQATQVKFKMSEETTLADLLQLNLHSYEDEVRNIVDKAVKESGMEKVLKALDSTWSMMEFQHEPHPRTGTMMLKSSEVLVETLEDNQVQLQNLMMSKYLAHFLKEVTSWQQKLSTADSVISIWFEVQRTWSHLESIFIGSEDIRTQLPGDSQRFDDINQEFKALMEDAVKTPNVVEATSKPGLYNKLEALKKSLAICEKALAEYLETKRLAFPRFYFVSSADLLDILSNGNDPVEVSRHLSKLFDSLCKLKFRLDASDKPLKVGLGMYSKEDEYMVFDQECDLSGQVEVWLNRVLDRMCSTLRHEIPEAVVTYEEKPREQWILDYPAQVALTCTQIWWTTEVGLAFARLEEGYENAIRDYNKKQISQLNVLITLLMGNLNAGDRMKIMTICTIDVHARDVVAKMIVAKVESSQAFTWQAQLRHRWDEEKRHCFANICDAQIQYSYEYLGNTPRLVITPLTDRCYITLTQSLHLIMGGAPAGPAGTGKTETTKDLGRALGTMVYVFNCSEQMDYKSCGNIYKGLAQTGAWGCFDEFNRISVEVLSVIAVQVKCVQDAIRAKKKAFNFLGEIIGLIPTVGIFITMNPGYAGRAELPENLKALFRPCAMVVPDFELICEIMLMAEGFLEARLLARKFITLYTLCKELLSKQDHYDWGLRAIKSVLVVAGSLKRGDPSRAEDQVLMRALRDFNIPKIVTDDLPVFMGLIGDLFPALDVPRKRDLNFEKIIKQSIVELKLQAEDSFVLKVVQLEELLQVRHSVFIVGNAGSGKSQVLKSLNKTYQNLKRKPVAVDLDPKAVTCDELFGIINPVTREWKDGLFSTIMRDLANITHDGPKWIILDGDIDPMWIESLNTVMDDNKVLTLASNERIPLNRTMRLVFEISHLRTATPATVSRAGILYINPADLGWNPVVSSWIERRKVQSEKANLMILFDKYLPTCLDKLRFGFKKITPVPEITVIQTILYLLECLLTEKTVPPDSPRELYELYFVFTCFWAFGGAMFQDQLVDYRVEFSKWWINEFKTIKFPSQGTIFDYYIDPDTKKFLPWTDKVPSFELDPDVPLQASLVHTTETIRIRYFMDLLMEKSWPVMLVGNAGTGKSVLMGDKLESLNTDNYLVQAVPFNFYTTSAMLQGVLEKPLEKKSGRNYGPPGTKKLVYFIDDMNMPEVDKYGTVAPHTLIRQHMDHRHWYDRHKLTLKDIHNCQYVACMNPTSGSFTIDSRLQRHFCVFAVSFPGQEALTTIYNTILTQHLAFRSVSMAIQRISSQLVAAALALHQKITATFLPTAIKFHYVFNLRDLSNIFQGLLFSTAEVLKTPLDLVRLWLHETERVYGDKMVDEKDQETLHRVTMASTKKFFDDLGDELLFAKPNIFCHFAQGIGDPKYVPVTDMAPLNKLLVDVLDSYNEVNAVMNLVLFEDAVAHICRINRILESPRGNALLVGVGGSGKQSLSRLAAYISGLDVFQITLKKGYGIPDLKIDLAAQYIKAAVKNVPSVFLMTDSQVAEEQFLVLINDLLASGEIPGLFMEDEVENIISSMRPQVKSLGMNDTRETCWKFFIEKVRRQLKVILCFSPVGSVLRVRARKFPAVVNCTAIDWFHEWPEDALVSVSARFLEETEGIPWEVKASISFFMSYVHTTVNEMSRVYLATERRYNYTTPKTFLEQIKLYQNLLAKKRTELVAKIERLENGLMKLQSTASQVDDLKAKLAIQEAELKQKNESADQLIQVVGIEAEKVSKEKAIADQEEVKVEVINKNVTEKQKACETDLAKAEPALLAAQEALDTLNKNNLTELKSFGSPPDAVVNVTAAVMILTAPGGKIPKDKSWKAAKIMMGKVDTFLDSLKKFDKEHIPEACLKAFKPYQGNPTFDPEFIRSKSTAAAGLCSWCINIVRFYEVYCDVAPKRQALEEANAELAEAQEKLSRIKNKIAELNANLSNLTSAFEKATAEKIKCQQEADATNRVILLANRLVGGLASENIRWAESVENFRSQGVTLCGDVLLISAFVSYVGYFTKKYRNELMEKFWIPYIHNLKVPIPITNGLDPLSLLTDDADVATWNNQGLPSDRMSTENATILGNTERWPLIVDAQLQGIKWIKNKYRSELKAIRLGQKSYLDVIEQAISEGDTLLIENIGETVDPVLDPLLGRNTIKKGKYIKIGDKEVEYHPKFRLILHTKYFNPHYKPEMQAQCTLINFLVTRDGLEDQLLAAVVAKERPDLEQLKANLTKSQNEFKIVLKELEDSLLARLSAASGNFLGDTALVENLETTKHTASEIEEKVVEAKITEVKINEARENYRPAAERASLLYFILNDLNKINPVYQFSLKAFNVVFEKAIQRTTPANEVKQRVINLTDEITYSVYMYTARGLFERDKLIFLAQVTFQVLSMKKELNPVELDFLLRFPFKAGVVSPVDFLQHQGWGGIKALSEMDEFKNLDSDIEGSAKRWKKLVESEAPEKEIFPKEWKNKTALQKLCMVRCLRPDRMTYAIKNFVEEKMGSKFVEGRSVEFSKSYEESSPSTSIFFILSPGVDPLKDVEALGKKLGFTIDNGKLHNVSLGQGQEVVAENALDVAAEKGHWVILQNIHLVARWLGTLDKKLEHYSTGSHEDYRVFISAEPAPSPETHIIPQGILENAIKITNEPPTGMHANLHKALDLFTQDTLEMCTKEMEFKCMLFALCYFHAVVAERRKFGAQGWNRSYPFNNGDLTISINVLYNYLEANPKVPWDDLRYLFGEIMYGGHITDDWDRRLCRTYLAEYIRTEMLEGDVLLAPGFQIPPNLDYKGYHEYIDENLPPESPYLYGLHPNAEIGFLTVTSEKLFRTVLEMQPKETDSGAGTGVSREEKVKAVLDDILEKIPETFNMAEIMAKAAEKTPYVVVAFQECERMNILTNEMRRSLKELNLGLKGELTITTDVEDLSTALFYDTVPDTWVARAYPSMMGLAAWYADLLLRIRELEAWTTDFALPTTVWLAGFFNPQSFLTAIMQSMARKNEWPLDKMCLSVEVTKKNREDMTAPPREGSYVYGLFMEGARWDTQTGVIAEARLKELTPAMPVIFIKAIPVDRMETKNIYECPVYKTRIRGPTYVWTFNLKTKEKAAKWILAAVALLLQV

SEQ ID NO: 26076 - protein, 4457 aa, Homo sapiens
  Payload ID: 5155
  Gene Symbol: DNAH17
  Gene Name: dynein, axonemal, heavy chain 17
  ENSP ID: ENSP00000465516
MTMAPDVRLEYLEEVASIVLKFKPDKWSKLIGAEENVALFTEFFEKPDVQVLVLTLNAAGMIIPCLGFPQSLKSKGVYFIKTKSENINKDNYRARLLYGDISPTPVDQLIAVVEEVLSSLLNQSENMAGWPQVVSEDIVKQVHRLKNEMFVMSGKIKGKTLLPIPEHLGSLDGTLESMERIPSSLDNLLLHAIETTIIDWSHQIRDVLSKDSAQALLDGLHPLPQVEFEFWDTRLLNLKCIHEQLNRPKVNKIVEILEKAKSCYWPALQNVYTNVTEGLKEANDIVLYLKPLRILLEEMEQADFTMLPTFIAKVLDTICFIWATSEYYNTPARIIVILQEFCNQIIEMTRTFLSPEEVLKGLQGEIEEVLSGISLAVNVLKELYQTYDFCCVNMKLFFKDKEPVPWEFPSSLAFSRINSFFQRIQTIEELYKTAIEFLKLEKIELGGVRGNLLGSLVTRIYDEVFELVKVFADCKYDPLDPGDSNFDRDYADFEIKIQDLDRRLATIFCQGFDDCSCIKSSAKLLYMCGGLMERPLILAEVAPRYSVMLELFDAELDNAKILYDAQMAASEEGNIPLIHKNMPPVAGQLKWSLELQERLEVSMKHLKHVEHPVMSGAEAKLTYQKYDEMMELLRCHREKIYQQWVAGVDQDCHFNLGQPLILRDAASNLIHVNFSKALVAVLREVKYLNFQQQKEIPDSAESLFSENETFRKFVGNLELIVGWYNEIKTIVKAVEFLLIKSELEAIDVKLLSAETTLFWNGEGVFQYIQEVREILHNLQNRMQKAKQNIEGISQAMKDWSANPLFERKDNKKEALLDLDGRIANLNKRYAAVRDAGVKIQAMVAENAELFRADTLSLPWKDYVIYIDDMVLDEFDQFIRKSLSFLMDNMESIAPLFEIRMELDEDGLTFNPTLEVGSDRGFLALIEGLVNDIYNVARLIPRLAKDRMNYKMDLEDNTDLIEMREEVSSLVINAMKEAEEYQDSFERYSYLWTDNLQEFMKNFLIYGCAVTAEDLDTWTDDTIPKTPPTLAQFQEQIDSYEKLYEEVSKCENTKVFHGWLQCDCRPFKQALLSTIRRWGFMFKRHLSNHVTNSLADLEAFMKVARMGLTKPLKEGDYDGLVEVMGHLMKVKERQAATDNMFEPLKQTIELLKTYGEEMPEEIHLKLQELPEHWANTKKLAIQVKLTVAPLQANEVSILRRKCQQFELKQHEFRERFRREAPFSFSDPNPYKSLNKQQKSISAMEGIMEALSKSGGLFEVPVPDYKQLKACHREVRLLKELWDMVVVVNTSIEDWKTTKWKDINVEQMDIDCKKFAKDMRSLDKEMKTWDAFVGLDNTVKNVITSLRAVSELQNPAIRERHWQQLMQATQVKFKMSEETTLADLLQLNLHSYEDEVRNIVDKAVKESGMEKVLKALDSTWSMMEFQHEPHPRTGTMMLKSSEVLVETLEDNQVQLQNLMMSKYLAHFLKEVTSWQQKLSTADSVISIWFEVQRTWSHLESIFIGSEDIRTQLPGDSQRFDDINQEFKALMEDAVKTPNVVEATSKPGLYNKLEALKKSLAICEKALAEYLETKRLAFPRFYFVSSADLLDILSNGNDPVEVSRHLSKLFDSLCKLKFRLDASDKPLKVGLGMYSKEDEYMVFDQECDLSGQVEVWLNRVLDRMCSTLRHEIPEAVVTYEEKPREQWILDYPAQVALTCTQIWWTTEVGLAFARLEEGYENAIRDYNKKQISQLNVLITLLMGNLNAGDRMKIMTICTIDVHARDVVAKMIVVESSQAFTWQAQLRHRWDEEKRHCFANICDAQIQYSYEYLGNTPRLVITPLTDRCYITLTQSLHLIMGGAPAGPAGTGKTETTKDLGRALGTMVYVFNCSEQMDYKSCGNIYKGLAQTGAWGCFDEFNRISVEVLSVIAVQVKCVQDAIRAKKKAFNFLGEIIGLIPTVGIFITMNPGYAGRAELPENLKALFRPCAMVVPDFELICEIMLMAEGFLEARLLARKFITLYTLCKELLSKQDHYDWGLRAIKSVLVVAGSLKRGDPSRAEDQVLMRALRDFNIPKIVTDDLPVFMGLIGDLFPALDVPRKRDLNFEKIIKQSIVELKLQAEDSFVLKVVQLEELLQVRHSVFIVGNAGSGKSQVLKSLNKTYQNLKRKPVAVDLDPKAVTCDELFGIINPVTREWKDGLFSTIMRDLANITHDGPKWIILDGDIDPMWIESLNTVMDDNKVLTLASNERIPLNRTMRLVFEISHLRTATPATVSRAGILYINPADLGWNPVVSSWIERRKVQSEKANLMILFDKYLPTCLDKLRFGFKKITPVPEITVIQTILYLLECLLTEKTVPPDSPRELYELYFVFTCFWAFGGAMFQDQLVDYRVEFSKWWINEFKTIKFPSQGTIFDYYIDPDTKKFLPWTDKVPSFELDPDVPLQASLVHTTETIRIRYFMDLLMEKSWPVMLVGNAGTGKSVLMGDKLESLNTDNYLVQAVPFNFYTTSAMLQGVLEKPLEKKSGRNYGPPGTKKLVYFIDDMNMPEVDKYGTVAPHTLIRQHMDHRHWYDRHKLTLKDIHNCQYVACMNPTSGSFTIDSRLQRHFCVFAVSFPGQEALTTIYNTILTQHLAFRSVSMAIQRISSQLVAAALALHQKITATFLPTAIKFHYVFNLRDLSNIFQGLLFSTAEVLKTPLDLVRLWLHETERVYGDKMVDEKDQETLHRVTMASTKKFFDDLGDELLFAKPNIFCHFAQGIGDPKYVPVTDMAPLNKLLVDVLDSYNEVNAVMNLVLFEDAVAHICRINRILESPRGNALLVGVGGSGKQSLSRLAAYISGLDVFQITLKKGYGIPDLKIDLAAQYIKAAVKNVPSVFLMTDSQVAEEQFLVLINDLLASGEIPGLFMEDEVENIISSMRPQVKSLGMNDTRETCWKFFIEKVRRQLKVILCFSPVGSVLRVRARKFPAVVNCTAIDWFHEWPEDALVSVSARFLEETEGIPWEVKASISFFMSYVHTTVNEMSRVYLATERRYNYTTPKTFLEQIKLYQNLLAKKRTELVAKIERLENGLMKLQSTASQVDDLKAKLAIQEAELKQKNESADQLIQVVGIEAEKVSKEKAIADQEEVKVEVINKNVTEKQKACETDLAKAEPALLAAQEALDTLNKNNLTELKSFGSPPDAVVNVTAAVMILTAPGGKIPKDKSWKAAKIMMGKVDTFLDSLKKFDKEHIPEACLKAFKPYQGNPTFDPEFIRSKSTAAAGLCSWCINIVRFYEVYCDVAPKRQALEEANAELAEAQEKLSRIKNKIAELNANLSNLTSAFEKATAEKIKCQQEADATNRVILLANRLVGGLASENIRWAESVENFRSQGVTLCGDVLLISAFVSYVGYFTKKYRNELMEKFWIPYIHNLKVPIPITNGLDPLSLLTDDADVATWNNQGLPSDRMSTENATILGNTERWPLIVDAQLQGIKWIKNKYRSELKAIRLGQKSYLDVIEQAISEGDTLLIENIGETVDPVLDPLLGRNTIKKGKYIKIGDKEVEYHPKFRLILHTKYFNPHYKPEMQAQCTLINFLVTRDGLEDQLLAAVVAKERPDLEQLKANLTKSQNEFKIVLKELEDSLLARLSAASGNFLGDTALVENLETTKHTASEIEEKVVEAKITEVKINEARENYRPAAERASLLYFILNDLNKINPVYQFSLKAFNVVFEKAIQRTTPANEVKQRVINLTDEITYSVYMYTARGLFERDKLIFLAQVTFQVLSMKKELNPVELDFLLRFPFKAGVVSPVDFLQHQGWGGIKALSEMDEFKNLDSDIEGSAKRWKKLVESEAPEKEIFPKEWKNKTALQKLCMVRCLRPDRMTYAIKNFVEEKMGSKFVEGRSVEFSKSYEESSPSTSIFFILSPGVDPLKDVEALGKKLGFTIDNGKLHNVSLGQGQEVVAENALDVAAEKGHWVILQNIHLVARWLGTLDKKLEHYSTGSHEDYRVFISAEPAPSPETHIIPQGILENAIKITNEPPTGMHANLHKALDLFTQDTLEMCTKEMEFKCMLFALCYFHAVVAERRKFGAQGWNRSYPFNNGDLTISINVLYNYLEANPKVPWDDLRYLFGEIMYGGHITDDWDRRLCRTYLAEYIRTEMLEGDVLLAPGFQIPPNLDYKGYHEYIDENLPPESPYLYGLHPNAEIGFLTVTSEKLFRTVLEMQPKETDSGAGTGVSREEKVKAVLDDILEKIPETFNMAEIMAKAAEKTPYVVVAFQECERMNILTNEMRRSLKELNLGLKGELTITTDVEDLSTALFYDTVPDTWVARAYPSMMGLAAWYADLLLRIRELEAWTTDFALPTTVWLAGFFNPQSFLTAIMQSMARKNEWPLDKMCLSVEVTKKNREDMTAPPREGSYVYGLFMEGARWDTQTGVIAEARLKELTPAMPVIFIKAIPVDRMETKNIYECPVYKTRIRGPTYVWTFNLKTKEKAAKWILAAVALLLQV

SEQ ID NO: 26077 - protein, 1563 aa, Homo sapiens
  Payload ID: 5155
  Gene Symbol: DNAH17
  Gene Name: dynein, axonemal, heavy chain 17
  ENSP ID: ENSP00000466150
  MOD_RES (1)..(1): Any amino acid
XEGRTEGEGKPGPARAVPAETACVTSGTRLGSRIRNLQIDLAAQYIKAAVKNVPSVFLMTDSQVAEEQFLVLINDLLASGEIPGLFMEDEVENIISSMRPQVKSLGMNDTRETCWKFFIEKVRRQLKVILCFSPVGSVLRVRARKFPAVVNCTAIDWFHEWPEDALVSVSARFLEETEGIPWEVKASISFFMSYVHTTVNEMSRVYLATERRYNYTTPKTFLEQIKLYQNLLAKKRTELVAKIERLENGLMKLQSTASQVDDLKAKLAIQEAELKQKNESADQLIQVVGIEAEKVSKEKAIADQEEVKVEVINKNVTEKQKACETDLAKAEPALLAAQEALDTLNKNNLTELKSFGSPPDAVVNVTAAVMILTAPGGKIPKDKSWKAAKIMMGKVDTFLDSLKKFDKEHIPEACLKAFKPYQGNPTFDPEFIRSKSTAAAGLCSWCINIVRFYEVYCDVAPKRQALEEANAELAEAQEKLSRIKNKIAELNANLSNLTSAFEKATAEKIKCQQEADATNRVILLANRLVGGLASENIRWAESVENFRSQGVTLCGDVLLISAFVSYVGYFTKKYRNELMEKFWIPYIHNLKVPIPITNGLDPLSLLTDDADVATWNNQGLPSDRMSTENATILGNTERWPLIVDAQLQGIKWIKNKYRSELKAIRLGQKSYLDVIEQAISEGDTLLIENIGETVDPVLDPLLGRNTIKKGKYIKIGDKEVEYHPKFRLILHTKYFNPHYKPEMQAQCTLINFLVTRDGLEDQLLAAVVAKERPDLEQLKANLTKSQNEFKIVLKELEDSLLARLSAASGNFLGDTALVENLETTKHTASEIEEKVVEAKITEVKINEARENYRPAAERASLLYFILNDLNKINPVYQFSLKAFNVVFEKAIQRTTPANEVKQRVINLTDEITYSVYMYTARGLFERDKLIFLAQVTFQVLSMKKELNPVELDFLLRFPFKAGVVSPVDFLQHQGWGGIKALSEMDEFKNLDSDIEGSAKRWKKLVESEAPEKEIFPKEWKNKTALQKLCMVRCLRPDRMTYAIKNFVEEKMGSKFVEGRSVEFSKSYEESSPSTSIFFILSPGVDPLKDVEALGKKLGFTIDNGKLHNVSLGQGQEVVAENALDVAAEKGHWVILQNIHLVARWLGTLDKKLEHYSTGSHEDYRVFISAEPAPSPETHIIPQGILENAIKITNEPPTGMHANLHKALDLFTQDTLEMCTKEMEFKCMLFALCYFHAVVAERRKFGAQGWNRSYPFNNGDLTISINVLYNYLEANPKVPWDDLRYLFGEIMYGGHITDDWDRRLCRTYLAEYIRTEMLEGDVLLAPGFQIPPNLDYKGYHEYIDENLPPESPYLYGLHPNAEIGFLTVTSEKLFRTVLEMQPKETDSGAGTGVSREEKVKAVLDDILEKIPETFNMAEIMAKAAEKTPYVVVAFQECERMNILTNEMRRSLKELNLGLKGELTITTDVEDLSTALFYDTVPDTWVARAYPSMMGLAAWYADLLLRIRRLVCPCRNSRPGRQTLPCPPPCGWPASSTPSRSSRPSCSPWPGRTSGPWTRCVCLSR

SEQ ID NO: 26078 - protein, 4427 aa, Homo sapiens
  Payload ID: 5156
  Gene Symbol: DNAH2
  Gene Name: dynein, axonemal, heavy chain 2
  Uniprot ID: Q9P225
  ENSP ID: ENSP00000373825
MSSKAEKKQRLSGRGSSQASWSGRATRAAVATQEQGNAPAVSEPELQAELPKEEPEPRLEGPQAQSEESVEPEADVKPLFLSRAALTGLADAVWTQEHDAILEHFAQDPTESILTIFIDPCFGLKLELGMPVQTQNQLVYFIRQAPVPITWENFEATVQFGTVRGPYIPALLRLLGGVFAPQIFANTGWPESIRNHFASHLHKFLACLTDTRYKLEGHTVLYIPAEAMNMKPEMVIKDKELVQRLETSMIHWTRQIKEMLSAQETVETGENLGPLEEIEFWRNRCMDLSGISKQLVKKGVKHVESILHLAKSSYLAPFMKLAQQIQDGSRQAQSNLTFLSILKEPYQELAFMKPKDISSKLPKLISLIRIIWVNSPHYNTRERLTSLFRKVCDCQYHFARWEDGKQGPLPCFFGAQGPQITRNLLEIEDIFHKNLHTLRAVRGGILDVKNTCWHEDYNKFRAGIKDLEVMTQNLITSAFELVRDVPHGVLLLDTFHRLASREAIKRTYDKKAVDLYMLFNSELALVNRERNKKWPDLEPYVAQYSGKARWVHILRRRIDRVMTCLAGAHFLPRIGTGKESVHTYQQMVQAIDELVRKTFQEWTSSLDKDCIRRLDTPLLRISQEKAGMLDVNFDKSLLILFAEIDYWERLLFETPHYVVNVAERAEDLRILRENLLLVARDYNRIIAMLSPDEQALFKERIRLLDKKIHPGLKKLHWALKGASAFFITECRIHASKVQMIVNEFKASTLTIGWRAQEMSEKLLVRISGKRVYRDLEFEEDQREHRAAVQQKLMNLHQDVVTIMTNSYEVFKNDGPEIQQQWMLYMIRLDRMMEDALRLNVKWSLLELSKAINGDGKTSPNPLFQVLVILKNDLQGSVAQVEFSPTLQTLAGVVNDIGNHLFSTISVFCHLPDILTKRKLHREPIQTVVEQDEDIKKIQTQISSGMTNNASLLQNYLKTWDMYREIWEINKDSFIHRYQRLNPPVSSFVADIARYTEVANNVQKEETVTNIQFVLLDCSHLKFSLVQHCNEWQNKFATLLREMAAGRLLELHTYLKENAEKISRPPQTLEELGVSLQLVDALKHDLANVETQIPPIHEQFAILEKYEVPVEDSVLEMLDSLNGEWVVFQQTLLDSKQMLKKHKEKFKTGLIHSADDFKKKAHTLLEDFEFKGHFTSNVGYMSALDQITQVRAMLMAMREEENSLRANLGIFKIEQPPSKDLQNLEKELDALQQIWEIARDWEENWNEWKTGRFLILQTETMETTAHGLFRRLTKLAKEYKDRNWEIIETTRSKIEQFKRTMPLISDLRNPALRERHWDQVRDEIQREFDQESESFTLEQIVELGMDQHVEKIGEISASATKELAIEVALQNIAKTWDVTQLDIVPYKDKGHHRLRGTEEVFQALEDNQVALSTMKASRFVKAFEKDVDHWERCLSLILEVIEMILTVQRQWMYLENIFLGEDIRKQLPNESTLFDQVNSNWKAIMDRMNKDNNALRSTHHPGLLDTLIEMNTILEDIQKSLDMYLETKRHIFPRFYFLSNDDLLEILGQSRNPEAVQPHLKKCFDNIKLLRIQKVGGPSSKWEAVGMFSGDGEYIDFLHSVFLEGPVESWLGDVEQTMRVTLRDLLRNCHLALRKFLNKRDKWVKEWAGQVVITASQIQWTADVTKCLLTAKERADKKILKVMKKNQVSILNKYSEAIRGNLTKIMRLKIVALVTIEIHARDVLEKLYKSGLMDVNSFDWLSQLRFYWEKDLDDCVIRQTNTQFQYNYEYLGNSGRLVITPLTDRCYMTLTTALHLHRGGSPKGPAGTGKTETVKDLGKALGIYVIVVNCSEGLDYKSMGRMYSGLAQTGAWGCFDEFNRINIEVLSVVAHQILCILSALAAGLTHFHFDGFEINLVWSCGIFITMNPGYAGRTELPENLKSMFRPIAMVVPDSTLIAEIILFGEGFGNCKILAKKVYTLYSLAVQQLSRQDHYDFGLRALTSLLRYAGKKRRLQPDLTDEEVLLLSMRDMNIAKLTSVDAPLFNAIVQDLFPNIELPVIDYGKLRETVEQEIRDMGLQSTPFTLTKVFQLYETKNSRHSTMIVGCTGSGKTASWRILQASLSSLCRAGDPNFNIVREFPLNPKALSLGELYGEYDLSTNEWTDGILSSVMRTACADEKPDEKWILFDGPVDTLWIENMNSVMDDNKVLTLINGERIAMPEQVSLLFEVEDLAMASPATVSRCGMVYTDYADLGWKPYVQSWLEKRPKAEVEPLQRMFEKLINKMLAFKKDNCKELVPLPEYSGITSLCKLYSALATPENGVNPADGENYVTMVEMTFVFSMIWSVCASVDEEGRKRIDSYLREIEGSFPNKDTVYEYFVDPKIRSWTSFEDKLPKSWRYPPNAPFYKIMVPTVDTVRYNYLVSSLVANQNPILLVGPVGTGKTSIAQSVLQSLPSSQWSVLVVNMSAQTTSNNVQSIIESRVEKRTKGVYVPFGGKSMITFMDDLNMPAKDMFGSQPPLELIRLWIDYGFWYDRTKQTIKYIREMFLMAAMGPPGGGRTVISPRLRSRFNIINMTFPTKSQIIRIFGTMINQKLQDFEEEVKPIGNVVTEATLDMYNTVVQRFLPTPTKMHYLFNLRDISKVFQGMLRANKDFHDTKSSITRLWIHECFRVFSDRLVDAADTEAFMGIISDKLGSFFDLTFHHLCPSKRPPIFGDFLKEPKVYEDLTDLTVLKTVMETALNEYNLSPSVVPMQLVLFREAIEHITRIVRVIGQPRGNMLLVGIGGSGRQSLARLASSICDYTTFQIEVTKHYRKQEFRDDIKRLYRQAGVELKTTSFIFVDTQIADESFLEDINNILSSGEVPNLYKPDEFEEIQSHIIDQARVEQVPESSDSLFAYLIERVQNNLHIVLCLSPMGDPFRNWIRQYPALVNCTTINWFSEWPQEALLEVAEKCLIGVDLGTQENIHRKVAQIFVTMHWSVAQYSQKMLLELRRHNYVTPTKYLELLSGYKKLLGEKRQELLAQANKLRTGLFKIDETREKVQVMSLELEDAKKKVAEFQKQCEEYLVIIVQQKREADEQQKAVTANSEKIAVEEIKCQALADNAQKDLEEALPALEEAMRALESLNKKDIGEIKSYGRPPAQVEIVMQAVMILRGNEPTWAEAKRQLGEQNFIKSLINFDKDNISDKVLKKIGAYCAQPDFQPDIIGRVSLAAKSLCMWVRAMELYGRLYRVVEPKRIRMNAALAQLREKQAALAEAQEKLREVAEKLEMLKKQYDEKLAQKEELRKKSEEMELKLERAGMLVSGLAGEKARWEETVQGLEEDLGYLVGDCLLAAAFLSYMGPFLTNYRDEIVNQIWIGKIWELQVPCSPSFAIDNFLCNPTKVRDWNIQGLPSDAFSTENGIIVTRGNRWALMIDPQAQALKWIKNMEGGQGLKIIDLQMSDYLRILEHAIHFGYPVLLQNVQEYLDPTLNPMLNKSVARIGGRLLMRIGDKEVEYNTNFRFYITTKLSNPHYSPETSAKTTIVNFAVKEQGLEAQLLGIVVRKERPELEEQKDSLVINIAAGKRKLKELEDEILRLLNEATGSLLDDVQLVNTLHTSKITATEVTEQLETSETTEINTDLAREAYRPCAQRASILFFVLNDMGCIDPMYQFSLDAYISLFILSIDKSHRSNKLEDRIDYLNDYHTYAVYRYTCRTLFERHKLLFSFHMCAKILETSGKLNMDEYNFFLRGGVVLDREGQMDNPCSSWLADAYWDNITELDKLTNFHGLMNSFEQYPRDWHLWYTNAAPEKAMLPGEWENACNEMQRMLIVRSLRQDRVAFCVTSFIITNLGSRFIEPPVLNMKSVLEDSTPRSPLVFILSPGVDPTSALLQLAEHMGMAQRFHALSLGQGQAPIAARLLREGVTQGHWVFLANCHLSLSWMPNLDKLVEQLQVEDPHPSFRLWLSSIPHPDFPISILQVSIKMTTEPPKGLKANMTRLYQLMSEPQFSRCSKPAKYKKLLFSLCFFHSVLLERKKFLQLGWNIIYGFNDSDFEVSENLLSLYLDEYEETPWDALKYLIAGINYGGHVTDDWDRRLLTTYINDYFCDQSLSTPFHRLSALETYFIPKDGSLASYKEYISLLPGMDPPEAFGQHPNADVASQITEAQTLFDTLLSLQPQITPTRAGGQTREEKVLELAADVKQKIPEMIDYEGTQKLLALDPSPLNVVLLQEIQRYNTLMQTILFSLTDLEKGIQGLIVMSTSLEEIFNCIFDAHVPPLWGKAYPSQKPLAAWTRDLAMRVEQFELWASRARPPVIFWLSGFTFPTGFLTAVLQSSARQNNVSVDSLSWEFIVSTVDDSNLVYPPKDGVWVRGLYLEGAGWDRKNSCLVEAEPMQLVCLMPTIHFRPAESRKKSAKGMYSCPCYYYPNRAGSSDRASFVIGIDLRSGAMTPDHWIKRGTALLMSLDS

SEQ ID NO: 26079 - protein, 4427 aa, Homo sapiens; identical to SEQ ID NO: 26078
  Payload ID: 5156
  Gene Symbol: DNAH2
  Gene Name: dynein, axonemal, heavy chain 2
  Uniprot ID: Q9P225
  ENSP ID: ENSP00000458355

SEQ ID NO: 26080 - protein, 872 aa, Homo sapiens
  Payload ID: 5156
  Gene Symbol: DNAH2
  Gene Name: dynein, axonemal, heavy chain 2
  Uniprot ID: Q9P225
  ENSP ID: ENSP00000460245
MSSKAEKKQRLSGRGSSQASWSGRATRAAVATQEQGNAPAVSEPELQAELPKEEPEPRLEGPQAQSEESVEPEADVKPLFLSRAALTGLADAVWTQEHDAILEHFAQDPTESILTIFIDPCFGLKLELGMPVQTQNQLVYFIRQAPVPITWENFEATVQFGTVRGPYIPALLRLLGGVFAPQIFANTGWPESIRNHFASHLHKFLACLTDTRYKLEGHTVLYIPAEAMNMKPEMVIKDKELVQRLETSMIHWTRQIKEMLSAQETVETGENLGPLEEIEFWRNRCMDLSGISKQLVKKGVKHVESILHLAKSSYLAPFMKLAQQIQDGSRQAQSNLTFLSILKEPYQELAFMKPKDISSKLPKLISLIRIIWVNSPHYNTRERLTSLFRKMSNEIIRLCCHAISLDRIFEGYVSSSKEDLQGCILCCHAWKDHYVQAVQMHIQFSSRGWVLDQTSIFAQVDAFVQRCKDLIEVCDCQYHFARWEDGKQGPLPCFFGAQGPQITRNLLEIEDIFHKNLHTLRAVRGGILDVKNTCWHEDYNKFRAGIKDLEVMTQNLITSAFELVRDVPHGVLLLDTFHRLASREAIKRTYDKKAVDLYMLFNSELALVNRERNKKWPDLEPYVAQYSGKARWVHILRRRIDRVMTCLAGAHFLPRIGTGKESVHTYQQMVQAIDELVRKTFQEWTSSLDKDCIRRLDTPLLRISQEKAGMLDVNFDKYRSHLAPFPYTPLLQLSQEFHSHLLTPLFIILSLSHTICLLSSFYFFFSSFIFVSPHLPPCYQHFNFTTYLKTQQNKTMIGQARWLTPVIPALWEAEVGASLEPRSLRTAWATWQNPVSAKNTKISWAWWHKPVVSATWEGEVGGSPEPGRQRLQ

SEQ ID NO: 26081 - protein, 261 aa, Homo sapiens
  Payload ID: 5156
  Gene Symbol: DNAH2
  Gene Name: dynein, axonemal, heavy chain 2
  ENSP ID: ENSP00000461273
  MOD_RES (1)..(1): Any amino acid
XDEDIKKIQTQISSGMTNNASLLQNYLKTWDMYREIWEINKDSFIHRYQRLNPPVSSFVADIARYTEVANNVQKEETVTNIQFVLLDCSHLKFSLVQHCNEWQNKFATLLREMAAGRLLELHTYLKENAEKISRPPQTLEELGVSLQLVDALKHDLANVETQIPPIHEQFAILEKYEVPVEDSVLEMLDSLNGEWVVFQQTLLDSKQMLKKHKEKFKTGLIHSADDFKKKAHTLLEDFEFKGARCPPANLGDRTRLGGELE

SEQ ID NO: 26082 - protein, 1158 aa, Homo sapiens
  Payload ID: 5156
  Gene Symbol: DNAH2
  Gene Name: dynein, axonemal, heavy chain 2
  ENSP ID: ENSP00000461726
KIDETREKVQVMSLELEDAKKKVAEFQKQCEEYLVIIVQQKREADEQQKALESLNKKDIGEIKSYGRPPAQVEIVMQAVMILRGNEPTWAEAKRQLGEQNFIKSLINFDKDNISDKVLKKIGAYCAQPDFQPDIIGRVSLAAKSLCMWVRAMELYGRLYRVVEPKRIRMNAALAQLREKQAALAEAQEKLREVAEKLEMLKKQYDEKLAQKEELRKKSEEMELKLERAGMLVSGLAGEKARWEETVQGLEEDLGYLVGDCLLAAAFLSYMGPFLTNYRDEIVNQIWIGKIWELQVPCSPSFAIDNFLCNPTKVRDWNIQGLPSDAFSTENGIIVTRGNRWALMIDPQAQALKWIKNMEGGQGLKIIDLQMSDYLRILEHAIHFGYPVLLQNVQEYLDPTLNPMLNKSVARIGGRLLMRIGDKEVEYNTNFRFYITTKLSNPHYSPETSAKTTIVNFAVKEQGLEAQLLGIVVRKERPELEEQKDSLVINIAAGKRKLKELEDEILRLLNEATGSLLDDVQLVNTLHTSKITATEVTEQLETSETTEINTDLAREAYRPCAQRASILFFVLNDMGCIDPMYQFSLDAYISLFILSIDKSHRSNKLEDRIDYLNDYHTYAVYRYTCRTLFERHKLLFSFHMCAKILETSGKLNMDEYNFFLRGGVVLDREGQMDNPCSSWLADAYWDNITELDKLTNFHGLMNSFEQYPRDWHLWYTNAAPEKAMLPGEWENACNEMQRMLIVRSLRQDRVAFCVTSFIITNLGSRFIEPPVLNMKSVLEDSTPRSPLVFILSPGVDPTSALLQLAEHMGMAQRFHALSLGQGQAPIAARLLREGVTQGHWVFLANCHLSLSWMPNLDKLVEQLQVEDPHPSFRLWLSSIPHPDFPISILQVSIKMTTEPPKGLKANMTRLYQLMSEPQFSRCSKPAKYKKLLFSLCFFHSVLLERKKFLQLGWNIIYGFNDSDFEVSENLLSLYLDEYEETPWDALKYLIAGINYGGHVTDDWDRRLLTTYINDYFCDQSLSTPFHRLSALETYFIPKDGSLASYKEYISLLPGMDPPEAFGQHPNADVASQITEAQTLFDTLLSLQPQITPTRAGGQTREEKVLELAADVKQKIPEMIDYEGTQKLLALDPSPLNVVLLQEIQRYNTLMQTILFSLTD

SEQ ID NO: 26083 - protein, 4116 aa, Homo sapiens
  Payload ID: 5157
  Gene Symbol: DNAH3
  Gene Name: dynein, axonemal, heavy chain 3
  Uniprot ID: Q8TD57
  ENSP ID: ENSP00000261383
MGATGRLELTLAAPPHPGPAFQRSKARETQGEEEGSEMQIAKSDSIHHMSHSQGQPELPPLPASANEEPSGLYQTVMSHSFYPPLMQRTSWTLAAPFKEQHHHRGPSDSIANNYSLMAQDLKLKDLLKVYQPATISVPRDRTGQGLPSSGNRSSSEPMRKKTKFSSRNKEDSTRIKLAFKTSIFSPMKKEVKTSLTFPGSRPMSPEQQLDVMLQQEMEMESKEKKPSESDLERYYYYLTNGIRKDMIAPEEGEVMVRISKLISNTLLTSPFLEPLMVVLVQEKENDYYCSLMKSIVDYILMDPMERKRLFIESIPRLFPQRVIRAPVPWHSVYRSAKKWNEEHLHTVNPMMLRLKELWFAEFRDLRFVRTAEILAGKLPLQPQEFWDVIQKHCLEAHQTLLNKWIPTCAQLFTSRKEHWIHFAPKSNYDSSRNIEEYFASVASFMSLQLRELVIKSLEDLVSLFMIHKDGNDFKEPYQEMKFFIPQLIMIKLEVSEPIIVFNPSFDGCWELIRDSFLEIIKNSNGIPKLKYIPLKFSFTAAAADRQCVKAAEPGEPSMHAAATAMAELKGYNLLLGTVNAEEKLVSDFLIQTFKVFQKNQVGPCKYLNVYKKYVDLLDNTAEQNIAAFLKENHDIDDFVTKINAIKKRRNEIASMNITVPLAMFCLDATALNHDLCERAQNLKDHLIQFQVDVNRDTNTSICNQYSHIADKVSEVPANTKELVSLIEFLKKSSAVTVFKLRRQLRDASERLEFLMDYADLPYQIEDIFDNSRNLLLHKRDQAEMDLIKRCSEFELRLEGYHRELESFRKREVMTTEEMKHNVEKLNELSKNLNRAFAEFELINKEEELLEKEKSTYPLLQAMLKNKVPYEQLWSTAYEFSIKSEEWMNGPLFLLNAEQIAEEIGNMWRTTYKLIKTLSDVPAPRRLAENVKIKIDKFKQYIPILSISCNPGMKDRHWQQISEIVGYEIKPTETTCLSNMLEFGFGKFVEKLEPIGAAASKEYSLEKNLDRMKLDWVNVTFSFVKYRDTDTNILCAIDDIQMLLDDHVIKTQTMCGSPFIKPIEAECRKWEEKLIRIQDNLDAWLKCQATWLYLEPIFSSEDIIAQMPEEGRKFGIVDSYWKSLMSQAVKDNRILVAADQPRMAEKLQEANFLLEDIQKGLNDYLEKKRLFFPRFFFLSNDELLEILSETKDPLRVQPHLKKCFEGIAKLEFTDNLEIVGMISSEKETVPFIQKIYPANAKGMVEKWLQQVEQMMLASMREVIGLGIEAYVKVPRNHWVLQWPGQVVICVSSIFWTQEVSQALAENTLLDFLKKSNDQIAQIVQLVRGKLSSGARLTLGALTVIDVHARDVVAKLSEDRVSDLNDFQWISQLRYYWVAKDVQVQIITTEALYGYEYLGNSPRLVITPLTDRCYRTLMGALKLNLGGAPEGPAGTGKTETTKDLAKALAKQCVVFNCSDGLDYKAMGKFFKGLAQAGAWACFDEFNRIEVEVLSVVAQQILSIQQAIIRKLKTFIFEGTELSLNPTCAVFITMNPGYAGRAELPDNLKALFRTVAMMVPDYALIGEISLYSMGFLDSRSLAQKIVATYRLCSEQLSSQHHYDYGMRAVKSVLTAAGNLKLKYPEENESVLLLRALLDVNLAKFLAQDVPLFQGIISDLFPGVVLPKPDYEVFLKVLNDNIKKMKLQPVPWFIGKIIQIYEMMLVRHGYMIVGDPMGGKTSAYKVLAAALGDLHAANQMEEFAVEYKIINPKAITMGQLYGCFDQVSHEWMDGVLANAFREQASSLSDDRKWIIFDGPVDAIWIENMNTVLDDNKKLCLMSGEIIQMNSKMSLIFEPADLEQASPATVSRCGMIYMEPHQLGWKPLKDSYMDTLPSSLTKEHKELVNDMFMWLVQPCLEFGRLHCKFVVQTSPIHLAFSMMRLYSSLLDEIRAVEEEEMELGEGLSSQQIFLWLQGLFLFSLVWTVAGTINADSRKKFDVFFRNLIMGMDDNHPRPKSVKLTKNNIFPERGSIYDFYFIKQASGHWETWTQYITKEEEKVPAGAKVSELIIPTMETARQSFFLKTYLDHEIPMLFVGPTGTGKSAITNNFLLHLPKNTYLPNCINFSARTSANQTQDIIMSKLDRRRKGLFGPPIGKKAVVFVDDLNMPAKEVYGAQPPIELLRQWIDHGYWFDKKDTTRLDIVDMLLVTAMGPPGGGRNDITGRFTRHLNIISINAFEDDILTKIFSSIVDWHFGKGFDVMFLRYGKMLVQATKTIYRDAVENFLPTPSKSHYVFNLRDFSRVIQGVLLCPHTHLQDVEKCIRLWIHEVYRVFYDRLIDKEDRQVFFNMVKETTSNCFKQTIEKVLIHLSPTGKIVDDNIRSLFFGDYFKPESDQKIYDEITDLKQLTVVMEHYLEEFNNISKAPMSLVMFRFAIEHISRICRVLKQDKGHLLLVGIGGSGRQSAAKLSTFMNAYELYQIEITKNYAGNDWREDLKKIILQVGVATKSTVFLFADNQIKDESFVEDINMLLNTGDVPNIFPADEKADIVEKMQTAARTQGEKVEVTPLSMYNFFIERVINKISFSLAMSPIGDAFRNRLRMFPSLINCCTIDWFQSWPTDALELVANKFLEDVELDDNIRVEVVSMCKYFQESVKKLSLDYYNKLRRHNYVTPTSYLELILTFKTLLNSKRQEVAMMRNRYLTGLQKLDFAASQVAVMQRELTALQPQLILTSEETAKMMVKIEAETREADGKKLLVQADEKEANVAAAIAQGIKNECEGDLAEAMPALEAALAALDTLNPADISLVKSMQNPPGPVKLVMESICIMKGMKPERKPDPSGSGKMIEDYWGVSKKILGDLKFLESLKTYDKDNIPPLTMKRIRERFINHPEFQPAVIKNVSSACEGLCKWVRAMEVYDRVAKVVAPKRERLREAEGKLAAQMQKLNQKRAELKLVVDRLQALNDDFEEMNTKKKDLEENIEICSQKLVRAEKLISGLGGEKDRWTEAARQLGIRYTNLTGDVLLSSGTVAYLGAFTVDYRVQCQNQWLAECKDKVIPGFSDFSLSHTLGDPIKIRAWQIAGLPVDSFSIDNGIIVSNSRRWALMIDPHGQANKWIKNMEKANKLAVIKFSDSNYMRMLENALQLGTPVLIENIGEELDASIEPILLKATFKQQGVEYMRLGENIIEYSRDFKLYITTRLRNPHYLPEVAVKVCLLNFMITPLGLQDQLLGIVAAKEKPELEEKKNQLIVESAKNKKHLKEIEDKILEVLSMSKGNILEDETAIKVLSSSKVLSEEISEKQKVASMTETQIDETRMGYKPVAVHSATIFFCISDLANIEPMYQYSLTWFINLYMHSLTHSTKSEELNLRIKYIIDHFTLSIYNNVCRSLFEKDKLLFSLLLTIGIMKQKKEITEEVWYFLLTGGIALDNPYPNPAPQWLSEKAWAEIVRASALPKLHGLMEHLEQNLGEWKLIYDSAWPHEEQLPGSWKFSQGLEKMVILRCLRPDKMVPAVREFIAEHMGKLYIEAPTFDLQGSYNDSSCCAPLIFVLSPSADPMAGLLKFADDLGMGGTRTQTISLGQGQGPIAAKMINNAIKDGTWVVLQNCHLAASWMPTLEKICEEVIVPESTNARFRLWLTSYPSEKFPVSILQNGIKMTNEPPKGLRANLLRSYLNDPISDPVFFQSCAKAVMWQKMLFGLCFFHAVVQERRNFGPLGWNIPYEFNESDLRISMWQIQMFLNDYKEVPFDALTYLTGECNYGGRVTDDKDRRLLLSLLSMFYCKEIEEDYYSLAPGDTYYIPPHGSYQSYIDYLRNLPITAHPEVFGLHENADITKDNQETNQLFEGVLLTLPRQSGGSGKSPQEVVEELAQDILSKLPRDFDLEEVMKLYPVVYEESMNTVLRQELIRFNRLTKVVRRSLINLGRAIKGQVLMSSELEEVFNSMLVGKVPAMWAAKSYPSLKPLGGYVADLLARLTFFQEWIDKGPPVVFWISGFYFTQSFLTGVSQNYARKYTIPIDHIGFEFEVTPQETVMENNPEDGAYIKGLFLEGARWDRKTMQIGESLPKILYDPLPIIWLKPGESAMFLHQDIYVCPVYKTSARRGTLSTTGHSTNYVLSIELPTDMPQKHWINRGVASLCQLDN

SEQ ID NO: 26084 - protein, 4624 aa, Homo sapiens
  Payload ID: 5158
  Gene Symbol: DNAH5
  Gene Name: dynein, axonemal, heavy chain 5
  Uniprot ID: Q8TE73
  ENSP ID: ENSP00000265104
MFRIGRRQLWKHSVTRVLTQRLKGEKEAKRALLDARHNYLFAIVASCLDLNKTEVEDAILEGNQIERIDQLFAVGGLRHLMFYYQDVEEAETGQLGSLGGVNLVSGKIKKPKVFVTEGNDVALTGVCVFFIRTDPSKAITPDNIHQEVSFNMLDAADGGLLNSVRRLLSDIFIPALRATSHGWGELEGLQDAANIRQEFLSSLEGFVNVLSGAQESLKEKVNLRKCDILELKTLKEPTDYLTLANNPETLGKIEDCMKVWIKQTEQVLAENNQLLKEADDVGPRAELEHWKKRLSKFNYLLEQLKSPDVKAVLAVLAAAKSKLLKTWREMDIRITDATNEAKDNVKYLYTLEKCCDPLYSSDPLSMMDAIPTLINAIKMIYSISHYYNTSEKITSLFVKVTNQIISACKAYITNNGTASIWNQPQDVVEEKILSAIKLKQEYQLCFHKTKQKLKQNPNAKQFDFSEMYIFGKFETFHRRLAKIIDIFTTLKTYSVLQDSTIEGLEDMATKYQGIVATIKKKEYNFLDQRKMDFDQDYEEFCKQTNDLHNELRKFMDVTFAKIQNTNQALRMLKKFERLNIPNLGIDDKYQLILENYGADIDMISKLYTKQKYDPPLARNQPPIAGKILWARQLFHRIQQPMQLFQQHPAVLSTAEAKPIIRSYNRMAKVLLEFEVLFHRAWLRQIEEIHVGLEASLLVKAPGTGELFVNFDPQILILFRETECMAQMGLEVSPLATSLFQKRDRYKRNFSNMKMMLAEYQRVKSKIPAAIEQLIVPHLAKVDEALQPGLAALTWTSLNIEAYLENTFAKIKDLELLLDRVNDLIEFRIDAILEEMSSTPLCQLPQEEPLTCEEFLQMTKDLCVNGAQILHFKSSLVEEAVNELVNMLLDVEVLSEEESEKISNENSVNYKNESSAKREEGNFDTLTSSINARANALLLTTVTRKKKETEMLGEEARELLSHFNHQNMDALLKVTRNTLEAIRKRIHSSHTINFRDSNSASNMKQNSLPIFRASVTLAIPNIVMAPALEDVQQTLNKAVECIISVPKGVRQWSSELLSKKKIQERKMAALQSNEDSDSDVEMGENELQDTLEIASVNLPIPVQTKNYYKNVSENKEIVKLVSVLSTIINSTKKEVITSMDCFKRYNHIWQKGKEEAIKTFITQSPLLSEFESQILYFQNLEQEINAEPEYVCVGSIALYTADLKFALTAETKAWMVVIGRHCNKKYRSEMENIFMLIEEFNKKLNRPIKDLDDIRIAMAALKEIREEQISIDFQVGPIEESYALLNRYGLLIAREEIDKVDTLHYAWEKLLARAGEVQNKLVSLQPSFKKELISAVEVFLQDCHQFYLDYDLNGPMASGLKPQEASDRLIMFQNQFDNIYRKYITYTGGEELFGLPATQYPQLLEIKKQLNLLQKIYTLYNSVIETVNSYYDILWSEVNIEKINNELLEFQNRCRKLPRALKDWQAFLDLKKIIDDFSECCPLLEYMASKAMMERHWERITTLTGHSLDVGNESFKLRNIMEAPLLKYKEEIEDICISAVKERDIEQKLKQVINEWDNKTFTFGSFKTRGELLLRGDSTSEIIANMEDSLMLLGSLLSNRYNMPFKAQIQKWVQYLSNSTDIIESWMTVQNLWIYLEAVFVGGDIAKQLPKEAKRFSNIDKSWVKIMTRAHEVPSVVQCCVGDETLGQLLPHLLDQLEICQKSLTGYLEKKRLCFPRFFFVSDPALLEILGQASDSHTIQAHLLNVFDNIKSVKFHEKIYDRILSISSQEGETIELDKPVMAEGNVEVWLNSLLEESQSSLHLVIRQAAANIQETGFQLTEFLSSFPAQVGLLGIQMIWTRDSEEALRNAKFDKKIMQKTNQAFLELLNTLIDVTTRDLSSTERVKYETLITIHVHQRDIFDDLCHMHIKSPMDFEWLKQCRFYFNEDSDKMMIHITDVAFIYQNEFLGCTDRLVITPLTDRCYITLAQALGMSMGGAPAGPAGTGKTETTKDMGRCLGKYVVVFNCSDQMDFRGLGRIFKGLAQSGSWGCFDEFNRIDLPVLSVAAQQISIILTCKKEHKKSFIFTDGDNVTMNPEFGLFLTMNPGYAGRQELPENLKINFRSVAMMVPDRQIIIRVKLASCGFIDNVVLARKFFTLYKLCEEQLSKQVHYDFGLRNILSVLRTLGAAKRANPMDTESTIVMRVLRDMNLSKLIDEDEPLFLSLIEDLFPNILLDKAGYPELEAAISRQVEEAGLINHPPWKLKVIQLFETQRVRHGMMTLGPSGAGKTTCIHTLMRAMTDCGKPHREMRMNPKAITAPQMFGRLDVATNDWTDGIFSTLWRKTLRAKKGEHIWIILDGPVDAIWIENLNSVLDDNKTLTLANGDRIPMAPNCKIIFEPHNIDNASPATVSRNGMVFMSSSILDWSPILEGFLKKRSPQEAEILRQLYTESFPDLYRFCIQNLEYKMEVLEAFVITQSINMLQGLIPLKEQGGEVSQAHLGRLFVFALLWSAGAALELDGRRRLELWLRSRPTGTLELPPPAGPGDTAFDYYVAPDGTWTHWNTRTQEYLYPSDTTPEYGSILVPNVDNVRTDFLIQTIAKQGKAVLLIGEQGTAKTVIIKGFMSKYDPECHMIKSLNFSSATTPLMFQRTIESYVDKRMGTTYGPPAGKKMTVFIDDVNMPIINEWGDQVTNEIVRQLMEQNGFYNLEKPGEFTSIVDIQFLAAMIHPGGGRNDIPQRLKRQFSIFNCTLPSEASVDKIFGVIGVGHYCTQRGFSEEVRDSVTKLVPLTRRLWQMTKIKMLPTPAKFHYVFNLRDLSRVWQGMLNTTSEVIKEPNDLLKLWKHECKRVIADRFTVSSDVTWFDKALVSLVEEEFGEEKKLLVDCGIDTYFVDFLRDAPEAAGETSEEADAETPKIYEPIESFSHLKERLNMFLQLYNESIRGAGMDMVFFADAMVHLVKISRVIRTPQGNALLVGVGGSGKQSLTRLASFIAGYVSFQITLTRSYNTSNLMEDLKVLYRTAGQQGKGITFIFTDNEIKDESFLEYMNNVLSSGEVSNLFARDEIDEINSDLASVMKKEFPRCLPTNENLHDYFMSRVRQNLHIVLCFSPVGEKFRNRALKFPALISGCTIDWFSRWPKDALVAVSEHFLTSYDIDCSLEIKKEVVQCMGSFQDGVAEKCVDYFQRFRRSTHVTPKSYLSFIQGYKFIYGEKHVEVRTLANRMNTGLEKLKEASESVAALSKELEAKEKELQVANDKADMVLKEVTMKAQAAEKVKAEVQKVKDRAQAIVDSISKDKAIAEEKLEAAKPALEEAEAALQTIRPSDIATVRTLGRPPHLIMRIMDCVLLLFQRKVSAVKIDLEKSCTMPSWQESLKLMTAGNFLQNLQQFPKDTINEEVIEFLSPYFEMPDYNIETAKRVCGNVAGLCSWTKAMASFFSINKEVLPLKANLVVQENRHLLAMQDLQKAQAELDDKQAELDVVQAEYEQAMTEKQTLLEDAERCRHKMQTASTLISGLAGEKERWTEQSQEFAAQTKRLVGDVLLATAFLSYSGPFNQEFRDLLLNDWRKEMKARKIPFGKNLNLSEMLIDAPTISEWNLQGLPNDDLSIQNGIIVTKASRYPLLIDPQTQGKIWIKNKESRNELQITSLNHKYFRNHLEDSLSLGRPLLIEDVGEELDPALDNVLERNFIKTGSTFKVKVGDKEVDVLDGFRLYITTKLPNPAYTPEISARTSIIDFTVTMKGLEDQLLGRVILTEKQELEKERTHLMEDVTANKRRMKELEDNLLYRLTSTQGSLVEDESLIVVLSNTKRTAEEVTQKLEISAETEVQINSAREEYRPVATRGSILYFLITEMRLVNEMYQTSLRQFLGLFDLSLARSVKSPITSKRIANIIEHMTYEVYKYAARGLYEEHKFLFTLLLTLKIDIQRNRVKHEEFLTLIKGGASLDLKACPPKPSKWILDITWLNLVELSKLRQFSDVLDQISRNEKMWKIWFDKENPEEEPLPNAYDKSLDCFRRLLLIRSWCPDRTIAQARKYIVDSMGEKYAEGVILDLEKTWEESDPRTPLICLLSMGSDPTDSIIALGKRLKIETRYVSMGQGQEVHARKLLQQTMANGGWALLQNCHLGLDFMDELMDIIIETELVHDAFRLWMTTEAHKQFPITLLQMSIKFANDPPQGLRAGLKRTYSGVSQDLLDVSSGSQWKPMLYAVAFLHSTVQERRKFGALGWNIPYEFNQADFNATVQFIQNHLDDMDVKKGVSWTTIRYMIGEIQYGGRVTDDYDKRLLNTFAKVWFSENMFGPDFSFYQGYNIPKCSTVDNYLQYIQSLPAYDSPEVFGLHPNADITYQSKLAKDVLDTILGIQPKDTSGGGDETREAVVARLADDMLEKLPPDYVPFEVKERLQKMGPFQPMNIFLRQEIDRMQRVLSLVRSTLTELKLAIDGTIIMSENLRDALDCMFDARIPAWWKKASWISSTLGFWFTELIERNSQFTSWVFNGRPHCFWMTGFFNPQGFLTAMRQEITRANKGWALDNMVLCNEVTKWMKDDISAPPTEGVYVYGLYLEGAGWDKRNMKLIESKPKVLFELMPVIRIYAENNTLRDPRFYSCPIYKKPVRTDLNYIAAVDLRTAQTPEHWVLRGVALLCDVK

SEQ ID NO: 26085 - protein, 4158 aa, Homo sapiens
  Payload ID: 5159
  Gene Symbol: DNAH6
  Gene Name: dynein, axonemal, heavy chain 6
  Uniprot ID: Q9C0G6
  ENSP ID: ENSP00000237449
MTFRATDSEFDLTNIEEYAENSALSRLNNIKAKQRVSYVTSTENESDTQILTFRHITKAQEKTRKRQQPIKLEPLPVLKVYQDHKQPEYIHEQNRFQLMTAGIIKRPVSIAKKSFATSSTQFLEHQDAVKKMQIHRPYVEVFSPSPPKLPHTGIGKRGLFGTRSSAYPKYTFHDREEVVKANIRDPLQIIKIIRENEHLGFLYMIPAVPRSSIEYDTYNLKVVSYENINKNDYYTISQRAVTHIYNEDIEFIEIDRWEQEYLYHRELTKIPIFSLFRKWKAFSVWRKNVRSKKITGCQKSLQKNLFIVNPHLRPALLKINELCYHLSFMGLCYIEKCHTYTLQEFKAAQVIRLAEVTERLGEFRNEAKYVVRRACRFALRAAGFVPDDCAFGPFEDYHKVQSSGSFINTPHELPTYGDSEKMTYTEQASKRHYCMRLTCFIRLNDYLIENTMHILTVNAVNSLLNHLTDKLKRTPSADVIQKWITEEKPEVPDKKGTLMVEKQEEDESLIPMFLTELMLTVQSLLFEPSLEDFLDGILGAVNHCQNTVLSVPNLVPDSYFDAFTSPYINNKLEGKTCGTGPSLAAVFEDDKNFHTIISQIKETIQAAFESARIYAATFEKFQIFFKENESLDLQALKLQEPDINFFSEQLEKYHKQHKDAVALRPTRNVGLLLIDTRLLREKLIPSPLRCLEVLNFMLPRQSKKKVDAIIFEAQDAEYKLEFVPTTTTEYVHSLLFLDEIQERIESLEDEGNIVTQMYKLMEQYQVPTPPEDFAVFATMKPSIVAVRNAIDKSVGDRESSIKQFCVHLGSDLEELNNEVNEVKLQAQDPQILDISADQDKIRLILNNLQSVLADLQKRAFQYKSYQKNFKVEVSKFEALEEVSAELKLKQLLWDSFSEWDKLQQEWLKSKFDCLDPEVLNGQVSKYAKFVTQLEKGLPPNSVVPQLKYKVEKMKEKLPVIIDLRNPTLKARHWAAIEQTVDATLVDAEIPLTLERLSQLHVFDFGQEIQDISGQASGEAALEAILKKVEDSWKTTEFVILPHRDSKDVFILGGTDDIQVLLDDSTINVATLASSRYLGPLKTRVDEWQKQLALFNQTLEEWLTCQRNWLYLESIFNAPDIQRQLPAEAKMFLQVDKSWKEIMRKVNRLPNALRAATQPGLLETFQNNNALLDQIQKCLEAYLESKRVIFPRFYFLSNDELLEILAQTRNPQAVQPHLRKCFDSISKLEFALMPPAEGKIPGIDGEPEKVYTNDILAMLSPEGERVSLGKGLKARGNVEEWLGKVEEAMFTSLRRLCKAAIADYQGKLRTDWVVAGHPSQVILTVSQIMWCRDLTECLETEHSNHIQALKNFEKVNFERLNALAAIVQGSLPKLHRNILTALITIDVHARDIVTELVQSKVETVESFDWQRQLRYYWDIDLDNCVARMALSQYTYGYEYLGACPRLVITPLTDRCYLCLMGALQLDLGGAPAGPAGTGKTETTKDLAKALAIQCVVFNCSDGLDYKMMGRFFSGLAQSGAWCCFDEFNRIDIEVLSVIAQQLITIRNAKAAKLSRFMFEGREIKLVMTCAAFITMNPGYAGRTELPDNLKALFRPFAMMVPNYALIAEVILYSEGFESSKILARKMTQMYKLCSEQLSQQDHYDFGMRAVKSVLVMAGSLKRENPDLNEDVVLIRALQDSNLPKFLTDDALLFSGIISDLFPGVQIPEHDYGILQSTIVDVMNRQNLQPEMCMVRKVIQFYETMLVRHGVMLVGPTGGGKTTVYRILAETLGNLQKLGIENSFYQAVKTYVLNPKSITMGELYGEVNNLTLEWKDGLMALSVRAAVNDTSEDHKWIISDGPVDALWIENMNTVLDDNKMLCLANSERIKLTPQIHMLFEVQDLRVASPATVSRCGMVFVDPEELKWMPYVKTWMKGISKKLTEETQEYILNLFQRYVDEGLHFINKKCSQAIPQVDISKVTTLCCLLESLILGKDGVNLAMEQTKLNTILCQTFVFCYLWSLGGNLTENYYDSFDTFIRTQFDDNPDARLPNSGDLWSIHMDFDTKRLDPWERIIPTFKYNRDVPFFEMLVPTTDTVRYGYLMEKLLAVKHSVLFTGITGVGKSVIAKGLLNKIQESAGYVPVYLNFSAQTSSARTQEIIESKLERKRKNILGAPGNKRIVIFVDDLNMPRLDRYGSQPPIELLRQYQDFGGFYDRNKLFWKEIQDVTIISACAPPGGGRNPVTPRFIRHFSMLCLPMPSEHSLKQIFQAILNGFLSDFPPAVKQTASSIVEASVEIYNKMSVDLLPTPAKSHYVFNLRDLSKCVQGILQCDPGTIREEIQIFRLFCHECQRVFHDRLINNEDKHYFHVILTEMANKHFGIAIDLEYFLNKPIIFGDFIKFGADKADRIYDDMPDIEKTANVLQDYLDDYNLTNPKEVKLVFFQDAIEHVSRIARMIRQERGNALLVGVGGTGKQSLTRLAAHICGYKCLQIELSRGYNYDSFHEDLRKLYKMAGVEDKNMVFLFTDTQIVVEEFLEDINNILNSGEVPNLFEKDELEQVLAATRPRAKEVGISEGNRDEVFQYFISKVRQKLHIVLCMSPVGEAFRSRCRMFPSLVNCCTIDWFVQWPREALLSVSKTFFSQVDAGNEELKEKLPLMCVNVHLSVSSMAERYYNELRRRYYTTPTSYLELINLYLSMLSEKRKQIISARDRVKNGLTKLLETNILVDKMKLDLSALEPVLLAKSEDVEALMEKLAVDQESADQVRNTVQEDEATAKVKAEETQAIADDAQRDLDEALPALDAANKALDSLDKADISEIRVFTKPPDLVMTVMEAISILLNAKPDWPSAKQLLGDSNFLKRLLEYDKENIKPQILAKLQKYINNPDFVPEKVEKVSKACKSMCMWVRAMDLYSRVVKVVEPKRQKLRAAQAELDITMATLREKQALLRQVEDQIQALQDEYDKGVNEKESLAKTMALTKARLVRAGKLTAALEDEQVRWEESIQKFEEEISNITGNVFIAAACVAYYGAFTAQYRQSLIECWIQDCQSLEIPIDPSFSLINILGDPYEIRQWNTDGLPRDLISTENGILVTQGRRWPLMIDPQDQANRWIRNKESKSGLKIIKLTDSNFLRILENSIRLGLPVLLEELKETLDPALEPILLKQIFISGGRLLIRLGDSDIDYDKNFRFYMTTKMPNPHYLPEVCIKVTIINFTVTKSGLEDQLLSDVVRLEKPRLEEQRIKLIVRINTDKNQLKTIEEKILRMLFTSEGNILDNEELIDTLQDSKITSGAIKTRLEEAESTEQMINVAREKYRPVATQGSVMYFVIASLSEIDPMYQYSLKYFKQLFNTTIETSVKTENLQQRLDVLLEQTLLTAYVNVSRGLFEQHKLIYSFMLCVEMMRQQGTLSDAEWNFFLRGSAGLEKERPPKPEAPWLPTATWFACCDLEESFPVFHGLTQNILSHPISIRLGSFETYINPQKWEGYSKMKHEDKHMRQEKEAAHQDPWSAGLSSFHKLILIKCCKEEKVVFALTDFVIENLGKQFIETPPVDLPTLYQDMSCNTPLVFILSTGSDPMGAFQRFARESGYSERVQSISLGQGQGPIAEKMVKDAMKSGNWVFLQNCHLAVSWMLAMEELIKTFTDPDSAIKDTFRLFLSSMPSNTFPVTVLQNSVKVTNEPPKGLRANIRRAFTEMTPSFFEENILGKKWRQIIFGICFFHAIIQERKKFGPLGWNICYEFNDSDRECALLNLKLYCKEGKIPWDALIYITGEITYGGRVTDSWDQRCLRTILKRFFSPETLEEDYKYSESGIYFAPMADSLQEFKDYIENLPLIDDPEIFGMHENANLVFQYKETSTLINTILEVQPRSSTGGEGKSNDEIVQELVASVQTRVPEKLEMEGASESLFVKDLQGRLNSLTTVLGQEVDRFNNLLKLIHTSLETLNKAIAGFVVMSEEMEKVYNSFLNNQVPALWSNTAYPSLKPLGSWVKDLILRTSFVDLWLKRGQPKSYWISGFFFPQGFLTGTLQNHARKYNLPIDELSFKYSVIPTYRDQAAVIEAAKTVQFGQELPMDMELPSPEDGVLVHGMFMDASRWDDKEMVIEDALPGQMNPVLPVVHFEPQQNYKPSPTLYHCPLYKTGARAGTLSTTGHSTNFVVTVLLPSKRSKDYWIAKGSALLCQLSE

SEQ ID NO: 26086 - protein, 4158 aa, Homo sapiens; identical to SEQ ID NO: 26085
  Payload ID: 5159
  Gene Symbol: DNAH6
  Gene Name: dynein, axonemal, heavy chain 6
  Uniprot ID: Q9C0G6
  ENSP ID: ENSP00000374045

SEQ ID NO: 26087 - protein, 551 aa, Homo sapiens
  Payload ID: 5159
  Gene Symbol: DNAH6
  Gene Name: dynein, axonemal, heavy chain 6
  ENSP ID: ENSP00000473441
MEQTKLNTILCQTFVFCYLWSLGGNLTENYYDSFDTFIRTQFDDNPDARLPNSGDLWSIHMDFDTKRLDPWERIIPTFKYNRDVPFFEMLVPTTDTVRYGYLMEKLLAVKHSVLFTGITGVGKSVIAKGLLNKIQESAGYVPVYLNFSAQTSSARTQEIIESKLERKRKNILGAPGNKRIVIFVDDLNMPRLDRYGSQPPIELLRQYQDFGGFYDRNKLFWKEIQDVTIISACAPPGGGRNPVTPRFIRHFSMLCLPMPSEHSLKQIFQAILNGFLSDFPPAVKQTASSIVEASVEIYNKMSVDLLPTPAKSHYVFNLRDLSKCVQDKHFGIAIDLEYFLNKPIIFGDFIKFGADKADRIYDDMPDIEKTANVLQDYLDDYNLTNPKEVKLVFFQDAIEHVSRIARMIRQERGNALLVGVGGTGKQSLTRLAAHICGYKCLQIELSRGYNYDSFHEDLRKLYKMAGVEDKNMVFLFTDTQIVVEEFLEDINNILNSGEVPNLFEKDELEQVLAATRPRAKEVGISEGNRDEVGCARVVMWLYHKNVSSPFI

SEQ ID NO: 26088 - protein, 4024 aa, Homo sapiens
  Payload ID: 5160
  Gene Symbol: DNAH7
  Gene Name: dynein, axonemal, heavy chain 7
  Uniprot ID: Q8WXX0
  ENSP ID: ENSP00000311273
MSSEQDKSASKEKSKKPVRFLPQLSMEKLASKEKFKAPARALPQLSMVSTKPHWQQAAPSFHLSVKQDDESPEPFSVKNEQSHAEYMERFGKKGKLPHQVDDSYVGPSTSKSKGKSPHKERENFRSTLVNVIMQQDADLDSAVPDGSTIPKPTASAIEKDILRYYYYIHHGIDTDHVAPMEDSWLEHVLDLVPQHLKVFTDSIVTLSDEMREDYLLSVRKSIVDFVLKDPREKGDDKKTDELPAHRAEMEILPKPWRKSFLAASSYIRDHLNAMNPTMLAVLDLWHTNFKKLRLVDIKEFHNCQDALELSSFQNIIMRHMDSAKETLLKMWFPEVQNIYYQGNKKKQLPTGDSSAKLESFFNCAAALMTLQLQDLTLVSMQDFTDLIAQPPDSVRAFEHPGFIMRLILDNDTIKFEPELSDYIDIFLNVYDVMIKAVSFVPRVETKLYSKWESKSKPTTLKPIILNEIVDAHKEKIKEVIMKESVAPTEHLRLYDKYDFLITRKAERDVDNFLAENHSYEKIIDEICKYQKLIEEIQYTSIKTIRLGMFEMHCEELIRALVKRADIICGKLLAKMFRDHQEVNTRLCDEFERIAEKALSTPPNTAELMEMKAYIQKVEVTDMIELEQRLVDSKNCLAFLIEYVNFSPADMRLNNSVFQWYGRMGEIFEEHRKIIKEKIEQYQEGLKLRCERFVEELESYAKQSEEFYSFGDLQDVQRYLKKAQILNGKLDLAADKIEQFNAEEEAFGWLPSVYPQRKKIQDGLNPYLRLYETAVEFSSNYRAWTEGPYHKVNPDQVEADIGNYWRGLYKLEKTFHDSPYALAMTKKVRSKVEDFKQHIPLIQVICNPGLRPRHWEAMSAIVGYPLQPSDDSTVSSFLDMNLEPYIDRFEGISEAASKEYSLEKAMEKMITEWDAVEFVIHSYRETGTFILASVDEIQMLLDDHIIKTQTMRGSPFIKPYEKQMREWEGKLLLLQEILDEWLKVQATWLYLEPIFSSPDIMSQMPEEGRRFTAVDKTWRDIMRSVMQDKHVLTVVTIDRMLERLKKSNELLELILKGLNEYLEKKRLFFPRFFFLSNDELLEILSETKDPTRVQPHLKKCFEGIAKVEFTETLDITHMKSSEGEVVELIEIISTAKARGQVEKWLVELERVMINSIHKVTGDATFAYTKYERINWVRDWPGQTVLCVSQIFWTKEVQTAIPMGIKALEQYLKTCNRQIDDIVTLVRGKLSMQNRVTLGALVVLDVHARDVLSSLVKKNISDDSDFEWLSQLRYYWQENHLETKMINAGLRYGYEYLGNSPRLVITPLTDRCYRTLFGALHLHLGGAPEGPAGTGKTETTKDLAKAVAKQCVVFNCSDGLDYLALGKFFKGLLSCGAWACFDEFNRIDLEVLSVVAQQILTIQRGINAGADILMFEGTELKLDPTCAVFITMNPGYAGRSELPDNLKALFRTVAMMVPDYAMIAEIVLYSCGFVTARPLSVKIVATYRLCSEQLSSQHHYDYGMRAVKSVLTAAGNLKLKYPNENEEILLLRSIIDVNLPKFLSHDLPLFEGITSDLFPGVKLPKPDYNDLLAAIKDNCASMNLQMTAFFSEKILQVYEMMIVRHGFMIVGEPFGGKTSAYRVLAGALNDICEKGLMEENKVQITVLNPKSVTMGQLYGQFDSVSHEWSDGVLAVSFRAFASSVTPDRKWLIFDGPVDAVWIENMNTVLDDNKKLCLMSGEIIQMSPQMNLIFEPMDLEVASPATVSRCGMIYMEPHMLGWRPLMLSWVNLLPASVSVIQKEFIMGLFDRMVPVSVEFIRKHTKELSPTSDTNLVRSLMNLIDCFMDDFADEVKLKERNDRETYSLLEGIFLFSLIWSVGASCTDDDRLKFNKILRELMESPISDRTRNTFKLQSGTEQTSSKALTVPFPEKGTIYDYQFVTEGIGKWEPWIKKLKEAPPIPKDVMFNEIIVPTLDTIRYSALMELLTTHQKPSIFVGPTGTGKSVYITNFLLNQLNKEIYKPLLINFSAQTTAAQTQNIVMSKLDKRRKGVFGPPLGKRMVVFVDDVNMPAREVYGAQPPIELLRQWLDHWNWYDLKDCSMIKLVDIQIMCAMGPPGGGRNPVTPRYMRHFNIITINEFSDKSMYTIFSRILTWHLEICYKFPDEFLDLTTQIVNGTMTLYKEAMKNLLPTPAKSHYLFNLRDFSRVIQGVCLSRPETTETTEVIKRLWVHEVLRVYYDRLLDNTDRSWLINYIQEILRNYMYEDFHELFQRLDFDNDGMVEADDLRSLMFCDFHDPKREDTNYREIADVDNLRMIVEIHLEEYNNISKKPMNLVLFRFAIEHISRISRILKQPRSHALLVGVGGSGRQSVTRLAAHMADYSVFQVEISKGYDTTEWHEDLKVILRKCAEGEMQGVFLFTDTQIKEESFLEDVSNLLNAGEIPNLFALDEKQEICDKMRQLDRQRDKTKQTDGSPIALFNMFIDHCRSQLHVVLAMSPIGDAFRNRLRKFPALVNCCTIDWFQSWPEDALQAVASRFLEEIEMSEEIRDGCIDMCKSFHTSTIDLSKSFFVELQRYNYVTPTSYLELISTFKLLLEKKRSEVMKMKKRYEVGLEKLDSASSQVATMQMELEALHPQLKVASKEVDEMMIMIEKESVEVAKTEKIVKADETIANEQAMASKAIKDECDADLAGALPILESALAALDTLTAQDITVVKSMKSPPAGVKLVMEAICILKGIKADKIPDPTGSGKKIEDFWGPAKRLLGDMRFLQSLHEYDKDNIPPAYMNIIRKNYIPNPDFVPEKIRNASTAAEGLCKWVIAMDSYDKVAKIVAPKKIKLAAAEGELKIAMDGLRKKQAALKEVQDKLARLQDTLELNKQKKADLENQVDLCSKKLERAEQLIGGLGGEKTRWSHTALELGQLYINLTGDILISSGVVAYLGAFTSTYRQNQTKEWTTLCKGRDIPCSDDCSLMGTLGEAVTIRTWNIAGLPSDSFSIDNGIIIMNARRWPLMIDPQSQANKWIKNMEKANSLYVIKLSEPDYVRTLENCIQFGTPVLLENVGEELDPILEPLLLKQTFKQGGSTCIRLGDSTIEYAPDFRFYITTKLRNPHYLPETSVKVTLLNFMITPEGMQDQLLGIVVAQERPDLEEEKQALILQGAENKRQLKEIEDKILEVLSSSEGNILEDETAIKILSSSKALANEISQKQEVAEETEKKIDTTRMGYRPIAIHSSILFFSLADLANIEPMYQYSLTWFINLFILSIENSEKSEILAKRLQILKDHFTYSLYVNVCRSLFEKDKLLFSFCLTINLLLHERAINKAEWRFLLTGGIGLDNPYANLCTWLPQKSWDEICRLDDLPAFKTIRREFMRLKDGWKKVYDSLEPHHEVFPEEWEDKANEFQRMLIIRCLRPDKVIPMLQEFIINRLGRAFIEPPPFDLAKAFGDSNCCAPLIFVLSPGADPMAALLKFADDQGYGGSKLSSLSLGQGQGPIAMKMLEKAVKEGTWVVLQNCHLATSWMPTLEKVCEELSPESTHPDFRMWLTSYPSPNFPVSVLQNGVKMTNEAPKGLRANIIRSYLMDPISDPEFFGSCKKPEEFKKLLYGLCFFHALVQERRKFGPLGWNIPYEFNETDLRISVQQLHMFLNQYEELPYEALRYMTGECNYGGRVTDDWDRRTLRSILNKFFNPELVENSDYKFDSSGIYFVPPSGDHKSYIEYTKTLPLTPAPEIFGMNANADITKDQSETQLLFDNILLTQSRSAGAGAKSSDEVVNEVASDILGKLPNNFDIEAAMRRYPTTYTQSMNTVLVQEMGRFNKLLKTIRDSCVNIQKAIKGLAVMSTDLEEVVSSILNVKIPEMWMGKSYPSLKPLGSYVNDFLARLKFLQQWYEVGPPPVFWLSGFFFTQAFLTGAQQNYARKYTIPIDLLGFDYEVMEDKEYKHPPEDGVFIHGLFLDGASWNRKIKKLAESHPKILYDTVPVMWLKPCKRADIPKRPSYVAPLYKTSERRGVLSTTGHSTNFVIAMTLPSDQPKEHWIGRGVALLCQLNS

SEQ ID NO: 26089 - protein, 501 aa, Homo sapiens
  Payload ID: 5160
  Gene Symbol: DNAH7
  Gene Name: dynein, axonemal, heavy chain 7
  Uniprot ID: Q8WXX0
  ENSP ID: ENSP00000386260
MSSEQDKSASKEKSKKPVRFLPQLSMEKLASKEKFKAPARALPQLSMVSTKPHWQQAAPSFHLSVKQDDESPEPFSVKNEQSHAEYMERFGKKGKLPHQVDDSYVGPSTSKSKGKSPHKERENFRSTLVNVIMQQDADLDSAVPDGSTIPKPTASAIEKDILRYYYYIHHGIDTDHVAPMEDSWLEHVLDLVPQHLKVFTDSIVTLSDEMREDYLLSVRKSIVDFVLKDPREKGDDKKTDELPAHRAEMEILPKPWRKSFLAASSYIRDHLNAMNPTMLAVLDLWHTNFKKLRLVDIKEFHNCQDALELSSFQNIIMRHMDSAKETLLKMWFPEVQNIYYQGNKKKQLPTGDSSAKLESFFNCAAALMTLQLQDLTLVSMQDFTDLIAQPPDSVRAFEHPGFIMRLILDNDTIKFEPELSDYIDIFLNVYDVMIKAVSFVPRVETKLYSKWRNKAKPGHFYFSHIQRSVTFQHSEVSSPQNSHFKIVSPFSVLGFTWRCQL

SEQ ID NO: 26090 - protein, 507 aa, Homo sapiens
  Payload ID: 5160
  Gene Symbol: DNAH7
  Gene Name: dynein, axonemal, heavy chain 7
  Uniprot ID: Q8WXX0
  ENSP ID: ENSP00000386912
MWLTSYPSPNFPVSVLQNGVKMTNEAPKGLRANIIRSYLMDPISDPEFFGSCKKPEEFKKLLYGLCFFHALVQERRKFGPLGWNIPYEFNETDLRISVQQLHMFLNQYEELPYEALRYMTGECNYGGRVTDDWDRRTLRSILNKFFNPELVENSDYKFDSSGIYFVPPSGDHKSYIEYTKTLPLTPAPEIFGMNANADITKDQSETQLLFDNILLTQSRSAGAGAKSSDEVVNEVASDILGKLPNNFDIEAAMRRYPTTYTQSMNTVLVQEMGRFNKLLKTIRDSCVNIQKAIKGLAVMSTDLEEVVSSILNVKIPEMWMGKSYPSLKPLGSYVNDFLARLKFLQQWYEVGPPPVFWLSGFFFTQAFLTGAQQNYARKYTIPIDLLGFDYEVMEDKEYKHPPEDGVFIHGLFLDGASWNRKIKKLAESHPKILYDTVPVMWLKPCKRADIPKRPSYVAPLYKTSERRGVLSTTGHSTNFVIAMTLPSDQPKEHWIGRGVALLCQLNS

SEQ ID NO: 26091 - protein, 121 aa, Homo sapiens
  Payload ID: 5160
  Gene Symbol: DNAH7
  Gene Name: dynein, axonemal, heavy chain 7
  ENSP ID: ENSP00000407444
MEKLASKEKFKAPARALPQLSMVSTKPHWQQAAPSFHLSVKQDDESPEPFSVKNEQSHAEYMERFGKKGKLPHQVDDSYVGPSTSKSKGKSPHKERENFRSTLVNVIMQQDADLDSAVPDG

SEQ ID NO: 26092 - protein, 56 aa, Homo sapiens
  Payload ID: 5160
  Gene Symbol: DNAH7
  Gene Name: dynein, axonemal, heavy chain 7
  ENSP ID: ENSP00000409732
YPSLKPLGSYVNDFLARLKFLQVFSFTDYFWMELPGIERSRNLQNRIPKFFMIQCL

SEQ ID NO: 26093 - protein, 4707 aa, Homo sapiens
  Payload ID: 5161
  Gene Symbol: DNAH8
  Gene Name: dynein, axonemal, heavy chain 8
  ENSP ID: ENSP00000333363
MEKDAEDGAPSEGAEAPPSTEEAAPPRSEEEEAPRPPTVEAPAEDGFSPSAEDAVSSVVDYRDLIPSEEGIVLPDDHEADLNRVRQRLAPRPVQSVISEVLSLPSSRRSSRYRRSMSGLPNLQETLKERQARFREARESRRLKIDPSYKYIFEILAENLGLDIVTVEELILDCPSLEAFTNFFAKDGCKTLKFLYQEGDVPGIECGRTIAGATKGAKMMKLYIDNAAPDKLKGLCIFFVRCRNDVAINVKTIQEEALFTVLDASKGLLNGIRDMLANIFLPAVLATNNWGALNQSKQGESEKHIFTETINRYLSFLDGARISIEGTVKLKTIDNVNFSKLHTFEEVTAAASNSETVHQLEEVLMVWYKQIEQVLIESEQMRKEAGDSGPLTELEHWKRMSAKFNYIIEQIKGPSCKAVINVLNVAHSKLLKNWRDLDARITDTANESKDNVRYLYTLEKVCQPLYNHDLVSMAHGIQNLINAIRMIHGVSRYYNTSERMTSLFIKVTNQMVTACKAYITDGGLNHVWDQETPVVLKKIQDCIFLFKEYQASFHKTRKLISESSGEKSFEVSEMYIFGKFEAFCKRLEKITEMITVVQTYSTLSNSTIEGIDIMAIKFRNIYQGVKKKQYDILDPRRTEFDTDFLDFMTKINGLEVQIQAFMNSSFGKILSSQQALQLLQRFQKLNIPCLGLEINHTIERILQYYVAELDATKKLYHSQKDDPPLARNMPPIAGKILWVRQLYRRISEPINYFFKNSDILSSPDGKAVIRQYNKISYVLVEFEVVYHTAWIREISQLHYALQATLFVRHPETGKLLVNFDPKILEVVRETKCMIKMKLDVPEQAKRLLKLESKLKADKLYLQGLLQYYDELCQEVPSVFVNLMTPKMKKVESVLRQGLTVLTWSSLTLESFFQEVELVLDMFNQLLKKISDLCEMHIDTVLKEIAKTVLISLPESGATKVEDMLTLNETYTKEWADILNHKSKHVEEAVRELISIFEQIYEVKYTGKVGKQSEQRKHVVFGSETGEGENNDYEANIVNEFDTHDKEDEFKKECKEVFAFFSHQLLDSLQKATRLSLDTMKRRIFVASLYGRKQSEDIISFIKSEVHLAIPNVVMIPSLDDIQQAINRMIQLTLEVSRGVAHWGQQQIRPIKSVIPSPTTTDVTHQNTGKLLKKEERSFEEAIPARKLKNFYPGVAEHKDISKLVLLLSSSVNSLRKAAHEALQDFQKYKTLWTEDRDVKVKEFLANNPSLTEIRSEILHYATFEQEIDELKPIIVVGALELHTEPMKLALSIEAKAWKMLLCRYLNEEYKKKMSYMIAFINEYLKKLSRPIRDLDDVRFAMEALSCIRDNEIQMDMTLGPIEEAYAILNRFEVEVTKEESEAVDTLRYSFNKLQSKAVSVQEDLVQVQPKFKSNLLESVEVFREDVINFAEAYELEGPMVPNIPPQEASNRLQIFQASFDDLWRKFVTYSSGEQLFGLPVTDYEVLHKTRKELNLLQKLYGLYDTVMSSISGYYEILWGDVDIEKINAELLEFQNRCRKLPKGLKDWQAFLDLKKRIDDFSESCPLLEMMTNKAMKQRHWDRISELTGTPFDVESDSFCLRNIMEAPLLKHKDDIEDICISAIKEKDIEAKLTQVIENWTNQNLSFAAFKGKGELLLKGTESGEIITLMEDSLMVLGSLLSNRYNAPFKKNIQNWVYKLSTSSDIIEEWLVVQNLWVYLEAVFVGGDIAKQLPQEAKRFQNIDKSWIKIMQRAHENPNVINCCVGDETMGQLLPHLHEQLEVCQKSLTGYLEKKRLLFPRFFFVSDPVLLEILGQASDSHTIQPHLPAVSDNINEVTFHAKDYDRIMAVISREGEKIVLDNSVMAKGPVEIWLLDLLKMQMSSLHNIIRSAFYQISDSGFQLLPFLSHFPAQVGLLGIQMLWTHDSEEALRNAKDDRKIMQVTNQKFLDILNTLISQTTHDLSKFDRVKFETLITIHVHQRDIFDDLVKMHIKSPTDFEWLKQSRFYFKEDLDQTVVSITDVDFIYQNEFLGCTDRLVITPLTDRCYITLAQALGMNMGGAPAGPAGTGKTETTKDMGRCLGKYVVVFNCSDQMDFRGLGRIFKGLAQSGSWGCFDEFNRIELPVLSVAAQQIYIVLTARKERKKQFIFSDGDCVDLNPEFGIFLTMNPGYAGRQELPENLKIQFRTVAMMVPDRQIIMRVKLASCGFLENVILAQKFYVLYKLCEEQLTKQVHYDFGLRNILSVLRTLGSQKRARPEDSELSIVMRGLRDMNLSKLVDEDEPLFLSLINDLFPGLQLDSNTYAELQNAVAHQVQIEGLINHPPWNLKLVQLYETSLVRHGLMTLGPSGSGKTTVITILMKAQTECGRPHREMRMNPKAITAPQMFGRLDTATNDWTDGIFSTLWRKTLKAKKGENIFLILDGPVDAIWIENLNSVLDDNKTLTLANGDRIPMAPSCKLLFEVHNIENASPATVSRMGMVYISSSALSWRPILQAWLKKRTAQEAAVFLTLYEKVFEDTYTYMKLNLNPKMQLLECNYIVQSLNLLEGLIPSKEEGGVSCVEHLHKLFVFGLMWSLGALLELESREKLEAFLRQHESKLDLPEIPKGSNQTMYEFYVTDYGDWEHWNKKLQPYYYPTDSIPEYSSILVPNVDNIRTNFLIDTIAKQHKAVLLTGEQGTAKTVMVKAYLKKYDPEVQLSKSLNFSSATEPMMFQRTIESYVDKRIGSTYGPPGGRKMTVFIDDINMPVINEWGDQITNEIVRQMMEMEGMYSLDKPGDFTTIVDVQLIAAMIHPGGGRNDIPQRLKRQFTVFNCTLPSNASIDKIFGIIGCGYFDPCRSFKPQICEMIVNLVSVGRVLWQWTKVKMLPTPSKFHYIFNLRDLSRIWQGMLTIKAEECASIPTLLSLFKHECSRVIADRFITPEDEQWFNAHLTRAVEENIGSDAASCILPEPYFVDFLREMPEPTGDEPEDSVFEVPKIYELMPSFDFLAEKLQFYQRQFNEIIRGTSLDLVFFKDAMTHLIKISRIIRTSCGNALLVGVGGSGKQSLSRLASFIAGYQIFQITLTRSYNVTNLTDDLKALYKVAGADGKGITFIFTDSEIKDEAFLEYLNNLLSSGEISNLFARDEMDEITQGLISVMKRELPRHPPTFDNLYEYFISRSRKNLHVVLCFSPVGEKFRARSLKFPGLISGCTMDWFSRWPREALIAVASYFLSDYNIVCSSEIKRQVVETMGLFHDMVSESCESYFQRYRRRAHVTPKSYLSFINGYKNIYAEKVKFINEQAERMNIGLDKLMEASESVAKLSQDLAVKEKELAVASIKADEVLAEVTVSAQASAKIKNEVQEVKDKAQKIVDEIDSEKVKAESKLEAAKPALEEAEAALNTIKPNDIATVRKLAKPPHLIMRIMDCVLLLFQKKIDPVTMDPEKSCCKPSWGESLKLMSATGFLWSLQQFPKDTINEETVELLQPYFNMDDYTFESAKKVCGNVAGLLSWTLAMAIFYGINREVLPLKANLAKQEGRLAVANAELGKAQALLDEKQAELDKVQAKFDAAMNEKMDLLNDADTCRKKMQAASTLIDGLSGEKIRWTQQSKEFKAQINRLVGDILLCTGFLSYLGPFNQIFRNYLLKDQWEMELRARKIPFTENLNLISMLVDPPTIGEWGLQGLPGDDLSIQNGIIVTKATRYPLLIDPQTQGKTWIKSKEKENDLQVTSLNHKYFRTHLEDSLSLGRPLLIEDIHEELDPALDNVLEKNFIKSGTTFKVKVGDKECDIMDTFKLYITTKLPNPAFTPEINAKTSVIDFTVTMKGLENQLLRRVILTEKQELEAERVKLLEDVTFNKRKMKELEDNLLYKLSATKGSLVDDESLIGVLRTTKQTAAEVSEKLHVAAETEIKINAAQEEFRPAATRGSILYFLITEMSMVNIMYQTSLAQFLKLFDQSMARSEKSPLPQKRITNIIEYLTYEVFTYSVRGLYENHKFLFVLLMTLKIDLQRGTVKHREFQALIKGGAALDLKACPPKPYRWILDMTWLNLVELSKLPQFAEIMNQISRNEKGWKSWFDKDAPEEEIIPDGYNDSLDTCHKLLLIRSWCPDRTVFQARKYIADSLEEKYTEPVILNLEKTWEESDTRTPLICFLSMGSDPTNQIDALAKKLKLECRTISMGQGQEVHARKLIQMSMQQGGWVLLQNCHLGLEFMEELLETLITTEASDDSFRVWITTEPHDRFPITLLQTSLKFTNEPPQGVRAGLKRTFAGINQDLLDISNLPMWKPMLYTVAFLHSTVQERRKFGPLGWNIPYEFNSADFSASVQFIQNHLDECDIKKGVSWNTVRYMIGEVQYGGRVTDDFDKRLLNCFARVWFSEKMFEPSFCFYTGYKIPLCKTLDQYFEYIQSLPSLDNPEVFGLHPNADITYQSNTASAVLETITNIQPKESGGGVGETREAIVYRLSEDMLSKLPPDYIPHEVKSRLIKMGHLNSMNIFLRQEIDRMQRVISILRSSLSDLKLAIEGTIIMSENLRDALDNMYDARIPQLWKRVSWDSSTLGFWFTELLERNAQFSTWIFEGRPNVFWMTGFFNPQGFLTAMRQEVTRAHKGWALDTVTIHNEVLRQTKEEITSPPGEGVYIYGLYMDGAAWDRRNGKLMESTPKVLFTQLPVLHIFAINSTAPKDPKLYVCPIYKKPRRTDLTFITVVYLRTVLSPDHWILRGVALLCDIK

SEQ ID NO: 26094 - protein, 4490 aa, Homo sapiens
  Payload ID: 5161
  Gene Symbol: DNAH8
  Gene Name: dynein, axonemal, heavy chain 8
  Uniprot ID: Q96JB1
  ENSP ID: ENSP00000352312
MMKLYIDNAAPDKLKGLCIFFVRCRNDVAINVKTIQEEALFTVLDASKGLLNGIRDMLANIFLPAVLATNNWGALNQSKQGESEKHIFTETINRYLSFLDGARISIEGTVKLKTIDNVNFSKLHTFEEVTAAASNSETVHQLEEVLMVWYKQIEQVLIESEQMRKEAGDSGPLTELEHWKRMSAKFNYIIEQIKGPSCKAVINVLNVAHSKLLKNWRDLDARITDTANESKDNVRYLYTLEKVCQPLYNHDLVSMAHGIQNLINAIRMIHGVSRYYNTSERMTSLFIKVTNQMVTACKAYITDGGLNHVWDQETPVVLKKIQDCIFLFKEYQASFHKTRKLISESSGEKSFEVSEMYIFGKFEAFCKRLEKITEMITVVQTYSTLSNSTIEGIDIMAIKFRNIYQGVKKKQYDILDPRRTEFDTDFLDFMTKINGLEVQIQAFMNSSFGKILSSQQALQLLQRFQKLNIPCLGLEINHTIERILQYYVAELDATKKLYHSQKDDPPLARNMPPIAGKILWVRQLYRRISEPINYFFKNSDILSSPDGKAVIRQYNKISYVLVEFEVVYHTAWIREISQLHYALQATLFVRHPETGKLLVNFDPKILEVVRETKCMIKMKLDVPEQAKRLLKLESKLKADKLYLQGLLQYYDELCQEVPSVFVNLMTPKMKKVESVLRQGLTVLTWSSLTLESFFQEVELVLDMFNQLLKKISDLCEMHIDTVLKEIAKTVLISLPESGATKVEDMLTLNETYTKEWADILNHKSKHVEEAVRELISIFEQIYEVKYTGKVGKQSEQRKHVVFGSETGEGENNDYEANIVNEFDTHDKEDEFKKECKEVFAFFSHQLLDSLQKATRLSLDTMKRRIFVASLYGRKQSEDIISFIKSEVHLAIPNVVMIPSLDDIQQAINRMIQLTLEVSRGVAHWGQQQIRPIKSVIPSPTTTDVTHQNTGKLLKKEERSFEEAIPARKLKNFYPGVAEHKDISKLVLLLSSSVNSLRKAAHEALQDFQKYKTLWTEDRDVKVKEFLANNPSLTEIRSEILHYATFEQEIDELKPIIVVGALELHTEPMKLALSIEAKAWKMLLCRYLNEEYKKKMSYMIAFINEYLKKLSRPIRDLDDVRFAMEALSCIRDNEIQMDMTLGPIEEAYAILNRFEVEVTKEESEAVDTLRYSFNKLQSKAVSVQEDLVQVQPKFKSNLLESVEVFREDVINFAEAYELEGPMVPNIPPQEASNRLQIFQASFDDLWRKFVTYSSGEQLFGLPVTDYEVLHKTRKELNLLQKLYGLYDTVMSSISGYYEILWGDVDIEKINAELLEFQNRCRKLPKGLKDWQAFLDLKKRIDDFSESCPLLEMMTNKAMKQRHWDRISELTGTPFDVESDSFCLRNIMEAPLLKHKDDIEDICISAIKEKDIEAKLTQVIENWTNQNLSFAAFKGKGELLLKGTESGEIITLMEDSLMVLGSLLSNRYNAPFKKNIQNWVYKLSTSSDIIEEWLVVQNLWVYLEAVFVGGDIAKQLPQEAKRFQNIDKSWIKIMQRAHENPNVINCCVGDETMGQLLPHLHEQLEVCQKSLTGYLEKKRLLFPRFFFVSDPVLLEILGQASDSHTIQPHLPAVSDNINEVTFHAKDYDRIMAVISREGEKIVLDNSVMAKGPVEIWLLDLLKMQMSSLHNIIRSAFYQISDSGFQLLPFLSHFPAQVGLLGIQMLWTHDSEEALRNAKDDRKIMQVTNQKFLDILNTLISQTTHDLSKFDRVKFETLITIHVHQRDIFDDLVKMHIKSPTDFEWLKQSRFYFKEDLDQTVVSITDVDFIYQNEFLGCTDRLVITPLTDRCYITLAQALGMNMGGAPAGPAGTGKTETTKDMGRCLGKYVVVFNCSDQMDFRGLGRIFKGLAQSGSWGCFDEFNRIELPVLSVAAQQIYIVLTARKERKKQFIFSDGDCVDLNPEFGIFLTMNPGYAGRQELPENLKIQFRTVAMMVPDRQIIMRVKLASCGFLENVILAQKFYVLYKLCEEQLTKQVHYDFGLRNILSVLRTLGSQKRARPEDSELSIVMRGLRDMNLSKLVDEDEPLFLSLINDLFPGLQLDSNTYAELQNAVAHQVQIEGLINHPPWNLKLVQLYETSLVRHGLMTLGPSGSGKTTVITILMKAQTECGRPHREMRMNPKAITAPQMFGRLDTATNDWTDGIFSTLWRKTLKAKKGENIFLILDGPVDAIWIENLNSVLDDNKTLTLANGDRIPMAPSCKLLFEVHNIENASPATVSRMGMVYISSSALSWRPILQAWLKKRTAQEAAVFLTLYEKVFEDTYTYMKLNLNPKMQLLECNYIVQSLNLLEGLIPSKEEGGVSCVEHLHKLFVFGLMWSLGALLELESREKLEAFLRQHESKLDLPEIPKGSNQTMYEFYVTDYGDWEHWNKKLQPYYYPTDSIPEYSSILVPNVDNIRTNFLIDTIAKQHKAVLLTGEQGTAKTVMVKAYLKKYDPEVQLSKSLNFSSATEPMMFQRTIESYVDKRIGSTYGPPGGRKMTVFIDDINMPVINEWGDQITNEIVRQMMEMEGMYSLDKPGDFTTIVDVQLIAAMIHPGGGRNDIPQRLKRQFTVFNCTLPSNASIDKIFGIIGCGYFDPCRSFKPQICEMIVNLVSVGRVLWQWTKVKMLPTPSKFHYIFNLRDLSRIWQGMLTIKAEECASIPTLLSLFKHECSRVIADRFITPEDEQWFNAHLTRAVEENIGSDAASCILPEPYFVDFLREMPEPTGDEPEDSVFEVPKIYELMPSFDFLAEKLQFYQRQFNEIIRGTSLDLVFFKDAMTHLIKISRIIRTSCGNALLVGVGGSGKQSLSRLASFIAGYQIFQITLTRSYNVTNLTDDLKALYKVAGADGKGITFIFTDSEIKDEAFLEYLNNLLSSGEISNLFARDEMDEITQGLISVMKRELPRHPPTFDNLYEYFISRSRKNLHVVLCFSPVGEKFRARSLKFPGLISGCTMDWFSRWPREALIAVASYFLSDYNIVCSSEIKRQVVETMGLFHDMVSESCESYFQRYRRRAHVTPKSYLSFINGYKNIYAEKVKFINEQAERMNIGLDKLMEASESVAKLSQDLAVKEKELAVASIKADEVLAEVTVSAQASAKIKNEVQEVKDKAQKIVDEIDSEKVKAESKLEAAKPALEEAEAALNTIKPNDIATVRKLAKPPHLIMRIMDCVLLLFQKKIDPVTMDPEKSCCKPSWGESLKLMSATGFLWSLQQFPKDTINEETVELLQPYFNMDDYTFESAKKVCGNVAGLLSWTLAMAIFYGINREVLPLKANLAKQEGRLAVANAELGKAQALLDEKQAELDKVQAKFDAAMNEKMDLLNDADTCRKKMQAASTLIDGLSGEKIRWTQQSKEFKAQINRLVGDILLCTGFLSYLGPFNQIFRNYLLKDQWEMELRARKIPFTENLNLISMLVDPPTIGEWGLQGLPGDDLSIQNGIIVTKATRYPLLIDPQTQGKTWIKSKEKENDLQVTSLNHKYFRTHLEDSLSLGRPLLIEDIHEELDPALDNVLEKNFIKSGTTFKVKVGDKECDIMDTFKLYITTKLPNPAFTPEINAKTSVIDFTVTMKGLENQLLRRVILTEKQELEAERVKLLEDVTFNKRKMKELEDNLLYKLSATKGSLVDDESLIGVLRTTKQTAAEVSEKLHVAAETEIKINAAQEEFRPAATRGSILYFLITEMSMVNIMYQTSLAQFLKLFDQSMARSEKSPLPQKRITNIIEYLTYEVFTYSVRGLYENHKFLFVLLMTLKIDLQRGTVKHREFQALIKGGAALDLKACPPKPYRWILDMTWLNLVELSKLPQFAEIMNQISRNEKGWKSWFDKDAPEEEIIPDGYNDSLDTCHKLLLIRSWCPDRTVFQARKYIADSLEEKYTEPVILNLEKTWEESDTRTPLICFLSMGSDPTNQIDALAKKLKLECRTISMGQGQEVHARKLIQMSMQQGGWVLLQNCHLGLEFMEELLETLITTEASDDSFRVWITTEPHDRFPITLLQTSLKFTNEPPQGVRAGLKRTFAGINQDLLDISNLPMWKPMLYTVAFLHSTVQERRKFGPLGWNIPYEFNSADFSASVQFIQNHLDECDIKKGVSWNTVRYMIGEVQYGGRVTDDFDKRLLNCFARVWFSEKMFEPSFCFYTGYKIPLCKTLDQYFEYIQSLPSLDNPEVFGLHPNADITYQSNTASAVLETITNIQPKESGGGVGETREAIVYRLSEDMLSKLPPDYIPHEVKSRLIKMGHLNSMNIFLRQEIDRMQRVISILRSSLSDLKLAIEGTIIMSENLRDALDNMYDARIPQLWKRVSWDSSTLGFWFTELLERNAQFSTWIFEGRPNVFWMTGFFNPQGFLTAMRQEVTRAHKGWALDTVTIHNEVLRQTKEEITSPPGEGVYIYGLYMDGAAWDRRNGKLMESTPKVLFTQLPVLHIFAINSTAPKDPKLYVCPIYKKPRRTDLTFITVVYLRTVLSPDHWILRGVALLCDIK

SEQ ID NO: 26095 - protein, 217 aa, Homo sapiens
  Payload ID: 5161
  Gene Symbol: DNAH8
  Gene Name: dynein, axonemal, heavy chain 8
  ENSP ID: ENSP00000362375
MEKDAEDGAPSEGAEAPPSTEEAAPPRSEEEEAPRPPTVEAPAEDGFSPSAEDAVSSVVDYRDLIPSEEGIVLPDDHEADLNRVRQRLAPRPVQSVISEVLSLPSSRRSSRYRRSMSGLPNLQETLKERQARFREARESRRLKIDPSYKYIFEILAENLGLDIVTVEELILDCPSLEAFTNFFAKDGCKTLKFLYQEGDVPGIECGRTIAGATKGAK

SEQ ID NO: 26096 - protein, 135 aa, Homo sapiens
  Payload ID: 5161
  Gene Symbol: DNAH8
  Gene Name: dynein, axonemal, heavy chain 8
  ENSP ID: ENSP00000377916
  MOD_RES (1)..(1): Any amino acid
XTARKERKKQFIFSDGDCVDLNPEFGIFLTMNPGYAGRQELPENLKIQFRTVAMMVPDRQVHYDFGLRNILSVLRTLGSQKRARPEDSELSIVMRGLRDMNLSKLVDEDEPLFLSLINDLFPGLQLDSNTYAELQ

SEQ ID NO: 26097 - protein, 4188 aa, Homo sapiens
  Payload ID: 5161
  Gene Symbol: DNAH8
  Gene Name: dynein, axonemal, heavy chain 8
  ENSP ID: ENSP00000415331
MEKDAEDGAPSEGAEAPPSTEEAAPPRSEEEEAPRPPTVEAPAEDGFSPSAEDAVSSVVDYRDLIPSEEGIVLPDDHEADLNRVRQRLAPRPVQSVISEVLSLPSSRRSSRYRRSMSGLPNLQETLKERQARFREARESRRLKIDPSYKYIFEILAENLGLDIVTVEELILDCPSLEAFTNFFAKDGCKTLKFLYQEGDVPGIECGRTIAGATKGAKMMKLYIDNAAPDKLKGLCIFFVRCRNDVAINVKTIQEEALFTVLDASKGLLNGIRDMLANIFLPAVLATNNWGALNQSKQGESEKHIFTETINRYLSFLDGARISIEGTVKLKTIDNVNFSKLHTFEEVTAAASNSETVHQLEEVLMVWYKQIEQVLIESEQMRKEAGDSGPLTELEHWKRMSAKFNYIIEQIKGPSCKAVINVLNVAHSKLLKNWRDLDARITDTANESKDNVRYLYTLEKVCQPLYNHDLVSMAHGIQNLINAIRMIHGVSRYYNTSERMTSLFIKVTNQMVTACKAYITDGGLNHVWDQETPVVLKKIQDCIFLFKEYQASFHKTRKLISESSGEKSFEVSEMYIFGKFEAFCKRLEKITEMITVVQTYSTLSNSTIEGIDIMAIKFRNIYQGVKKKQYDILDPRRTEFDTDFLDFMTKINGLEVQIQAFMNSSFGKILSSQQALQLLQRFQKLNIPCLGLEINHTIERILQYYVAELDATKKLYHSQKDDPPLARNMPPIAGKILWVRQLYRRISEPINYFFKNSDILSSPDGKAVIRQYNKISYVLVEFEVVYHTAWIREISQLHYALQATLFVRHPETGKLLVNFDPKILEVVRETKCMIKMKLDVPEQAKRLLKLESKLKADKLYLQGLLQYYDELCQEVPSVFVNLMTPKMKKVESVLRQGLTVLTWSSLTLESFFQEVELVLDMFNQLLKKISDLCEMHIDTVLKEIAKTVLISLPESGATKVEDMLTLNETYTKEWADILNHKSKHVEEAVRELISIFEQIYEVKYTGKVGKQSEQRKHVVFGSETGEGENNDYEANIVNEFDTHDKEDEFKKECKEVFAFFSHQLLDSLQKATRLSLDTMKRRIFVASLYGRKQSEDIISFIKSEVHLAIPNVVMIPSLDDIQQAINRMIQLTLEVSRGVAHWGQQQIRPIKSVIPSPTTTDVTHQNTGKLLKKEERSFEEAIPARKLKNFYPGVAEHKDISKLVLLLSSSVNSLRKAAHEALQDFQKYKTLWTEDRDVKVKEFLANNPSLTEIRSEILHYATFEQEIDELKPIIVVGALELHTEPMKLALSIEAKAWKMLLCRYLNEEYKKKMSYMIAFINEYLKKLSRPIRDLDDVRFAMEALSCIRDNEIQMDMTLGPIEEAYAILNRFEVEVTKEESEAVDTLRYSFNKLQSKAVSVQEDLVQVQPKFKSNLLESVEVFREDVINFAEAYELEGPMVPNIPPQEASNRLQIFQASFDDLWRKFVTYSSGEQLFGLPVTDYEVLHKTRKELNLLQKLYGLYDTVMSSISGYYEILWGDVDIEKINAELLEFQNRCRKLPKGLKDWQAFLDLKKRIDDFSESCPLLEMMTNKAMKQRHWDRISELTGTPFDVESDSFCLRNIMEAPLLKHKDDIEDICISAIKEKDIEAKLTQVIENWTNQNLSFAAFKGKGELLLKGTESGEIITLMEDSLMVLGSLLSNRYNAPFKKNIQNWVYKLSTSSDIIEEWLVVQNLWVYLEAVFVGGDIAKQLPQEAKRFQNIDKSWIKIMQRAHENPNVINCCVGDETMGQLLPHLHEQLEVCQKSLTGYLEKKRLLFPRFFFVSDPVLLEILGQASDSHTIQPHLPAVSDNINEVTFHAKDYDRIMAVISREGEKIVLDNSVMAKGPVEIWLLDLLKMQMSSLHNIIRSAFYQISDSGFQLLPFLSHFPAQVGLLGIQMLWTHDSEEALRNAKDDRKIMQVTNQKFLDILNTLISQTTHDLSKFDRVKFETLITIHVHQRDIFDDLVKMHIKSPTDFEWLKQSRFYFKEDLDQTVVSITDVDFIYQNEFLGCTDRLVITPLTDRCYITLAQALGMNMGGAPAGPAGTGKTETTKDMGRCLGKYVVVFNCSDQMDFRGLGRIFKGLAQSGSWGCFDEFNRIELPVLSVAAQQIYIVLTARKERKKQFIFSDGDCVDLNPEFGIFLTMNPGYAGRQELPENLKIQFRTVAMMVPDRQIIMRVKLASCGFLENVILAQKFYVLYKLCEEQLTKQVHYDFGLRNILSVLRTLGSQKRARPEDSELSIVMRGLRDMNLSKLVDEDEPLFLSLINDLFPGLQLDSNTYAELQNAVAHQVQIEGLINHPPWNLKLVQLYETSLVRHGLMTLGPSGSGKTTVITILMKAQTECGRPHREMRMNPKAITAPQMFGRLDTATNDWTDGIFSTLWRKTLKAKKGENIFLILDGPVDAIWIENLNSVLDDNKTLTLANGDRIPMAPSCKLLFEVHNIENASPATVSRMGMVYISSSALSWRPILQAWLKKRTAQEAAVFLTLYEKVFEDTYTYMKLNLNPKMQLLECNYIVQSLNLLEGLIPSKEEGGVSCVEHLHKLFVFGLMWSLGALLELESREKLEAFLRQHESKLDLPEIPKGSNQTMYEFYVTDYGDWEHWNKKLQPYYYPTDSIPEYSSILVPNVDNIRTNFLIDTIAKQHKAVLLTGEQGTAKTVMVKAYLKKYDPEVQLSKSLNFSSATEPMMFQRTIESYVDKRIGSTYGPPGGRKMTVFIDDINMPVINEWGDQITNEIVRQMMEMEGMYSLDKPGDFTTIVDVQLIAAMIHPGGGRNDIPQRLKRQFTVFNCTLPSNASIDKIFGIIGCGYFDPCRSFKPQICEMIVNLVSVGRVLWQWTKVKMLPTPSKFHYIFNLRDLSRIWQGMLTIKAEECASIPTLLSLFKHECSRVIADRFITPEDEQWFNAHLTRAVEENIGSDAASCILPEPYFVDFLREMPEPTGDEPEDSVFEVPKIYELMPSFDFLAEKLQFYQRQFNEIIRGTSLDLVFFKDAMTHLIKISRIIRTSCGNALLVGVGGSGKQSLSRLASFIAGYQIFQITLTRSYNVTNLTDDLKALYKVAGADGKGITFIFTDSEIKDEAFLEYLNNLLSSGEISNLFARDEMDEITQGLISVMKRELPRHPPTFDNLYEYFISRSRKNLHVVLCFSPVGEKFRARSLKFPGLISGCTMDWFSRWPREALIAVASYFLSDYNIVCSSEIKRQVVETMGLFHDMVSESCESYFQRYRRRAHVTPKSYLSFINGYKNIYAEKVKFINEQAERMNIGLDKLMEASESVAKLSQDLAVKEKELAVASIKADEVLAEVTVSAQASAKIKNEVQEVKDKAQKIVDEIDSEKVKAESKLEAAKPALEEAEAALNTIKPNDIATVRKLAKPPHLIMRIMDCVLLLFQKKIDPVTMDPEKSCCKPSWGESLKLMSATGFLWSLQQFPKDTINEETVELLQPYFNMDDYTFESAKKVCGNVAGLLSWTLAMAIFYGINREVLPLKANLAKQEGRLAVANAELGKAQALLDEKQAELDKVQAKFDAAMNEKMDLLNDADTCRKKMQAASTLIDGLSGEKIRWTQQSKEFKAQINRLVGDILLCTGFLSYLGPFNQIFRNYLLKDQWEMELRARKIPFTENLNLISMLVDPPTIGEWGLQGLPGDDLSIQNGIIVTKATRYPLLIDPQTQGKTWIKSKEKENDLQVTSLNHKYFRTHLEDSLSLGRPLLIEDIHEELDPALDNVLEKNFIKSGTTFKVKVGDKECDIMDTFKLYITTKLPNPAFTPEINAKTSVIDFTVTMKGLENQLLRRVILTEKQELEAERVKLLEDVTFNKRKMKELEDNLLYKLSATKGSLVDDESLIGVLRTTKQTAAEVSEKLHVAAETEIKINAAQEEFRPAATRGSILYFLITEMSMVNIMYQTSLAQFLKLFDQSMARSEKSPLPQKRITNIIEYLTYEVFTYSVRGLYENHKFLFVLLMTLKIDLQRGTVKHREFQALIKGGAALDLKACPPKPYRWILDMTWLNLVELSKLPQFAEIMNQISRNEKGWKSWFDKDAPEEEIIPDGYNDSLDTCHKLLLIRSWCPDRTVFQARKYIADSLEEKYTEPVILNLEKTWEESDTRTPLICFLSMGSDPTNQIDALAKKLKLECRTISMGQGQEVHARKLIQMSMQQVCDKRLLLLQHYC

SEQ ID NO: 26098 - protein, 4486 aa, Homo sapiens
  Payload ID: 5162
  Gene Symbol: DNAH9
  Gene Name: dynein, axonemal, heavy chain 9
  Uniprot ID: Q9NYC9
  ENSP ID: ENSP00000262442
MRLAEERAALAAENADGEPGADRRLRLLGTYVAMSLRPAAGAWERCAGSAEAEQLLQAFLGRDAAEGPRPLLVVRPGPRGLAIRPGLEVGPESGLAGAKALFFLRTGPEPPGPDSFRGAVVCGDLPAAPLEHLAALFSEVVLPVLANEKNRLNWPHMICEDVRRHAHSLQCDLSVILEQVKGKTLLPLPAGSEKMEFADSKSETVLDSIDKSVIYAIESAVIKWSYQVQVVLKRESSQPLLQGENPTPKVELEFWKSRYEDLKYIYNQLRTITVRGMAKLLDKLQSSYFPAFKAMYRDVVAALAEAQDIHVHLIPLQRHLEALENAEFPEVKPQLRPLLHVVCLIWATCKSYRSPGRLTVLLQEICNLLIQQASNYLSPEDLLRSEVEESQRKLQVVSDTLSFFKQEFQDRRENLHTYFKENQEVKEWDFQSSLVFVRLDGFLGQLHVVEGLLKTALDFHKLGKVEFSGVRGNALSQQVQQMHEEFQEMYRLLSGSSSDCLYLQSTDFENDVSEFNQKVEDLDRRLGTIFIQAFDDAPGLEHAFKLLDIAGNLLERPLVARDTSDKYLVLIQMFNKDLDAVRMIYSQHVQEEAELGFSPVHKNMPTVAGGLRWAQELRQRIQGPFSNFGRITHPCMESAEGKRMQQKYEDMLSLLEKYETRLYEDWCRTVSEKSQYNLSQPLLKRDPETKEITINFNPQLISVLKEMSYLEPREMKHMPETAAAMFSSRDFYRQLVANLELMANWYNKVMKTLLEVEFPLVEEELQNIDLRLRAAEETLNWKTEGICDYVTEITSSIHDLEQRIQKTKDNVEEIQNIMKTWVTPIFKTKDGKRESLLSLDDRHDRMEKYYNLIKESGLKIHALVQENLGLFSADPTSNIWKTYVNSIDNLLLNGFFLAIECSLKYLLENTECKAGLTPIFEAQLSLAIPELVFYPSLESGVKGGFCDIVEGLITSIFRIPSLVPRLSPQNGSPHYQVDLDGIPDLANMRRTLMERVQRMMGLCCGYQSTFSQYSYLYVEDRKEVLGQFLLYGHILTPEEIEDHVEDGIPENPPLLSQFKVQIDSYETLYEEVCRLEPIKVFDGWMKIDIRPFKASLLNIIKRWSLLFKQHLVDHVTHSLANLDAFIKKSESGLLKKVEKGDFQGLVEIMGHLMAVKERQSNTDEMFEPLKQTIELLKTYEQELPETVFKQLEELPEKWNNIKKVAITVKQQVAPLQANEVTLLRQRCTAFDAEQQQFWEQFHKEAPFRFDSIHPHQMLDARHIEIQQMESTMASISESASLFEVNVPDYKQLRQCRKEVCQLKELWDTIGMVTSSIHAWETTPWRNINVEAMELECKQFARHIRNLDKEVRAWDAFTGLESTVWNTLSSLRAVAELQNPAIRERHWRQLMQATGVSFTMDQDTTLAHLLQLQLHHYEDEVRGIVDKAAKEMGMEKTLKELQTTWAGMEFQYEPHPRTNVPLLCSDEDLIEVLEDNQVQLQNLVMSKYVAFFLEEVSGWQKKLSTVDAVISIWFEVQRTWTHLESIFTGSEDIRAQLPQDSKRFEGIDIDFKELAYDAQKIPNVVQTTNKPGLYEKLEDIQGRLCLCEKALAEYLDTKRLAFPRFYFLSSSDLLDILSNGTAPQQVQRHLSKLFDNMAKMRFQLDASGEPTKTSLGMYSKEEEYVAFSEPCDCSGQVEIWLNHVLGHMKATVRHEMTEGVTAYEEKPREQWLFDHPAQVALTCTQIWWTTEVGMAFARLEEGYESAMKDYYKKQVAQLKTLITMLIGQLSKGDRQKIMTICTIDVHARDVVAKMIAQKVDNAQAFLWLSQLRHRWDDEVKHCFANICDAQFLYSYEYLGNTPRLVITPLTDRCYITLTQSLHLTMSGAPAGPAGTGKTETTKDLGRALGILVYVFNCSEQMDYKSCGNIYKGLAQTGAWGCFDEFNRISVEVLSVVAVQVKSIQDAIRDKKQWFSFLGEEISLNPSVGIFITMNPGYAGRTELPENLKSLFRPCAMVVPDFELICEIMLVAEGFIEAQSLARKFITLYQLCKELLSKQDHYDWGLRAIKSVLVVAGSLKRGDPDRPEDQVLMRSLRDFNIPKIVTDDMPIFMGLIGDLFPALDVPRRRDPNFEALVRKAIVDLKLQAEDNFVLKVVQLEELLAVRHSVFVVGGAGTGKSQVLRSLHKTYQIMKRRPVWTDLNPKAVTNDELFGIINPATGEWKDGLFSSIMRELANITHDGPKWILLDGDIDPMWIESLNTVMDDNKVLTLASNERIPLNPTMKLLFEISHLRTATPATVSRAGILYINPADLGWNPPVSSWIEKREIQTERANLTILFDKYLPTCLDTLRTRFKKIIPIPEQSMVQMVCHLLECLLTTEDIPADCPKEIYEHYFVFAAIWAFGGAMVQDQLVDYRAEFSKWWLTEFKTVKFPSQGTIFDYYIDPETKKFEPWSKLVPQFEFDPEMPLQACLVHTSETIRVCYFMERLMARQRPVMLVGTAGTGKSVLVGAKLASLDPEAYLVKNVPFNYYTTSAMLQAVLEKPLEKKAGRNYGPPGNKKLIYFIDDMNMPEVDAYGTVQPHTIIRQHLDYGHWYDRSKLSLKEITNVQYVSCMNPTAGSFTINPRLQRHFSVFVLSFPGADALSSIYSIILTQHLKLGNFPASLQKSIPPLIDLALAFHQKIATTFLPTGIKFHYIFNLRDFANIFQGILFSSVECVKSTWDLIRLYLHESNRVYRDKMVEEKDFDLFDKIQTEVLKKTFDDIEDPVEQTQSPNLYCHFANGIGEPKYMPVQSWELLTQTLVEALENHNEVNTVMDLVLFEDAMRHVCHINRILESPRGNALLVGVGGSGKQSLTRLAAFISSMDVFQITLRKGYQIQDFKMDLASLCLKAGVKNLNTVFLMTDAQVADERFLVLINDLLASGEIPDLYSDDEVENIISNVRNEVKSQGLVDNRENCWKFFIDRIRRQLKVTLCFSPVGNKLRVRSRKFPAIVNCTAIHWFHEWPQQALESVSLRFLQNTEGIEPTVKQSISKFMAFVHTSVNQTSQSYLSNEQRYNYTTPKSFLEFIRLYQSLLHRHRKELKCKTERLENGLLKLHSTSAQVDDLKAKLAAQEVELKQKNEDADKLIQVVGVETDKVSREKAMADEEEQKVAVIMLEVKQKQKDCEEDLAKAEPALTAAQAALNTLNKTNLTELKSFGSPPLAVSNVSAAVMVLMAPRGRVPKDRSWKAAKVTMAKVDGFLDSLINFNKENIHENCLKAIRPYLQDPEFNPEFVATKSYAAAGLCSWVINIVRFYEVFCDVEPKRQALNKATADLTAAQEKLAAIKAKIAHLNENLAKLTARFEKATADKLKCQQEAEVTAVTISLANRLVGGLASENVRWADAVQNFKQQERTLCGDILLITAFISYLGFFTKKYRQSLLDRTWRPYLSQLKTPIPVTPALDPLRMLMDDADVAAWQNEGLPADRMSVENATILINCERWPLMVDPQLQGIKWIKNKYGEDLRVTQIGQKGYLQIIEQALEAGAVVLIENLEESIDPVLGPLLGREVIKKGRFIKIGDKECEYNPKFRLILHTKLANPHYQPELQAQATLINFTVTRDGLEDQLLAAVVSMERPDLEQLKSDLTKQQNGFKITLKTLEDSLLSRLSSASGNFLGETVLVENLEITKQTAAEVEKKVQEAKVTEVKINEAREHYRPAAARASLLYFIMNDLSKIHPMYQFSLKAFSIVFQKAVERAAPDESLRERVANLIDSITFSVYQYTIRGLFECDKLTYLAQLTFQILLMNREVNAVELDFLLRSPVQTGTASPVEFLSHQAWGAVKVLSSMEEFSNLDRDIEGSAKSWKKFVESECPEKEKLPQEWKNKTALQRLCMLRAMRPDRMTYALRDFVEEKLGSKYVVGRALDFATSFEESGPATPMFFILSPGVDPLKDVESQGRKLGYTFNNQNFHNVSLGQGQEVVAEAALDLAAKKGHWVILQNIHLVAKWLSTLEKKLEEHSENSHPEFRVFMSAEPAPSPEGHIIPQGILENSIKITNEPPTGMHANLHKALDNFTQDTLEMCSRETEFKSILFALCYFHAVVAERRKFGPQGWNRSYPFNTGDLTISVNVLYNFLEANAKVPYDDLRYLFGEIMYGGHITDDWDRRLCRTYLGEFIRPEMLEGELSLAPGFPLPGNMDYNGYHQYIDAELPPESPYLYGLHPNAEIGFLTQTSEKLFRTVLELQPRDSQARDGAGATREEKVKALLEEILERVTDEFNIPELMAKVEERTPYIVVAFQECGRMNILTREIQRSLRELELGLKGELTMTSHMENLQNALYFDMVPESWARRAYPSTAGLAAWFPDLLNRIKELEAWTGDFTMPSTVWLTGFFNPQSFLTAIMQSTARKNEWPLDQMALQCDMTKKNREEFRSPPREGAYIHGLFMEGACWDTQAGIITEAKLKDLTPPMPVMFIKAIPADKQDCRSVYSCPVYKTSQRGPTYVWTFNLKTKENPSKWVLAGVALLLQI

SEQ ID NO: 26099 - protein, 4410 aa, Homo sapiens
  Payload ID: 5162
  Gene Symbol: DNAH9
  Gene Name: dynein, axonemal, heavy chain 9
  ENSP ID: ENSP00000414874
MRLAEERAALAAENADGEPGADRRLRLLGTYVAMSLRPAAGAWERCAGSAEAEQLLQAFLGRDAAEGPRPLLVVRPGPRGLAIRPGLEVGPESGLAGAKALFFLRTGPEPPGPDSFRGAVVCGDLPAAPLEHLAALFSEVVLPVLANEKNRLNWPHMICEDVRRHAHSLQCDLSVILEQVKGKTLLPLPAGSEKMEFADSKSETVLDSIDKSVIYAIESAVIKWSYQVQVVLKRESSQPLLQGENPTPKVELEFWKSRYEDLKYIYNQLRTITVRGMAKLLDKLQSSYFPAFKAMYRDVVAALAEAQDIHVHLIPLQRHLEALENAEFPEVKPQLRPLLHVVCLIWATCKSYRSPGRLTVLLQEICNLLIQQASNYLSPEDLLRSEVEESQRKLQVVSDTLSFFKQEFQDRRENLHTYFKENQEVKEWDFQSSLVFVRLDGFLGQLHVVEGLLKTALDFHKLGKVEFSGVRGNALSQQVQQMHEEFQEMYRLLSGSSSDCLYLQSTDFENDVSEFNQKVEDLDRRLGTIFIQAFDDAPGLEHAFKLLDIAGNLLERPLVARDTSDKYLVLIQMFNKDLDAVRMIYSQHVQEEAELGFSPVHKNMPTVAGGLRWAQELRQRIQGPFSNFGRITHPCMESAEGKRMQQKYEDMLSLLEKYETRLYEDWCRTVSEKSQYNLSQPLLKRDPETKEITINFNPQLISVLKEMSYLEPREMKHMPETAAAMFSSRDFYRQLVANLELMANWYNKVMKTLLEVEFPLVEEELQNIDLRLRAAEETLNWKTEGICDYVTEITSSIHDLEQRIQKTKDNVEEIQNIMKTWVTPIFKTKDGKRESLLSLDDRHDRMEKYYNLIKESGLKIHALVQENLGLFSADPTSNIWKTYVNSIDNLLLNGFFLAIECSLKYLLENTECKAGLTPIFEAQLSLAIPELVFYPSLESGVKGGFCDIVEGLITSIFRIPSLVPRLSPQNGSPHYQVDLDGIPDLANMRRTLMERVQRMMGLCCGYQSTFSQYSYLYVEDRKEVLGQFLLYGHILTPEEIEDHVEDGIPENPPLLSQFKVQIDSYETLYEEVCRLEPIKVFDGWMKIDIRPFKASLLNIIKRWSLLFKQHLVDHVTHSLANLDAFIKKSESGLLKKVEKGDFQGLVEIMGHLMAVKERQSNTDEMFEPLKQTIELLKTYEQELPETVFKQLEELPEKWNNIKKVAITVKQQVAPLQANEVTLLRQRCTAFDAEQQQFWEQFHKEAPFRFDSIHPHQMLDARHIEIQQMESTMASISESASLFEVNVPDYKQLRQCRKEVCQLKELWDTIGMVTSSIHAWETTPWRNINVEAMELECKQFARHIRNLDKEVRAWDAFTGLESTVWNTLSSLRAVAELQNPAIRERHWRQLMQATGVSFTMDQDTTLAHLLQLQLHHYEDEVRGIVDKAAKEMGMEKTLKELQTTWAGMEFQYEPHPRTNVPLLCSDEDLIEVLEDNQVQLQNLVMSKYVAFFLEEVSGWQKKLSTVDAVISIWFEVQRTWTHLESIFTGSEDIRAQLPQDSKRFEGIDIDFKELAYDAQKIPNVVQTTNKPGLYEKLEDIQGRLCLCEKALAEYLDTKRLAFPRFYFLSSSDLLDILSNGTAPQQVQRHLSKLFDNMAKMRFQLDASGEPTKTSLGMYSKEEEYVAFSEPCDCSGQVEIWLNHVLGHMKATVRHEMTEGVTAYEEKPREQWLFDHPAQVALTCTQIWWTTEVGMAFARLEEGYESAMKDYYKKQVAQLKTLITMLIGQLSKGDRQKIMTICTIDVHARDVVAKMIAQKVDNAQAFLWLSQLRHRWDDEVKHCFANICDAQFLYSYEYLGNTPRLVITPLTDRCYITLTQSLHLTMSGAPAGPAGTGKTETTKDLGRALGILVYVFNCSEQMDYKSCGNIYKGLAQTGAWGCFDEFNRISVEVLSVVAVQVKSIQDAIRDKKQWFSFLGEEISLNPSVGIFITMNPGYAGRTELPENLKSLFRPCAMVVPDFELICEIMLVAEGFIEAQSLARKFITLYQLCKELLSKQDHYDWGLRAIKSVLVVAGSLKRGDPDRPEDQVLMRSLRDFNIPKIVTDDMPIFMGLIGDLFPALDVPRRRDPNFEALVRKAIVDLKLQAEDNFVLKVVQLEELLAVRHSVFVVGGAGTGKSQVLRSLHKTYQIMKRRPVWTDLNPKAVTNDELFGIINPATGEWKDGLFSSIMRELANITHDGPKWILLDGDIDPMWIESLNTVMDDNKVLTLASNERIPLNPTMKLLFEISHLRTATPATVSRAGILYINPADLGWNPPVSSWIEKREIQTERANLTILFDKYLPTCLDTLRTRFKKIIPIPEQSMVQMVCHLLECLLTTEDIPADCPKEIYEHYFVFAAIWAFGGAMVQDQLVDYRAEFSKWWLTEFKTVKFPSQGTIFDYYIDPETKKFEPWSKLVPQFEFDPEMPLQACLVHTSETIRVCYFMERLMARQRPVMLVGTAGTGKSVLVGAKLASLDPEAYLVKNVPFNYYTTSAMLQAVLEKPLEKKAGRNYGPPGNKKLIYFIDDMNMPEVDAYGTVQPHTIIRQHLDYGHWYDRSKLSLKEITNVQYVSCMNPTAGSFTINPRLQRHFSVFVLSFPGADALSSIYSIILTQHLKLGNFPASLQKSIPPLIDLALAFHQKIATTFLPTGIKFHYIFNLRDFANIFQGILFSSVECVKSTWDLIRLYLHESNRVYRDKMVEEKDFDLFDKIQTEVLKKTFDDIEDPVEQTQSPNLYCHFANGIGEPKYMPVQSWELLTQTLVEALENHNEVNTVMDLVLFEDAMRHVCHINRILESPRGNALLVGVGGSGKQSLTRLAAFISSMDVFQITLRKGYQIQDFKMDLASLCLKAGVKNLNTVFLMTDAQVADERFLVLINDLLASGEIPDLYSDDEVENIISNVRNEVKSQGLVDNRENCWKFFIDRIRRQLKVTLCFSPVGNKLRVRSRKFPAIVNCTAIHWFHEWPQQALESVSLRFLQNTEGIEPTVKQSISKFMAFVHTSVNQTSQSYLSNEQRYNYTTPKSFLEFIRLYQSLLHRHRKELKCKTERLENGLLKLHSTSAQVDDLKAKLAAQEVELKQKNEDADKLIQVVGVETDKVSREKAMADEEEQKVAVIMLEVKQKQKDCEEDLAKAEPALTAAQAALNTLNKTNLTELKSFGSPPLAVSNVSAAVMVLMAPRGRVPKDRSWKAAKVTMAKVDGFLDSLINFNKENIHENCLKAIRPYLQDPEFNPEFVATKSYAAAGLCSWVINIVRFYEVFCDVEPKRQALNKATADLTAAQEKLAAIKAKIAHLNENLAKLTARFEKATADKLKCQQEAEVTAVTISLANRLVGGLASENVRWADAVQNFKQQERTLCGDILLITAFISYLGFFTKKYRQSLLDRTWRPYLSQLKTPIPVTPALDPLRMLMDDADVAAWQNEGLPADRMSVENATILINCERWPLMVDPQLQGIKWIKNKYGEDLRVTQIGQKGYLQIIEQALEAGAVVLIENLEESIDPVLGPLLGREVIKKGRFIKIGDKECEYNPKFRLILHTKLANPHYQPELQAQATLINFTVTRDGLEDQLLAAVVSMERPDLEQLKSDLTKQQNGFKITLKTLEDSLLSRLSSASGNFLGETVLVENLEITKQTAAEVEKKVQEAKVTEVKINEAREHYRPAAARASLLYFIMNDLSKIHPMYQFSLKAFSIVFQKAVERAAPDESLRERVANLIDSITFSVYQYTIRGLFECDKLTYLAQLTFQILLMNREVNAVELDFLLRSPVQTGTASPVEFLSHQAWGAVKVLSSMEEFSNLDRDIEGSAKSWKKFVESECPEKEKLPQEWKNKTALQRLCMLRAMRPDRMTYALRDFVEEKLGSKYVVGRALDFATSFEESGPATPMFFILSPGVDPLKDVESQGRKLGYTFNNQNFHNVSLGQGQEVVAEAALDLAAKKGHWVILQDTLEMCSRETEFKSILFALCYFHAVVAERRKFGPQGWNRSYPFNTGDLTISVNVLYNFLEANAKVPYDDLRYLFGEIMYGGHITDDWDRRLCRTYLGEFIRPEMLEGELSLAPGFPLPGNMDYNGYHQYIDAELPPESPYLYGLHPNAEIGFLTQTSEKLFRTVLELQPRDSQARDGAGATREEKVKALLEEILERVTDEFNIPELMAKVEERTPYIVVAFQECGRMNILTREIQRSLRELELGLKGELTMTSHMENLQNALYFDMVPESWARRAYPSTAGLAAWFPDLLNRIKELEAWTGDFTMPSTVWLTGFFNPQSFLTAIMQSTARKNEWPLDQMALQCDMTKKNREEFRSPPREGAYIHGLFMEGACWDTQAGIITEAKLKDLTPPMPVMFIKAIPADKQDCRSVYSCPVYKTSQRGPTYVWTFNLKTKENPSKWVLAGVALLLQI

SEQ ID NO: 26100 - protein, 284 aa, Homo sapiens
  Payload ID: 5162
  Gene Symbol: DNAH9
  Gene Name: dynein, axonemal, heavy chain 9
  ENSP ID: ENSP00000463622
NVSAAVMVLMAPRGRVPKDRSWKAAKVTMAKVDGFLDSLINFNKENIHENCLKAIRPYLQDPEFNPEFVATKSYAAAGLCSWVINIVRFYEVFCDVEPKRQALNKATADLTAAQEKLAAIKAKIAHLNENLAKLTARFEKATADKLKCQQEAEVTAVTISLANRLTPIPVTPALDPLRMLMDDADVAAWQNEGLPADRMSVENATILINCERWPLMVDPQLQGIKWIKNKYGEDLRVTQIGQKGYLQIIEQALEAGAVVLIENLEESIDPVLGPLLGREVIKKG

SEQ ID NO: 26101 - protein, 319 aa, Homo sapiens
  Payload ID: 5162
  Gene Symbol: DNAH9
  Gene Name: dynein, axonemal, heavy chain 9
  ENSP ID: ENSP00000463782
MRLAEERAALAAENADGEPGADRRLRLLGTYVAMSLRPAAGAWERCAGSAEAEQLLQAFLGRDAAEGPRPLLVVRPGPRGLAIRPGLEVGPESGLAGAKALFFLRTGPEPPGPDSFRGAVVCGDLPAAPLEHLAALFSEVVLPVLANEKNRLNWPHMICEDVRRHAHSLQCDLSVILEQVKGKTLLPLPAGSEKMEFADSKSETVLDSIDKSVIYAIESAVIKWSYQVQVVLKRESSQPLLQGENPTPKVELEFWKSRYEDLKYIYNQLRTITVRGMAKLLDKLQSSYFPAFKAMYRDVVAGEDQQVFSQMCLTQVTVE

SEQ ID NO: 26102 - protein, 87 aa, Homo sapiens
  Payload ID: 5162
  Gene Symbol: DNAH9
  Gene Name: dynein, axonemal, heavy chain 9
  ENSP ID: ENSP00000466691
PTPKVELEFWKSRYEDLKYIYNQLRTITVRGMAKLLDKLQSSYFPAFKAMYRDVVADGTAISWPFEHQTRSTLIKIAKPAKSMIRSR

SEQ ID NO: 26103 - protein, 43 aa, Homo sapiens
  Payload ID: 5162
  Gene Symbol: DNAH9
  Gene Name: dynein, axonemal, heavy chain 9
  ENSP ID: ENSP00000467192
YRDVVAAPFCIFYSYCQMGLQFPGHLSTRQDLRLSKLPSQQSL

SEQ ID NO: 26104 - protein, 798 aa, Homo sapiens
  Payload ID: 5162
  Gene Symbol: DNAH9
  Gene Name: dynein, axonemal, heavy chain 9
  Uniprot ID: Q9NYC9
  ENSP ID: ENSP00000476951
MNDLSKIHPMYQFSLKAFSIVFQKAVERAAPDESLRERVANLIDSITFSVYQYTIRGLFECDKLTYLAQLTFQILLMNREVNAVELDFLLRSPVQTGTASPVEFLSHQAWGAVKVLSSMEEFSNLDRDIEGSAKSWKKFVESECPEKEKLPQEWKNKTALQRLCMLRAMRPDRMTYALRDFVEEKLGSKYVVGRALDFATSFEESGPATPMFFILSPGVDPLKDVESQGRKLGYTFNNQNFHNVSLGQGQEVVAEAALDLAAKKGHWVILQNIHLVAKWLSTLEKKLEEHSENSHPEFRVFMSAEPAPSPEGHIIPQGILENSIKITNEPPTGMHANLHKALDNFTQDTLEMCSRETEFKSILFALCYFHAVVAERRKFGPQGWNRSYPFNTGDLTISVNVLYNFLEANAKVPYDDLRYLFGEIMYGGHITDDWDRRLCRTYLGEFIRPEMLEGELSLAPGFPLPGNMDYNGYHQYIDAELPPESPYLYGLHPNAEIGFLTQTSEKLFRTVLELQPRDSQARDGAGATREEKVKALLEEILERVTDEFNIPELMAKVEERTPYIVVAFQECGRMNILTREIQRSLRELELGLKGELTMTSHMENLQNALYFDMVPESWARRAYPSTAGLAAWFPDLLNRIKELEAWTGDFTMPSTVWLTGFFNPQSFLTAIMQSTARKNEWPLDQMALQCDMTKKNREEFRSPPREGAYIHGLFMEGACWDTQAGIITEAKLKDLTPPMPVMFIKAIPADKQDCRSVYSCPVYKTSQRGPTYVWTFNLKTKENPSKWVLAGVALLLQI

SEQ ID NO: 26105 - protein, 699 aa, Homo sapiens
  Payload ID: 5163
  Gene Symbol: DNAI1
  Gene Name: dynein, axonemal, intermediate chain 1
  Uniprot ID: Q9UI46
  ENSP ID: ENSP00000242317
MIPASAKAPHKQPHKQSISIGRGTRKRDEDSGTEVGEGTDEWAQSKATVRPPDQLELTDAELKEEFTRILTANNPHAPQNIVRYSFKEGTYKPIGFVNQLAVHYTQVGNLIPKDSDEGRRQHYRDELVAGSQESVKVISETGNLEEDEEPKELETEPGSQTDVPAAGAAEKVTEEELMTPKQPKERKLTNQFNFSERASQTYNNPVRDRECQTEPPPRTNFSATANQWEIYDAYVEELEKQEKTKEKEKAKTPVAKKSGKMAMRKLTSMESQTDDLIKLSQAAKIMERMVNQNTYDDIAQDFKYYDDAADEYRDQVGTLLPLWKFQNDKAKRLSVTALCWNPKYRDLFAVGYGSYDFMKQSRGMLLLYSLKNPSFPEYMFSSNSGVMCLDIHVDHPYLVAVGHYDGNVAIYNLKKPHSQPSFCSSAKSGKHSDPVWQVKWQKDDMDQNLNFFSVSSDGRIVSWTLVKRKLVHIDVIKLKVEGSTTEVPEGLQLHPVGCGTAFDFHKEIDYMFLVGTEEGKIYKCSKSYSSQFLDTYDAHNMSVDTVSWNPYHTKVFMSCSSDWTVKIWDHTIKTPMFIYDLNSAVGDVAWAPYSSTVFAAVTTDGKAHIFDLAINKYEAICNQPVAAKKNRLTHVQFNLIHPIIIVGDDRGHIISLKLSPNLRKMPKEKKGQEVQKGPAVEIAKLDKLLNLVREVKIKT

SEQ ID NO: 26106 - protein, 289 aa, Homo sapiens
  Payload ID: 5163
  Gene Symbol: DNAI1
  Gene Name: dynein, axonemal, intermediate chain 1
  ENSP ID: ENSP00000395396
MIPASAKAPHKQPHKQDEDSGTEVGEGTDEWAQSKATVRPPDQLELTDAELKEEFTRILTANNPHAPQNIVRYSFKEGTYKPIGFVNQLAVHYTQVGNLIPKDSDEGRRQHYRDELVAGSQESVKVISETGNLEEDEEPKELETEPGSQTDVPAAGAAEKVTEEELMTPKQPKERKLTNQFNFSERASQTYNNPVRDRECQTEPPPRTNFSATANQWEIYDAYVEELEKQEKTKEKEKAKTPVAKKSGKMAMRKLTSMESQTDDLIKLSQAAKIMERMVNQNTYDDIAQ

SEQ ID NO: 26107 - protein, 142 aa, Homo sapiens
  Payload ID: 5163
  Gene Symbol: DNAI1
  Gene Name: dynein, axonemal, intermediate chain 1
  ENSP ID: ENSP00000408129
  MOD_RES (1)..(1): Any amino acid
XCGTAFDFHKEIDYMFLVGTEEGKIYKCSKSYSSQFLDTYDAHNMSVDTVSWNPYHTKVFMSCSSDWTVKIWDHTIKTPMFIYDLNSAVGDVAWAPYSSTVFAAVTTDGKEKKGQEVQKGPAVEIAKLDKLLNLVREVKIKT

SEQ ID NO: 26108 - protein, 175 aa, Homo sapiens
  Payload ID: 5163
  Gene Symbol: DNAI1
  Gene Name: dynein, axonemal, intermediate chain 1
  ENSP ID: ENSP00000434296
  MOD_RES (1)..(1): Any amino acid
XDFMKQSRGMLLLYSLKNPSFPEYMFSSNSGVMCLDIHVDHPYLVAVGHYDGNVAIYNLKKPHSQPSFCSSAKSGKHSDPVWQVKWQKDDMDQNLNFFSVSSDGRIVSWTLVKRKLVHIDVIKLKVEGSTTEVPEGLQLHPVGCGTAFDFHKEIDYMFLVGTEEGKIYKDPDVHL

SEQ ID NO: 26109 - protein, 703 aa, Homo sapiens
  Payload ID: 5163
  Gene Symbol: DNAI1
  Gene Name: dynein, axonemal, intermediate chain 1
  ENSP ID: ENSP00000480538
MIPASAKAPHKQPHKQSISIGRGTRKRDEDSGTEVGEGTDEWAQSKATVRPPDQLELTDAELKEEFTRILTANNPHAPQNIVRYSFKEGTYKPIGFVNQLAVHYTQVGNLIPKDSDEGRRQHYRDELVAVSYQGSQESVKVISETGNLEEDEEPKELETEPGSQTDVPAAGAAEKVTEEELMTPKQPKERKLTNQFNFSERASQTYNNPVRDRECQTEPPPRTNFSATANQWEIYDAYVEELEKQEKTKEKEKAKTPVAKKSGKMAMRKLTSMESQTDDLIKLSQAAKIMERMVNQNTYDDIAQDFKYYDDAADEYRDQVGTLLPLWKFQNDKAKRLSVTALCWNPKYRDLFAVGYGSYDFMKQSRGMLLLYSLKNPSFPEYMFSSNSGVMCLDIHVDHPYLVAVGHYDGNVAIYNLKKPHSQPSFCSSAKSGKHSDPVWQVKWQKDDMDQNLNFFSVSSDGRIVSWTLVKRKLVHIDVIKLKVEGSTTEVPEGLQLHPVGCGTAFDFHKEIDYMFLVGTEEGKIYKCSKSYSSQFLDTYDAHNMSVDTVSWNPYHTKVFMSCSSDWTVKIWDHTIKTPMFIYDLNSAVGDVAWAPYSSTVFAAVTTDGKAHIFDLAINKYEAICNQPVAAKKNRLTHVQFNLIHPIIIVGDDRGHIISLKLSPNLRKMPKEKKGQEVQKGPAVEIAKLDKLLNLVREVKIKT

SEQ ID NO: 26110 - protein, 605 aa, Homo sapiens
  Payload ID: 5164
  Gene Symbol: DNAI2
  Gene Name: dynein, axonemal, intermediate chain 2
  Uniprot ID: Q9GZS0
  ENSP ID: ENSP00000308312
MEIVYVYVKKRSEFGKQCNFSDRQAELNIDIMPNPELAEQFVERNPVDTGIQCSISMSEHEANSERFEMETRGVNHVEGGWPKDVNPLELEQTIRFRKKVEKDENYVNAIMQLGSIMEHCIKQNNAIDIYEEYFNDEEAMEVMEEDPSAKTINVFRDPQEIKRAATHLSWHPDGNRKLAVAYSCLDFQRAPVGMSSDSYIWDLENPNKPELALKPSSPLVTLEFNPKDSHVLLGGCYNGQIACWDTRKGSLVAELSTIESSHRDPVYGTIWLQSKTGTECFSASTDGQVMWWDIRKMSEPTEVVILDITKKEQLENALGAISLEFESTLPTKFMVGTEQGIVISCNRKAKTSAEKIVCTFPGHHGPIYALQRNPFYPKNFLTVGDWTARIWSEDSRESSIMWTKYHMAYLTDAAWSPVRPTVFFTTRMDGTLDIWDFMFEQCDPTLSLKVCDEALFCLRVQDNGCLIACGSQLGTTTLLEVSPGLSTLQRNEKNVASSMFERETRREKILEARHREMRLKEKGKAEGRDEEQTDEELAVDLEALVSKAEEEFFDIIFAELKKKEADAIKLTPVPQQPSPEEDQVVEEGEEAAGEEGDEEVEEDLA

SEQ ID NO: 26111 - protein, 605 aa, Homo sapiens; identical to SEQ ID NO: 26110
  Payload ID: 5164
  Gene Symbol: DNAI2
  Gene Name: dynein, axonemal, intermediate chain 2
  Uniprot ID: Q9GZS0
  ENSP ID: ENSP00000400252

SEQ ID NO: 26112 - protein, 593 aa, Homo sapiens
  Payload ID: 5164
  Gene Symbol: DNAI2
  Gene Name: dynein, axonemal, intermediate chain 2
  Uniprot ID: Q9GZS0
  ENSP ID: ENSP00000461950
MEIVYVYVKKRSEFGKQCNFSDRQAELNIDIMPNPELAEQFVERNPVDTGIQCSISMSEHEANSERFEMETRGVNHVEGGWPKDVNPLELEQTIRFRKKVEKDENYVNAIMQLGSIMEHCIKQNNAIDIYEEYFNDEEAMEVMEEDPSAKTINVFRDPQEIKRAATHLSWHPDGNRKLAVAYSCLDFQRAPVGMSSDSYIWDLENPNKPELALKPSSPLVTLEFNPKDSHVLLGGCYNGQIACWDTRKGSLVAELSTIESSHRDPVYGTIWLQSKTGTECFSASTDGQVMWWDIRKMSEPTEVVILDITKKEQLENALGAISLEFESTLPTKFMVGTEQGIVISCNRKAKTSAEKIVCTFPGHHGPIYALQRNPFYPKNFLTVGDWTARIWSEDSRESSIMWTKYHMAYLTDAAWSPVRPTVFFTTRMDGTLDIWDFMFEQCDPTLSLKDNGCLIACGSQLGTTTLLEVSPGLSTLQRNEKNVASSMFERETRREKILEARHREMRLKEKGKAEGRDEEQTDEELAVDLEALVSKAEEEFFDIIFAELKKKEADAIKLTPVPQQPSPEEDQVVEEGEEAAGEEGDEEVEEDLA

SEQ ID NO: 26113 - protein, 168 aa, Homo sapiens
  Payload ID: 5164
  Gene Symbol: DNAI2
  Gene Name: dynein, axonemal, intermediate chain 2
  ENSP ID: ENSP00000462767
MEIVYVYVKKRSEFGKQCNFSDRQAELNIDIMPNPELAEQFVERNPVDTGIQCSISMSEHEANSERFEMETRGVNHVEGGWPKDVNPLELEQTIRFRKKVEKDENYVNAIMQLGSGPPGNQEGCHTPLLAPRWQQEVGSGILLLGFSAGTCGHEQRFIHLGPGKPQQA

SEQ ID NO: 26114 - protein, 662 aa, Homo sapiens
  Payload ID: 5164
  Gene Symbol: DNAI2
  Gene Name: dynein, axonemal, intermediate chain 2
  ENSP ID: ENSP00000464197
MRMQLLDKFLGSPHHPLLPAPTRLRTWSCPGRTCGDREGAGGVPHPTPSLCPPAAGTMEIVYVYVKKRSEFGKQCNFSDRQAELNIDIMPNPELAEQFVERNPVDTGIQCSISMSEHEANSERFEMETRGVNHVEGGWPKDVNPLELEQTIRFRKKVEKDENYVNAIMQLGSIMEHCIKQNNAIDIYEEYFNDEEAMEVMEEDPSAKTINVFRDPQEIKRAATHLSWHPDGNRKLAVAYSCLDFQRAPVGMSSDSYIWDLENPNKPELALKPSSPLVTLEFNPKDSHVLLGGCYNGQIACWDTRKGSLVAELSTIESSHRDPVYGTIWLQSKTGTECFSASTDGQVMWWDIRKMSEPTEVVILDITKKEQLENALGAISLEFESTLPTKFMVGTEQGIVISCNRKAKTSAEKIVCTFPGHHGPIYALQRNPFYPKNFLTVGDWTARIWSEDSRESSIMWTKYHMAYLTDAAWSPVRPTVFFTTRMDGTLDIWDFMFEQCDPTLSLKVCDEALFCLRVQDNGCLIACGSQLGTTTLLEVSPGLSTLQRNEKNVASSMFERETRREKILEARHREMRLKEKGKAEGRDEEQTDEELAVDLEALVSKAEEEFFDIIFAELKKKEADAIKLTPVPQQPSPEEDQVVEEGEEAAGEEGDEEVEEDLA

SEQ ID NO: 26115 - protein, 77 aa, Homo sapiens
  Payload ID: 5165
  Gene Symbol: DNAL1
  Gene Name: dynein, axonemal, light chain 1
  Uniprot ID: Q4LDG9
  ENSP ID: ENSP00000310360
MKKLKILYMSNNLVKDWAEFVKLAELPCLEDLVFVGNPLEEKHSAENNWIEEATKRVPKLKKLDGTPVIKGDEEEDN

SEQ ID NO: 26116 - protein, 103 aa, Homo sapiens
  Payload ID: 5165
  Gene Symbol: DNAL1
  Gene Name: dynein, axonemal, light chain 1
  ENSP ID: ENSP00000450744
MEAVGDTLEELWISYNFIEKLKGIHIMKKLKILYMSNNLVKDWAEFVKLAELPCLEDLVFVGNPLEEKHSAENNWIEEATKRVPKLKKLDGTPVIKGDEEEDN

SEQ ID NO: 26117 - protein, 52 aa, Homo sapiens
  Payload ID: 5165
  Gene Symbol: DNAL1
  Gene Name: dynein, axonemal, light chain 1
  ENSP ID: ENSP00000451101
MDASLSMLANCEKLSLSTNCIEKIANLNGLKNLRILSLGRNNIKNLNGLEAV

SEQ ID NO: 26118 - protein, 67 aa, Homo sapiens
  Payload ID: 5165
  Gene Symbol: DNAL1
  Gene Name: dynein, axonemal, light chain 1
  ENSP ID: ENSP00000451264
QRPSEAKEIKLYAQIPPIEKMDASLSMLANCEKLSLSTNCIEKIANLNGLRGSRGHIRRTVDLLQFY

SEQ ID NO: 26119 - protein, 138 aa, Homo sapiens
  Payload ID: 5165
  Gene Symbol: DNAL1
  Gene Name: dynein, axonemal, light chain 1
  ENSP ID: ENSP00000451547
MDASLSMLANCEKLSLSTNCIEKIANLNGLKNLRILSLGRNNIKNLNGLEAVGDTLEELWISYNFIEKLKGIHIMKKLKILYMSNNLVKDWAEFVKLAELPCLEDLVFVGNPLEEKHSAENNWIEEATKRVPKLKKLD

SEQ ID NO: 26120 - protein, 151 aa, Homo sapiens
  Payload ID: 5165
  Gene Symbol: DNAL1
  Gene Name: dynein, axonemal, light chain 1
  Uniprot ID: Q4LDG9
  ENSP ID: ENSP00000451834
MDASLSMLANCEKLSLSTNCIEKIANLNGLKNLRILSLGRNNIKNLNGLEAVGDTLEELWISYNFIEKLKGIHIMKKLKILYMSNNLVKDWAEFVKLAELPCLEDLVFVGNPLEEKHSAENNWIEEATKRVPKLKKLDGTPVIKGDEEEDN

SEQ ID NO: 26121 - protein, 190 aa, Homo sapiens
  Payload ID: 5165
  Gene Symbol: DNAL1
  Gene Name: dynein, axonemal, light chain 1
  Uniprot ID: Q4LDG9
  ENSP ID: ENSP00000452037
MAKATTIKEALARWEEKTGQRPSEAKEIKLYAQIPPIEKMDASLSMLANCEKLSLSTNCIEKIANLNGLKNLRILSLGRNNIKNLNGLEAVGDTLEELWISYNFIEKLKGIHIMKKLKILYMSNNLVKDWAEFVKLAELPCLEDLVFVGNPLEEKHSAENNWIEEATKRVPKLKKLDGTPVIKGDEEEDN

SEQ ID NO: 26122 - protein, 57 aa, Homo sapiens
  Payload ID: 5165
  Gene Symbol: DNAL1
  Gene Name: dynein, axonemal, light chain 1
  ENSP ID: ENSP00000452368
MKKLKILYMSNNLVKDWAEFVKLAELPCLEDLVFVGNPLEEKHSAENNWIEEATKRV

SEQ ID NO: 26123 - protein, 65 aa, Homo sapiens
  Payload ID: 5165
  Gene Symbol: DNAL1
  Gene Name: dynein, axonemal, light chain 1
  ENSP ID: ENSP00000453439
MKKLKILYMSNNLVKDWAEFVKLAELPCLEDLVFVGNPLEEKHSAENNWIEEATKRVPKLKKLDG

SEQ ID NO: 26124 - protein, 105 aa, Homo sapiens
  Payload ID: 5166
  Gene Symbol: DNAL4
  Gene Name: dynein, axonemal, light chain 4
  Uniprot ID: O96015
  ENSP ID: ENSP00000216068
MGETEGKKDEADYKRLQTFPLVRHSDMPEEMRVETMELCVTACEKFSNNNESAAKMIKETMDKKFGSSWHVVIGEGFGFEITHEVKNLLYLYFGGTLAVCVWKCS

SEQ ID NO: 26125 - protein, 68 aa, Homo sapiens
  Payload ID: 5166
  Gene Symbol: DNAL4
  Gene Name: dynein, axonemal, light chain 4
  ENSP ID: ENSP00000385712
MGETEGKKDEADYKRLQTFPLVRHSDMPEEMRVETMELCVTACEKFSNNNEVLPAVQAAPRAFDGPCG

SEQ ID NO: 26126 - protein, 280 aa, Homo sapiens
  Payload ID: 5167
  Gene Symbol: DNALI1
  Gene Name: dynein, axonemal, light intermediate chain 1
  Uniprot ID: O14645
  ENSP ID: ENSP00000296218
MVTANKAHTGQGSCWVATLASAMIPPADSLLKYDTPVLVSRNTEKRSPKARLLKVSPQQPGPSGSAPQPPKTKLPSTPCVPDPTKQAEEILNAILPPREWVEDTQLWIQQVSSTPSTRMDVVHLQEQLDLKLQQRQARETGICPVRRELYSQCFDELIREVTINCAERGLLLLRVRDEIRMTIAAYQTLYESSVAFGMRKALQAEQGKSDMERKIAELETEKRDLERQVNEQKAKCEATEKRESERRQVEEKKHNEEIQFLKRTNQQLKAQLEGIIAPKK

SEQ ID NO: 26127 - protein, 4646 aa, Homo sapiens [sequence omitted]

SEQ ID NO: 26128 - protein, 180 aa, Homo sapiens
  Payload ID: 5168
  Gene Symbol: DYNC1H1
  Gene Name: dynein, cytoplasmic 1, heavy chain 1
  ENSP ID: ENSP00000450674
  MOD_RES (1)..(1): Any amino acid
XQNLFTTWSHHLQQANIQFRTDIARTEYLSNADERLRWQASSLPADDLCTENAIMLKRFNRYPLIIDPSGQATEFIMNEYKDRKITRTSFLDDAFRKNLESALRFGNPLLVQVEFPPDLCSRVTFVNFTVTRSSLQSQCLNEVLKAERPDVDEKRSDLLKLQGEFQLRLRQLEKSLLQAL

SEQ ID NO: 26129 - protein, 645 aa, Homo sapiens
  Payload ID: 5169
  Gene Symbol: DYNC1I1
  Gene Name: dynein, cytoplasmic 1, intermediate chain 1
  Uniprot ID: O14576
  ENSP ID: ENSP00000320130
MSDKSDLKAELERKKQRLAQIREEKKRKEEERKKKEADMQQKKEPVQDDSDLDRKRRETEALLQSIGISPEPPLVQPLHFLTWDTCYFHYLVPTPMSPSSKSVSTPSEAGSQDSGDLGPLTRTLQWDTDPSVLQLQSDSELGRRLHKLGVSKVTQVDFLPREVVSYSKETQTPLATHQSEEDEEDEEMVESKVGQDSELENQDKKQEVKEAPPRELTEEEKQQILHSEEFLIFFDRTIRVIERALAEDSDIFFDYSGRELEEKDGDVQAGANLSFNRQFYDEHWSKHRVVTCMDWSLQYPELMVASYNNNEDAPHEPDGVALVWNMKFKKTTPEYVFHCQSSVMSVCFARFHPNLVVGGTYSGQIVLWDNRSHRRTPVQRTPLSAAAHTHPVYCVNVVGTQNAHNLITVSTDGKMCSWSLDMLSTPQESMELVYNKSKPVAVTGMAFPTGDVNNFVVGSEEGTVYTACRHGSKAGIGEVFEGHQGPVTGINCHMAVGPIDFSHLFVTSSFDWTVKLWTTKHNKPLYSFEDNADYVYDVMWSPVHPALFACVDGMGRLDLWNLNNDTEVPTASVAIEGASALNRVRWAQAGKEVAVGDSEGRIWVYDVGELAVPHNDEWTRFARTLVEIRANRADSEEEGTVELSA

SEQ ID NO: 26130 - protein, 608 aa, Homo sapiens
  Payload ID: 5169
  Gene Symbol: DYNC1I1
  Gene Name: dynein, cytoplasmic 1, intermediate chain 1
  Uniprot ID: O14576
  ENSP ID: ENSP00000352348
MSDKSDLKAELERKKQRLAQIREEKKRKEEERKKKEADMQQKKEPVQDDSDLDRKRRETEALLQSIGISPEPPLVPTPMSPSSKSVSTPSEAGSQDSGDLGPLTRRRLHKLGVSKVTQVDFLPREVVSYSKETQTPLATHQSEEDEEDEEMVESKVGQDSELENQDKKQEVKEAPPRELTEEEKQQILHSEEFLIFFDRTIRVIERALAEDSDIFFDYSGRELEEKDGDVQAGANLSFNRQFYDEHWSKHRVVTCMDWSLQYPELMVASYNNNEDAPHEPDGVALVWNMKFKKTTPEYVFHCQSSVMSVCFARFHPNLVVGGTYSGQIVLWDNRSHRRTPVQRTPLSAAAHTHPVYCVNVVGTQNAHNLITVSTDGKMCSWSLDMLSTPQESMELVYNKSKPVAVTGMAFPTGDVNNFVVGSEEGTVYTACRHGSKAGIGEVFEGHQGPVTGINCHMAVGPIDFSHLFVTSSFDWTVKLWTTKHNKPLYSFEDNADYVYDVMWSPVHPALFACVDGMGRLDLWNLNNDTEVPTASVAIEGASALNRVRWAQAGKEVAVGDSEGRIWVYDVGELAVPHNDEWTRFARTLVEIRANRADSEEEGTVELSA

SEQ ID NO: 26131 - protein, 628 aa, Homo sapiens
  Payload ID: 5169
  Gene Symbol: DYNC1I1
  Gene Name: dynein, cytoplasmic 1, intermediate chain 1
  Uniprot ID: O14576
  ENSP ID: ENSP00000392337
MSDKSDLKAELERKKQRLAQIREEKKRKEEERKKKEADMQQKKEPVQDDSDLDRKRRETEALLQSIGISPEPPLVPTPMSPSSKSVSTPSEAGSQDSGDLGPLTRTLQWDTDPSVLQLQSDSELGRRLHKLGVSKVTQVDFLPREVVSYSKETQTPLATHQSEEDEEDEEMVESKVGQDSELENQDKKQEVKEAPPRELTEEEKQQILHSEEFLIFFDRTIRVIERALAEDSDIFFDYSGRELEEKDGDVQAGANLSFNRQFYDEHWSKHRVVTCMDWSLQYPELMVASYNNNEDAPHEPDGVALVWNMKFKKTTPEYVFHCQSSVMSVCFARFHPNLVVGGTYSGQIVLWDNRSHRRTPVQRTPLSAAAHTHPVYCVNVVGTQNAHNLITVSTDGKMCSWSLDMLSTPQESMELVYNKSKPVAVTGMAFPTGDVNNFVVGSEEGTVYTACRHGSKAGIGEVFEGHQGPVTGINCHMAVGPIDFSHLFVTSSFDWTVKLWTTKHNKPLYSFEDNADYVYDVMWSPVHPALFACVDGMGRLDLWNLNNDTEVPTASVAIEGASALNRVRWAQAGKEVAVGDSEGRIWVYDVGELAVPHNDEWTRFARTLVEIRANRADSEEEGTVELSA

SEQ ID NO: 26132 - protein, 625 aa, Homo sapiens
  Payload ID: 5169
  Gene Symbol: DYNC1I1
  Gene Name: dynein, cytoplasmic 1, intermediate chain 1
  Uniprot ID: O14576
  ENSP ID: ENSP00000398118
MSDKSDLKAELERKKQRLAQIREEKKRKEEERKKKEADMQQKKEPVQDDSDLDRKRRETEALLQSIGISPEPPLVQPLHFLTWDTCYFHYLVPTPMSPSSKSVSTPSEAGSQDSGDLGPLTRRRLHKLGVSKVTQVDFLPREVVSYSKETQTPLATHQSEEDEEDEEMVESKVGQDSELENQDKKQEVKEAPPRELTEEEKQQILHSEEFLIFFDRTIRVIERALAEDSDIFFDYSGRELEEKDGDVQAGANLSFNRQFYDEHWSKHRVVTCMDWSLQYPELMVASYNNNEDAPHEPDGVALVWNMKFKKTTPEYVFHCQSSVMSVCFARFHPNLVVGGTYSGQIVLWDNRSHRRTPVQRTPLSAAAHTHPVYCVNVVGTQNAHNLITVSTDGKMCSWSLDMLSTPQESMELVYNKSKPVAVTGMAFPTGDVNNFVVGSEEGTVYTACRHGSKAGIGEVFEGHQGPVTGINCHMAVGPIDFSHLFVTSSFDWTVKLWTTKHNKPLYSFEDNADYVYDVMWSPVHPALFACVDGMGRLDLWNLNNDTEVPTASVAIEGASALNRVRWAQAGKEVAVGDSEGRIWVYDVGELAVPHNDEWTRFARTLVEIRANRADSEEEGTVELSA

SEQ ID NO: 26133 - protein, 116 aa, Homo sapiens
  Payload ID: 5169
  Gene Symbol: DYNC1I1
  Gene Name: dynein, cytoplasmic 1, intermediate chain 1
  ENSP ID: ENSP00000411957
MSDKSDLKAELERKKQRLAQIREEKKRKEEERKKKEADMQQKKEPVQDDSDLDRKRRETEALLQSIGISPEPPLVPTPMSPSSKSVSTPSEAGSQDSGDLGPLTRDEALLYSPGWS

SEQ ID NO: 26134 - protein, 628 aa, Homo sapiens; identical to SEQ ID NO: 26131
  Payload ID: 5169
  Gene Symbol: DYNC1I1
  Gene Name: dynein, cytoplasmic 1, intermediate chain 1
  Uniprot ID: O14576
  ENSP ID: ENSP00000412444

SEQ ID NO: 26135 - protein, 128 aa, Homo sapiens
  Payload ID: 5169
  Gene Symbol: DYNC1I1
  Gene Name: dynein, cytoplasmic 1, intermediate chain 1
  ENSP ID: ENSP00000428273
MSDKSDLKAELERKKQRLAQIREEKKRKEEERKKKEADMQQKKEPVQDDSDLDRKRRETEALLQSIGISPEPPLVPTPMSPSSKSVSTPSEAGSQDSGDLGPLTRTLQWDTDPSVLQLQSDSELGYMS

SEQ ID NO: 26136 - protein, 85 aa, Homo sapiens
  Payload ID: 5169
  Gene Symbol: DYNC1I1
  Gene Name: dynein, cytoplasmic 1, intermediate chain 1
  ENSP ID: ENSP00000428934
MSDKSDLKAELERKKQRLAQIREEKKRKEEERKKKEADMQQKKEPVQDDSDLDRKRRETEALLQSIGISPEPPLVPTPMSPSSKS

SEQ ID NO: 26137 - protein, 544 aa, Homo sapiens
  Payload ID: 5169
  Gene Symbol: DYNC1I1
  Gene Name: dynein, cytoplasmic 1, intermediate chain 1
  ENSP ID: ENSP00000438377
MSPSSKSVSTPSEAGSQDSGDLGPLTRTLQWDTDPSVLQLQSDSELGRRLHKLGVSKVTQVDFLPREVVSYSKETQTPLATHQSEEDEEDEEMVESKVGQDSELENQDKKQEVKEAPPRELTEEEKQQILHSEEFLIFFDRTIRVIERALAEDSDIFFDYSGRELEEKDGDVQAGANLSFNRQFYDEHWSKHRVVTCMDWSLQYPELMVASYNNNEDAPHEPDGVALVWNMKFKKTTPEYVFHCQSSVMSVCFARFHPNLVVGGTYSGQIVLWDNRSHRRTPVQRTPLSAAAHTHPVYCVNVVGTQNAHNLITVSTDGKMCSWSLDMLSTPQESMELVYNKSKPVAVTGMAFPTGDVNNFVVGSEEGTVYTACRHGSKAGIGEVFEGHQGPVTGINCHMAVGPIDFSHLFVTSSFDWTVKLWTTKHNKPLYSFEDNADYVYDVMWSPVHPALFACVDGMGRLDLWNLNNDTEVPTASVAIEGASALNRVRWAQAGKEVAVGDSEGRIWVYDVGEGLAMLPGWSQNSWTQAILLCWPPKVLGLQT

SEQ ID NO: 26138 - protein, 602 aa, Homo sapiens
  Payload ID: 5169
  Gene Symbol: DYNC1I1
  Gene Name: dynein, cytoplasmic 1, intermediate chain 1
  Uniprot ID: O14576
  ENSP ID: ENSP00000486363
MSDKSDLKAELERKKQRLAQIREEKKRKEEERKKKEADMQQKKEPVQDDSDLDRKRRETEALLQSIGISPEPPLVPTPMSPSSKSVSTPSEAGSQDSGDLGPLTRRRLHKLGVSKVTQVDFLPREVVSYSKETQTPLATHQSEEDEEDEEMVESKVGQDSELENQDKKQEVKEAPPRELTEEEKQQILHSEEFLIFFDRTIRVIERALAEDSDIFFDYSGRELEEKDGDVQAGANLSFNRQFYDEHWSKHRVVTCMDWSLQYPELMVASYNNNEDAPHEPDGVALVWNMKFKKTTPEYVFHCQSSVMSVCFARFHPNLVVGGTYSGQIVLWDNRSHRRTPVQRTPLSAAAHTHPVYCVNVVGTQNAHNLITVSTDGKMCSWSLDMLSTPQESMELVYNKSKPVAVTGMAFPTGDVNNFVVGSEEGTVYTACRHGSKAGIGEVFEGHQGPVTGINCHMAVGPIDFSHLFVTSSFDWTVKLWTTKHNKPLYSFEDNADYVYDVMWSPVHPALFACVDGMGRLDLWNLNNDTEVPTASVAIEGASALNRVRWAQAGKEVAVGDSEGRIWVYDVGEGLAMLPGWSQNSWTQAILLCWPPKVLGLQT

SEQ ID NO: 26139 - protein, 612 aa, Homo sapiens
  Payload ID: 5170
  Gene Symbol: DYNC1I2
  Gene Name: dynein, cytoplasmic 1, intermediate chain 2
  Uniprot ID: Q13409
  ENSP ID: ENSP00000339430
MSDKSELKAELERKKQRLAQIREEKKRKEEERKKKETDQKKEAVAPVQEESDLEKKRREAEALLQSMGLTPESPIVPPPMSPSSKSVSTPSEAGSQDSGDGAVGSRRGPIKLGMAKITQVDFPPREIVTYTKETQTPVMAQPKEDEEEDDDVVAPKPPIEPEEEKTLKKDEENDSKAPPHELTEEEKQQILHSEEFLSFFDHSTRIVERALSEQINIFFDYSGRDLEDKEGEIQAGAKLSLNRQFFDERWSKHRVVSCLDWSSQYPELLVASYNNNEDAPHEPDGVALVWNMKYKKTTPEYVFHCQSAVMSATFAKFHPNLVVGGTYSGQIVLWDNRSNKRTPVQRTPLSAAAHTHPVYCVNVVGTQNAHNLISISTDGKICSWSLDMLSHPQDSMELVHKQSKAVAVTSMSFPVGDVNNFVVGSEEGSVYTACRHGSKAGISEMFEGHQGPITGIHCHAAVGAVDFSHLFVTSSFDWTVKLWTTKNNKPLYSFEDNADYVYDVMWSPTHPALFACVDGMGRLDLWNLNNDTEVPTASISVEGNPALNRVRWTHSGREIAVGDSEGQIVIYDVGEQIAVPRNDEWARFGRTLAEINANRADAEEEAATRIPA

SEQ ID NO: 26140 - protein, 638 aa, Homo sapiens
  Payload ID: 5170
  Gene Symbol: DYNC1I2
  Gene Name: dynein, cytoplasmic 1, intermediate chain 2
  Uniprot ID: Q13409
  ENSP ID: ENSP00000380308
MSDKSELKAELERKKQRLAQIREEKKRKEEERKKKETDQKKEAVAPVQEESDLEKKRREAEALLQSMGLTPESPIVFSEYWVPPPMSPSSKSVSTPSEAGSQDSGDGAVGSRTLHWDTDPSVLQLHSDSDLGRGPIKLGMAKITQVDFPPREIVTYTKETQTPVMAQPKEDEEEDDDVVAPKPPIEPEEEKTLKKDEENDSKAPPHELTEEEKQQILHSEEFLSFFDHSTRIVERALSEQINIFFDYSGRDLEDKEGEIQAGAKLSLNRQFFDERWSKHRVVSCLDWSSQYPELLVASYNNNEDAPHEPDGVALVWNMKYKKTTPEYVFHCQSAVMSATFAKFHPNLVVGGTYSGQIVLWDNRSNKRTPVQRTPLSAAAHTHPVYCVNVVGTQNAHNLISISTDGKICSWSLDMLSHPQDSMELVHKQSKAVAVTSMSFPVGDVNNFVVGSEEGSVYTACRHGSKAGISEMFEGHQGPITGIHCHAAVGAVDFSHLFVTSSFDWTVKLWTTKNNKPLYSFEDNADYVYDVMWSPTHPALFACVDGMGRLDLWNLNNDTEVPTASISVEGNPALNRVRWTHSGREIAVGDSEGQIVIYDVGEQIAVPRNDEWARFGRTLAEINANRADAEEEAATRIPA

SEQ ID NO: 26141 - protein, 612 aa, Homo sapiens; identical to SEQ ID NO: 26139
  Payload ID: 5170
  Gene Symbol: DYNC1I2
  Gene Name: dynein, cytoplasmic 1, intermediate chain 2
  Uniprot ID: Q13409
  ENSP ID: ENSP00000386397

SEQ ID NO: 26142 - protein, 638 aa, Homo sapiens; identical to SEQ ID NO: 26140
  Payload ID: 5170
  Gene Symbol: DYNC1I2
  Gene Name: dynein, cytoplasmic 1, intermediate chain 2
  Uniprot ID: Q13409
  ENSP ID: ENSP00000386415

SEQ ID NO: 26143 - protein, 630 aa, Homo sapiens
  Payload ID: 5170
  Gene Symbol: DYNC1I2
  Gene Name: dynein, cytoplasmic 1, intermediate chain 2
  Uniprot ID: Q13409
  ENSP ID: ENSP00000386522
MSDKSELKAELERKKQRLAQIREEKKRKEEERKKKETDQKKEAVAPVQEESDLEKKRREAEALLQSMGLTPESPIAEQPLRVVTADTCLFHYLVPPPMSPSSKSVSTPSEAGSQDSGDGAVGSRRGPIKLGMAKITQVDFPPREIVTYTKETQTPVMAQPKEDEEEDDDVVAPKPPIEPEEEKTLKKDEENDSKAPPHELTEEEKQQILHSEEFLSFFDHSTRIVERALSEQINIFFDYSGRDLEDKEGEIQAGAKLSLNRQFFDERWSKHRVVSCLDWSSQYPELLVASYNNNEDAPHEPDGVALVWNMKYKKTTPEYVFHCQSAVMSATFAKFHPNLVVGGTYSGQIVLWDNRSNKRTPVQRTPLSAAAHTHPVYCVNVVGTQNAHNLISISTDGKICSWSLDMLSHPQDSMELVHKQSKAVAVTSMSFPVGDVNNFVVGSEEGSVYTACRHGSKAGISEMFEGHQGPITGIHCHAAVGAVDFSHLFVTSSFDWTVKLWTTKNNKPLYSFEDNADYVYDVMWSPTHPALFACVDGMGRLDLWNLNNDTEVPTASISVEGNPALNRVRWTHSGREIAVGDSEGQIVIYDVGEQIAVPRNDEWARFGRTLAEINANRADAEEEAATRIPA

SEQ ID NO: 26144 - protein, 632 aa, Homo sapiens
  Payload ID: 5170
  Gene Symbol: DYNC1I2
  Gene Name: dynein, cytoplasmic 1, intermediate chain 2
  Uniprot ID: Q13409
  ENSP ID: ENSP00000386591
MSDKSELKAELERKKQRLAQIREEKKRKEEERKKKETDQKKEAVAPVQEESDLEKKRREAEALLQSMGLTPESPIVPPPMSPSSKSVSTPSEAGSQDSGDGAVGSRTLHWDTDPSVLQLHSDSDLGRGPIKLGMAKITQVDFPPREIVTYTKETQTPVMAQPKEDEEEDDDVVAPKPPIEPEEEKTLKKDEENDSKAPPHELTEEEKQQILHSEEFLSFFDHSTRIVERALSEQINIFFDYSGRDLEDKEGEIQAGAKLSLNRQFFDERWSKHRVVSCLDWSSQYPELLVASYNNNEDAPHEPDGVALVWNMKYKKTTPEYVFHCQSAVMSATFAKFHPNLVVGGTYSGQIVLWDNRSNKRTPVQRTPLSAAAHTHPVYCVNVVGTQNAHNLISISTDGKICSWSLDMLSHPQDSMELVHKQSKAVAVTSMSFPVGDVNNFVVGSEEGSVYTACRHGSKAGISEMFEGHQGPITGIHCHAAVGAVDFSHLFVTSSFDWTVKLWTTKNNKPLYSFEDNADYVYDVMWSPTHPALFACVDGMGRLDLWNLNNDTEVPTASISVEGNPALNRVRWTHSGREIAVGDSEGQIVIYDVGEQIAVPRNDEWARFGRTLAEINANRADAEEEAATRIPA

SEQ ID NO: 26145 - protein, 637 aa, Homo sapiens
  Payload ID: 5170
  Gene Symbol: DYNC1I2
  Gene Name: dynein, cytoplasmic 1, intermediate chain 2
  Uniprot ID: Q13409
  ENSP ID: ENSP00000386886
MSDKSELKAELERKKQRLAQIREEKKRKEEERKKKETDQKKEAVAPVQEESDLEKKRREAEALLQSMGLTPESPIVFSEYWVPPPMSPSSKSVSTPSEAGSQDSGDGAVGSRTLHWDTDPSVLQLHSDSDLGRGPIKLGMAKITQVDFPPREIVTYTKETQTPVMAQPKEDEEEDDDVVAPKPPIEPEEEKTLKKDEENDSKAPPHELTEEEKQQILHSEEFLSFFDHSTRIVERALSEQINIFFDYSGRDLEDKEGEIQAGAKLSLNRQFFDERWSKHRVVSCLDWSSQYPELLVASYNNNEDAPHEPDGVALVWNMKYKKTTPEYVFHCQSAVMSATFAKFHPNLVVGGTYSGQIVLWDNRSNKRTPVQRTPLSAAAHTHPVYCVNVVGTQNAHNLISISTDGKICSWSLDMLSHPQDSMELVHKQSKAVAVTSMSFPVGDVNNFVVGSEEGSVYTACRHGSKAGISEMFEGHQGPITGIHCHAAVGAVDFSHLFVTSSFDWTVKLWTTKNNKPLYSFEDNADYVYDVMWSPTHPALFACVDGMGRLDLWNLNNDTEVPTASISVEGNPALNRVRWTHSGREIAVGDSEGQIVIYDVGEIAVPRNDEWARFGRTLAEINANRADAEEEAATRIPA

SEQ ID NO: 26146 - protein, 187 aa, Homo sapiens
  Payload ID: 5170
  Gene Symbol: DYNC1I2
  Gene Name: dynein, cytoplasmic 1, intermediate chain 2
  ENSP ID: ENSP00000388699
MSDKSELKAELERKKQRLAQIREEKKRKEEERKKKETDQKKEAVAPVQEESDLEKKRREAEALLQSMGLTPESPIAEQPLRVVTADTCLFHYLVPPPMSPSSKSVSTPSEAGSQDSGDGAVGSRRGPIKLGMAKITQVDFPPREIVTYTKETQTPVMAQPKEDEEEDDDVVAPKPPIEPEEEKTLKK

SEQ ID NO: 26147 - protein, 214 aa, Homo sapiens
  Payload ID: 5170
  Gene Symbol: DYNC1I2
  Gene Name: dynein, cytoplasmic 1, intermediate chain 2
  ENSP ID: ENSP00000392741
MSDKSELKAELERKKQRLAQIREEKKRKEEERKKKETDQKKEAVAPVQEESDLEKKRREAEALLQSMGLTPESPIAEQPLRVVTADTCLFHYLVPPPMSPSSKSVSTPSEAGSQDSGDGAVGSRTLHWDTDPSVLQLHSDSDLGRGPIKLGMAKITQVDFPPREIVTYTKETQTPVMAQPKEDEEEDDDVVAPKPPIEPEEEKTLKKDEENDSK

SEQ ID NO: 26148 - protein, 185 aa, Homo sapiens
  Payload ID: 5170
  Gene Symbol: DYNC1I2
  Gene Name: dynein, cytoplasmic 1, intermediate chain 2
  ENSP ID: ENSP00000394492
MSDKSELKAELERKKQRLAQIREEKKRKEEERKKKETDQKKEAVAPVQEESDLEKKRREAEALLQSMGLTPESPIVPPPMSPSSKSVSTPSEAGSQDSGDGAVGSRRGPIKLGMAKITQVDFPPREIVTYTKETQTPVMAQPKEDEEEDDDVVAPKPPIEPEEEKTLKKDEENDSKAPPHELTEE

SEQ ID NO: 26149 - protein, 173 aa, Homo sapiens
  Payload ID: 5170
  Gene Symbol: DYNC1I2
  Gene Name: dynein, cytoplasmic 1, intermediate chain 2
  ENSP ID: ENSP00000397654
MSDKSELKAELERKKQRLAQIREEKKRKEEERKKKETDQKKEAVAPVQEESDLEKKRREAEALLQSMGLTPESPIAEQPLRVVTADTCLFHYLVPPPMSPSSKSVSTPSEAGSQDSGDGAVGSRRGPIKLGMAKITQVDFPPREIVTYTKETQTPVMAQPKEDEEEDDDVVAP

SEQ ID NO: 26150 - protein, 250 aa, Homo sapiens
  Payload ID: 5170
  Gene Symbol: DYNC1I2
  Gene Name: dynein, cytoplasmic 1, intermediate chain 2
  ENSP ID: ENSP00000398765
MSDKSELKAELERKKQRLAQIREEKKRKEEERKKKETDQKKEAVAPVQEESDLEKKRREAEALLQSMGLTPESPIVPPPMSPSSKSVSTPSEAGSQDSGDGAVGSRTLHWDTDPSVLQLHSDSDLGRGPIKLGMAKITQVDFPPREIVTYTKETQTPVMAQPKEDEEEDDDVVAPKPPIEPEEEKTLKKDEENDSKAPPHELTEEEKQQILHSEEFLSFFDHSTRIVERALSEQINIFFDYSGRDLEDKE

SEQ ID NO: 26151 - protein, 139 aa, Homo sapiens
  Payload ID: 5170
  Gene Symbol: DYNC1I2
  Gene Name: dynein, cytoplasmic 1, intermediate chain 2
  ENSP ID: ENSP00000401005
MSDKSELKAELERKKQRLAQIREEKKRKEEERKKKETDQKKEAVAPVQEESDLEKKRREAEALLQSMGLTPESPIVFSEYWVPPPMSPSSKSVSTPSEAGSQDSGDGAVGSRTLHWDTDPSVLQLHSDSDLGRGPIKLG

SEQ ID NO: 26152 - protein, 184 aa, Homo sapiens
  Payload ID: 5170
  Gene Symbol: DYNC1I2
  Gene Name: dynein, cytoplasmic 1, intermediate chain 2
  ENSP ID: ENSP00000403089
MSDKSELKAELERKKQRLAQIREEKKRKEEERKKKETDQKKEAVAPVQEESDLEKKRREAEALLQSMGLTPESPIVPPPMSPSSKSVSTPSEAGSQDSGDGAVGSRTLHWDTDPSVLQLHSDSDLGRGPIKLGMAKITQVDFPPREIVTYTKETQTPVMAQPKEDEEEDDDVVAPKPPIEPEEE

SEQ ID NO: 26153 - protein, 151 aa, Homo sapiens
  Payload ID: 5170
  Gene Symbol: DYNC1I2
  Gene Name: dynein, cytoplasmic 1, intermediate chain 2
  ENSP ID: ENSP00000405454
MSDKSELKAELERKKQRLAQIREEKKRKEEERKKKETDQKKEAVAPVQEESDLEKKRREAEALLQSMGLTPESPIAEQPLRVVTADTCLFHYLVPPPMSPSSKSVSTPSEAGSQDSGDGAVGSRTLHWDTDPSVLQLHSDSDLGRGPIKLG

SEQ ID NO: 26154 - protein, 137 aa, Homo sapiens
  Payload ID: 5170
  Gene Symbol: DYNC1I2
  Gene Name: dynein, cytoplasmic 1, intermediate chain 2
  ENSP ID: ENSP00000406104
MSDKSELKAELERKKQRLAQIREEKKRKEEERKKKETDQKKEAVAPVQEESDLEKKRREAEALLQSMGLTPESPIAEQPLRVVTADTCLFHYLVPPPMSPSSKSVSTPSEAGSQDSGDGAVGSRRGPIKLGMAKITQ

SEQ ID NO: 26155 - protein, 110 aa, Homo sapiens
  Payload ID: 5170
  Gene Symbol: DYNC1I2
  Gene Name: dynein, cytoplasmic 1, intermediate chain 2
  ENSP ID: ENSP00000409951
MSDKSELKAELERKKQRLAQIREEKKRKEEERKKKETDQKKEAVAPVQEESDLEKKRREAEALLQSMGLTPESPIVPPPMSPSSKSVSTPSEAGSQDSGDGAVGSRTLHW

SEQ ID NO: 26156 - protein, 305 aa, Homo sapiens
  Payload ID: 5170
  Gene Symbol: DYNC1I2
  Gene Name: dynein, cytoplasmic 1, intermediate chain 2
  ENSP ID: ENSP00000410807
MSDKSELKAELERKKQRLAQIREEKKRKEEERKKKETDQKKEAVAPVQEESDLEKKRREAEALLQSMGLTPESPIVPPPMSPSSKSVSTPSEAGSQDSGDGAVGSRRGPIKLGMAKITQVDFPPREIVTYTKETQTPVMAQPKEDEEEDDDVVAPKPPIEPEEEKTLKKDEENDSKAPPHELTEEEKQQILHSEEFLSFFDHSTRIVERALSEQINIFFDYSGRDLEDKEGEIQAGAKLSLNRQFFDERWSKHRVVSCLDWSSQYPELLVASYNNNEDAPHEPDGVALVWNMKYKKTTPEYVFHC

SEQ ID NO: 26157 - protein, 121 aa, Homo sapiens
  Payload ID: 5170
  Gene Symbol: DYNC1I2
  Gene Name: dynein, cytoplasmic 1, intermediate chain 2
  ENSP ID: ENSP00000415410
MSDKSELKAELERKKQRLAQIREEKKRKEEERKKKETDQKKEAVAPVQEESDLEKKRREAEALLQSMGLTPESPIDEDLLNLEWLKSRKSTFLLEKLSRIQRKLRLQLWLNPKKMKRKMMM

SEQ ID NO: 26158 - protein, 611 aa, Homo sapiens
  Payload ID: 5170
  Gene Symbol: DYNC1I2
  Gene Name: dynein, cytoplasmic 1, intermediate chain 2
  Uniprot ID: Q13409
  ENSP ID: ENSP00000423339
MSDKSELKAELERKKQRLAQIREEKKRKEEERKKKETDQKKEAVAPVQEESDLEKKRREAEALLQSMGLTPESPIVPPPMSPSSKSVSTPSEAGSQDSGDGAVGSRRGPIKLGMAKITQVDFPPREIVTYTKETQTPVMAQPKEDEEEDDDVVAPKPPIEPEEEKTLKKDEENDSKAPPHELTEEEKQQILHSEEFLSFFDHSTRIVERALSEQINIFFDYSGRDLEDKEGEIQAGAKLSLNRQFFDERWSKHRVVSCLDWSSQYPELLVASYNNNEDAPHEPDGVALVWNMKYKKTTPEYVFHCQSAVMSATFAKFHPNLVVGGTYSGQIVLWDNRSNKRTPVQRTPLSAAAHTHPVYCVNVVGTQNAHNLISISTDGKICSWSLDMLSHPQDSMELVHKQSKAVAVTSMSFPVGDVNNFVVGSEEGSVYTACRHGSKAGISEMFEGHQGPITGIHCHAAVGAVDFSHLFVTSSFDWTVKLWTTKNNKPLYSFEDNADYVYDVMWSPTHPALFACVDGMGRLDLWNLNNDTEVPTASISVEGNPALNRVRWTHSGREIAVGDSEGQIVIYDVGEIAVPRNDEWARFGRTLAEINANRADAEEEAATRIPA

SEQ ID NO: 26159 - protein, 523 aa, Homo sapiens
  Payload ID: 5171
  Gene Symbol: DYNC1LI1
  Gene Name: dynein, cytoplasmic 1, light intermediate chain 1
  Uniprot ID: Q9Y6G9
  ENSP ID: ENSP00000273130
MAAVGRVGSFGSSPPGLSSTYTGGPLGNEIASGNGGAAAGDDEDGQNLWSCILSEVSTRSRSKLPAGKNVLLLGEDGAGKTSLIRKIQGIEEYKKGRGLEYLYLNVHDEDRDDQTRCNVWILDGDLYHKGLLKFSLDAVSLKDTLVMLVVDMSKPWTALDSLQKWASVVREHVDKLKIPPEEMKQMEQKLIRDFQEYVEPGEDFPASPQRRNTASQEDKDDSVVLPLGADTLTHNLGIPVLVVCTKCDAISVLEKEHDYRDEHFDFIQSHIRKFCLQYGAALIYTSVKENKNIDLVYKYIVQKLYGFPYKIPAVVVEKDAVFIPAGWDNDKKIGILHENFQTLKAEDNFEDIITKPPVRKFVHEKEIMAEDDQVFLMKLQSLLAKQPPTAAGRPVDASPRVPGGSPRTPNRSVSSNVASVSPIPAGSKKIDPNMKAGATSEGVLANFFNSLLSKKTGSPGGPGVSGGSPAGGAGGGSSGLPPSTKKSGQKPVLDVHAELDRITRKPVTVSPTTPTSPTEGEAS

SEQ ID NO: 26160 - protein, 190 aa, Homo sapiens
  Payload ID: 5171
  Gene Symbol: DYNC1LI1
  Gene Name: dynein, cytoplasmic 1, light intermediate chain 1
  ENSP ID: ENSP00000390507
MAGREGEHETLDPGPAGTRPPSGEDGAGKTSLIRKIQGIEEYKKGRGLEYLYLNVHDEDRDDQTRCNVWILDGDLYHKGLLKFSLDAVSLKDTLVMLVVDMSKPWTALDSLQKWASVVREHVDKLKIPPEEMKQMEQKLIRDFQEYVEPGEDFPASPQRRNTASQEDKDDSVVLPLGADTLTHNLGIPVL

SEQ ID NO: 26161 - protein, 407 aa, Homo sapiens
  Payload ID: 5171
  Gene Symbol: DYNC1LI1
  Gene Name: dynein, cytoplasmic 1, light intermediate chain 1
  ENSP ID: ENSP00000407279
MAAVGRVGSFGSSPPGLSSTYTGGPLGNEIASGNGGAAAGDDEDGQNLWSCILSEVSTRSRSKLPAGKNVLLLVIRDFQEYVEPGEDFPASPQRRNTASQEDKDDSVVLPLGADTLTHNLGIPVLVVCTKCDAISVLEKEHDYRDEHFDFIQSHIRKFCLQYGAALIYTSVKENKNIDLVYKYIVQKLYGFPYKIPAVVVEKDAVFIPAGWDNDKKIGILHENFQTLKAEDNFEDIITKPPVRKFVHEKEIMAEDDQVFLMKLQSLLAKQPPTAAGRPVDASPRVPGGSPRTPNRSVSSNVASVSPIPAGSKKIDPNMKAGATSEGVLANFFNSLLSKKTGSPGGPGVSGGSPAGGAGGGSSGLPPSTKKSGQKPVLDVHAELDRITRKPVTVSPTTPTSPTEGEAS

SEQ ID NO: 26162 - protein, 192 aa, Homo sapiens
  Payload ID: 5171
  Gene Symbol: DYNC1LI1
  Gene Name: dynein, cytoplasmic 1, light intermediate chain 1
  ENSP ID: ENSP00000409019
MAAVGRVGSFGSSPPGLSSTYTGGPLGNEIASGNGGAAAGDDEDGQNLWSCILSEVSTRSRSKLPAGKNVLLLDGVSLLLPRLECNGKISAHCNLHLLGSSDSPASASCVAGITGEDGAGKTSLIRKIQGIEEYKKGRGLEYLYLNVHDEDRDDQTRCNVWILDGDLYHKGLLKFSLDAVSLKDTLVMLVVD

SEQ ID NO: 26163 - protein, 492 aa, Homo sapiens
  Payload ID: 5172
  Gene Symbol: DYNC1LI2
  Gene Name: dynein, cytoplasmic 1, light intermediate chain 2
  Uniprot ID: O43237
  ENSP ID: ENSP00000258198
MAPVGVEKKLLLGPNGPAVAAAGDLTSEEEEGQSLWSSILSEVSTRARSKLPSGKNILVFGEDGSGKTTLMTKLQGAEHGKKGRGLEYLYLSVHDEDRDDHTRCNVWILDGDLYHKGLLKFAVSAESLPETLVIFVADMSRPWTVMESLQKWASVLREHIDKMKIPPEKMRELERKFVKDFQDYMEPEEGCQGSPQRRGPLTSGSDEENVALPLGDNVLTHNLGIPVLVVCTKCDAVSVLEKEHDYRDEHLDFIQSHLRRFCLQYGAALIYTSVKEEKNLDLLYKYIVHKTYGFHFTTPALVVEKDAVFIPAGWDNEKKIAILHENFTTVKPEDAYEDFIVKPPVRKLVHDKELAAEDEQVFLMKQQSLLAKQPATPTRASESPARGPSGSPRTQGRGGPASVPSSSPGTSVKKPDPNIKNNAASEGVLASFFNSLLSKKTGSPGSPGAGGVQSTAKKSGQKTVLSNVQEELDRMTRKPDSMVTNSSTENEA

SEQ ID NO: 26164 - protein, 415 aa, Homo sapiens
  Payload ID: 5172
  Gene Symbol: DYNC1LI2
  Gene Name: dynein, cytoplasmic 1, light intermediate chain 2
  Uniprot ID: O43237
  ENSP ID: ENSP00000394289
MAPVGVEKKLLLGPNGPAVAAAGDLTSEEEEGQSLWSSILSEVSTRARSKLPSGKNILVFGEDGSGKTTLMTKLQGAEHGKKGRGLEYLYLSVHDEDRDVVKDFQDYMEPEEGCQGSPQRRGPLTSGSDEENVALPLGDNVLTHNLGIPVLVVCTKCDAVSVLEKEHDYRDEHLDFIQSHLRRFCLQYGAALIYTSVKEEKNLDLLYKYIVHKTYGFHFTTPALVVEKDAVFIPAGWDNEKKIAILHENFTTVKPEDAYEDFIVKPPVRKLVHDKELAAEDEQVFLMKQQSLLAKQPATPTRASESPARGPSGSPRTQGRGGPASVPSSSPGTSVKKPDPNIKNNAASEGVLASFFNSLLSKKTGSPGSPGAGGVQSTAKKSGQKTVLSNVQEELDRMTRKPDSMVTNSSTENEA

SEQ ID NO: 26165 - protein, 271 aa, Homo sapiens
  Payload ID: 5172
  Gene Symbol: DYNC1LI2
  Gene Name: dynein, cytoplasmic 1, light intermediate chain 2
  ENSP ID: ENSP00000408566
MAPVGVEKKLLLGPNGPAVAAAGDLTSEEEEGQSLWSSILSEVSTRARSKLPSGKNILVFDHTRCNVWILDGDLYHKGLLKFAVSAESLPETLVIFVADMSRPWTVMESLQKWASVLREHIDKMKIPPEKMRELERKFVKDFQDYMEPEEGCQGSPQRRGPLTSGSDEENVALPLGDNVLTHNLGIPVLVVCTKCDAVSVLEKEHDYRDEHLDFIQSHLRRFCLQYGAALIYTSVKEEKNLDLLYKYIVHKTYGFHFTTPALVVEKDAVFM

SEQ ID NO: 26166 - protein, 56 aa, Homo sapiens
  Payload ID: 5172
  Gene Symbol: DYNC1LI2
  Gene Name: dynein, cytoplasmic 1, light intermediate chain 2
  ENSP ID: ENSP00000457464
MAPVGVEKKLLLGPNGPAVAAAGDLTSEEEEGQSLCCRPARTSWSSVKMVLVKQPS

SEQ ID NO: 26167 - protein, 186 aa, Homo sapiens
  Payload ID: 5172
  Gene Symbol: DYNC1LI2
  Gene Name: dynein, cytoplasmic 1, light intermediate chain 2
  ENSP ID: ENSP00000457707
MAPVGVEKKLLLGPNGPAVAAAGDLTSEEEEGQSLWSSILSEVSTRARSKLPSGKNILVFGEDGSGKTTLMTKLQGAEHGKKGRGLEYLYLSVHDEDRDDMSRPWTVMESLQKWASVLREHIDKMKIPPEKMRELERKFVKDFQDYMEPEEGCQGSPQRRGPLTSGSDEENVALPLGDNVLTHNLG

SEQ ID NO: 26168 - protein, 167 aa, Homo sapiens
  Payload ID: 5172
  Gene Symbol: DYNC1LI2
  Gene Name: dynein, cytoplasmic 1, light intermediate chain 2
  ENSP ID: ENSP00000462017
AGWDNEKKIAILHENFTTVKPEDAYEDFIVKPPVRKLVHDKELAAEDEQVFLMKQQESPARGPSGSPRTQGRGGPASVPSSSPGTSVKKPDPNIKNNAASEGVLASFFNSLLSKKTGSPGSPGAGGVQSTAKKSGQKTVLSNVQEELDRMTRKPDSMVTNSSTENEA

SEQ ID NO: 26169 - protein, 92 aa, Homo sapiens
  Payload ID: 5172
  Gene Symbol: DYNC1LI2
  Gene Name: dynein, cytoplasmic 1, light intermediate chain 2
  ENSP ID: ENSP00000462224
  MOD_RES (1)..(1): Any amino acid
XTPTRASESPARGPSGSPRTQGRGGPASVPSSSPGTSVKKPDPNIKNNAASEGVLASFFNSLLSKKTGSPGSPGAGGVQSTAKKSESRPPPP

SEQ ID NO: 26170 - protein, 49 aa, Homo sapiens
  Payload ID: 5172
  Gene Symbol: DYNC1LI2
  Gene Name: dynein, cytoplasmic 1, light intermediate chain 2
  ENSP ID: ENSP00000462434
LVHDKELAAEDEQVFLMKQQSLLAKQPATPTRASDKRLCCQMFRKNWIE

SEQ ID NO: 26171 - protein, 40 aa, Homo sapiens
  Payload ID: 5172
  Gene Symbol: DYNC1LI2
  Gene Name: dynein, cytoplasmic 1, light intermediate chain 2
  ENSP ID: ENSP00000463124
MAPVGVEKKLLLGPNGPAVAAAGDLTSEEEEGQSLCPARG

SEQ ID NO: 26172 - protein, 920 aa, Homo sapiens
  Payload ID: 5173
  Gene Symbol: DYNC2H1
  Gene Name: dynein, cytoplasmic 2, heavy chain 1
  Uniprot ID: Q8NCM8
  ENSP ID: ENSP00000334021
MANGTADVRKLFIFTTTQNYFGLMSELWDQPLLCNCLEINNFLDDGNQMLLRVQRSDAGISFSNTIEFGDTKDKVLVFFKLRPEVITDENLHDNILVSSMLESPISSLYQAVRQVFAPMLLKDQEWSRNFDPKLQNLLSELEAGLGIVLRRSDTNLTKLKFKEDDTRGILTPSDEFQFWIEQAHRGNKQISKERANYFKELFETIAREFYNLDSLSLLEVVDLVETTQDVVDDVWRQTEHDHYPESRMLHLLDIIGGSFGRFVQKKLGTLNLWEDPYYLVKESLKAGISICEQWVIVCNHLTGQVWQRYVPHPWKNEKYFPETLDKLGKRLEEVLAIRTIHEKFLYFLPASEEKIICLTRVFEPFTGLNPVQYNPYTEPLWKAAVSQYEKIIAPAEQKIAGKLKNYISEIQDSPQQLLQAFLKYKELVKRPTISKELMLERETLLARLVDSIKDFRLDFENRCRGIPGDASGPLSGKNLSEVVNSIVWVRQLELKVDDTIKIAEALLSDLPGFRCFHQSAKDLLDQLKLYEQEQFDDWSRDIQSGLSDSRSGLCIEASSRIMELDSNDGLLKVHYSDRLVILLREVRQLSALGFVIPAKIQQVANIAQKFCKQAIILKQVAHFYNSIDQQMIQSQRPMMLQSALAFEQIIKNSKAGSGGKSQITWDNPKELEGYIQKLQNAAERLATENRKLRKWHTTFCEKVVVLMNIDLLRQQQRWKDGLQELRTGLATVEAQCPLAWQSKWEGPEDPLQYLRGLVARALAIQNWVDKAEKQALLSETLDLSELFHPDTFLNALRQETARAVGRSVDSLKFVASWKGRLQEAKLQIKISGLLLEGCSFDGNQLSENQLDSPSVSSVLPCFMGWIPQDACGPYSPDECISLPVYTSAERDRVVTNIDVPCGGNQDQWIQCGAALFLKNQ

SEQ ID NO: 26173 - protein, 4307 aa, Homo sapiens
  Payload ID: 5173
  Gene Symbol: DYNC2H1
  Gene Name: dynein, cytoplasmic 2, heavy chain 1
  Uniprot ID: Q8NCM8
  ENSP ID: ENSP00000364887
MANGTADVRKLFIFTTTQNYFGLMSELWDQPLLCNCLEINNFLDDGNQMLLRVQRSDAGISFSNTIEFGDTKDKVLVFFKLRPEVITDENLHDNILVSSMLESPISSLYQAVRQVFAPMLLKDQEWSRNFDPKLQNLLSELEAGLGIVLRRSDTNLTKLKFKEDDTRGILTPSDEFQFWIEQAHRGNKQISKERANYFKELFETIAREFYNLDSLSLLEVVDLVETTQDVVDDVWRQTEHDHYPESRMLHLLDIIGGSFGRFVQKKLGTLNLWEDPYYLVKESLKAGISICEQWVIVCNHLTGQVWQRYVPHPWKNEKYFPETLDKLGKRLEEVLAIRTIHEKFLYFLPASEEKIICLTRVFEPFTGLNPVQYNPYTEPLWKAAVSQYEKIIAPAEQKIAGKLKNYISEIQDSPQQLLQAFLKYKELVKRPTISKELMLERETLLARLVDSIKDFRLDFENRCRGIPGDASGPLSGKNLSEVVNSIVWVRQLELKVDDTIKIAEALLSDLPGFRCFHQSAKDLLDQLKLYEQEQFDDWSRDIQSGLSDSRSGLCIEASSRIMELDSNDGLLKVHYSDRLVILLREVRQLSALGFVIPAKIQQVANIAQKFCKQAIILKQVAHFYNSIDQQMIQSQRPMMLQSALAFEQIIKNSKAGSGGKSQITWDNPKELEGYIQKLQNAAERLATENRKLRKWHTTFCEKVVVLMNIDLLRQQQRWKDGLQELRTGLATVEAQGFQASDMHAWKQHWNHQLYKALEHQYQMGLEALNENLPEINIDLTYKQGRLQFRPPFEEIRAKYYREMKRFIGIPNQFKGVGEAGDESIFSIMIDRNASGFLTIFSKAEDLFRRLSAVLHQHKEWIVIGQVDMEALVEKHLFTVHDWEKNFKALKIKGKEVERLPSAVKVDCLNINCNPVKTVIDDLIQKLFDLLVLSLKKSIQAHLHEIDTFVTEAMEVLTIMPQSVEEIGDANLQYSKLQERKPEILPLFQEAEDKNRLLRTVAGGGLETISNLKAKWDKFELMMESHQLMIKDQIEVMKGNVKSRLQIYYQELEKFKARWDQLKPGDDVIETGQHNTLDKSAKLIKEKKIEFDDLEVTRKKLVDDCHHFRLEEPNFSLASSISKDIESCAQIWAFYEEFQQGFQEMANEDWITFRTKTYLFEEFLMNWHDRLRKVEEHSVMTVKLQSEVDKYKIVIPILKYVRGEHLSPDHWLDLFRLLGLPRGTSLEKLLFGDLLRVADTIVAKAADLKDLNSRAQGEVTIREALRELDLWGVGAVFTLIDYEDSQSRTMKLIKDWKDIVNQVGDNRCLLQSLKDSPYYKGFEDKVSIWERKLAELDEYLQNLNHIQRKWVYLEPIFGRGALPKEQTRFNRVDEDFRSIMTDIKKDNRVTTLTTHAGIRNSLLTILDQLQRCQKSLNEFLEEKRSAFPRFYFIGDDDLLEILGQSTNPSVIQSHLKKLFAGINSVCFDEKSKHITAMKSLEGEVVPFKNKVPLSNNVETWLNDLALEMKKTLEQLLKECVTTGRSSQGAVDPSLFPSQILCLAEQIKFTEDVENAIKDHSLHQIETQLVNKLEQYTNIDTSSEDPGNTESGILELKLKALILDIIHNIDVVKQLNQIQVHTTEDWAWKKQLRFYMKSDHTCCVQMVDSEFQYTYEYQGNASKLVYTPLTDKCYLTLTQAMKMGLGGNPYGPAGTGKTESVKALGGLLGRQVLVFNCDEGIDVKSMGRIFVGLVKCGAWGCFDEFNRLEESVLSAVSMQIQTIQDALKNHRTVCELLGKEVEVNSNSGIFITMNPAGKGYGGRQKLPDNLKQLFRPVAMSHPDNELIAEVILYSEGFKDAKVLSRKLVAIFNLSRELLTPQQHYDWGLRALKTVLRGSGNLLRQLNKSGTTQNANESHIVVQALRLNTMSKFTFTDCTRFDALIKDVFPGIELKEVEYDELSAALKQVFEEANYEIIPNQIKKALELYEQLCQRMGVVIVGPSGAGKSTLWRMLRAALCKTGKVVKQYTMNPKAMPRYQLLGHIDMDTREWSDGVLTNSARQVVREPQDVSSWIICDGDIDPEWIESLNSVLDDNRLLTMPSGERIQFGPNVNFVFETHDLSCASPATISRMGMIFLSDEETDLNSLIKSWLRNQPAEYRNNLENWIGDYFEKALQWVLKQNDYVVETSLVGTVMNGLSHLHGCRDHDEFIINLIRGLGGNLNMKSRLEFTKEVFHWARESPPDFHKPMDTYYDSTRGRLATYVLKKPEDLTADDFSNGLTLPVIQTPDMQRGLDYFKPWLSSDTKQPFILVGPEGCGKGMLLRYAFSQLRSTQIATVHCSAQTTSRHLLQKLSQTCMVISTNTGRVYRPKDCERLVLYLKDINLPKLDKWGTSTLVAFLQQVLTYQGFYDENLEWVGLENIQIVASMSAGGRLGRHKLTTRFTSIVRLCSIDYPEREQLQTIYGAYLEPVLHKNLKNHSIWGSSSKIYLLAGSMVQVYEQVRAKFTVDDYSHYFFTPCILTQWVLGLFRYDLEGGSSNHPLDYVLEIVAYEARRLFRDKIVGAKELHLFDIILTSVFQGDWGSDILDNMSDSFYVTWGARHNSGARAAPGQPLPPHGKPLGKLNSTDLKDVIKKGLIHYGRDNQNLDILLFHEVLEYMSRIDRVLSFPGGSLLLAGRSGVGRRTITSLVSHMHGAVLFSPKISRGYELKQFKNDLKHVLQLAGIEAQQVVLLLEDYQFVHPTFLEMINSLLSSGEVPGLYTLEELEPLLLPLKDQASQDGFFGPVFNYFTYRIQQNLHIVLIMDSANSNFMINCESNPALHKKCQVLWMEGWSNSSMKKIPEMLFSETGGGEKYNDKKRKEEKKKNSVDPDFLKSFLLIHESCKAYGATPSRYMTFLHVYSAISSSKKKELLKRQSHLQAGVSKLNEAKALVDELNRKAGEQSVLLKTKQDEADAALQMITVSMQDASEQKTELERLKHRIAEEVVKIEERKNKIDDELKEVQPLVNEAKLAVGNIKPESLSEIRSLRMPPDVIRDILEGVLRLMGIFDTSWVSMKSFLAKRGVREDIATFDARNISKEIRESVEELLFKNKGSFDPKNAKRASTAAAPLAAWVKANIQYSHVLERIHPLETEQAGLESNLKKTEDRKRKLEELLNSVGQKVSELKEKFQSRTSEAAKLEAEVSKAQETIKAAEVLINQLDREHKRWNAQVVEITEELATLPKRAQLAAAFITYLSAAPESLRKTCLEEWTKSAGLEKFDLRRFLCTESEQLIWKSEGLPSDDLSIENALVILQSRVCPFLIDPSSQATEWLKTHLKDSRLEVINQQDSNFITALELAVRFGKTLIIQEMDGVEPVLYPLLRRDLVAQGPRYVVQIGDKIIDYNEEFRLFLSTRNPNPFIPPDAASIVTEVNFTTTRSGLRGQLLALTIQHEKPDLEEQKTKLLQQEEDKKIQLAKLEESLLETLATSQGNILENKDLIESLNQTKASSALIQESLKESYKLQISLDQERDAYLPLAESASKMYFIISDLSKINNMYRFSLAAFLRLFQRALQNKQDSENTEQRIQSLISSLQHMVYEYICRCLFKADQLMFALHFVRGMHPELFQENEWDTFTGVVVGDMLRKADSQQKIRDQLPSWIDQERSWAVATLKIALPSLYQTLCFEDAALWRTYYNNSMCEQEFPSILAKKVSLFQQILVVQALRPDRLQSAMALFACKTLGLKEVSPLPLNLKRLYKETLEIEPILIIISPGADPSQELQELANAERSGECYHQVAMGQGQADLAIQMLKECARNGDWLCLKNLHLVVSWLPVLEKELNTLQPKDTFRLWLTAEVHPNFTPILLQSSLKITYESPPGLKKNLMRTYESWTPEQISKKDNTHRAHALFSLAWFHAACQERRNYIPQGWTKFYEFSLSDLRAGYNIIDRLFDGAKDVQWEFVHGLLENAIYGGRIDNYFDLRVLQSYLKQFFNSSVIDVFNQRNKKSIFPYSVSLPQSCSILDYRAVIEKIPEDDKPSFFGLPANIARSSQRMISSQVISQLRILGRSITAGSKFDREIWSNELSPVLNLWKKLNQNSNLIHQKVPPPNDRQGSPILSFIILEQFNAIRLVQSVHQSLAALSKVIRGTTLLSSEVQKLASALLNQKCPLAWQSKWEGPEDPLQYLRGLVARALAIQNWVDKAEKQALLSETLDLSELFHPDTFLNALRQETARAVGRSVDSLKFVASWKGRLQEAKLQIKISGLLLEGCSFDGNQLSENQLDSPSVSSVLPCFMGWIPQDACGPYSPDECISLPVYTSAERDRVVTNIDVPCGGNQDQWIQCGAALFLKNQ

SEQ ID NO: 26174 - protein, 4314 aa, Homo sapiens
  Payload ID: 5173
  Gene Symbol: DYNC2H1
  Gene Name: dynein, cytoplasmic 2, heavy chain 1
  Uniprot ID: Q8NCM8
  ENSP ID: ENSP00000381167
MANGTADVRKLFIFTTTQNYFGLMSELWDQPLLCNCLEINNFLDDGNQMLLRVQRSDAGISFSNTIEFGDTKDKVLVFFKLRPEVITDENLHDNILVSSMLESPISSLYQAVRQVFAPMLLKDQEWSRNFDPKLQNLLSELEAGLGIVLRRSDTNLTKLKFKEDDTRGILTPSDEFQFWIEQAHRGNKQISKERANYFKELFETIAREFYNLDSLSLLEVVDLVETTQDVVDDVWRQTEHDHYPESRMLHLLDIIGGSFGRFVQKKLGTLNLWEDPYYLVKESLKAGISICEQWVIVCNHLTGQVWQRYVPHPWKNEKYFPETLDKLGKRLEEVLAIRTIHEKFLYFLPASEEKIICLTRVFEPFTGLNPVQYNPYTEPLWKAAVSQYEKIIAPAEQKIAGKLKNYISEIQDSPQQLLQAFLKYKELVKRPTISKELMLERETLLARLVDSIKDFRLDFENRCRGIPGDASGPLSGKNLSEVVNSIVWVRQLELKVDDTIKIAEALLSDLPGFRCFHQSAKDLLDQLKLYEQEQFDDWSRDIQSGLSDSRSGLCIEASSRIMELDSNDGLLKVHYSDRLVILLREVRQLSALGFVIPAKIQQVANIAQKFCKQAIILKQVAHFYNSIDQQMIQSQRPMMLQSALAFEQIIKNSKAGSGGKSQITWDNPKELEGYIQKLQNAAERLATENRKLRKWHTTFCEKVVVLMNIDLLRQQQRWKDGLQELRTGLATVEAQGFQASDMHAWKQHWNHQLYKALEHQYQMGLEALNENLPEINIDLTYKQGRLQFRPPFEEIRAKYYREMKRFIGIPNQFKGVGEAGDESIFSIMIDRNASGFLTIFSKAEDLFRRLSAVLHQHKEWIVIGQVDMEALVEKHLFTVHDWEKNFKALKIKGKEVERLPSAVKVDCLNINCNPVKTVIDDLIQKLFDLLVLSLKKSIQAHLHEIDTFVTEAMEVLTIMPQSVEEIGDANLQYSKLQERKPEILPLFQEAEDKNRLLRTVAGGGLETISNLKAKWDKFELMMESHQLMIKDQIEVMKGNVKSRLQIYYQELEKFKARWDQLKPGDDVIETGQHNTLDKSAKLIKEKKIEFDDLEVTRKKLVDDCHHFRLEEPNFSLASSISKDIESCAQIWAFYEEFQQGFQEMANEDWITFRTKTYLFEEFLMNWHDRLRKVEEHSVMTVKLQSEVDKYKIVIPILKYVRGEHLSPDHWLDLFRLLGLPRGTSLEKLLFGDLLRVADTIVAKAADLKDLNSRAQGEVTIREALRELDLWGVGAVFTLIDYEDSQSRTMKLIKDWKDIVNQVGDNRCLLQSLKDSPYYKGFEDKVSIWERKLAELDEYLQNLNHIQRKWVYLEPIFGRGALPKEQTRFNRVDEDFRSIMTDIKKDNRVTTLTTHAGIRNSLLTILDQLQRCQKSLNEFLEEKRSAFPRFYFIGDDDLLEILGQSTNPSVIQSHLKKLFAGINSVCFDEKSKHITAMKSLEGEVVPFKNKVPLSNNVETWLNDLALEMKKTLEQLLKECVTTGRSSQGAVDPSLFPSQILCLAEQIKFTEDVENAIKDHSLHQIETQLVNKLEQYTNIDTSSEDPGNTESGILELKLKALILDIIHNIDVVKQLNQIQVHTTEDWAWKKQLRFYMKSDHTCCVQMVDSEFQYTYEYQGNASKLVYTPLTDKCYLTLTQAMKMGLGGNPYGPAGTGKTESVKALGGLLGRQVLVFNCDEGIDVKSMGRIFVGLVKCGAWGCFDEFNRLEESVLSAVSMQIQTIQDALKNHRTVCELLGKEVEVNSNSGIFITMNPAGKGYGGRQKLPDNLKQLFRPVAMSHPDNELIAEVILYSEGFKDAKVLSRKLVAIFNLSRELLTPQQHYDWGLRALKTVLRGSGNLLRQLNKSGTTQNANESHIVVQALRLNTMSKFTFTDCTRFDALIKDVFPGIELKEVEYDELSAALKQVFEEANYEIIPNQIKKALELYEQLCQRMGVVIVGPSGAGKSTLWRMLRAALCKTGKVVKQYTMNPKAMPRYQLLGHIDMDTREWSDGVLTNSARQVVREPQDVSSWIICDGDIDPEWIESLNSVLDDNRLLTMPSGERIQFGPNVNFVFETHDLSCASPATISRMGMIFLSDEETDLNSLIKSWLRNQPAEYRNNLENWIGDYFEKALQWVLKQNDYVVETSLVGTVMNGLSHLHGCRDHDEFIINLIRGLGGNLNMKSRLEFTKEVFHWARESPPDFHKPMDTYYDSTRGRLATYVLKKPEDLTADDFSNGLTLPVIQTPDMQRGLDYFKPWLSSDTKQPFILVGPEGCGKGMLLRYAFSQLRSTQIATVHCSAQTTSRHLLQKLSQTCMVISTNTGRVYRPKDCERLVLYLKDINLPKLDKWGTSTLVAFLQQVLTYQGFYDENLEWVGLENIQIVASMSAGGRLGRHKLTTRFTSIVRLCSIDYPEREQLQTIYGAYLEPVLHKNLKNHSIWGSSSKIYLLAGSMVQVYEQVRAKFTVDDYSHYFFTPCILTQWVLGLFRYDLEGGSSNHPLDYVLEIVAYEARRLFRDKIVGAKELHLFDIILTSVFQGDWGSDILDNMSDSFYVTWGARHNSGARAAPGQPLPPHGKPLGKLNSTDLKDVIKKGLIHYGRDNQNLDILLFHEVLEYMSRIDRVLSFPGGSLLLAGRSGVGRRTITSLVSHMHGAVLFSPKISRGYELKQFKNDLKHVLQLAGIEAQQVVLLLEDYQFVHPTFLEMINSLLSSGEVPGLYTLEELEPLLLPLKDQASQDGFFGPVFNYFTYRIQQNLHIVLIMDSANSNFMINCESNPALHKKCQVLWMEGWSNSSMKKIPEMLFSETGGGEKYNDKKRKEEKKKNSVDPDFLKSFLLIHESCKAYGATPSRYMTFLHVYSAISSSKKKELLKRQSHLQAGVSKLNEAKALVDELNRKAGEQSVLLKTKQDEADAALQMITVSMQDASEQKTELERLKHRIAEEVVKIEERKNKIDDELKEVQPLVNEAKLAVGNIKPESLSEIRSLRMPPDVIRDILEGVLRLMGIFDTSWVSMKSFLAKRGVREDIATFDARNISKEIRESVEELLFKNKGSFDPKNAKRASTAAAPLAAWVKANIQYSHVLERIHPLETEQAGLESNLKKTEDRKRKLEELLNSVGQKVSELKEKFQSRTSEAAKLEAEVSKAQETIKAAEVLINQLDREHKRWNAQVVEITEELATLPKRAQLAAAFITYLSAAPESLRKTCLEEWTKSAGLEKFDLRRFLCTESEQLIWKSEGLPSDDLSIENALVILQIIGLKSWSRVCPFLIDPSSQATEWLKTHLKDSRLEVINQQDSNFITALELAVRFGKTLIIQEMDGVEPVLYPLLRRDLVAQGPRYVVQIGDKIIDYNEEFRLFLSTRNPNPFIPPDAASIVTEVNFTTTRSGLRGQLLALTIQHEKPDLEEQKTKLLQQEEDKKIQLAKLEESLLETLATSQGNILENKDLIESLNQTKASSALIQESLKESYKLQISLDQERDAYLPLAESASKMYFIISDLSKINNMYRFSLAAFLRLFQRALQNKQDSENTEQRIQSLISSLQHMVYEYICRCLFKADQLMFALHFVRGMHPELFQENEWDTFTGVVVGDMLRKADSQQKIRDQLPSWIDQERSWAVATLKIALPSLYQTLCFEDAALWRTYYNNSMCEQEFPSILAKKVSLFQQILVVQALRPDRLQSAMALFACKTLGLKEVSPLPLNLKRLYKETLEIEPILIIISPGADPSQELQELANAERSGECYHQVAMGQGQADLAIQMLKECARNGDWLCLKNLHLVVSWLPVLEKELNTLQPKDTFRLWLTAEVHPNFTPILLQSSLKITYESPPGLKKNLMRTYESWTPEQISKKDNTHRAHALFSLAWFHAACQERRNYIPQGWTKFYEFSLSDLRAGYNIIDRLFDGAKDVQWEFVHGLLENAIYGGRIDNYFDLRVLQSYLKQFFNSSVIDVFNQRNKKSIFPYSVSLPQSCSILDYRAVIEKIPEDDKPSFFGLPANIARSSQRMISSQVISQLRILGRSITAGSKFDREIWSNELSPVLNLWKKLNQNSNLIHQKVPPPNDRQGSPILSFIILEQFNAIRLVQSVHQSLAALSKVIRGTTLLSSEVQKLASALLNQKCPLAWQSKWEGPEDPLQYLRGLVARALAIQNWVDKAEKQALLSETLDLSELFHPDTFLNALRQETARAVGRSVDSLKFVASWKGRLQEAKLQIKISGLLLEGCSFDGNQLSENQLDSPSVSSVLPCFMGWIPQDACGPYSPDECISLPVYTSAERDRVVTNIDVPCGGNQDQWIQCGAALFLKNQ

SEQ ID NO: 26175 - protein, 378 aa, Homo sapiens
  Payload ID: 5173
  Gene Symbol: DYNC2H1
  Gene Name: dynein, cytoplasmic 2, heavy chain 1
  ENSP ID: ENSP00000433451
QKIRDQLPSWIDQERSWAVATLKIALPSLYQTLCFEDAALWRTYYNNSMCEQEFPSILAKKVSLFQQILVVQALRPDRLQSAMALFACKTLGLKEVSPLPLNLKRLYKETLEIEPILIIISPGADPSQELQELANAERSGECYHQVAMGQGQADLAIQMLKECARNGDWLCLKNLHLVVSWLPVLEKELNTLQPKDTFRLWLTAEVHPNFTPILLQSSLKITYESPPGLKKNLMRTYESWTPEQISKKDNTHRAHALFSLAWFHAACQERRNYIPQGWTKFYEFSLSDLRAGYNIIDRLFDGAKDVQWEFVHGLLENAIYGGRIDNYFDLRVLQSYLKQFFNSSVIDVFNQRNKKSIFPYSVSLPQSCSILVGLSCCH

SEQ ID NO: 26176 - protein, 224 aa, Homo sapiens
  Payload ID: 5173
  Gene Symbol: DYNC2H1
  Gene Name: dynein, cytoplasmic 2, heavy chain 1
  ENSP ID: ENSP00000436736
VISQLRILGRSITAGSKFDREIWSNELSPVLNLWKKLNQCPLAWQSKWEGPEDPLQYLRGLVARALAIQNWVDKAEKQALLSETLDLSELFHPDTFLNALRQETARAVGRSVDSLKFVASWKGRLQEAKLQIKISGLLLEGCSFDGNQLSENQLDSPSVSSVLPCFMGWIPQDACGPYSPDECISLPVYTSAERDRVVTNIDVPCGGNQDQWIQCGAALFLKNQ

SEQ ID NO: 26177 - protein, 351 aa, Homo sapiens
  Payload ID: 5174
  Gene Symbol: DYNC2LI1
  Gene Name: dynein, cytoplasmic 2, light intermediate chain 1
  Uniprot ID: Q8TCX1
  ENSP ID: ENSP00000260605
MPSETLWEIAKAEVEKRGINGSEGDGAEIAEKFVFFIGSKNGGKTTIILRCLDRDEPPKPTLALEYTYGRRAKGHNTPKDIAHFWELGGGTSLLDLISIPITGDTLRTFSLVLVLDLSKPNDLWPTMENLLQATKSHVDKVIMKLGKTNAKAVSEMRQKIWNNMPKDHPDHELIDPFPVPLVIIGSKYDVFQDFESEKRKVICKTLRFVAHYYGASLMFTSKSEALLLKIRGVINQLAFGIDKSKSICVDQNKPLFITAGLDSFGQIGSPPVPENDIGKLHAHSPMELWKKVYEKLFPPKSINTLKDIKDPARDPQYAENEVDEMRIQKDLELEQYKRSSSKSWKQIELDS

SEQ ID NO: 26178 - protein, 318 aa, Homo sapiens
  Payload ID: 5174
  Gene Symbol: DYNC2LI1
  Gene Name: dynein, cytoplasmic 2, light intermediate chain 1
  ENSP ID: ENSP00000367850
  MOD_RES (1)..(1): Any amino acid
XGINGSEGDGAEIAEKFVFFIGSKNGGKTTIILRCLDRDEPPKPTLALEYTYGRRAKGHNTPKDIAHFWELGGGTSLLDLISIPITGDTLRTFSLVLVLDLSKPNDLWPTMENLLQATKSHVDKVIMKLGKTNAKAVSEMRQKIWNNMPKDHPDHELIDPFPVPLVIIGSKYDVFQDFESEKRKVICKTLRFVAHYYGASLMFTSKSEALLLKIRGVINQLAFGIDKSKSICVDQNKPLFITAGLDSFGQIGSPPVPENDIGKLHAHSPMELWKKVYEKLFPPKSINTLKDIKDPARDPQYAENEVDEMRIQKDLVLS

SEQ ID NO: 26179 - protein, 144 aa, Homo sapiens
  Payload ID: 5174
  Gene Symbol: DYNC2LI1
  Gene Name: dynein, cytoplasmic 2, light intermediate chain 1
  Uniprot ID: Q8TCX1
  ENSP ID: ENSP00000381804
MPSETLWEIAKAEVEKRGINGSEGDGAEIAEKFVFFIGSKNGGKTTIILRCLDRDEPPKPTLALEYTYGRRAKGHNTPKDIAHFWELGGGTSLLDLISIPITGDTLRSWQLSSLLPVSMNLTTPVPHINEIIHYLSFCYLFHLA

SEQ ID NO: 26180 - protein, 201 aa, Homo sapiens
  Payload ID: 5174
  Gene Symbol: DYNC2LI1
  Gene Name: dynein, cytoplasmic 2, light intermediate chain 1
  Uniprot ID: Q8TCX1
  ENSP ID: ENSP00000385738
MPSETLWEIAKAEVEKRGINGSEGDGAEIAEKFVFFIGSKNGGKTTIILRCLDRDEPPKPTLALEYTYGRRAKGHNTPKDIAHFWELGGGTSLLDLISIPITGDTLRTFSLVLVLDLSKPNDLWPTMENLLQATKSHVDKVIMKLGKTNAKAVSEMRQKIWNNMPKDHPVSCCLGLLLESLVPFIVNDNITNNFFRFLCMT

SEQ ID NO: 26181 - protein, 75 aa, Homo sapiens
  Payload ID: 5174
  Gene Symbol: DYNC2LI1
  Gene Name: dynein, cytoplasmic 2, light intermediate chain 1
  ENSP ID: ENSP00000428082
MPRQSLALLPRLECSGTILAQYNIHLLSSVKLSGKLQKLKWKKGELMEVKVMELKLQKNLFSSLAVKMGERLLLF

SEQ ID NO: 26182 - protein, 94 aa, Homo sapiens
  Payload ID: 5174
  Gene Symbol: DYNC2LI1
  Gene Name: dynein, cytoplasmic 2, light intermediate chain 1
  ENSP ID: ENSP00000430356
MPSETLWEIAKAEVEKRGINGSEGDGAEIAEKFVFFIGSKNGSLALSPRFECSGVISAHCSLCLLGSHHSPASASQVAGTAGAHDHAWERLLLF

SEQ ID NO: 26183 - protein, 72 aa, Homo sapiens
  Payload ID: 5174
  Gene Symbol: DYNC2LI1
  Gene Name: dynein, cytoplasmic 2, light intermediate chain 1
  ENSP ID: ENSP00000430525
MPSETLWEIAKAEVEKRGINGSEGDGAEIAEKFVFFIGSKNGGKTTIILRCLDSQKISLTFGNSVEEPLYWT

SEQ ID NO: 26184 - protein, 352 aa, Homo sapiens
  Payload ID: 5174
  Gene Symbol: DYNC2LI1
  Gene Name: dynein, cytoplasmic 2, light intermediate chain 1
  Uniprot ID: Q8TCX1
  ENSP ID: ENSP00000474032
MPSETLWEIAKAEVEKRGINGSEGDGAEIAEKFVFFIGSKNGGKTTIILRCLDRDEPPKPTLALEYTYGRRAKGHNTPKDIAHFWELGGGTSLLDLISIPITGDTLRTFSLVLVLDLSKPNDLWPTMENLLQATKSHVDKVIMKLGKTNAKAVSEMRQKIWNNMPKDHPQDHELIDPFPVPLVIIGSKYDVFQDFESEKRKVICKTLRFVAHYYGASLMFTSKSEALLLKIRGVINQLAFGIDKSKSICVDQNKPLFITAGLDSFGQIGSPPVPENDIGKLHAHSPMELWKKVYEKLFPPKSINTLKDIKDPARDPQYAENEVDEMRIQKDLELEQYKRSSSKSWKQIELDS

SEQ ID NO: 26185 - protein, 89 aa, Homo sapiens
  Payload ID: 5175
  Gene Symbol: DYNLL1
  Gene Name: dynein, light chain, LC8-type 1
  Uniprot ID: P63167
  ENSP ID: ENSP00000242577
MCDRKAVIKNADMSEEMQQDSVECATQALEKYNIEKDIAAHIKKEFDKKYNPTWHCIVGRNFGSYVTHETKHFIYFYLGQVAILLFKSG

SEQ ID NO: 26186 - protein, 89 aa, Homo sapiens; identical to SEQ ID NO: 26185
  Payload ID: 5175
  Gene Symbol: DYNLL1
  Gene Name: dynein, light chain, LC8-type 1
  Uniprot ID: P63167
  ENSP ID: ENSP00000376296

SEQ ID NO: 26187 - protein, 89 aa, Homo sapiens; identical to SEQ ID NO: 26185
  Payload ID: 5175
  Gene Symbol: DYNLL1
  Gene Name: dynein, light chain, LC8-type 1
  Uniprot ID: P63167
  ENSP ID: ENSP00000376297

SEQ ID NO: 26188 - protein, 67 aa, Homo sapiens
  Payload ID: 5175
  Gene Symbol: DYNLL1
  Gene Name: dynein, light chain, LC8-type 1
  ENSP ID: ENSP00000446596
MCDRKAVIKNADMSEEMQQDSVECATQALEKYNIEKDIAAHIKKVRMGAGADTQPGAGGSFPPILLS

SEQ ID NO: 26189 - protein, 89 aa, Homo sapiens; identical to SEQ ID NO: 26185
  Payload ID: 5175
  Gene Symbol: DYNLL1
  Gene Name: dynein, light chain, LC8-type 1
  Uniprot ID: P63167
  ENSP ID: ENSP00000446614

SEQ ID NO: 26190 - protein, 67 aa, Homo sapiens; identical to SEQ ID NO: 26188
  Payload ID: 5175
  Gene Symbol: DYNLL1
  Gene Name: dynein, light chain, LC8-type 1
  ENSP ID: ENSP00000447494

SEQ ID NO: 26191 - protein, 89 aa, Homo sapiens; identical to SEQ ID NO: 26185
  Payload ID: 5175
  Gene Symbol: DYNLL1
  Gene Name: dynein, light chain, LC8-type 1
  Uniprot ID: P63167
  ENSP ID: ENSP00000447907

SEQ ID NO: 26192 - protein, 67 aa, Homo sapiens; identical to SEQ ID NO: 26188
  Payload ID: 5175
  Gene Symbol: DYNLL1
  Gene Name: dynein, light chain, LC8-type 1
  ENSP ID: ENSP00000448608

SEQ ID NO: 26193 - protein, 42 aa, Homo sapiens
  Payload ID: 5175
  Gene Symbol: DYNLL1
  Gene Name: dynein, light chain, LC8-type 1
  ENSP ID: ENSP00000448834
MCDRKAVIKNADMSEEMQQDSVECATQALEKYNIEKDIAAHI

SEQ ID NO: 26194 - protein, 47 aa, Homo sapiens
  Payload ID: 5175
  Gene Symbol: DYNLL1
  Gene Name: dynein, light chain, LC8-type 1
  ENSP ID: ENSP00000449088
MCDRKAVIKNADMSEEMQQDSVECATQALEKYNIEKDIAAHIKKELR

SEQ ID NO: 26195 - protein, 89 aa, Homo sapiens
  Payload ID: 5176
  Gene Symbol: DYNLL2
  Gene Name: dynein, light chain, LC8-type 2
  Uniprot ID: Q96FJ2
  ENSP ID: ENSP00000477310
MSDRKAVIKNADMSEDMQQDAVDCATQAMEKYNIEKDIAAYIKKEFDKKYNPTWHCIVGRNFGSYVTHETKHFIYFYLGQVAILLFKSG

SEQ ID NO: 26196 - protein, 47 aa, Homo sapiens
  Payload ID: 5177
  Gene Symbol: DYNLRB1
  Gene Name: dynein, light chain, roadblock-type 1
  Uniprot ID: Q9NP97
  ENSP ID: ENSP00000300469
MAEVEETLKRLQSQKGVQGIIVVNTEGGWEPLGHCGDRSRPPAQGCP

SEQ ID NO: 26197 - protein, 96 aa, Homo sapiens
  Payload ID: 5177
  Gene Symbol: DYNLRB1
  Gene Name: dynein, light chain, roadblock-type 1
  Uniprot ID: Q9NP97
  ENSP ID: ENSP00000349679
MAEVEETLKRLQSQKGVQGIIVVNTEGIPIKSTMDNPTTTQYASLMHSFILKARSTVRDIDPQNDLTFLRIRSKKNEIMVAPDKDYFLIVIQNPTE

SEQ ID NO: 26198 - protein, 148 aa, Homo sapiens
  Payload ID: 5177
  Gene Symbol: DYNLRB1
  Gene Name: dynein, light chain, roadblock-type 1
  ENSP ID: ENSP00000363979
MGEGWAAALQPRVLGPWCAMATLATFPGSSVCGRLCQALYVSCISSASSQLCEAEVEETLKRLQSQKGVQGIIVVNTEGIPIKSTMDNPTTTQYASLMHSFILKARSTVRDIDPQNDLTFLRIRSKKNEIMVAPDKDYFLIVIQNPTE

SEQ ID NO: 26199 - protein, 96 aa, Homo sapiens
  Payload ID: 5178
  Gene Symbol: DYNLRB2
  Gene Name: dynein, light chain, roadblock-type 2
  Uniprot ID: Q8TF09
  ENSP ID: ENSP00000302936
MAEVEETLKRIQSHKGVIGTMVVNAEGIPIRTTLDNSTTVQYAGLLHHLTMKAKSTVRDIDPQNDLTFLRIRSKKHEIMVAPDKEYLLIVIQNPCE

SEQ ID NO: 26200 - protein, 54 aa, Homo sapiens
  Payload ID: 5178
  Gene Symbol: DYNLRB2
  Gene Name: dynein, light chain, roadblock-type 2
  ENSP ID: ENSP00000342009
MAEVEETLKRIQSHKGVIGTMVVNAEDPRFVTFKYARQLTAFQRKSGQQITIKD

SEQ ID NO: 26201 - protein, 40 aa, Homo sapiens
  Payload ID: 5178
  Gene Symbol: DYNLRB2
  Gene Name: dynein, light chain, roadblock-type 2
  ENSP ID: ENSP00000454846
MAEVEETLKRIQSHKGVIGTMVVNAEDKEYLLIVIQNPCE

SEQ ID NO: 26202 - protein, 44 aa, Homo sapiens
  Payload ID: 5178
  Gene Symbol: DYNLRB2
  Gene Name: dynein, light chain, roadblock-type 2
  ENSP ID: ENSP00000455216
MAEVEETLKRIQSHKGVIGTMVVNAEGKKTNTMSQSKNFRADSL

SEQ ID NO: 26203 - protein, 125 aa, Homo sapiens
  Payload ID: 5178
  Gene Symbol: DYNLRB2
  Gene Name: dynein, light chain, roadblock-type 2
  ENSP ID: ENSP00000455791
MNEWTNTGREPDPLPSSLPGPTAPGLGEPQAEVEETLKRIQSHKGVIGTMVVNAEGIPIRTTLDNSTTVQYAGLLHHLTMKAKSTVRDIDPQNDLTFLRIRSKKHEIMVAPDKEYLLIVIQNPCE

SEQ ID NO: 26204 - protein, 92 aa, Homo sapiens
  Payload ID: 5179
  Gene Symbol: DYNLT1
  Gene Name: dynein, light chain, Tctex-type 1
  ENSP ID: ENSP00000356052
MEDYQAAEETAFVVDEVSNIVKEAIESAIGGNAYQHSKVNQWTTNVVEQTLSQLTKLGKPFKYIGNGVLFLLYLRDGFLTLIRGASSTRNNS

SEQ ID NO: 26205 - protein, 67 aa, Homo sapiens [sequence omitted]

SEQ ID NO: 26206 - protein, 113 aa, Homo sapiens
  Payload ID: 5179
  Gene Symbol: DYNLT1
  Gene Name: dynein, light chain, Tctex-type 1
  Uniprot ID: P63172
  ENSP ID: ENSP00000356056
MEDYQAAEETAFVVDEVSNIVKEAIESAIGGNAYQHSKVNQWTTNVVEQTLSQLTKLGKPFKYIVTCVIMQKNGAGLHTASSCFWDSSTDGSCTVRWENKTMYCIVSAFGLSI

SEQ ID NO: 26207 - protein, 116 aa, Homo sapiens
  Payload ID: 5180
  Gene Symbol: DYNLT3
  Gene Name: dynein, light chain, Tctex-type 3
  Uniprot ID: P51808
  ENSP ID: ENSP00000367841
MEEYHRHCDEVGFNAEEAHNIVKECVDGVLGGEDYNHNNINQWTASIVEQSLTHLVKLGKAYKYIVTCAVVQKSAYGFHTASSCFWDTTSDGTCTVRWENRTMNCIVNVFAIAIVL

SEQ ID NO: 26208 - protein, 152 aa, Homo sapiens
  Payload ID: 5180
  Gene Symbol: DYNLT3
  Gene Name: dynein, light chain, Tctex-type 3
  ENSP ID: ENSP00000367844
MEEYHRHCDEVGFNAEEAHNIVKECVDGVLGGEDYNHNNINQWTASIVEQSLTHLVKLGKAYKYIVTCAVVQKSAYGFHTASSCFWDTTSDGTCTVRWENRTMNCGVLLCRPGWSAVMQFRLTATSASQVQVILLPQPPEYLELQAHAITPG

SEQ ID NO: 26209 - protein, 122 aa, Homo sapiens
  Payload ID: 5180
  Gene Symbol: DYNLT3
  Gene Name: dynein, light chain, Tctex-type 3
  ENSP ID: ENSP00000402695
MARSLGVLVALPFPLPVGFNAEEAHNIVKECVDGVLGGEDYNHNNINQWTASIVEQSLTHLVKLGKAYKYIVTCAVVQKSAYGFHTASSCFWDTTSDGTCTVRWENRTMNCIVNVFAIAIVL

SEQ ID NO: 26210 - protein, 158 aa, Homo sapiens
  Payload ID: 5181
  Gene Symbol: DBNDD1
  Gene Name: dysbindin (dystrobrevin binding protein 1) domain containing 1
  Uniprot ID: Q9H9R9
  ENSP ID: ENSP00000002501
MEPPEGAGTGEIVKEAEVPQAALGVPAQGTGDNGHTPVEEEVGGIPVPAPGLLQVTERRQPLSSVSSLEVHFDLLDLTELTDMSDQELAEVFADSDDENLNTESPAGLHPLPRAGYLRSPSWTRTRAEQSHEKQPLGDPERQATVLDTFLTVERPQED

SEQ ID NO: 26211 - protein, 178 aa, Homo sapiens
  Payload ID: 5181
  Gene Symbol: DBNDD1
  Gene Name: dysbindin (dystrobrevin binding protein 1) domain containing 1
  Uniprot ID: Q9H9R9
  ENSP ID: ENSP00000306407
MGETWKNICSTVRHGWWLRDHRMAGLPIPPEIVKEAEVPQAALGVPAQGTGDNGHTPVEEEVGGIPVPAPGLLQVTERRQPLSSVSSLEVHFDLLDLTELTDMSDQELAEVFADSDDENLNTESPAGLHPLPRAGYLRSPSWTRTRAEQSHEKQPLGDPERQATVLDTFLTVERPQED

SEQ ID NO: 26212 - protein, 164 aa, Homo sapiens
  Payload ID: 5181
  Gene Symbol: DBNDD1
  Gene Name: dysbindin (dystrobrevin binding protein 1) domain containing 1
  ENSP ID: ENSP00000376699
MWEPCGSQGDTVSLDAEIVKEAEVPQAALGVPAQGTGDNGHTPVEEEVGGIPVPAPGLLQVTERRQPLSSVSSLEVHFDLLDLTELTDMSDQELAEVFADSDDENLNTESPAGLHPLPRAGYLRSPSWTRTRAEQSHEKQPLGDPERQATVLDTFLTVERPQED

SEQ ID NO: 26213 - protein, 79 aa, Homo sapiens
  Payload ID: 5181
  Gene Symbol: DBNDD1
  Gene Name: dysbindin (dystrobrevin binding protein 1) domain containing 1
  ENSP ID: ENSP00000456573
  MOD_RES (1)..(1): Any amino acid
XPGRSVSLSLPSASQAPPVPLASPEGRPHTVGAPHASTWKRTRGRQRARPPNASGKVETRFRESPVQPAQPPGLKRAMP

SEQ ID NO: 26214 - protein, 278 aa, Homo sapiens
  Payload ID: 5181
  Gene Symbol: DBNDD1
  Gene Name: dysbindin (dystrobrevin binding protein 1) domain containing 1
  Uniprot ID: Q9H9R9
  ENSP ID: ENSP00000457625
MTQQWREVNEDREAVAQARSWQSLNLGDRDMGVSFIETALALSAARARRPLLTSHPPSRPFQPPKHTPSPPPAPRVNSRHPGRSVSLSLPSASQAPPVPLASPEGRPHTVGAPHASTWKRTRGRQRARPPKIVKEAEVPQAALGVPAQGTGDNGHTPVEEEVGGIPVPAPGLLQVTERRQPLSSVSSLEVHFDLLDLTELTDMSDQELAEVFADSDDENLNTESPAGLHPLPRAGYLRSPSWTRTRAEQSHEKQPLGDPERQATVLDTFLTVERPQED

SEQ ID NO: 26215 - protein, 161 aa, Homo sapiens
  Payload ID: 5182
  Gene Symbol: DBNDD2
  Gene Name: dysbindin (dystrobrevin binding protein 1) domain containing 2
  Uniprot ID: Q9BQY9
  ENSP ID: ENSP00000349822
MDPNPRAALERQQLRLRERQKFFEDILQPETEFVFPLSHLHLESQRPPIGSISSMEVNVDTLEQVELIDLGDPDAADVFLPCEDPPPTPQSSGMDNHLEELSLPVPTSDRTTSRTSSSSSSDSSTNLHSPNPSDDGADTPLAQSDEEEERGDGGAEPGACS

SEQ ID NO: 26216 - protein, 161 aa, Homo sapiens; identical to SEQ ID NO: 26215
  Payload ID: 5182
  Gene Symbol: DBNDD2
  Gene Name: dysbindin (dystrobrevin binding protein 1) domain containing 2
  Uniprot ID: Q9BQY9
  ENSP ID: ENSP00000354250

SEQ ID NO: 26217 - protein, 263 aa, Homo sapiens
  Payload ID: 5182
  Gene Symbol: DBNDD2
  Gene Name: dysbindin (dystrobrevin binding protein 1) domain containing 2
  Uniprot ID: Q9BQY9
  ENSP ID: ENSP00000361795
MESWALAVFPEYRVSLLWCLELASPLWSLGQAPPLHETWFVGHTWFQGRGKRSPRAEVSRPEPGAPLLGCWLQWGAPSPGPLCLLFRLCSCTCFAPLPAGADMDPNPRAALERQQLRLRERQKFFEDILQPETEFVFPLSHLHLESQRPPIGSISSMEVNVDTLEQVELIDLGDPDAADVFLPCEDPPPTPQSSGMDNHLEELSLPVPTSDRTTSRTSSSSSSDSSTNLHSPNPSDDGADTPLAQSDEEEERGDGGAEPGACS

SEQ ID NO: 26218 - protein, 161 aa, Homo sapiens; identical to SEQ ID NO: 26215
  Payload ID: 5182
  Gene Symbol: DBNDD2
  Gene Name: dysbindin (dystrobrevin binding protein 1) domain containing 2
  Uniprot ID: Q9BQY9
  ENSP ID: ENSP00000361797

SEQ ID NO: 26219 - protein, 112 aa, Homo sapiens
  Payload ID: 5182
  Gene Symbol: DBNDD2
  Gene Name: dysbindin (dystrobrevin binding protein 1) domain containing 2
  Uniprot ID: Q9BQY9
  ENSP ID: ENSP00000361802
MDPNPRAALERQQLRLRERQKFFEDILQPETEFVFPLSHLHLESQRPPIGSISSMEVNVDTLEQVELIDLGDPDAADVFLPCEDPPPTPQSSGMPLCFGDFSASQPEPDVRL

SEQ ID NO: 26220 - protein, 259 aa, Homo sapiens
  Payload ID: 5182
  Gene Symbol: DBNDD2
  Gene Name: dysbindin (dystrobrevin binding protein 1) domain containing 2
  Uniprot ID: Q9BQY9
  ENSP ID: ENSP00000361805
MGAGNFLTALEVPVAALAGAASDRRASCERVSPPPPLPHFRLPPLPRSRLPGPVSRPEPGAPLLGCWLQWGAPSPGPLCLLFRLCSCTCFAPLPAGADMDPNPRAALERQQLRLRERQKFFEDILQPETEFVFPLSHLHLESQRPPIGSISSMEVNVDTLEQVELIDLGDPDAADVFLPCEDPPPTPQSSGMDNHLEELSLPVPTSDRTTSRTSSSSSSDSSTNLHSPNPSDDGADTPLAQSDEEEERGDGGAEPGACS

SEQ ID NO: 26221 - protein, 112 aa, Homo sapiens; identical to SEQ ID NO: 26219
  Payload ID: 5182
  Gene Symbol: DBNDD2
  Gene Name: dysbindin (dystrobrevin binding protein 1) domain containing 2
  Uniprot ID: Q9BQY9
  ENSP ID: ENSP00000361807

SEQ ID NO: 26222 - protein, 161 aa, Homo sapiens; identical to SEQ ID NO: 26215
  Payload ID: 5182
  Gene Symbol: DBNDD2
  Gene Name: dysbindin (dystrobrevin binding protein 1) domain containing 2
  Uniprot ID: Q9BQY9
  ENSP ID: ENSP00000361808

SEQ ID NO: 26223 - protein, 172 aa, Homo sapiens
  Payload ID: 5182
  Gene Symbol: DBNDD2
  Gene Name: dysbindin (dystrobrevin binding protein 1) domain containing 2
  ENSP ID: ENSP00000414161
  MOD_RES (1)..(1): Any amino acid
XTWFQGRGKRSPRAEVSRPEPGAPLLGCWLQWGAPSPGPLCLLFRLCSCTCFAPLPAGADMDPNPRAALERQQLRLRERQKFFEDILQPETEFVFPLSHLHLESQRPPIGSISSMEVNVDTLEQVELIDLGDPDAADVFLPCEDPPPTPQSSGMPLCFGDFSASQPEPDVRL

SEQ ID NO: 26224 - protein, 2080 aa, Homo sapiens
  Payload ID: 5183
  Gene Symbol: DYSF
  Gene Name: dysferlin
  Uniprot ID: O75923
  ENSP ID: ENSP00000258104
MLRVFILYAENVHTPDTDISDAYCSAVFAGVKKRTKVIKNSVNPVWNEGFEWDLKGIPLDQGSELHVVVKDHETMGRNRFLGEAKVPLREVLATPSLSASFNAPLLDTKKQPTGASLVLQVSYTPLPGAVPLFPPPTPLEPSPTLPDLDVVADTGGEEDTEDQGLTGDEAEPFLDQSGGPGAPTTPRKLPSRPPPHYPGIKRKRSAPTSRKLLSDKPQDFQIRVQVIEGRQLPGVNIKPVVKVTAAGQTKRTRIHKGNSPLFNETLFFNLFDSPGELFDEPIFITVVDSRSLRTDALLGEFRMDVGTIYREPRHAYLRKWLLLSDPDDFSAGARGYLKTSLCVLGPGDEAPLERKDPSEDKEDIESNLLRPTGVALRGAHFCLKVFRAEDLPQMDDAVMDNVKQIFGFESNKKNLVDPFVEVSFAGKMLCSKILEKTANPQWNQNITLPAMFPSMCEKMRIRIIDWDRLTHNDIVATTYLSMSKISAPGGEIEEEPAGAVKPSKASDLDDYLGFLPTFGPCYINLYGSPREFTGFPDPYTELNTGKGEGVAYRGRLLLSLETKLVEHSEQKVEDLPADDILRVEKYLRRRKYSLFAAFYSATMLQDVDDAIQFEVSIGNYGNKFDMTCLPLASTTQYSRAVFDGCHYYYLPWGNVKPVVVLSSYWEDISHRIETQNQLLGIADRLEAGLEQVHLALKAQCSTEDVDSLVAQLTDELIAGCSQPLGDIHETPSATHLDQYLYQLRTHHLSQITEAALALKLGHSELPAALEQAEDWLLRLRALAEEPQNSLPDIVIWMLQGDKRVAYQRVPAHQVLFSRRGANYCGKNCGKLQTIFLKYPMEKVPGARMPVQIRVKLWFGLSVDEKEFNQFAEGKLSVFAETYENETKLALVGNWGTTGLTYPKFSDVTGKIKLPKDSFRPSAGWTWAGDWFVCPEKTLLHDMDAGHLSFVEEVFENQTRLPGGQWIYMSDNYTDVNGEKVLPKDDIECPLGWKWEDEEWSTDLNRAVDEQGWEYSITIPPERKPKHWVPAEKMYYTHRRRRWVRLRRRDLSQMEALKRHRQAEAEGEGWEYASLFGWKFHLEYRKTDAFRRRRWRRRMEPLEKTGPAAVFALEGALGGVMDDKSEDSMSVSTLSFGVNRPTISCIFDYGNRYHLRCYMYQARDLAAMDKDSFSDPYAIVSFLHQSQKTVVVKNTLNPTWDQTLIFYEIEIFGEPATVAEQPPSIVVELYDHDTYGADEFMGRCICQPSLERMPRLAWFPLTRGSQPSGELLASFELIQREKPAIHHIPGFEVQETSRILDESEDTDLPYPPPQREANIYMVPQNIKPALQRTAIEILAWGLRNMKSYQLANISSPSLVVECGGQTVQSCVIRNLRKNPNFDICTLFMEVMLPREELYCPPITVKVIDNRQFGRRPVVGQCTIRSLESFLCDPYSAESPSPQGGPDDVSLLSPGEDVLIDIDDKEPLIPIQEEEFIDWWSKFFASIGEREKCGSYLEKDFDTLKVYDTQLENVEAFEGLSDFCNTFKLYRGKTQEETEDPSVIGEFKGLFKIYPLPEDPAIPMPPRQFHQLAAQGPQECLVRIYIVRAFGLQPKDPNGKCDPYIKISIGKKSVSDQDNYIPCTLEPVFGKMFELTCTLPLEKDLKITLYDYDLLSKDEKIGETVVDLENRLLSKFGARCGLPQTYCVSGPNQWRDQLRPSQLLHLFCQQHRVKAPVYRTDRVMFQDKEYSIEEIEAGRIPNPHLGPVEERLALHVLQQQGLVPEHVESRPLYSPLQPDIEQGKLQMWVDLFPKALGRPGPPFNITPRRARRFFLRCIIWNTRDVILDDLSLTGEKMSDIYVKGWMIGFEEHKQKTDVHYRSLGGEGNFNWRFIFPFDYLPAEQVCTIAKKDAFWRLDKTESKIPARVVFQIWDNDKFSFDDFLGSLQLDLNRMPKPAKTAKKCSLDQLDDAFHPEWFVSLFEQKTVKGWWPCVAEEGEKKILAGKLEMTLEIVAESEHEERPAGQGRDEPNMNPKLEDPRRPDTSFLWFTSPYKTMKFILWRRFRWAIILFIILFILLLFLAIFIYAFPNYAAMKLVKPFS

SEQ ID NO: 26225 - protein, 2081 aa, Homo sapiens
  Payload ID: 5183
  Gene Symbol: DYSF
  Gene Name: dysferlin
  Uniprot ID: O75923
  ENSP ID: ENSP00000377678
MLCCLLVRASNLPSAKKDRRSDPVASLTFRGVKKRTKVIKNSVNPVWNEGFEWDLKGIPLDQGSELHVVVKDHETMGRNRFLGEAKVPLREVLATPSLSASFNAPLLDTKKQPTGASLVLQVSYTPLPGAVPLFPPPTPLEPSPTLPDLDVVADTGGEEDTEDQGLTGDEAEPFLDQSGGPGAPTTPRKLPSRPPPHYPGIKRKRSAPTSRKLLSDKPQDFQIRVQVIEGRQLPGVNIKPVVKVTAAGQTKRTRIHKGNSPLFNETLFFNLFDSPGELFDEPIFITVVDSRSLRTDALLGEFRMDVGTIYREPRHAYLRKWLLLSDPDDFSAGARGYLKTSLCVLGPGDEAPLERKDPSEDKEDIESNLLRPTGVALRGAHFCLKVFRAEDLPQMDDAVMDNVKQIFGFESNKKNLVDPFVEVSFAGKMLCSKILEKTANPQWNQNITLPAMFPSMCEKMRIRIIDWDRLTHNDIVATTYLSMSKISAPGGEIEEEPAGAVKPSKASDLDDYLGFLPTFGPCYINLYGSPREFTGFPDPYTELNTGKGEGVAYRGRLLLSLETKLVEHSEQKVEDLPADDILRVEKYLRRRKYSLFAAFYSATMLQDVDDAIQFEVSIGNYGNKFDMTCLPLASTTQYSRAVFDGCHYYYLPWGNVKPVVVLSSYWEDISHRIETQNQLLGIADRLEAGLEQVHLALKAQCSTEDVDSLVAQLTDELIAGCSQPLGDIHETPSATHLDQYLYQLRTHHLSQITEAALALKLGHSELPAALEQAEDWLLRLRALAEEPQNSLPDIVIWMLQGDKRVAYQRVPAHQVLFSRRGANYCGKNCGKLQTIFLKYPMEKVPGARMPVQIRVKLWFGLSVDEKEFNQFAEGKLSVFAETYENETKLALVGNWGTTGLTYPKFSDVTGKIKLPKDSFRPSAGWTWAGDWFVCPEKTLLHDMDAGHLSFVEEVFENQTRLPGGQWIYMSDNYTDVNGEKVLPKDDIECPLGWKWEDEEWSTDLNRAVDEQGWEYSITIPPERKPKHWVPAEKMYYTHRRRRWVRLRRRDLSQMEALKRHRQAEAEGEGWEYASLFGWKFHLEYRKTDAFRRRRWRRRMEPLEKTGPAAVFALEGALGGVMDDKSEDSMSVSTLSFGVNRPTISCIFDYGNRYHLRCYMYQARDLAAMDKDSFSDPYAIVSFLHQSQKTVVVKNTLNPTWDQTLIFYEIEIFGEPATVAEQPPSIVVELYDHDTYGADEFMGRCICQPSLERMPRLAWFPLTRGSQPSGELLASFELIQREKPAIHHIPGFEVQETSRILDESEDTDLPYPPPQREANIYMVPQNIKPALQRTAIEILAWGLRNMKSYQLANISSPSLVVECGGQTVQSCVIRNLRKNPNFDICTLFMEVMLPREELYCPPITVKVIDNRQFGRRPVVGQCTIRSLESFLCDPYSAESPSPQGGPDDVSLLSPGEDVLIDIDDKEPLIPIQEEEFIDWWSKFFASIGEREKCGSYLEKDFDTLKVYDTQLENVEAFEGLSDFCNTFKLYRGKTQEETEDPSVIGEFKGLFKIYPLPEDPAIPMPPRQFHQLAAQGPQECLVRIYIVRAFGLQPKDPNGKCDPYIKISIGKKSVSDQDNYIPCTLEPVFGKMFELTCTLPLEKDLKITLYDYDLLSKDEKIGETVVDLENRLLSKFGARCGLPQTYCVSGPNQWRDQLRPSQLLHLFCQQHRVKAPVYRTDRVMFQDKEYSIEEIEAGRIPNPHLGPVEERLALHVLQQQGLVPEHVESRPLYSPLQPDIEQGKLQMWVDLFPKALGRPGPPFNITPRRARRFFLRCIIWNTRDVILDDLSLTGEKMSDIYVKGWMIGFEEHKQKTDVHYRSLGGEGNFNWRFIFPFDYLPAEQVCTIAKKDAFWRLDKTESKIPARVVFQIWDNDKFSFDDFLGSLQLDLNRMPKPAKTAKKCSLDQLDDAFHPEWFVSLFEQKTVKGWWPCVAEEGEKKILAGKLEMTLEIVAESEHEERPAGQGRDEPNMNPKLEDPRRPDTSFLWFTSPYKTMKFILWRRFRWAIILFIILFILLLFLAIFIYAFPNYAAMKLVKPFS

SEQ ID NO: 26226 - protein, 2088 aa, Homo sapiens
  Payload ID: 5183
  Gene Symbol: DYSF
  Gene Name: dysferlin
  Uniprot ID: O75923
  ENSP ID: ENSP00000386285
MLCCLLVRASNLPSAKKDRRSDPVASLTFRGVKKRTKVIKNSVNPVWNEGFEWDLKGIPLDQGSELHVVVKDHETMGRNRFLGEAKVPLREVLATPSLSASFNAPLLDTKKQPTGASLVLQVSYTPLPGAVPLFPPPTPLEPSPTLPDLDVVADTGGEEDTEDQGLTGDEAEPFLDQSGGPGAPTTPRKLPSRPPPHYPGIKRKRSAPTSRKLLSDKPQDFQIRVQVIEGRQLPGVNIKPVVKVTAAGQTKRTRIHKGNSPLFNETLFFNLFDSPGELFDEPIFITVVDSRSLRTDALLGEFRMDVGTIYREPRHAYLRKWLLLSDPDDFSAGARGYLKTSLCVLGPGDEAPLERKDPSEDKEDIESNLLRPTGVALRGAHFCLKVFRAEDLPQMDDAVMDNVKQIFGFESNKKNLVDPFVEVSFAGKMLCSKILEKTANPQWNQNITLPAMFPSMCEKMRIRIIDWDRLTHNDIVATTYLSMSKISAPGGEIEVDDYLGFLPTFGPCYINLYGSPREFTGFPDPYTELNTGKGEGVAYRGRLLLSLETKLVEHSEQKVEDLPADDILRVEKYLRRRKYSLFAAFYSATMLQDVDDAIQFEVSIGNYGNKFDMTCLPLASTTQYSRAVFDGCHYYYLPWGNVKPVVVLSSYWEDISHRIETQNQLLGIADRLEAGLEQVHLALKAQCSTEDVDSLVAQLTDELIAGCSQPLGDIHETPSATHLDQYLYQLRTHHLSQITEAALALKLGHSELPAALEQAEDWLLRLRALAEEPQNSLPDIVIWMLQGDKRVAYQRVPAHQVLFSRRGANYCGKNCGKLQTIFLKYPMEKVPGARMPVQIRVKLWFGLSVDEKEFNQFAEGKLSVFAETYENETKLALVGNWGTTGLTYPKFSDVTGKIKLPKDSFRPSAGWTWAGDWFVCPEKTLLHDMDAGHLSFVEEVFENQTRLPGGQWIYMSDNYTDVNGEKVLPKDDIECPLGWKWEDEEWSTDLNRAVDEQGWEYSITIPPERKPKHWVPAEKMYYTHRRRRWVRLRRRDLSQMEALKRHRQAEAEGEGWEYASLFGWKFHLEYRKTDAFRRRRWRRRMEPLEKTGPAAVFALEGALGGVMDDKSEDSMSVSTLSFGVNRPTISCIFDYGNRYHLRCYMYQARDLAAMDKDSFSDPYAIVSFLHQSQKTVVVKNTLNPTWDQTLIFYEIEIFGEPATVAEQPPSIVVELYDHDTYGADEFMGRCICQPSLERMPRLAWFPLTRGSQPSGELLASFELIQREKPAIHHIPGFEVQETSRILDESEDTDLPYPPPQREANIYMVPQNIKPALQRTAIEILAWGLRNMKSYQLANISSPSLVVECGGQTVQSCVIRNLRKNPNFDICTLFMEVMLPREELYCPPITVKVIDNRQFGRRPVVGQCTIRSLESFLCDPYSAESPSPQGGPDDVSLLSPGEDVLIDIDDKEPLIPIQLADGLSSLAPTNTASPPSSPHEEEFIDWWSKFFASIGEREKCGSYLEKDFDTLKVYDTQLENVEAFEGLSDFCNTFKLYRGKTQEETEDPSVIGEFKGLFKIYPLPEDPAIPMPPRQFHQLAAQGPQECLVRIYIVRAFGLQPKDPNGKCDPYIKISIGKKSVSDQDNYIPCTLEPVFGKMFELTCTLPLEKDLKITLYDYDLLSKDEKIGETVVDLENRLLSKFGARCGLPQTYCVSGPNQWRDQLRPSQLLHLFCQQHRVKAPVYRTDRVMFQDKEYSIEEIEAGRIPNPHLGPVEERLALHVLQQQGLVPEHVESRPLYSPLQPDIEQGKLQMWVDLFPKALGRPGPPFNITPRRARRFFLRCIIWNTRDVILDDLSLTGEKMSDIYVKGWMIGFEEHKQKTDVHYRSLGGEGNFNWRFIFPFDYLPAEQVCTIAKKDAFWRLDKTESKIPARVVFQIWDNDKFSFDDFLGSLQLDLNRMPKPAKTAKKCSLDQLDDAFHPEWFVSLFEQKTVKGWWPCVAEEGEKKILAGKLEMTLEIVAESEHEERPAGQGRDEPNMNPKLEDPRRPDTSFLWFTSPYKTMKFILWRRFRWAIILFIILFILLLFLAIFIYAFPNYAAMKLVKPFS

SEQ ID NO: 26227 - protein, 2102 aa, Homo sapiens
  Payload ID: 5183
  Gene Symbol: DYSF
  Gene Name: dysferlin
  Uniprot ID: O75923
  ENSP ID: ENSP00000386512
MLCCLLVRASNLPSAKKDRRSDPVASLTFRGVKKRTKVIKNSVNPVWNEGFEWDLKGIPLDQGSELHVVVKDHETMGRNRFLGEAKVPLREVLATPSLSASFNAPLLDTKKQPTGASLVLQVSYTPLPGAVPLFPPPTPLEPSPTLPDLDVVADTGGEEDTEDQGLTGDEAEPFLDQSGGPGAPTTPRKLPSRPPPHYPGIKRKRSAPTSRKLLSDKPQDFQIRVQVIEGRQLPGVNIKPVVKVTAAGQTKRTRIHKGNSPLFNETLFFNLFDSPGELFDEPIFITVVDSRSLRTDALLGEFRMDVGTIYREPRHAYLRKWLLLSDPDDFSAGARGYLKTSLCVLGPGDEAPLERKDPSEDKEDIESNLLRPTGVALRGAHFCLKVFRAEDLPQMDDAVMDNVKQIFGFESNKKNLVDPFVEVSFAGKMLCSKILEKTANPQWNQNITLPAMFPSMCEKMRIRIIDWDRLTHNDIVATTYLSMSKISAPGGEIEEEPAGAVKPSKASDLDDYLGFLPTFGPCYINLYGSPREFTGFPDPYTELNTGKGEGVAYRGRLLLSLETKLVEHSEQKVEDLPADDILRVEKYLRRRKYSLFAAFYSATMLQDVDDAIQFEVSIGNYGNKFDMTCLPLASTTQYSRAVFDGCHYYYLPWGNVKPVVVLSSYWEDISHRIETQNQLLGIADRLEAGLEQVHLALKAQCSTEDVDSLVAQLTDELIAGCSQPLGDIHETPSATHLDQYLYQLRTHHLSQITEAALALKLGHSELPAALEQAEDWLLRLRALAEEPQNSLPDIVIWMLQGDKRVAYQRVPAHQVLFSRRGANYCGKNCGKLQTIFLKYPMEKVPGARMPVQIRVKLWFGLSVDEKEFNQFAEGKLSVFAETYENETKLALVGNWGTTGLTYPKFSDVTGKIKLPKDSFRPSAGWTWAGDWFVCPEKTLLHDMDAGHLSFVEEVFENQTRLPGGQWIYMSDNYTDVNGEKVLPKDDIECPLGWKWEDEEWSTDLNRAVDEQGWEYSITIPPERKPKHWVPAEKMYYTHRRRRWVRLRRRDLSQMEALKRHRQAEAEGEGWEYASLFGWKFHLEYRKTDAFRRRRWRRRMEPLEKTGPAAVFALEGALGGVMDDKSEDSMSVSTLSFGVNRPTISCIFDYGNRYHLRCYMYQARDLAAMDKDSFSDPYAIVSFLHQSQKTVVVKNTLNPTWDQTLIFYEIEIFGEPATVAEQPPSIVVELYDHDTYGADEFMGRCICQPSLERMPRLAWFPLTRGSQPSGELLASFELIQREKPAIHHIPGFEVQETSRILDESEDTDLPYPPPQREANIYMVPQNIKPALQRTAIEILAWGLRNMKSYQLANISSPSLVVECGGQTVQSCVIRNLRKNPNFDICTLFMEVMLPREELYCPPITVKVIDNRQFGRRPVVGQCTIRSLESFLCDPYSAESPSPQGGPDDVSLLSPGEDVLIDIDDKEPLIPIQLADGLSSLAPTNTASPPSSPHEEEFIDWWSKFFASIGEREKCGSYLEKDFDTLKVYDTQLENVEAFEGLSDFCNTFKLYRGKTQEETEDPSVIGEFKGLFKIYPLPEDPAIPMPPRQFHQLAAQGPQECLVRIYIVRAFGLQPKDPNGKCDPYIKISIGKKSVSDQDNYIPCTLEPVFGKMFELTCTLPLEKDLKITLYDYDLLSKDEKIGETVVDLENRLLSKFGARCGLPQTYCVSGPNQWRDQLRPSQLLHLFCQQHRVKAPVYRTDRVMFQDKEYSIEEIEAGRIPNPHLGPVEERLALHVLQQQGLVPEHVESRPLYSPLQPDIEQGKLQMWVDLFPKALGRPGPPFNITPRRARRFFLRCIIWNTRDVILDDLSLTGEKMSDIYVKGWMIGFEEHKQKTDVHYRSLGGEGNFNWRFIFPFDYLPAEQVCTIAKKDAFWRLDKTESKIPARVVFQIWDNDKFSFDDFLGSLQLDLNRMPKPAKTAKKCSLDQLDDAFHPEWFVSLFEQKTVKGWWPCVAEEGEKKILAGKLEMTLEIVAESEHEERPAGQGRDEPNMNPKLEDPRRPDTSFLWFTSPYKTMKFILWRRFRWAIILFIILFILLLFLAIFIYAFPNYAAMKLVKPFS

SEQ ID NO: 26228 - protein, 2118 aa, Homo sapiens
  Payload ID: 5183
  Gene Symbol: DYSF
  Gene Name: dysferlin
  Uniprot ID: O75923
  ENSP ID: ENSP00000386547
MLRVFILYAENVHTPDTDISDAYCSAVFAGVKKRTKVIKNSVNPVWNEGFEWDLKGIPLDQGSELHVVVKDHETMGRNRFLGEAKVPLREVLATPSLSASFNAPLLDTKKQPTGASLVLQVSYTPLPGAVPLFPPPTPLEPSPTLPDLDVVAGGGQSRAETWSLLSDSTMDTRYSGKKWPAPTDTGGEEDTEDQGLTGDEAEPFLDQSGGPGAPTTPRKLPSRPPPHYPGIKRKRSAPTSRKLLSDKPQDFQIRVQVIEGRQLPGVNIKPVVKVTAAGQTKRTRIHKGNSPLFNETLFFNLFDSPGELFDEPIFITVVDSRSLRTDALLGEFRMDVGTIYREPRHAYLRKWLLLSDPDDFSAGARGYLKTSLCVLGPGDEAPLERKDPSEDKEDIESNLLRPTGVALRGAHFCLKVFRAEDLPQMDDAVMDNVKQIFGFESNKKNLVDPFVEVSFAGKMLCSKILEKTANPQWNQNITLPAMFPSMCEKMRIRIIDWDRLTHNDIVATTYLSMSKISAPGGEIEVDDYLGFLPTFGPCYINLYGSPREFTGFPDPYTELNTGKGEGVAYRGRLLLSLETKLVEHSEQKVEDLPADDILRVEKYLRRRKYSLFAAFYSATMLQDVDDAIQFEVSIGNYGNKFDMTCLPLASTTQYSRAVFDGCHYYYLPWGNVKPVVVLSSYWEDISHRIETQNQLLGIADRLEAGLEQVHLALKAQCSTEDVDSLVAQLTDELIAGCSQPLGDIHETPSATHLDQYLYQLRTHHLSQITEAALALKLGHSELPAALEQAEDWLLRLRALAEEPQNSLPDIVIWMLQGDKRVAYQRVPAHQVLFSRRGANYCGKNCGKLQTIFLKYPMEKVPGARMPVQIRVKLWFGLSVDEKEFNQFAEGKLSVFAETYENETKLALVGNWGTTGLTYPKFSDVTGKIKLPKDSFRPSAGWTWAGDWFVCPEKTLLHDMDAGHLSFVEEVFENQTRLPGGQWIYMSDNYTDVNGEKVLPKDDIECPLGWKWEDEEWSTDLNRAVDEQGWEYSITIPPERKPKHWVPAEKMYYTHRRRRWVRLRRRDLSQMEALKRHRQAEAEGEGWEYASLFGWKFHLEYRKTDAFRRRRWRRRMEPLEKTGPAAVFALEGALGGVMDDKSEDSMSVSTLSFGVNRPTISCIFDYGNRYHLRCYMYQARDLAAMDKDSFSDPYAIVSFLHQSQKTVVVKNTLNPTWDQTLIFYEIEIFGEPATVAEQPPSIVVELYDHDTYGADEFMGRCICQPSLERMPRLAWFPLTRGSQPSGELLASFELIQREKPAIHHIPGFEVQETSRILDESEDTDLPYPPPQREANIYMVPQNIKPALQRTAIEILAWGLRNMKSYQLANISSPSLVVECGGQTVQSCVIRNLRKNPNFDICTLFMEVMLPREELYCPPITVKVIDNRQFGRRPVVGQCTIRSLESFLCDPYSAESPSPQGGPDDVSLLSPGEDVLIDIDDKEPLIPIQLADGLSSLAPTNTASPPSSPHEEEFIDWWSKFFASIGEREKCGSYLEKDFDTLKVYDTQLENVEAFEGLSDFCNTFKLYRGKTQEETEDPSVIGEFKGLFKIYPLPEDPAIPMPPRQFHQLAAQGPQECLVRIYIVRAFGLQPKDPNGKCDPYIKISIGKKSVSDQDNYIPCTLEPVFGKMFELTCTLPLEKDLKITLYDYDLLSKDEKIGETVVDLENRLLSKFGARCGLPQTYCVSGPNQWRDQLRPSQLLHLFCQQHRVKAPVYRTDRVMFQDKEYSIEEIEAGRIPNPHLGPVEERLALHVLQQQGLVPEHVESRPLYSPLQPDIEQGKLQMWVDLFPKALGRPGPPFNITPRRARRFFLRCIIWNTRDVILDDLSLTGEKMSDIYVKGWMIGFEEHKQKTDVHYRSLGGEGNFNWRFIFPFDYLPAEQVCTIAKKDAFWRLDKTESKIPARVVFQIWDNDKFSFDDFLGSLQLDLNRMPKPAKTAKKCSLDQLDDAFHPEWFVSLFEQKTVKGWWPCVAEEGEKKILAGKLEMTLEIVAESEHEERPAGQGRDEPNMNPKLEDPRRPDTSFLWFTSPYKTMKFILWRRFRWAIILFIILFILLLFLAIFIYAFPNYAAMKLVKPFS

SEQ ID NO: 26229 - protein, 2098 aa, Homo sapiens
  Payload ID: 5183
  Gene Symbol: DYSF
  Gene Name: dysferlin
  Uniprot ID: O75923
  ENSP ID: ENSP00000386617
MLCCLLVRASNLPSAKKDRRSDPVASLTFRGVKKRTKVIKNSVNPVWNEGFEWDLKGIPLDQGSELHVVVKDHETMGRNRFLGEAKVPLREVLATPSLSASFNAPLLDTKKQPTGASLVLQVSYTPLPGAVPLFPPPTPLEPSPTLPDLDVVAGGGQSRAETWSLLSDSTMDTRYSGKKWPAPTDTGGEEDTEDQGLTGDEAEPFLDQSGGPGAPTTPRKLPSRPPPHYPGIKRKRSAPTSRKLLSDKPQDFQIRVQVIEGRQLPGVNIKPVVKVTAAGQTKRTRIHKGNSPLFNETLFFNLFDSPGELFDEPIFITVVDSRSLRTDALLGEFRMDVGTIYREPRHAYLRKWLLLSDPDDFSAGARGYLKTSLCVLGPGDEAPLERKDPSEDKEDIESNLLRPTGVALRGAHFCLKVFRAEDLPQMDDAVMDNVKQIFGFESNKKNLVDPFVEVSFAGKMLCSKILEKTANPQWNQNITLPAMFPSMCEKMRIRIIDWDRLTHNDIVATTYLSMSKISAPGGEIEVDDYLGFLPTFGPCYINLYGSPREFTGFPDPYTELNTGKGEGVAYRGRLLLSLETKLVEHSEQKVEDLPADDILRVEKYLRRRKYSLFAAFYSATMLQDVDDAIQFEVSIGNYGNKFDMTCLPLASTTQYSRAVFDGCHYYYLPWGNVKPVVVLSSYWEDISHRIETQNQLLGIADRLEAGLEQVHLALKAQCSTEDVDSLVAQLTDELIAGCSQPLGDIHETPSATHLDQYLYQLRTHHLSQITEAALALKLGHSELPAALEQAEDWLLRLRALAEEPQNSLPDIVIWMLQGDKRVAYQRVPAHQVLFSRRGANYCGKNCGKLQTIFLKYPMEKVPGARMPVQIRVKLWFGLSVDEKEFNQFAEGKLSVFAETYENETKLALVGNWGTTGLTYPKFSDVTGKIKLPKDSFRPSAGWTWAGDWFVCPEKTLLHDMDAGHLSFVEEVFENQTRLPGGQWIYMSDNYTDVNGEKVLPKDDIECPLGWKWEDEEWSTDLNRAVDEQGWEYSITIPPERKPKHWVPAEKMYYTHRRRRWVRLRRRDLSQMEALKRHRQAEAEGEGWEYASLFGWKFHLEYRKTDAFRRRRWRRRMEPLEKTGPAAVFALEGALGGVMDDKSEDSMSVSTLSFGVNRPTISCIFDYGNRYHLRCYMYQARDLAAMDKDSFSDPYAIVSFLHQSQKTVVVKNTLNPTWDQTLIFYEIEIFGEPATVAEQPPSIVVELYDHDTYGADEFMGRCICQPSLERMPRLAWFPLTRGSQPSGELLASFELIQREKPAIHHIPGFEVQETSRILDESEDTDLPYPPPQREANIYMVPQNIKPALQRTAIEILAWGLRNMKSYQLANISSPSLVVECGGQTVQSCVIRNLRKNPNFDICTLFMEVMLPREELYCPPITVKVIDNRQFGRRPVVGQCTIRSLESFLCDPYSAESPSPQGGPDDVSLLSPGEDVLIDIDDKEPLIPIQEEEFIDWWSKFFASIGEREKCGSYLEKDFDTLKVYDTQLENVEAFEGLSDFCNTFKLYRGKTQEETEDPSVIGEFKGLFKIYPLPEDPAIPMPPRQFHQLAAQGPQECLVRIYIVRAFGLQPKDPNGKCDPYIKISIGKKSVSDQDNYIPCTLEPVFGKMFELTCTLPLEKDLKITLYDYDLLSKDEKIGETVVDLENRLLSKFGARCGLPQTYCVSGPNQWRDQLRPSQLLHLFCQQHRVKAPVYRTDRVMFQDKEYSIEEIEAGRIPNPHLGPVEERLALHVLQQQGLVPEHVESRPLYSPLQPDIEQGKLQMWVDLFPKALGRPGPPFNITPRRARRFFLRCIIWNTRDVILDDLSLTGEKMSDIYVKGWMIGFEEHKQKTDVHYRSLGGEGNFNWRFIFPFDYLPAEQVCTIAKKDAFWRLDKTESKIPARVVFQIWDNDKFSFDDFLGSLQLDLNRMPKPAKTAKKCSLDQLDDAFHPEWFVSLFEQKTVKGWWPCVAEEGEKKILAGKLEMTLEIVAESEHEERPAGQGRDEPNMNPKLEDPRRPDTSFLWFTSPYKTMKFILWRRFRWAIILFIILFILLLFLAIFIYAFPNYAAMKLVKPFS

SEQ ID NO: 26230 - protein, 2112 aa, Homo sapiens
  Payload ID: 5183
  Gene Symbol: DYSF
  Gene Name: dysferlin
  Uniprot ID: O75923
  ENSP ID: ENSP00000386683
MLCCLLVRASNLPSAKKDRRSDPVASLTFRGVKKRTKVIKNSVNPVWNEGFEWDLKGIPLDQGSELHVVVKDHETMGRNRFLGEAKVPLREVLATPSLSASFNAPLLDTKKQPTGASLVLQVSYTPLPGAVPLFPPPTPLEPSPTLPDLDVVAGGGQSRAETWSLLSDSTMDTRYSGKKWPAPTDTGGEEDTEDQGLTGDEAEPFLDQSGGPGAPTTPRKLPSRPPPHYPGIKRKRSAPTSRKLLSDKPQDFQIRVQVIEGRQLPGVNIKPVVKVTAAGQTKRTRIHKGNSPLFNETLFFNLFDSPGELFDEPIFITVVDSRSLRTDALLGEFRMDVGTIYREPRHAYLRKWLLLSDPDDFSAGARGYLKTSLCVLGPGDEAPLERKDPSEDKEDIESNLLRPTGVALRGAHFCLKVFRAEDLPQMDDAVMDNVKQIFGFESNKKNLVDPFVEVSFAGKMLCSKILEKTANPQWNQNITLPAMFPSMCEKMRIRIIDWDRLTHNDIVATTYLSMSKISAPGGEIEEEPAGAVKPSKASDLDDYLGFLPTFGPCYINLYGSPREFTGFPDPYTELNTGKGEGVAYRGRLLLSLETKLVEHSEQKVEDLPADDILRVEKYLRRRKYSLFAAFYSATMLQDVDDAIQFEVSIGNYGNKFDMTCLPLASTTQYSRAVFDGCHYYYLPWGNVKPVVVLSSYWEDISHRIETQNQLLGIADRLEAGLEQVHLALKAQCSTEDVDSLVAQLTDELIAGCSQPLGDIHETPSATHLDQYLYQLRTHHLSQITEAALALKLGHSELPAALEQAEDWLLRLRALAEEPQNSLPDIVIWMLQGDKRVAYQRVPAHQVLFSRRGANYCGKNCGKLQTIFLKYPMEKVPGARMPVQIRVKLWFGLSVDEKEFNQFAEGKLSVFAETYENETKLALVGNWGTTGLTYPKFSDVTGKIKLPKDSFRPSAGWTWAGDWFVCPEKTLLHDMDAGHLSFVEEVFENQTRLPGGQWIYMSDNYTDVNGEKVLPKDDIECPLGWKWEDEEWSTDLNRAVDEQGWEYSITIPPERKPKHWVPAEKMYYTHRRRRWVRLRRRDLSQMEALKRHRQAEAEGEGWEYASLFGWKFHLEYRKTDAFRRRRWRRRMEPLEKTGPAAVFALEGALGGVMDDKSEDSMSVSTLSFGVNRPTISCIFDYGNRYHLRCYMYQARDLAAMDKDSFSDPYAIVSFLHQSQKTVVVKNTLNPTWDQTLIFYEIEIFGEPATVAEQPPSIVVELYDHDTYGADEFMGRCICQPSLERMPRLAWFPLTRGSQPSGELLASFELIQREKPAIHHIPGFEVQETSRILDESEDTDLPYPPPQREANIYMVPQNIKPALQRTAIEILAWGLRNMKSYQLANISSPSLVVECGGQTVQSCVIRNLRKNPNFDICTLFMEVMLPREELYCPPITVKVIDNRQFGRRPVVGQCTIRSLESFLCDPYSAESPSPQGGPDDVSLLSPGEDVLIDIDDKEPLIPIQEEEFIDWWSKFFASIGEREKCGSYLEKDFDTLKVYDTQLENVEAFEGLSDFCNTFKLYRGKTQEETEDPSVIGEFKGLFKIYPLPEDPAIPMPPRQFHQLAAQGPQECLVRIYIVRAFGLQPKDPNGKCDPYIKISIGKKSVSDQDNYIPCTLEPVFGKMFELTCTLPLEKDLKITLYDYDLLSKDEKIGETVVDLENRLLSKFGARCGLPQTYCVSGPNQWRDQLRPSQLLHLFCQQHRVKAPVYRTDRVMFQDKEYSIEEIEAGRIPNPHLGPVEERLALHVLQQQGLVPEHVESRPLYSPLQPDIEQGKLQMWVDLFPKALGRPGPPFNITPRRARRFFLRCIIWNTRDVILDDLSLTGEKMSDIYVKGWMIGFEEHKQKTDVHYRSLGGEGNFNWRFIFPFDYLPAEQVCTIAKKDAFWRLDKTESKIPARVVFQIWDNDKFSFDDFLGSLQLDLNRMPKPAKTAKKCSLDQLDDAFHPEWFVSLFEQKTVKGWWPCVAEEGEKKILAGKLEMTLEIVAESEHEERPAGQGRDEPNMNPKLEDPRRPDTSFLWFTSPYKTMKFILWRRFRWAIILFIILFILLLFLAIFIYAFPNYAAMKLVKPFS

SEQ ID NO: 26231 - protein, 2119 aa, Homo sapiens
  Payload ID: 5183
  Gene Symbol: DYSF
  Gene Name: dysferlin
  Uniprot ID: O75923
  ENSP ID: ENSP00000386881
MLCCLLVRASNLPSAKKDRRSDPVASLTFRGVKKRTKVIKNSVNPVWNEGFEWDLKGIPLDQGSELHVVVKDHETMGRNRFLGEAKVPLREVLATPSLSASFNAPLLDTKKQPTGASLVLQVSYTPLPGAVPLFPPPTPLEPSPTLPDLDVVAGGGQSRAETWSLLSDSTMDTRYSGKKWPAPTDTGGEEDTEDQGLTGDEAEPFLDQSGGPGAPTTPRKLPSRPPPHYPGIKRKRSAPTSRKLLSDKPQDFQIRVQVIEGRQLPGVNIKPVVKVTAAGQTKRTRIHKGNSPLFNETLFFNLFDSPGELFDEPIFITVVDSRSLRTDALLGEFRMDVGTIYREPRHAYLRKWLLLSDPDDFSAGARGYLKTSLCVLGPGDEAPLERKDPSEDKEDIESNLLRPTGVALRGAHFCLKVFRAEDLPQMDDAVMDNVKQIFGFESNKKNLVDPFVEVSFAGKMLCSKILEKTANPQWNQNITLPAMFPSMCEKMRIRIIDWDRLTHNDIVATTYLSMSKISAPGGEIEVDDYLGFLPTFGPCYINLYGSPREFTGFPDPYTELNTGKGEGVAYRGRLLLSLETKLVEHSEQKVEDLPADDILRVEKYLRRRKYSLFAAFYSATMLQDVDDAIQFEVSIGNYGNKFDMTCLPLASTTQYSRAVFDGCHYYYLPWGNVKPVVVLSSYWEDISHRIETQNQLLGIADRLEAGLEQVHLALKAQCSTEDVDSLVAQLTDELIAGCSQPLGDIHETPSATHLDQYLYQLRTHHLSQITEAALALKLGHSELPAALEQAEDWLLRLRALAEEPQNSLPDIVIWMLQGDKRVAYQRVPAHQVLFSRRGANYCGKNCGKLQTIFLKYPMEKVPGARMPVQIRVKLWFGLSVDEKEFNQFAEGKLSVFAETYENETKLALVGNWGTTGLTYPKFSDVTGKIKLPKDSFRPSAGWTWAGDWFVCPEKTLLHDMDAGHLSFVEEVFENQTRLPGGQWIYMSDNYTDVNGEKVLPKDDIECPLGWKWEDEEWSTDLNRAVDEQGWEYSITIPPERKPKHWVPAEKMYYTHRRRRWVRLRRRDLSQMEALKRHRQAEAEGEGWEYASLFGWKFHLEYRKTDAFRRRRWRRRMEPLEKTGPAAVFALEGALGGVMDDKSEDSMSVSTLSFGVNRPTISCIFDYGNRYHLRCYMYQARDLAAMDKDSFSDPYAIVSFLHQSQKTVVVKNTLNPTWDQTLIFYEIEIFGEPATVAEQPPSIVVELYDHDTYGADEFMGRCICQPSLERMPRLAWFPLTRGSQPSGELLASFELIQREKPAIHHIPGFEVQETSRILDESEDTDLPYPPPQREANIYMVPQNIKPALQRTAIEILAWGLRNMKSYQLANISSPSLVVECGGQTVQSCVIRNLRKNPNFDICTLFMEVMLPREELYCPPITVKVIDNRQFGRRPVVGQCTIRSLESFLCDPYSAESPSPQGGPDDVSLLSPGEDVLIDIDDKEPLIPIQLADGLSSLAPTNTASPPSSPHEEEFIDWWSKFFASIGEREKCGSYLEKDFDTLKVYDTQLENVEAFEGLSDFCNTFKLYRGKTQEETEDPSVIGEFKGLFKIYPLPEDPAIPMPPRQFHQLAAQGPQECLVRIYIVRAFGLQPKDPNGKCDPYIKISIGKKSVSDQDNYIPCTLEPVFGKMFELTCTLPLEKDLKITLYDYDLLSKDEKIGETVVDLENRLLSKFGARCGLPQTYCVSGPNQWRDQLRPSQLLHLFCQQHRVKAPVYRTDRVMFQDKEYSIEEIEAGRIPNPHLGPVEERLALHVLQQQGLVPEHVESRPLYSPLQPDIEQGKLQMWVDLFPKALGRPGPPFNITPRRARRFFLRCIIWNTRDVILDDLSLTGEKMSDIYVKGWMIGFEEHKQKTDVHYRSLGGEGNFNWRFIFPFDYLPAEQVCTIAKKDAFWRLDKTESKIPARVVFQIWDNDKFSFDDFLGSLQLDLNRMPKPAKTAKKCSLDQLDDAFHPEWFVSLFEQKTVKGWWPCVAEEGEKKILAGKLEMTLEIVAESEHEERPAGQGRDEPNMNPKLEDPRRPDTSFLWFTSPYKTMKFILWRRFRWAIILFIILFILLLFLAIFIYAFPNYAAMKLVKPFS

SEQ ID NO: 26232 - protein, 2097 aa, Homo sapiens
  Payload ID: 5183
  Gene Symbol: DYSF
  Gene Name: dysferlin
  Uniprot ID: O75923
  ENSP ID: ENSP00000387137
MLRVFILYAENVHTPDTDISDAYCSAVFAGVKKRTKVIKNSVNPVWNEGFEWDLKGIPLDQGSELHVVVKDHETMGRNRFLGEAKVPLREVLATPSLSASFNAPLLDTKKQPTGASLVLQVSYTPLPGAVPLFPPPTPLEPSPTLPDLDVVAGGGQSRAETWSLLSDSTMDTRYSGKKWPAPTDTGGEEDTEDQGLTGDEAEPFLDQSGGPGAPTTPRKLPSRPPPHYPGIKRKRSAPTSRKLLSDKPQDFQIRVQVIEGRQLPGVNIKPVVKVTAAGQTKRTRIHKGNSPLFNETLFFNLFDSPGELFDEPIFITVVDSRSLRTDALLGEFRMDVGTIYREPRHAYLRKWLLLSDPDDFSAGARGYLKTSLCVLGPGDEAPLERKDPSEDKEDIESNLLRPTGVALRGAHFCLKVFRAEDLPQMDDAVMDNVKQIFGFESNKKNLVDPFVEVSFAGKMLCSKILEKTANPQWNQNITLPAMFPSMCEKMRIRIIDWDRLTHNDIVATTYLSMSKISAPGGEIEVDDYLGFLPTFGPCYINLYGSPREFTGFPDPYTELNTGKGEGVAYRGRLLLSLETKLVEHSEQKVEDLPADDILRVEKYLRRRKYSLFAAFYSATMLQDVDDAIQFEVSIGNYGNKFDMTCLPLASTTQYSRAVFDGCHYYYLPWGNVKPVVVLSSYWEDISHRIETQNQLLGIADRLEAGLEQVHLALKAQCSTEDVDSLVAQLTDELIAGCSQPLGDIHETPSATHLDQYLYQLRTHHLSQITEAALALKLGHSELPAALEQAEDWLLRLRALAEEPQNSLPDIVIWMLQGDKRVAYQRVPAHQVLFSRRGANYCGKNCGKLQTIFLKYPMEKVPGARMPVQIRVKLWFGLSVDEKEFNQFAEGKLSVFAETYENETKLALVGNWGTTGLTYPKFSDVTGKIKLPKDSFRPSAGWTWAGDWFVCPEKTLLHDMDAGHLSFVEEVFENQTRLPGGQWIYMSDNYTDVNGEKVLPKDDIECPLGWKWEDEEWSTDLNRAVDEQGWEYSITIPPERKPKHWVPAEKMYYTHRRRRWVRLRRRDLSQMEALKRHRQAEAEGEGWEYASLFGWKFHLEYRKTDAFRRRRWRRRMEPLEKTGPAAVFALEGALGGVMDDKSEDSMSVSTLSFGVNRPTISCIFDYGNRYHLRCYMYQARDLAAMDKDSFSDPYAIVSFLHQSQKTVVVKNTLNPTWDQTLIFYEIEIFGEPATVAEQPPSIVVELYDHDTYGADEFMGRCICQPSLERMPRLAWFPLTRGSQPSGELLASFELIQREKPAIHHIPGFEVQETSRILDESEDTDLPYPPPQREANIYMVPQNIKPALQRTAIEILAWGLRNMKSYQLANISSPSLVVECGGQTVQSCVIRNLRKNPNFDICTLFMEVMLPREELYCPPITVKVIDNRQFGRRPVVGQCTIRSLESFLCDPYSAESPSPQGGPDDVSLLSPGEDVLIDIDDKEPLIPIQEEEFIDWWSKFFASIGEREKCGSYLEKDFDTLKVYDTQLENVEAFEGLSDFCNTFKLYRGKTQEETEDPSVIGEFKGLFKIYPLPEDPAIPMPPRQFHQLAAQGPQECLVRIYIVRAFGLQPKDPNGKCDPYIKISIGKKSVSDQDNYIPCTLEPVFGKMFELTCTLPLEKDLKITLYDYDLLSKDEKIGETVVDLENRLLSKFGARCGLPQTYCVSGPNQWRDQLRPSQLLHLFCQQHRVKAPVYRTDRVMFQDKEYSIEEIEAGRIPNPHLGPVEERLALHVLQQQGLVPEHVESRPLYSPLQPDIEQGKLQMWVDLFPKALGRPGPPFNITPRRARRFFLRCIIWNTRDVILDDLSLTGEKMSDIYVKGWMIGFEEHKQKTDVHYRSLGGEGNFNWRFIFPFDYLPAEQVCTIAKKDAFWRLDKTESKIPARVVFQIWDNDKFSFDDFLGSLQLDLNRMPKPAKTAKKCSLDQLDDAFHPEWFVSLFEQKTVKGWWPCVAEEGEKKILAGKLEMTLEIVAESEHEERPAGQGRDEPNMNPKLEDPRRPDTSFLWFTSPYKTMKFILWRRFRWAIILFIILFILLLFLAIFIYAFPNYAAMKLVKPFS

SEQ ID NO: 26233 - protein, 2101 aa, Homo sapiens
  Payload ID: 5183
  Gene Symbol: DYSF
  Gene Name: dysferlin
  Uniprot ID: O75923
  ENSP ID: ENSP00000398305
MLRVFILYAENVHTPDTDISDAYCSAVFAGVKKRTKVIKNSVNPVWNEGFEWDLKGIPLDQGSELHVVVKDHETMGRNRFLGEAKVPLREVLATPSLSASFNAPLLDTKKQPTGASLVLQVSYTPLPGAVPLFPPPTPLEPSPTLPDLDVVADTGGEEDTEDQGLTGDEAEPFLDQSGGPGAPTTPRKLPSRPPPHYPGIKRKRSAPTSRKLLSDKPQDFQIRVQVIEGRQLPGVNIKPVVKVTAAGQTKRTRIHKGNSPLFNETLFFNLFDSPGELFDEPIFITVVDSRSLRTDALLGEFRMDVGTIYREPRHAYLRKWLLLSDPDDFSAGARGYLKTSLCVLGPGDEAPLERKDPSEDKEDIESNLLRPTGVALRGAHFCLKVFRAEDLPQMDDAVMDNVKQIFGFESNKKNLVDPFVEVSFAGKMLCSKILEKTANPQWNQNITLPAMFPSMCEKMRIRIIDWDRLTHNDIVATTYLSMSKISAPGGEIEEEPAGAVKPSKASDLDDYLGFLPTFGPCYINLYGSPREFTGFPDPYTELNTGKGEGVAYRGRLLLSLETKLVEHSEQKVEDLPADDILRVEKYLRRRKYSLFAAFYSATMLQDVDDAIQFEVSIGNYGNKFDMTCLPLASTTQYSRAVFDGCHYYYLPWGNVKPVVVLSSYWEDISHRIETQNQLLGIADRLEAGLEQVHLALKAQCSTEDVDSLVAQLTDELIAGCSQPLGDIHETPSATHLDQYLYQLRTHHLSQITEAALALKLGHSELPAALEQAEDWLLRLRALAEEPQNSLPDIVIWMLQGDKRVAYQRVPAHQVLFSRRGANYCGKNCGKLQTIFLKYPMEKVPGARMPVQIRVKLWFGLSVDEKEFNQFAEGKLSVFAETYENETKLALVGNWGTTGLTYPKFSDVTGKIKLPKDSFRPSAGWTWAGDWFVCPEKTLLHDMDAGHLSFVEEVFENQTRLPGGQWIYMSDNYTDVNGEKVLPKDDIECPLGWKWEDEEWSTDLNRAVDEQGWEYSITIPPERKPKHWVPAEKMYYTHRRRRWVRLRRRDLSQMEALKRHRQAEAEGEGWEYASLFGWKFHLEYRKTDAFRRRRWRRRMEPLEKTGPAAVFALEGALGGVMDDKSEDSMSVSTLSFGVNRPTISCIFDYGNRYHLRCYMYQARDLAAMDKDSFSDPYAIVSFLHQSQKTVVVKNTLNPTWDQTLIFYEIEIFGEPATVAEQPPSIVVELYDHDTYGADEFMGRCICQPSLERMPRLAWFPLTRGSQPSGELLASFELIQREKPAIHHIPGFEVQETSRILDESEDTDLPYPPPQREANIYMVPQNIKPALQRTAIEILAWGLRNMKSYQLANISSPSLVVECGGQTVQSCVIRNLRKNPNFDICTLFMEVMLPREELYCPPITVKVIDNRQFGRRPVVGQCTIRSLESFLCDPYSAESPSPQGGPDDVSLLSPGEDVLIDIDDKEPLIPIQLADGLSSLAPTNTASPPSSPHEEEFIDWWSKFFASIGEREKCGSYLEKDFDTLKVYDTQLENVEAFEGLSDFCNTFKLYRGKTQEETEDPSVIGEFKGLFKIYPLPEDPAIPMPPRQFHQLAAQGPQECLVRIYIVRAFGLQPKDPNGKCDPYIKISIGKKSVSDQDNYIPCTLEPVFGKMFELTCTLPLEKDLKITLYDYDLLSKDEKIGETVVDLENRLLSKFGARCGLPQTYCVSGPNQWRDQLRPSQLLHLFCQQHRVKAPVYRTDRVMFQDKEYSIEEIEAGRIPNPHLGPVEERLALHVLQQQGLVPEHVESRPLYSPLQPDIEQGKLQMWVDLFPKALGRPGPPFNITPRRARRFFLRCIIWNTRDVILDDLSLTGEKMSDIYVKGWMIGFEEHKQKTDVHYRSLGGEGNFNWRFIFPFDYLPAEQVCTIAKKDAFWRLDKTESKIPARVVFQIWDNDKFSFDDFLGSLQLDLNRMPKPAKTAKKCSLDQLDDAFHPEWFVSLFEQKTVKGWWPCVAEEGEKKILAGKLEMTLEIVAESEHEERPAGQGRDEPNMNPKLEDPRRPDTSFLWFTSPYKTMKFILWRRFRWAIILFIILFILLLFLAIFIYAFPNYAAMKLVKPFS

SEQ ID NO: 26234 - protein, 2111 aa, Homo sapiens
  Payload ID: 5183
  Gene Symbol: DYSF
  Gene Name: dysferlin
  Uniprot ID: O75923
  ENSP ID: ENSP00000407046
MLRVFILYAENVHTPDTDISDAYCSAVFAGVKKRTKVIKNSVNPVWNEGFEWDLKGIPLDQGSELHVVVKDHETMGRNRFLGEAKVPLREVLATPSLSASFNAPLLDTKKQPTGASLVLQVSYTPLPGAVPLFPPPTPLEPSPTLPDLDVVAGGGQSRAETWSLLSDSTMDTRYSGKKWPAPTDTGGEEDTEDQGLTGDEAEPFLDQSGGPGAPTTPRKLPSRPPPHYPGIKRKRSAPTSRKLLSDKPQDFQIRVQVIEGRQLPGVNIKPVVKVTAAGQTKRTRIHKGNSPLFNETLFFNLFDSPGELFDEPIFITVVDSRSLRTDALLGEFRMDVGTIYREPRHAYLRKWLLLSDPDDFSAGARGYLKTSLCVLGPGDEAPLERKDPSEDKEDIESNLLRPTGVALRGAHFCLKVFRAEDLPQMDDAVMDNVKQIFGFESNKKNLVDPFVEVSFAGKMLCSKILEKTANPQWNQNITLPAMFPSMCEKMRIRIIDWDRLTHNDIVATTYLSMSKISAPGGEIEEEPAGAVKPSKASDLDDYLGFLPTFGPCYINLYGSPREFTGFPDPYTELNTGKGEGVAYRGRLLLSLETKLVEHSEQKVEDLPADDILRVEKYLRRRKYSLFAAFYSATMLQDVDDAIQFEVSIGNYGNKFDMTCLPLASTTQYSRAVFDGCHYYYLPWGNVKPVVVLSSYWEDISHRIETQNQLLGIADRLEAGLEQVHLALKAQCSTEDVDSLVAQLTDELIAGCSQPLGDIHETPSATHLDQYLYQLRTHHLSQITEAALALKLGHSELPAALEQAEDWLLRLRALAEEPQNSLPDIVIWMLQGDKRVAYQRVPAHQVLFSRRGANYCGKNCGKLQTIFLKYPMEKVPGARMPVQIRVKLWFGLSVDEKEFNQFAEGKLSVFAETYENETKLALVGNWGTTGLTYPKFSDVTGKIKLPKDSFRPSAGWTWAGDWFVCPEKTLLHDMDAGHLSFVEEVFENQTRLPGGQWIYMSDNYTDVNGEKVLPKDDIECPLGWKWEDEEWSTDLNRAVDEQGWEYSITIPPERKPKHWVPAEKMYYTHRRRRWVRLRRRDLSQMEALKRHRQAEAEGEGWEYASLFGWKFHLEYRKTDAFRRRRWRRRMEPLEKTGPAAVFALEGALGGVMDDKSEDSMSVSTLSFGVNRPTISCIFDYGNRYHLRCYMYQARDLAAMDKDSFSDPYAIVSFLHQSQKTVVVKNTLNPTWDQTLIFYEIEIFGEPATVAEQPPSIVVELYDHDTYGADEFMGRCICQPSLERMPRLAWFPLTRGSQPSGELLASFELIQREKPAIHHIPGFEVQETSRILDESEDTDLPYPPPQREANIYMVPQNIKPALQRTAIEILAWGLRNMKSYQLANISSPSLVVECGGQTVQSCVIRNLRKNPNFDICTLFMEVMLPREELYCPPITVKVIDNRQFGRRPVVGQCTIRSLESFLCDPYSAESPSPQGGPDDVSLLSPGEDVLIDIDDKEPLIPIQEEEFIDWWSKFFASIGEREKCGSYLEKDFDTLKVYDTQLENVEAFEGLSDFCNTFKLYRGKTQEETEDPSVIGEFKGLFKIYPLPEDPAIPMPPRQFHQLAAQGPQECLVRIYIVRAFGLQPKDPNGKCDPYIKISIGKKSVSDQDNYIPCTLEPVFGKMFELTCTLPLEKDLKITLYDYDLLSKDEKIGETVVDLENRLLSKFGARCGLPQTYCVSGPNQWRDQLRPSQLLHLFCQQHRVKAPVYRTDRVMFQDKEYSIEEIEAGRIPNPHLGPVEERLALHVLQQQGLVPEHVESRPLYSPLQPDIEQGKLQMWVDLFPKALGRPGPPFNITPRRARRFFLRCIIWNTRDVILDDLSLTGEKMSDIYVKGWMIGFEEHKQKTDVHYRSLGGEGNFNWRFIFPFDYLPAEQVCTIAKKDAFWRLDKTESKIPARVVFQIWDNDKFSFDDFLGSLQLDLNRMPKPAKTAKKCSLDQLDDAFHPEWFVSLFEQKTVKGWWPCVAEEGEKKILAGKLEMTLEIVAESEHEERPAGQGRDEPNMNPKLEDPRRPDTSFLWFTSPYKTMKFILWRRFRWAIILFIILFILLLFLAIFIYAFPNYAAMKLVKPFS

SEQ ID NO: 26235 - protein, 514 aa, Homo sapiens
  Payload ID: 5184
  Gene Symbol: DKC1
  Gene Name: dyskeratosis congenita 1, dyskerin
  Uniprot ID: O60832
  ENSP ID: ENSP00000358563
MADAEVIILPKKHKKKKERKSLPEEDVAEIQHAEEFLIKPESKVAKLDTSQWPLLLKNFDKLNVRTTHYTPLACGSNPLKREIGDYIRTGFINLDKPSNPSSHEVVAWIRRILRVEKTGHSGTLDPKVTGCLIVCIERATRLVKSQQSAGKEYVGIVRLHNAIEGGTQLSRALETLTGALFQRPPLIAAVKRQLRVRTIYESKMIEYDPERRLGIFWVSCEAGTYIRTLCVHLGLLLGVGGQMQELRRVRSGVMSEKDHMVTMHDVLDAQWLYDNHKDESYLRRVVYPLEKLLTSHKRLVMKDSAVNAICYGAKIMLPGVLRYEDGIEVNQEIVVITTKGEAICMAIALMTTAVISTCDHGIVAKIKRVIMERDTYPRKWGLGPKASQKKLMIKQGLLDKHGKPTDSTPATWKQEYVDYSESAKKEVVAEVVKAPQVVAEAAKTAKRKRESESESDETPPAAPQLIKKEKKKSKKDKKAKAGLESGAEPGDGDSDTTKKKKKKKKAKEVELVSE

SEQ ID NO: 26236 - protein, 76 aa, Homo sapiens
  Payload ID: 5184
  Gene Symbol: DKC1
  Gene Name: dyskeratosis congenita 1, dyskerin
  ENSP ID: ENSP00000389304
  MOD_RES (1)..(1): Any amino acid
XVRLHNAIEGGTQLSRALETLTGALFQRPPLIAAVKRQLRVRTIYESKMIEYDPERRLGKCHLLWGQDYASRCSSI

SEQ ID NO: 26237 - protein, 229 aa, Homo sapiens
  Payload ID: 5184
  Gene Symbol: DKC1
  Gene Name: dyskeratosis congenita 1, dyskerin
  ENSP ID: ENSP00000395693
  MOD_RES (1)..(1): Any amino acid
XKKERKSLPEEDVAEIQHAEEFLIKPESKVAKLDTSQWPLLLKNFDKLNVRTTHYTPLACGSNPLKREIGDYIRTGFINLDKPSNPSSHEVVAWIRRILRVEKTGHSGTLDPKVTGCLIVCIERATRLVKSQQSAGKEYVGIVRLHNAIEGGTQLSRALETLTGALFQRPPLIAAVKRQLRVRTIYESKMIEYDPERRLGAAFLLCVCILGIFWVSCEAGTYIRTLCVH

SEQ ID NO: 26238 - protein, 258 aa, Homo sapiens
  Payload ID: 5184
  Gene Symbol: DKC1
  Gene Name: dyskeratosis congenita 1, dyskerin
  ENSP ID: ENSP00000400542
MADAEVIILPKKHKKKKERKSLPEEDVAEIQHAEEFLIKPESKVAKLDTSQWPLLLKNFDKLNVRTTHYTPLACGSNPLKREIGDYIRTGFINLDKPSNPSSHEVVAWIRRILRVEKTGHSGTLDPKVTGCLIVCIERATRLVKSQQSAGKEYVGIVRLHNAIEGGTQLSRALETLTGALFQRPPLIAAVKRQLRVRTIYESKMIEYDPERRLGIFWDHMVTMHDVLDAQWLYDNHKDESYLRRVVYPLEKLLTSHKR

SEQ ID NO: 26239 - protein, 207 aa, Homo sapiens
  Payload ID: 5184
  Gene Symbol: DKC1
  Gene Name: dyskeratosis congenita 1, dyskerin
  ENSP ID: ENSP00000407253
  MOD_RES (1)..(1): Any amino acid
XIFWVSCEAGTYIRTLCVHLGLLLGVGGQMQELRRVRSGVMSEKDHMVTMHDVLDAQWLYDNHKDESYLRRVVYPLEKLLTSHKRLVMKDSAVNAICYGAKIMLPGVLRYEDGIEVNQEIVVITTKGEAICMAIALMTTAVISTCDHGIVAKIKRVIMERDTYPRKWGLGPKASQKKLMIKQGLLDKHGKPTDSTPATWKQEYVDYR

SEQ ID NO: 26240 - protein, 169 aa, Homo sapiens
  Payload ID: 5184
  Gene Symbol: DKC1
  Gene Name: dyskeratosis congenita 1, dyskerin
  ENSP ID: ENSP00000407325
KKKERKSLPEEDVAEIQHAEEFLIKPESKVAKLDTSQWPLLLKNFDKLNVRTTHYTPLACGSNPLKREIGDYIRTGFINLDKPSNPSSHEVVAWIRRILRVEKTGHSGTLDPKVTGCLIVCIERATRLVKSQQSAGPRNSDRCLIPATPTYCCSKEAAPSEDHLREQND

SEQ ID NO: 26241 - protein, 420 aa, Homo sapiens
  Payload ID: 5184
  Gene Symbol: DKC1
  Gene Name: dyskeratosis congenita 1, dyskerin
  Uniprot ID: O60832
  ENSP ID: ENSP00000478387
MADAEVIILPKKHKKKKERKSLPEEDVAEIQHAEEFLIKPESKVAKLDTSQWPLLLKNFDKLNVRTTHYTPLACGSNPLKREIGDYIRTGFINLDKPSNPSSHEVVAWIRRILRVEKTGHSGTLDPKVTGCLIVCIERATRLVKSQQSAGKEYVGIVRLHNAIEGGTQLSRALETLTGALFQRPPLIAAVKRQLRVRTIYESKMIEYDPERRLGIFWVSCEAGTYIRTLCVHLGLLLGVGGQMQELRRVRSGVMSEKDHMVTMHDVLDAQWLYDNHKDESYLRRVVYPLEKLLTSHKRLVMKDSAVNAICYGAKIMLPGVLRYEDGIEVNQEIVVITTKGEAICMAIALMTTAVISTCDHGIVAKIKRVIMERDTYPRKWGLGPKASQKKLMIKQGLLDKHGKPTDSTPATWKQEYVDYR

SEQ ID NO: 26242 - protein, 420 aa, Homo sapiens
  Payload ID: 5185
  Gene Symbol: DYX1C1
  Gene Name: dyslexia susceptibility 1 candidate 1
  Uniprot ID: Q8WXU2
  ENSP ID: ENSP00000299561
MPLQVSDYSWQQTKTAVFLSLPLKGVCVRDTDVFCTENYLKVNFPPFLFEAFLYAPIDDESSKAKIGNDTIVFTLYKKEAAMWETLSVTGVDKEMMQRIREKSILQAQERAKEATEAKAAAKREDQKYALSVMMKIEEEERKKIEDMKENERIKATKALEAWKEYQRKAEEQKKIQREEKLCQKEKQIKEERKKIKYKSLTRNLASRNLAPKGRNSENIFTEKLKEDSIPAPRSVGSIKINFTPRVFPTALRESQVAEEEEWLHKQAEARRAMNTDIAELCDLKEEEKNPEWLKDKGNKLFATENYLAAINAYNLAIRLNNKMPLLYLNRAACHLKLKNLHKAIEDSSKALELLMPPVTDNANARMKAHVRRGTAFCQLELYVEGLQDYEAALKIDPSNKIVQIDAEKIRNVIQGTELKS

SEQ ID NO: 26243 - protein, 420 aa, Homo sapiens; identical to SEQ ID NO: 26242
  Payload ID: 5185
  Gene Symbol: DYX1C1
  Gene Name: dyslexia susceptibility 1 candidate 1
  Uniprot ID: Q8WXU2
  ENSP ID: ENSP00000323275

SEQ ID NO: 26244 - protein, 376 aa, Homo sapiens
  Payload ID: 5185
  Gene Symbol: DYX1C1
  Gene Name: dyslexia susceptibility 1 candidate 1
  Uniprot ID: Q8WXU2
  ENSP ID: ENSP00000402640
MPLQVSDYSWQQTKTAVFLSLPLKGVCVRDTDVFCTENYLKVNFPPFLFEAFLYAPIDDESSKAKIGNDTIVFTLYKKEAAMWETLSVTGVDKEMMQRIREKSILQAQERAKEATEAKAAAKREDQKYALSVMMKIEEEERKKIEDMKENERIKATKALEAWKEYQRKAEEQKKIQREEKLCQKEKQIKEERKKIKYKSLTRNLASRNLAPKGRNSENIFTEKLKEDSIPAPRSVGSIKINFTPRVFPTALRESQVAEEEEWLHKQAEARRAMNTDIAELCDLKEEEKNPEWLKDKGNKLFATENYLAAINAYNLAIRLNNKMPLLYLNRAACHLKLKNLHKAIEDSSKAYRIMKRHLRLIHPTKLYKLMLRRFGM

SEQ ID NO: 26245 - protein, 381 aa, Homo sapiens
  Payload ID: 5185
  Gene Symbol: DYX1C1
  Gene Name: dyslexia susceptibility 1 candidate 1
  Uniprot ID: Q8WXU2
  ENSP ID: ENSP00000403412
MPLQVSDYSWQQTKTAVFLSLPLKGVCVRDTDVFCTENYLKVNFPPFLFEAFLYAPIDDESSKAKIGNDTIVFTLYKKEAAMWETLSVTGVDKEMMQRIREKSILQAQERAKEATEAKAAAKREDQKYALSVMMKIEEEERKKIEDMKENERIKATKALEAWKEYQRKAEEQKKIQREEKLCQKEKQIKEERKKIKYKSLTRNLASRNLAPKGRNSENIFTEKLKEDSIPAPRSVGSIKINFTPRVFPTALRESQVAEEEEWLHKQAEARRAMNTDIAELCDLKEEEKNPEWLKDKGNKLFATENYLAAINAYNLAIRLNNKMPLLYLNRAACHLKLKNLHKAIEDSSKEFCSLEGIECQASEPKLSHHIPSDLHVYIQMA

SEQ ID NO: 26246 - protein, 146 aa, Homo sapiens
  Payload ID: 5185
  Gene Symbol: DYX1C1
  Gene Name: dyslexia susceptibility 1 candidate 1
  ENSP ID: ENSP00000428097
MPLQVSDYSWQQTKTAVFLSLPLKGVCVRDTDVFCTENYLKVNFPPFLFEAFLYAPIDDESSKAKIGNDTIVFTLYKKEAAMWETLSVTGVDKEMMQRIREKSILQAQERAKEATEAKAAAKREDQKYALSVMMKGEIQKIYLLRS

SEQ ID NO: 26247 - protein, 71 aa, Homo sapiens
  Payload ID: 5185
  Gene Symbol: DYX1C1
  Gene Name: dyslexia susceptibility 1 candidate 1
  ENSP ID: ENSP00000429219
MPLQVSDYSWQQTKTAVFLSLPLKGVCVRDTDVFCTENYLKTMRAAKQRLGMTPLSSPCIKKKRPCGRPFL

SEQ ID NO: 26248 - protein, 5171 aa, Homo sapiens
  Payload ID: 5186
  Gene Symbol: DST
  Gene Name: dystonin
  Uniprot ID: Q03001
  ENSP ID: ENSP00000244364
MHSSSYSYRSSDSVFSNTTSTRTSLDSNENLLLVHCGPTLINSCISFGSESFDGHRLEMLQQIANRVQRDSVICEDKLILAGNALQSDSKRLESGVQFQNEAEIAGYILECENLLRQHVIDVQILIDGKYYQADQLVQRVAKLRDEIMALRNECSSVYSKGRILTTEQTKLMISGITQSLNSGFAQTLHPSLTSGLTQSLTPSLTSSSMTSGLSSGMTSRLTPSVTPAYTPGFPSGLVPNFSSGVEPNSLQTLKLMQIRKPLLKSSLLDQNLTEEEINMKFVQDLLNWVDEMQVQLDRTEWGSDLPSVESHLENHKNVHRAIEEFESSLKEAKISEIQMTAPLKLTYAEKLHRLESQYAKLLNTSRNQERHLDTLHNFVSRATNELIWLNEKEEEEVAYDWSERNTNIARKKDYHAELMRELDQKEENIKSVQEIAEQLLLENHPARLTIEAYRAAMQTQWSWILQLCQCVEQHIKENTAYFEFFNDAKEATDYLRNLKDAIQRKYSCDRSSSIHKLEDLVQESMEEKEELLQYKSTIANLMGKAKTIIQLKPRNSDCPLKTSIPIKAICDYRQIEITIYKDDECVLANNSHRAKWKVISPTGNEAMVPSVCFTVPPPNKEAVDLANRIEQQYQNVLTLWHESHINMKSVVSWHYLINEIDRIRASNVASIKTMLPGEHQQVLSNLQSRFEDFLEDSQESQVFSGSDITQLEKEVNVCKQYYQELLKSAEREEQEESVYNLYISEVRNIRLRLENCEDRLIRQIRTPLERDDLHESVFRITEQEKLKKELERLKDDLGTITNKCEEFFSQAAASSSVPTLRSELNVVLQNMNQVYSMSSTYIDKLKTVNLVLKNTQAAEALVKLYETKLCEEEAVIADKNNIENLISTLKQWRSEVDEKRQVFHALEDELQKAKAISDEMFKTYKERDLDFDWHKEKADQLVERWQNVHVQIDNRLRDLEGIGKSLKYYRDTYHPLDDWIQQVETTQRKIQENQPENSKTLATQLNQQKMLVSEIEMKQSKMDECQKYAEQYSATVKDYELQTMTYRAMVDSQQKSPVKRRRMQSSADLIIQEFMDLRTRYTALVTLMTQYIKFAGDSLKRLEEEEKSLEEEKKEHVEKAKELQKWVSNISKTLKDAEKAGKPPFSKQKISSEEISTKKEQLSEALQTIQLFLAKHGDKMTDEERNELEKQVKTLQESYNLLFSESLKQLQESQTSGDVKVEEKIVAERQQEYKEKLQGICDLLTQTENRLIGHQEAFMIGDGTVELKKYQSKQEELQKDMQGSAQALAEVVKNTENFLKENGEKLSQEDKALIEQKLNEAKIKCEQLNLKAEQSKKELDKVVTTAIKEETEKVAAVKQLEESKTKIENLLDWLSNVDKDSERAGTKHKQVIEQNGTHFQEGDGKSAIGEEDEVNGNLLETDVDGQVGTTQENLNQQYQKVKAQHEKIISQHQAVIIATQSAQVLLEKQGQYLSPEEKEKLQKNMKELKVHYETALAESEKKMKLTHSLQEELEKFDADYTEFEHWLQQSEQELENLEAGADDINGLMTKLKRQKSFSEDVISHKGDLRYITISGNRVLEAAKSCSKRDGGKVDTSATHREVQRKLDHATDRFRSLYSKCNVLGNNLKDLVDKYQHYEDASCGLLAGLQACEATASKHLSEPIAVDPKNLQRQLEETKALQGQISSQQVAVEKLKKTAEVLLDARGSLLPAKNDIQKTLDDIVGRYEDLSKSVNERNEKLQITLTRSLSVQDGLDEMLDWMGNVESSLKEQGQVPLNSTALQDIISKNIMLEQDIAGRQSSINAMNEKVKKFMETTDPSTASSLQAKMKDLSARFSEASHKHKETLAKMEELKTKVELFENLSEKLQTFLETKTQALTEVDVPGKDVTELSQYMQESTSEFLEHKKHLEVLHSLLKEISSHGLPSDKALVLEKTNNLSKKFKEMEDTIKEKKEAVTSCQEQLDAFQVLVKSLKSWIKETTKKVPIVQPSFGAEDLGKSLEDTKKLQEKWSLKTPEIQKVNNSGISLCNLISAVTTPAKAIAAVKSGGAVLNGEGTATNTEEFWANKGLTSIKKDMTDISHGYEDLGLLLKDKIAELNTKLSKLQKAQEESSAMMQWLQKMNKTATKWQQTPAPTDTEAVKTQVEQNKSFEAELKQNVNKVQELKDKLTELLEENPDTPEAPRWKQMLTEIDSKWQELNQLTIDRQQKLEESSNNLTQFQTVEAQLKQWLVEKELMVSVLGPLSIDPNMLNTQRQQVQILLQEFATRKPQYEQLTAAGQGILSRPGEDPSLRGIVKEQLAAVTQKWDSLTGQLSDRCDWIDQAIVKSTQYQSLLRSLSDKLSDLDNKLSSSLAVSTHPDAMNQQLETAQKMKQEIQQEKKQIKVAQALCEDLSALVKEEYLKAELSRQLEGILKSFKDVEQKAENHVQHLQSACASSHQFQQMSRDFQAWLDTKKEEQNKSHPISAKLDVLESLIKDHKDFSKTLTAQSHMYEKTIAEGENLLLKTQGSEKAALQLQLNTIKTNWDTFNKQVKERENKLKESLEKALKYKEQVETLWPWIDKCQNNLEEIKFCLDPAEGENSIAKLKSLQKEMDQHFGMVELLNNTANSLLSVCEIDKEVVTDENKSLIQKVDMVTEQLHSKKFCLENMTQKFKEFQEVSKESKRQLQCAKEQLDIHDSLGSQAYSNKYLTMLQTQQKSLQALKHQVDLAKRLAQDLVVEASDSKGTSDVLLQVETIAQEHSTLSQQVDEKCSFLETKLQGIGHFQNTIREMFSQFAEFDDELDSMAPVGRDAETLQKQKETIKAFLKKLEALMASNDNANKTCKMMLATEETSPDLVGIKRDLEALSKQCNKLLDRAQAREEQVEGTIKRLEEFYSKLKEFSILLQKAEEHEESQGPVGMETETINQQLNMFKVFQKEEIEPLQGKQQDVNWLGQGLIQSAAKSTSTQGLEHDLDDVNARWKTLNKKVAQRAAQLQEALLHCGRFQDALESLLSWMVDTEELVANQKPPSAEFKVVKAQIQEQKLLQRLLDDRKSTVEVIKREGEKIATTAEPADKVKILKQLSLLDSRWEALLNKAETRNRQLEGISVVAQQFHETLEPLNEWLTTIEKRLVNCEPIGTQASKLEEQIAQHKALEDDIINHNKHLHQAVSIGQSLKVLSSREDKDMVQSKLDFSQVWYIEIQEKSHSRSELLQQALCNAKIFGEDEVELMNWLNEVHDKLSKLSVQDYSTEGLWKQQSELRVLQEDILLRKQNVDQALLNGLELLKQTTGDEVLIIQDKLEAIKARYKDITKLSTDVAKTLEQALQLARRLHSTHEELCTWLDKVEVELLSYETQVLKGEEASQAQMRPKELKKEAKNNKALLDSLNEVSSALLELVPWRAREGLEKMVAEDNERYRLVSDTITQKVEEIDAAILRSQQFDQAADAELSWITETEKKLMSLGDIRLEQDQTSAQLQVQKTFTMEILRHKDIIDDLVKSGHKIMTACSEEEKQSMKKKLDKVLKNYDTICQINSERYLQLERAQSLVNQFWETYEELWPWLTETQSIISQLPAPALEYETLRQQQEEHRQLRELIAEHKPHIDKMNKTGPQLLELSPGEGFSIQEKYVAADTLYSQIKEDVKKRAVALDEAISQSTQFHDKIDQILESLERIVERLRQPPSISAEVEKIKEQISENKNVSVDMEKLQPLYETLKQRGEEMIARSGGTDKDISAKAVQDKLDQMVFIWENIHTLVEEREAKLLDVMELAEKFWCDHMSLIVTIKDTQDFIRDLEDPGIDPSVVKQQQEAAETIREEIDGLQEELDIVINLGSELIAACGEPDKPIVKKSIDELNSAWDSLNKAWKDRIDKLEEAMQAAVQYQDGLQAVFDWVDIAGGKLASMSPIGTDLETVKQQIEELKQFKSEAYQQQIEMERLNHQAELLLKKVTEESDKHTVQDPLMELKLIWDSLEERIINRQHKLEGALLALGQFQHALDELLAWLTHTEGLLSEQKPVGGDPKAIEIELAKHHVLQNDVLAHQSTVEAVNKAGNDLIESSAGEEASNLQNKLEVLNQRWQNVLEKTEQRKQQLDGALRQAKGFHGEIEDLQQWLTDTERHLLASKPLGGLPETAKEQLNVHMEVCAAFEAKEETYKSLMQKGQQMLARCPKSAETNIDQDINNLKEKWESVETKLNERKTKLEEALNLAMEFHNSLQDFINWLTQAEQTLNVASRPSLILDTVLFQIDEHKVFANEVNSHREQIIELDKTGTHLKYFSQKQDVVLIKNLLISVQSRWEKVVQRLVERGRSLDDARKRAKQFHEAWSKLMEWLEESEKSLDSELEIANDPDKIKTQLAQHKEFQKSLGAKHSVYDTTNRTGRSLKEKTSLADDNLKLDDMLSELRDKWDTICGKSVERQNKLEEALLFSGQFTDALQALIDWLYRVEPQLAEDQPVHGDIDLVMNLIDNHKAFQKELGKRTSSVQALKRSARELIEGSRDDSSWVKVQMQELSTRWETVCALSISKQTRLEAALRQAEEFHSVVHALLEWLAEAEQTLRFHGVLPDDEDALRTLIDQHKEFMKKLEEKRAELNKATTMGDTVLAICHPDSITTIKHWITIIRARFEEVLAWAKQHQQRLASALAGLIAKQELLEALLAWLQWAETTLTDKDKEVIPQEIEEVKALIAEHQTFMEEMTRKQPDVDKVTKTYKRRAADPSSLQSHIPVLDKGRAGRKRFPASSLYPSGSQTQIETKNPRVNLLVSKWQQVWLLALERRRKLNDALDRLEELREFANFDFDIWRKKYMRWMNHKKSRVMDFFRRIDKDQDGKITRQEFIDGILSSKFPTSRLEMSAVADIFDRDGDGYIDYYEFVAALHPNKDAYKPITDADKIEDEVTRQVAKCKCAKRFQVEQIGDNKYRFFLGNQFGDSQQLRLVRILRSTVMVRVGGGWMALDEFLVKNDPCRAKGRTNMELREKFILADGASQGMAAFRPRGRRSRPSSRGASPNRSTSVSSQAAQAASPQVPATTTPKILHPLTRNYGKPWLTNSKMSTPCKAAECSDFPVPSAEGTPIQGSKLRLPGYLSGKGFHSGEDSGLITTAAARVRTQFADSKKTPSRPGSRAGSKAGSRASSRRGSDASDFDISEIQSVCSDVETVPQTHRPTPRAGSRPSTAKPSKIPTPQRKSPASKLDKSSKR

SEQ ID NO: 26249 - protein, 5537 aa, Homo sapiens
  Payload ID: 5186
  Gene Symbol: DST
  Gene Name: dystonin
  ENSP ID: ENSP00000307959
MSSGNASYRCSMSSSADFSDEDDFSQKSGSASPAPGDTLPWNLPKHERSKRKIQGGSVLDPAERAVLRIADERDKVQKKTFTKWINQHLMKVRKHVNDLYEDLRDGHNLISLLEVLSGDTLPREKGRMRFHRLQNVQIALDYLKRRQVKLVNIRNDDITDGNPKLTLGLIWTIILHFQISDIHVTGESEDMSAKERLLLWTQQATEGYAGIRCENFTTCWRDGKLFNAIIHKYRPDLIDMNTVAVQSNLANLEHAFYVAEKIGVIRLLDPEDVDVSSPDEKSVITYVSSLYDAFPKVPEGGEGIGANDVEVKWIEYQNMVNYLIQWIRHHVTTMSERTFPNNPVELKALYNQYLQFKETEIPPKETEKSKIKRLYKLLEIWIEFGRIKLLQGYHPNDIEKEWGKLIIAMLEREKALRPEVERLEMLQQIANRVQRDSVICEDKLILAGNALQSDSKRLESGVQFQNEAEIAGYILECENLLRQHVIDVQILIDGKYYQADQLVQRVAKLRDEIMALRNECSSVYSKGRILTTEQTKLMISGITQSLNSGFAQTLHPSLTSGLTQSLTPSLTSSSMTSGLSSGMTSRLTPSVTPAYTPGFPSGLVPNFSSGVEPNSLQTLKLMQIRKPLLKSSLLDQNLTEEEINMKFVQDLLNWVDEMQVQLDRTEWGSDLPSVESHLENHKNVHRAIEEFESSLKEAKISEIQMTAPLKLTYAEKLHRLESQYAKLLNTSRNQERHLDTLHNFVSRATNELIWLNEKEEEEVAYDWSERNTNIARKKDYHAELMRELDQKEENIKSVQEIAEQLLLENHPARLTIEAYRAAMQTQWSWILQLCQCVEQHIKENTAYFEFFNDAKEATDYLRNLKDAIQRKYSCDRSSSIHKLEDLVQESMEEKEELLQYKSTIANLMGKAKTIIQLKPRNSDCPLKTSIPIKAICDYRQIEITIYKDDECVLANNSHRAKWKVISPTGNEAMVPSVCFTVPPPNKEAVDLANRIEQQYQNVLTLWHESHINMKSVVSWHYLINEIDRIRASNVASIKTMLPGEHQQVLSNLQSRFEDFLEDSQESQVFSGSDITQLEKEVNVCKQYYQELLKSAEREEQEESVYNLYISEVRNIRLRLENCEDRLIRQIRTPLERDDLHESVFRITEQEKLKKELERLKDDLGTITNKCEEFFSQAAASSSVPTLRSELNVVLQNMNQVYSMSSTYIDKLKTVNLVLKNTQAAEALVKLYETKLCEEEAVIADKNNIENLISTLKQWRSEVDEKRQVFHALEDELQKAKAISDEMFKTYKERDLDFDWHKEKADQLVERWQNVHVQIDNRLRDLEGIGKSLKYYRDTYHPLDDWIQQVETTQRKIQENQPENSKTLATQLNQQKMLVSEIEMKQSKMDECQKYAEQYSATVKDYELQTMTYRAMVDSQQKSPVKRRRMQSSADLIIQEFMDLRTRYTALVTLMTQYIKFAGDSLKRLEEEEKSLEEEKKEHVEKAKELQKWVSNISKTLKDAEKAGKPPFSKQKISSEEISTKKEQLSEALQTIQLFLAKHGDKMTDEERNELEKQVKTLQESYNLLFSESLKQLQESQTSGDVKVEEKIVAERQQEYKEKLQGICDLLTQTENRLIGHQEAFMIGDGTVELKKYQSKQEELQKDMQGSAQALAEVVKNTENFLKENGEKLSQEDKALIEQKLNEAKIKCEQLNLKAEQSKKELDKVVTTAIKEETEKVAAVKQLEESKTKIENLLDWLSNVDKDSERAGTKHKQVIEQNGTHFQEGDGKSAIGEEDEVNGNLLETDVDGQVGTTQENLNQQYQKVKAQHEKIISQHQAVIIATQSAQVLLEKQGQYLSPEEKEKLQKNMKELKVHYETALAESEKKMKLTHSLQEELEKFDADYTEFEHWLQQSEQELENLEAGADDINGLMTKLKRQKSFSEDVISHKGDLRYITISGNRVLEAAKSCSKRDGGKVDTSATHREVQRKLDHATDRFRSLYSKCNVLGNNLKDLVDKYQHYEDASCGLLAGLQACEATASKHLSEPIAVDPKNLQRQLEETKALQGQISSQQVAVEKLKKTAEVLLDARGSLLPAKNDIQKTLDDIVGRYEDLSKSVNERNEKLQITLTRSLSVQDGLDEMLDWMGNVESSLKEQGQVPLNSTALQDIISKNIMLEQDIAGRQSSINAMNEKVKKFMETTDPSTASSLQAKMKDLSARFSEASHKHKETLAKMEELKTKVELFENLSEKLQTFLETKTQALTEVDVPGKDVTELSQYMQESTSEFLEHKKHLEVLHSLLKEISSHGLPSDKALVLEKTNNLSKKFKEMEDTIKEKKEAVTSCQEQLDAFQVLVKSLKSWIKETTKKVPIVQPSFGAEDLGKSLEDTKKLQEKWSLKTPEIQKVNNSGISLCNLISAVTTPAKAIAAVKSGGAVLNGEGTATNTEEFWANKGLTSIKKDMTDISHGYEDLGLLLKDKIAELNTKLSKLQKAQEESSAMMQWLQKMNKTATKWQQTPAPTDTEAVKTQVEQNKSFEAELKQNVNKVQELKDKLTELLEENPDTPEAPRWKQMLTEIDSKWQELNQLTIDRQQKLEESSNNLTQFQTVEAQLKQWLVEKELMVSVLGPLSIDPNMLNTQRQQVQILLQEFATRKPQYEQLTAAGQGILSRPGEDPSLRGIVKEQLAAVTQKWDSLTGQLSDRCDWIDQAIVKSTQYQSLLRSLSDKLSDLDNKLSSSLAVSTHPDAMNQQLETAQKMKQEIQQEKKQIKVAQALCEDLSALVKEEYLKAELSRQLEGILKSFKDVEQKAENHVQHLQSACASSHQFQQMSRDFQAWLDTKKEEQNKSHPISAKLDVLESLIKDHKDFSKTLTAQSHMYEKTIAEGENLLLKTQGSEKAALQLQLNTIKTNWDTFNKQVKERENKLKESLEKALKYKEQVETLWPWIDKCQNNLEEIKFCLDPAEGENSIAKLKSLQKEMDQHFGMVELLNNTANSLLSVCEIDKEVVTDENKSLIQKVDMVTEQLHSKKFCLENMTQKFKEFQEVSKESKRQLQCAKEQLDIHDSLGSQAYSNKYLTMLQTQQKSLQALKHQVDLAKRLAQDLVVEASDSKGTSDVLLQVETIAQEHSTLSQQVDEKCSFLETKLQGIGHFQNTIREMFSQFAEFDDELDSMAPVGRDAETLQKQKETIKAFLKKLEALMASNDNANKTCKMMLATEETSPDLVGIKRDLEALSKQCNKLLDRAQAREEQVEGTIKRLEEFYSKLKEFSILLQKAEEHEESQGPVGMETETINQQLNMFKVFQKEEIEPLQGKQQDVNWLGQGLIQSAAKSTSTQGLEHDLDDVNARWKTLNKKVAQRAAQLQEALLHCGRFQDALESLLSWMVDTEELVANQKPPSAEFKVVKAQIQEQKLLQRLLDDRKSTVEVIKREGEKIATTAEPADKVKILKQLSLLDSRWEALLNKAETRNRQLEGISVVAQQFHETLEPLNEWLTTIEKRLVNCEPIGTQASKLEEQIAQHKALEDDIINHNKHLHQAVSIGQSLKVLSSREDKDMVQSKLDFSQVWYIEIQEKSHSRSELLQQALCNAKIFGEDEVELMNWLNEVHDKLSKLSVQDYSTEGLWKQQSELRVLQEDILLRKQNVDQALLNGLELLKQTTGDEVLIIQDKLEAIKARYKDITKLSTDVAKTLEQALQLARRLHSTHEELCTWLDKVEVELLSYETQVLKGEEASQAQMRPKELKKEAKNNKALLDSLNEVSSALLELVPWRAREGLEKMVAEDNERYRLVSDTITQKVEEIDAAILRSQQFDQAADAELSWITETEKKLMSLGDIRLEQDQTSAQLQVQKTFTMEILRHKDIIDDLVKSGHKIMTACSEEEKQSMKKKLDKVLKNYDTICQINSERYLQLERAQSLVNQFWETYEELWPWLTETQSIISQLPAPALEYETLRQQQEEHRQLRELIAEHKPHIDKMNKTGPQLLELSPGEGFSIQEKYVAADTLYSQIKEDVKKRAVALDEAISQSTQFHDKIDQILESLERIVERLRQPPSISAEVEKIKEQISENKNVSVDMEKLQPLYETLKQRGEEMIARSGGTDKDISAKAVQDKLDQMVFIWENIHTLVEEREAKLLDVMELAEKFWCDHMSLIVTIKDTQDFIRDLEDPGIDPSVVKQQQEAAETIREEIDGLQEELDIVINLGSELIAACGEPDKPIVKKSIDELNSAWDSLNKAWKDRIDKLEEAMQAAVQYQDGLQAVFDWVDIAGGKLASMSPIGTDLETVKQQIEELKQFKSEAYQQQIEMERLNHQAELLLKKVTEESDKHTVQDPLMELKLIWDSLEERIINRQHKLEGALLALGQFQHALDELLAWLTHTEGLLSEQKPVGGDPKAIEIELAKHHVLQNDVLAHQSTVEAVNKAGNDLIESSAGEEASNLQNKLEVLNQRWQNVLEKTEQRKQQLDGALRQAKGFHGEIEDLQQWLTDTERHLLASKPLGGLPETAKEQLNVHMEVCAAFEAKEETYKSLMQKGQQMLARCPKSAETNIDQDINNLKEKWESVETKLNERKTKLEEALNLAMEFHNSLQDFINWLTQAEQTLNVASRPSLILDTVLFQIDEHKVFANEVNSHREQIIELDKTGTHLKYFSQKQDVVLIKNLLISVQSRWEKVVQRLVERGRSLDDARKRAKQFHEAWSKLMEWLEESEKSLDSELEIANDPDKIKTQLAQHKEFQKSLGAKHSVYDTTNRTGRSLKEKTSLADDNLKLDDMLSELRDKWDTICGKSVERQNKLEEALLFSGQFTDALQALIDWLYRVEPQLAEDQPVHGDIDLVMNLIDNHKAFQKELGKRTSSVQALKRSARELIEGSRDDSSWVKVQMQELSTRWETVCALSISKQTRLEAALRQAEEFHSVVHALLEWLAEAEQTLRFHGVLPDDEDALRTLIDQHKEFMKKLEEKRAELNKATTMGDTVLAICHPDSITTIKHWITIIRARFEEVLAWAKQHQQRLASALAGLIAKQELLEALLAWLQWAETTLTDKDKEVIPQEIEEVKALIAEHQTFMEEMTRKQPDVDKVTKTYKRRAADPSSLQSHIPVLDKGRAGRKRFPASSLYPSGSQTQIETKNPRVNLLVSKWQQVWLLALERRRKLNDALDRLEELREFANFDFDIWRKKYMRWMNHKKSRVMDFFRRIDKDQDGKITRQEFIDGILSSKFPTSRLEMSAVADIFDRDGDGYIDYYEFVAALHPNKDAYKPITDADKIEDEVTRQVAKCKCAKRFQVEQIGDNKYRFFLGNQFGDSQQLRLVRILRSTVMVRVGGGWMALDEFLVKNDPCRAKGRTNMELREKFILADGASQGMAAFRPRGRRSRPSSRGASPNRSTSVSSQAAQAASPQVPATTTPKILHPLTRNYGKPWLTNSKMSTPCKAAECSDFPVPSAEGTPIQGSKLRLPGYLSGKGFHSGEDSGLITTAAARVRTQFADSKKTPSRPGSRAGSKAGSRASSRRGSDASDFDISEIQSVCSDVETVPQTHRPTPRAGSRPSTAKPSKIPTPQRKSPASKLDKSSKR

SEQ ID NO: 26250 - protein, 7461 aa, Homo sapiens
  Payload ID: 5186
  Gene Symbol: DST
  Gene Name: dystonin
  ENSP ID: ENSP00000354508
MAGYLSPAAYLYVEEQEYLQAYEDVLERYKDERDKVQKKTFTKWINQHLMKVRKHVNDLYEDLRDGHNLISLLEVLSGDTLPREKGRMRFHRLQNVQIALDYLKRRQVKLVNIRNDDITDGNPKLTLGLIWTIILHFQISDIHVTGESEDMSAKERLLLWTQQATEGYAGIRCENFTTCWRDGKLFNAIIHKYRPDLIDMNTVAVQSNLANLEHAFYVAEKIGVIRLLDPEDVDVSSPDEKSVITYVSSLYDAFPKVPEGGEGIGANDVEVKWIEYQNMVNYLIQWIRHHVTTMSERTFPNNPVELKALYNQYLQFKETEIPPKETEKSKIKRLYKLLEIWIEFGRIKLLQGYHPNDIEKEWGKLIIAMLEREKALRPEVERLEMLQQIANRVQRDSVICEDKLILAGNALQSDSKRLESGVQFQNEAEIAGYILECENLLRQHVIDVQILIDGKYYQADQLVQRVAKLRDEIMALRNECSSVYSKGRILTTEQTKLMISGITQSLNSGFAQTLHPSLTSGLTQSLTPSLTSSSMTSGLSSGMTSRLTPSVTPAYTPGFPSGLVPNFSSGVEPNSLQTLKLMQIRKPLLKSSLLDQNLTEEEINMKFVQDLLNWVDEMQVQLDRTEWGSDLPSVESHLENHKNVHRAIEEFESSLKEAKISEIQMTAPLKLTYAEKLHRLESQYAKLLNTSRNQERHLDTLHNFVSRATNELIWLNEKEEEEVAYDWSERNTNIARKKDYHAELMRELDQKEENIKSVQEIAEQLLLENHPARLTIEAYRAAMQTQWSWILQLCQCVEQHIKENTAYFEFFNDAKEATDYLRNLKDAIQRKYSCDRSSSIHKLEDLVQESMEEKEELLQYKSTIANLMGKAKTIIQLKPRNSDCPLKTSIPIKAICDYRQIEITIYKDDECVLANNSHRAKWKVISPTGNEAMVPSVCFTVPPPNKEAVDLANRIEQQYQNVLTLWHESHINMKSVVSWHYLINEIDRIRASNVASIKTMLPGEHQQVLSNLQSRFEDFLEDSQESQVFSGSDITQLEKEVNVCKQYYQELLKSAEREEQEESVYNLYISEVRNIRLRLENCEDRLIRQIRTPLERDDLHESVFRITEQEKLKKELERLKDDLGTITNKCEEFFSQAAASSSVPTLRSELNVVLQNMNQVYSMSSTYIDKLKTVNLVLKNTQAAEALVKLYETKLCEEEAVIADKNNIENLISTLKQWRSEVDEKRQVFHALEDELQKAKAISDEMFKTYKERDLDFDWHKEKADQLVERWQNVHVQIDNRLRDLEGIGKSLKYYRDTYHPLDDWIQQVETTQRKIQENQPENSKTLATQLNQQKMLVSEIEMKQSKMDECQKYAEQYSATVKDYELQTMTYRAMVDSQQKSPVKRRRMQSSADLIIQEFMDLRTRYTALVTLMTQYIKFAGDSLKRLEEEEKSLEEEKKEHVEKAKELQKWVSNISKTLKDAEKAGKPPFSKQKISSEEISTKKEQLSEALQTIQLFLAKHGDKMTDEERNELEKQVKTLQESYNLLFSESLKQLQESQTSGDVKVEEKLDKVIAGTIDQTTGEVLSVFQAVLRGLIDYDTGIRLLETQLMISGLISPELRKCFDLKDAKSHGLIDEQILCQLKELSKAKEIISAASPTTIPVLDALAQSMITESMAIKVLEILLSTGSLVIPATGEQLTLQKAFQQNLVSSALFSKVLERQNMCKDLIDPCTSEKVSLIDMVQRSTLQENTGMWLLPVRPQEGGRITLKCGRNISILRAAHEGLIDRETMFRLLSAQLLSGGLINSNSGQRMTVEEAVREGVIDRDTASSILTYQVQTGGIIQSNPAKRLTVDEAVQCDLITSSSALLVLEAQRGYVGLIWPHSGEIFPTSSSLQQELITNELAYKILNGRQKIAALYIPESSQVIGLDAAKQLGIIDNNTASILKNITLPDKMPDLGDLEACKNARRWLSFCKFQPSTVHDYRQEEDVFDGEEPVTTQTSEETKKLFLSYLMINSYMDANTGQRLLLYDGDLDEAVGMLLEGCHAEFDGNTAIKECLDVLSSSGVFLNNASGREKDECTATPSSFNKCHCGEPEHEETPENRKCAIDEEFNEMRNTVINSEFSQSGKLASTISIDPKVNSSPSVCVPSLISYLTQTELADISMLRSDSENILTNYENQSRVETNERANECSHSKNIQNFPSDLIENPIMKSKMSKFCGVNETENEDNTNRDSPIFDYSPRLSALLSHDKLMHSQGSFNDTHTPESNGNKCEAPALSFSDKTMLSGQRIGEKFQDQFLGIAAINISLPGEQYGQKSLNMISSNPQVQYHNDKYISNTSGEDEKTHPGFQQMPEDKEDESEIEEYSCAVTPGGDTDNAIVSLTCATPLLDETISASDYETSLLNDQQNNTGTDTDSDDDFYDTPLFEDDDHDSLLLDGDDRDCLHPEDYDTLQEENDETASPADVFYDVSKENENSMVPQGAPVGSLSVKNKAHCLQDFLMDVEKDELDSGEKIHLNPVGSDKVNGQSLETGSERECTNILEGDESDSLTDYDIVGGKESFTASLKFDDSGSWRGRKEEYVTGQEFHSDTDHLDSMQSEESYGDYIYDSNDQDDDDDDGIDEEGGGIRDENGKPRCQNVAEDMDIQLCASILNENSDENENINTMILLDKMHSCSSLEKQQRVNVVQLASPSENNLVTEKSNLPEYTTEIAGKSKENLLNHEMVLKDVLPPIIKDTESEKTFGPASISHDNNNISSTSELGTDLANTKVKLIQGSELPELTDSVKGKDEYFKNMTPKVDSSLDHIICTEPDLIGKPAEESHLSLIASVTDKDPQGNGSDLIKGRDGKSDILIEDETSIQKMYLGEGEVLVEGLVEEENRHLKLLPGKNTRDSFKLINSQFPFPQITNNEELNQKGSLKKATVTLKDEPNNLQIIVSKSPVQFENLEEIFDTSVSKEISDDITSDITSWEGNTHFEESFTDGPEKELDLFTYLKHCAKNIKAKDVAKPNEDVPSHVLITAPPMKEHLQLGVNNTKEKSTSTQKDSPLNDMIQSNDLCSKESISGGGTEISQFTPESIEATLSILSRKHVEDVGKNDFLQSERCANGLGNDNSSNTLNTDYSFLEINNKKERIEQQLPKEQALSPRSQEKEVQIPELSQVFVEDVKDILKSRLKEGHMNPQEVEEPSACADTKILIQNLIKRITTSQLVNEASTVPSDSQMSDSSGVSPMTNSSELKPESRDDPFCIGNLKSELLLNILKQDQHSQKITGVFELMRELTHMEYDLEKRGITSKVLPLQLENIFYKLLADGYSEKIEHVGDFNQKACSTSEMMEEKPHILGDIKSKEGNYYSPNLETVKEIGLESSTVWASTLPRDEKLKDLCNDFPSHLECTSGSKEMASGDSSTEQFSSELQQCLQHTEKMHEYLTLLQDMKPPLDNQESLDNNLEALKNQLRQLETFELGLAPIAVILRKDMKLAEEFLKSLPSDFPRGHVEELSISHQSLKTAFSSLSNVSSERTKQIMLAIDSEMSKLAVSHEEFLHKLKSFSDWVSEKSKSVKDIEIVNVQDSEYVKKRLEFLKNVLKDLGHTKMQLETTAFDVQFFISEYAQDLSPNQSKQLLRLLNTTQKCFLDVQESVTTQVERLETQLHLEQDLDDQKIVAERQQEYKEKLQGICDLLTQTENRLIGHQEAFMIGDGTVELKKYQSKQEELQKDMQGSAQALAEVVKNTENFLKENGEKLSQEDKALIEQKLNEAKIKCEQLNLKAEQSKKELDKVVTTAIKEETEKVAAVKQLEESKTKIENLLDWLSNVDKDSERAGTKHKQVIEQNGTHFQEGDGKSAIGEEDEVNGNLLETDVDGQVGTTQENLNQQYQKVKAQHEKIISQHQAVIIATQSAQVLLEKQGQYLSPEEKEKLQKNMKELKVHYETALAESEKKMKLTHSLQEELEKFDADYTEFEHWLQQSEQELENLEAGADDINGLMTKLKRQKSFSEDVISHKGDLRYITISGNRVLEAAKSCSKRDGGKVDTSATHREVQRKLDHATDRFRSLYSKCNVLGNNLKDLVDKYQHYEDASCGLLAGLQACEATASKHLSEPIAVDPKNLQRQLEETKALQGQISSQQVAVEKLKKTAEVLLDARGSLLPAKNDIQKTLDDIVGRYEDLSKSVNERNEKLQITLTRSLSVQDGLDEMLDWMGNVESSLKEQGQVPLNSTALQDIISKNIMLEQDIAGRQSSINAMNEKVKKFMETTDPSTASSLQAKMKDLSARFSEASHKHKETLAKMEELKTKVELFENLSEKLQTFLETKTQALTEVDVPGKDVTELSQYMQESTSEFLEHKKHLEVLHSLLKEISSHGLPSDKALVLEKTNNLSKKFKEMEDTIKEKKEAVTSCQEQLDAFQVLVKSLKSWIKETTKKVPIVQPSFGAEDLGKSLEDTKKLQEKWSLKTPEIQKVNNSGISLCNLISAVTTPAKAIAAVKSGGAVLNGEGTATNTEEFWANKGLTSIKKDMTDISHGYEDLGLLLKDKIAELNTKLSKLQKAQEESSAMMQWLQKMNKTATKWQQTPAPTDTEAVKTQVEQNKSFEAELKQNVNKVQELKDKLTELLEENPDTPEAPRWKQMLTEIDSKWQELNQLTIDRQQKLEESSNNLTQFQTVEAQLKQWLVEKELMVSVLGPLSIDPNMLNTQRQQVQILLQEFATRKPQYEQLTAAGQGILSRPGEDPSLRGIVKEQLAAVTQKWDSLTGQLSDRCDWIDQAIVKSTQYQSLLRSLSDKLSDLDNKLSSSLAVSTHPDAMNQQLETAQKMKQEIQQEKKQIKVAQALCEDLSALVKEEYLKAELSRQLEGILKSFKDVEQKAENHVQHLQSACASSHQFQQMSRDFQAWLDTKKEEQNKSHPISAKLDVLESLIKDHKDFSKTLTAQSHMYEKTIAEGENLLLKTQGSEKAALQLQLNTIKTNWDTFNKQVKERENKLKESLEKALKYKEQVETLWPWIDKCQNNLEEIKFCLDPAEGENSIAKLKSLQKEMDQHFGMVELLNNTANSLLSVCEIDKEVVTDENKSLIQKVDMVTEQLHSKKFCLENMTQKFKEFQEVSKESKRQLQCAKEQLDIHDSLGSQAYSNKYLTMLQTQQKSLQALKHQVDLAKRLAQDLVVEASDSKGTSDVLLQVETIAQEHSTLSQQVDEKCSFLETKLQGIGHFQNTIREMFSQFAEFDDELDSMAPVGRDAETLQKQKETIKAFLKKLEALMASNDNANKTCKMMLATEETSPDLVGIKRDLEALSKQCNKLLDRAQAREEQVEGTIKRLEEFYSKLKEFSILLQKAEEHEESQGPVGMETETINQQLNMFKVFQKEEIEPLQGKQQDVNWLGQGLIQSAAKSTSTQGLEHDLDDVNARWKTLNKKVAQRAAQLQEALLHCGRFQDALESLLSWMVDTEELVANQKPPSAEFKVVKAQIQEQKLLQRLLDDRKSTVEVIKREGEKIATTAEPADKVKILKQLSLLDSRWEALLNKAETRNRQLEGISVVAQQFHETLEPLNEWLTTIEKRLVNCEPIGTQASKLEEQIAQHKVLQEDILLRKQNVDQALLNGLELLKQTTGDEVLIIQDKLEAIKARYKDITKLSTDVAKTLEQALQLARRLHSTHEELCTWLDKVEVELLSYETQVLKGEEASQAQMRPKELKKEAKNNKALLDSLNEVSSALLELVPWRAREGLEKMVAEDNERYRLVSDTITQKVEEIDAAILRSQQFDQAADAELSWITETEKKLMSLGDIRLEQDQTSAQLQVQKTFTMEILRHKDIIDDLVKSGHKIMTACSEEEKQSMKKKLDKVLKNYDTICQINSERYLQLERAQSLVNQFWETYEELWPWLTETQSIISQLPAPALEYETLRQQQEEHRQLRELIAEHKPHIDKMNKTGPQLLELSPGEGFSIQEKYVAADTLYSQIKEDVKKRAVALDEAISQSTQFHDKIDQILESLERIVERLRQPPSISAEVEKIKEQISENKNVSVDMEKLQPLYETLKQRGEEMIARSGGTDKDISAKAVQDKLDQMVFIWENIHTLVEEREAKLLDVMELAEKFWCDHMSLIVTIKDTQDFIRDLEDPGIDPSVVKQQQEAAETIREEIDGLQEELDIVINLGSELIAACGEPDKPIVKKSIDELNSAWDSLNKAWKDRIDKLEEAMQAAVQYQDGLQAVFDWVDIAGGKLASMSPIGTDLETVKQQIEELKQFKSEAYQQQIEMERLNHQAELLLKKVTEESDKHTVQDPLMELKLIWDSLEERIINRQHKLEGALLALGQFQHALDELLAWLTHTEGLLSEQKPVGGDPKAIEIELAKHHVLQNDVLAHQSTVEAVNKAGNDLIESSAGEEASNLQNKLEVLNQRWQNVLEKTEQRKQQLDGALRQAKGFHGEIEDLQQWLTDTERHLLASKPLGGLPETAKEQLNVHMEVCAAFEAKEETYKSLMQKGQQMLARCPKSAETNIDQDINNLKEKWESVETKLNERKTKLEEALNLAMEFHNSLQDFINWLTQAEQTLNVASRPSLILDTVLFQIDEHKVFANEVNSHREQIIELDKTGTHLKYFSQKQDVVLIKNLLISVQSRWEKVVQRLVERGRSLDDARKRAKQFHEAWSKLMEWLEESEKSLDSELEIANDPDKIKTQLAQHKEFQKSLGAKHSVYDTTNRTGRSLKEKTSLADDNLKLDDMLSELRDKWDTICGKSVERQNKLEEALLFSGQFTDALQALIDWLYRVEPQLAEDQPVHGDIDLVMNLIDNHKAFQKELGKRTSSVQALKRSARELIEGSRDDSSWVKVQMQELSTRWETVCALSISKQTRLEAALRQAEEFHSVVHALLEWLAEAEQTLRFHGVLPDDEDALRTLIDQHKEFMKKLEEKRAELNKATTMGDTVLAICHPDSITTIKHWITIIRARFEEVLAWAKQHQQRLASALAGLIAKQELLEALLAWLQWAETTLTDKDKEVIPQEIEEVKALIAEHQTFMEEMTRKQPDVDKVTKTYKRRAADPSSLQSHIPVLDKGRAGRKRFPASSLYPSGSQTQIETKNPRVNLLVSKWQQVWLLALERRRKLNDALDRLEELREFANFDFDIWRKKYMRWMNHKKSRVMDFFRRIDKDQDGKITRQEFIDGILSSKFPTSRLEMSAVADIFDRDGDGYIDYYEFVAALHPNKDAYKPITDADKIEDEVTRQVAKCKCAKRFQVEQIGDNKYRFFLGNQFGDSQQLRLVRILRSTVMVRVGGGWMALDEFLVKNDPCRVHHHGSKMLRSESNSSITTTQPTIAKGRTNMELREKFILADGASQGMAAFRPRGRRSRPSSRGASPNRSTSVSSQAAQAASPQVPATTTPKGTPIQGSKLRLPGYLSGKGFHSGEDSGLITTAAARVRTQFADSKKTPSRPGSRAGSKAGSRASSRRGSDASDFDISEIQSVCSDVETVPQTHRPTPRAGSRPSTAKPSKIPTPQRKSPASKLDKSSKR

SEQ ID NO: 26251 - protein, 5675 aa, Homo sapiens
  Payload ID: 5186
  Gene Symbol: DST
  Gene Name: dystonin
  ENSP ID: ENSP00000359790
MIAAAFLVLLRPYSIQCALFLLLLLLGTIATIVFFCCWHRKLQKGRHPMKSVFSGRSRSRDAVLRSHHFRSEGFRASPRHLRRRVAAAAAARLEEVKPVVEVHHQSEQETSVRKRRIKKSSRVQPEFYHSVQGASIRRPSSGNASYRCSMSSSADFSDEDDFSQKSGSASPAPGDTLPWNLPKHERSKRKIQGGSVLDPAERAVLRIADERDKVQKKTFTKWINQHLMKVRKHVNDLYEDLRDGHNLISLLEVLSGDTLPREKGRMRFHRLQNVQIALDYLKRRQVKLVNIRNDDITDGNPKLTLGLIWTIILHFQISDIHVTGESEDMSAKERLLLWTQQATEGYAGIRCENFTTCWRDGKLFNAIIHKYRPDLIDMNTVAVQSNLANLEHAFYVAEKIGVIRLLDPEDVDVSSPDEKSVITYVSSLYDAFPKVPEGGEGIGANDVEVKWIEYQNMVNYLIQWIRHHVTTMSERTFPNNPVELKALYNQYLQFKETEIPPKETEKSKIKRLYKLLEIWIEFGRIKLLQGYHPNDIEKEWGKLIIAMLEREKALRPEVERLEMLQQIANRVQRDSVICEDKLILAGNALQSDSKRLESGVQFQNEAEIAGYILECENLLRQHVIDVQILIDGKYYQADQLVQRVAKLRDEIMALRNECSSVYSKGRILTTEQTKLMISGITQSLNSGFAQTLHPSLTSGLTQSLTPSLTSSSMTSGLSSGMTSRLTPSVTPAYTPGFPSGLVPNFSSGVEPNSLQTLKLMQIRKPLLKSSLLDQNLTEEEINMKFVQDLLNWVDEMQVQLDRTEWGSDLPSVESHLENHKNVHRAIEEFESSLKEAKISEIQMTAPLKLTYAEKLHRLESQYAKLLNTSRNQERHLDTLHNFVSRATNELIWLNEKEEEEVAYDWSERNTNIARKKDYHAELMRELDQKEENIKSVQEIAEQLLLENHPARLTIEAYRAAMQTQWSWILQLCQCVEQHIKENTAYFEFFNDAKEATDYLRNLKDAIQRKYSCDRSSSIHKLEDLVQESMEEKEELLQYKSTIANLMGKAKTIIQLKPRNSDCPLKTSIPIKAICDYRQIEITIYKDDECVLANNSHRAKWKVISPTGNEAMVPSVCFTVPPPNKEAVDLANRIEQQYQNVLTLWHESHINMKSVVSWHYLINEIDRIRASNVASIKTMLPGEHQQVLSNLQSRFEDFLEDSQESQVFSGSDITQLEKEVNVCKQYYQELLKSAEREEQEESVYNLYISEVRNIRLRLENCEDRLIRQIRTPLERDDLHESVFRITEQEKLKKELERLKDDLGTITNKCEEFFSQAAASSSVPTLRSELNVVLQNMNQVYSMSSTYIDKLKTVNLVLKNTQAAEALVKLYETKLCEEEAVIADKNNIENLISTLKQWRSEVDEKRQVFHALEDELQKAKAISDEMFKTYKERDLDFDWHKEKADQLVERWQNVHVQIDNRLRDLEGIGKSLKYYRDTYHPLDDWIQQVETTQRKIQENQPENSKTLATQLNQQKMLVSEIEMKQSKMDECQKYAEQYSATVKDYELQTMTYRAMVDSQQKSPVKRRRMQSSADLIIQEFMDLRTRYTALVTLMTQYIKFAGDSLKRLEEEEKSLEEEKKEHVEKAKELQKWVSNISKTLKDAEKAGKPPFSKQKISSEEISTKKEQLSEALQTIQLFLAKHGDKMTDEERNELEKQVKTLQESYNLLFSESLKQLQESQTSGDVKVEEKIVAERQQEYKEKLQGICDLLTQTENRLIGHQEAFMIGDGTVELKKYQSKQEELQKDMQGSAQALAEVVKNTENFLKENGEKLSQEDKALIEQKLNEAKIKCEQLNLKAEQSKKELDKVVTTAIKEETEKVAAVKQLEESKTKIENLLDWLSNVDKDSERAGTKHKQVIEQNGTHFQEGDGKSAIGEEDEVNGNLLETDVDGQVGTTQENLNQQYQKVKAQHEKIISQHQAVIIATQSAQVLLEKQGQYLSPEEKEKLQKNMKELKVHYETALAESEKKMKLTHSLQEELEKFDADYTEFEHWLQQSEQELENLEAGADDINGLMTKLKRQKSFSEDVISHKGDLRYITISGNRVLEAAKSCSKRDGGKVDTSATHREVQRKLDHATDRFRSLYSKCNVLGNNLKDLVDKYQHYEDASCGLLAGLQACEATASKHLSEPIAVDPKNLQRQLEETKALQGQISSQQVAVEKLKKTAEVLLDARGSLLPAKNDIQKTLDDIVGRYEDLSKSVNERNEKLQITLTRSLSVQDGLDEMLDWMGNVESSLKEQGQVPLNSTALQDIISKNIMLEQDIAGRQSSINAMNEKVKKFMETTDPSTASSLQAKMKDLSARFSEASHKHKETLAKMEELKTKVELFENLSEKLQTFLETKTQALTEVDVPGKDVTELSQYMQESTSEFLEHKKHLEVLHSLLKEISSHGLPSDKALVLEKTNNLSKKFKEMEDTIKEKKEAVTSCQEQLDAFQVLVKSLKSWIKETTKKVPIVQPSFGAEDLGKSLEDTKKLQEKWSLKTPEIQKVNNSGISLCNLISAVTTPAKAIAAVKSGGAVLNGEGTATNTEEFWANKGLTSIKKDMTDISHGYEDLGLLLKDKIAELNTKLSKLQKAQEESSAMMQWLQKMNKTATKWQQTPAPTDTEAVKTQVEQNKSFEAELKQNVNKVQELKDKLTELLEENPDTPEAPRWKQMLTEIDSKWQELNQLTIDRQQKLEESSNNLTQFQTVEAQLKQWLVEKELMVSVLGPLSIDPNMLNTQRQQVQILLQEFATRKPQYEQLTAAGQGILSRPGEDPSLRGIVKEQLAAVTQKWDSLTGQLSDRCDWIDQAIVKSTQYQSLLRSLSDKLSDLDNKLSSSLAVSTHPDAMNQQLETAQKMKQEIQQEKKQIKVAQALCEDLSALVKEEYLKAELSRQLEGILKSFKDVEQKAENHVQHLQSACASSHQFQQMSRDFQAWLDTKKEEQNKSHPISAKLDVLESLIKDHKDFSKTLTAQSHMYEKTIAEGENLLLKTQGSEKAALQLQLNTIKTNWDTFNKQVKERENKLKESLEKALKYKEQVETLWPWIDKCQNNLEEIKFCLDPAEGENSIAKLKSLQKEMDQHFGMVELLNNTANSLLSVCEIDKEVVTDENKSLIQKVDMVTEQLHSKKFCLENMTQKFKEFQEVSKESKRQLQCAKEQLDIHDSLGSQAYSNKYLTMLQTQQKSLQALKHQVDLAKRLAQDLVVEASDSKGTSDVLLQVETIAQEHSTLSQQVDEKCSFLETKLQGIGHFQNTIREMFSQFAEFDDELDSMAPVGRDAETLQKQKETIKAFLKKLEALMASNDNANKTCKMMLATEETSPDLVGIKRDLEALSKQCNKLLDRAQAREEQVEGTIKRLEEFYSKLKEFSILLQKAEEHEESQGPVGMETETINQQLNMFKVFQKEEIEPLQGKQQDVNWLGQGLIQSAAKSTSTQGLEHDLDDVNARWKTLNKKVAQRAAQLQEALLHCGRFQDALESLLSWMVDTEELVANQKPPSAEFKVVKAQIQEQKLLQRLLDDRKSTVEVIKREGEKIATTAEPADKVKILKQLSLLDSRWEALLNKAETRNRQLEGISVVAQQFHETLEPLNEWLTTIEKRLVNCEPIGTQASKLEEQIAQHKALEDDIINHNKHLHQAVSIGQSLKVLSSREDKDMVQSKLDFSQVWYIEIQEKSHSRSELLQQALCNAKIFGEDEVELMNWLNEVHDKLSKLSVQDYSTEGLWKQQSELRVLQEDILLRKQNVDQALLNGLELLKQTTGDEVLIIQDKLEAIKARYKDITKLSTDVAKTLEQALQLARRLHSTHEELCTWLDKVEVELLSYETQVLKGEEASQAQMRPKELKKEAKNNKALLDSLNEVSSALLELVPWRAREGLEKMVAEDNERYRLVSDTITQKVEEIDAAILRSQQFDQAADAELSWITETEKKLMSLGDIRLEQDQTSAQLQVQKTFTMEILRHKDIIDDLVKSGHKIMTACSEEEKQSMKKKLDKVLKNYDTICQINSERYLQLERAQSLVNQFWETYEELWPWLTETQSIISQLPAPALEYETLRQQQEEHRQLRELIAEHKPHIDKMNKTGPQLLELSPGEGFSIQEKYVAADTLYSQIKEDVKKRAVALDEAISQSTQFHDKIDQILESLERIVERLRQPPSISAEVEKIKEQISENKNVSVDMEKLQPLYETLKQRGEEMIARSGGTDKDISAKAVQDKLDQMVFIWENIHTLVEEREAKLLDVMELAEKFWCDHMSLIVTIKDTQDFIRDLEDPGIDPSVVKQQQEAAETIREEIDGLQEELDIVINLGSELIAACGEPDKPIVKKSIDELNSAWDSLNKAWKDRIDKLEEAMQAAVQYQDGLQAVFDWVDIAGGKLASMSPIGTDLETVKQQIEELKQFKSEAYQQQIEMERLNHQAELLLKKVTEESDKHTVQDPLMELKLIWDSLEERIINRQHKLEGALLALGQFQHALDELLAWLTHTEGLLSEQKPVGGDPKAIEIELAKHHVLQNDVLAHQSTVEAVNKAGNDLIESSAGEEASNLQNKLEVLNQRWQNVLEKTEQRKQQLDGALRQAKGFHGEIEDLQQWLTDTERHLLASKPLGGLPETAKEQLNVHMEVCAAFEAKEETYKSLMQKGQQMLARCPKSAETNIDQDINNLKEKWESVETKLNERKTKLEEALNLAMEFHNSLQDFINWLTQAEQTLNVASRPSLILDTVLFQIDEHKVFANEVNSHREQIIELDKTGTHLKYFSQKQDVVLIKNLLISVQSRWEKVVQRLVERGRSLDDARKRAKQFHEAWSKLMEWLEESEKSLDSELEIANDPDKIKTQLAQHKEFQKSLGAKHSVYDTTNRTGRSLKEKTSLADDNLKLDDMLSELRDKWDTICGKSVERQNKLEEALLFSGQFTDALQALIDWLYRVEPQLAEDQPVHGDIDLVMNLIDNHKAFQKELGKRTSSVQALKRSARELIEGSRDDSSWVKVQMQELSTRWETVCALSISKQTRLEAALRQAEEFHSVVHALLEWLAEAEQTLRFHGVLPDDEDALRTLIDQHKEFMKKLEEKRAELNKATTMGDTVLAICHPDSITTIKHWITIIRARFEEVLAWAKQHQQRLASALAGLIAKQELLEALLAWLQWAETTLTDKDKEVIPQEIEEVKALIAEHQTFMEEMTRKQPDVDKVTKTYKRRAADPSSLQSHIPVLDKGRAGRKRFPASSLYPSGSQTQIETKNPRVNLLVSKWQQVWLLALERRRKLNDALDRLEELREFANFDFDIWRKKYMRWMNHKKSRVMDFFRRIDKDQDGKITRQEFIDGILSSKFPTSRLEMSAVADIFDRDGDGYIDYYEFVAALHPNKDAYKPITDADKIEDEVTRQVAKCKCAKRFQVEQIGDNKYRFFLGNQFGDSQQLRLVRILRSTVMVRVGGGWMALDEFLVKNDPCRAKGRTNMELREKFILADGASQGMAAFRPRGRRSRPSSRGASPNRSTSVSSQAAQAASPQVPATTTPKILHPLTRNYGKPWLTNSKMSTPCKAAECSDFPVPSAEGTPIQGSKLRLPGYLSGKGFHSGEDSGLITTAAARVRTQFADSKKTPSRPGSRAGSKAGSRASSRRGSDASDFDISEIQSVCSDVETVPQTHRPTPRAGSRPSTAKPSKIPTPQRKSPASKLDKSSKR

SEQ ID NO: 26252 - protein, 2649 aa, Homo sapiens
  Payload ID: 5186
  Gene Symbol: DST
  Gene Name: dystonin
  Uniprot ID: Q03001
  ENSP ID: ENSP00000359801
MHSSSYSYRSSDSVFSNTTSTRTSLDSNENLLLVHCGPTLINSCISFGSESFDGHRLEMLQQIANRVQRDSVICEDKLILAGNALQSDSKRLESGVQFQNEAEIAGYILECENLLRQHVIDVQILIDGKYYQADQLVQRVAKLRDEIMALRNECSSVYSKGRILTTEQTKLMISGITQSLNSGFAQTLHPSLTSGLTQSLTPSLTSSSMTSGLSSGMTSRLTPSVTPAYTPGFPSGLVPNFSSGVEPNSLQTLKLMQIRKPLLKSSLLDQNLTEEEINMKFVQDLLNWVDEMQVQLDRTEWGSDLPSVESHLENHKNVHRAIEEFESSLKEAKISEIQMTAPLKLTYAEKLHRLESQYAKLLNTSRNQERHLDTLHNFVSRATNELIWLNEKEEEEVAYDWSERNTNIARKKDYHAELMRELDQKEENIKSVQEIAEQLLLENHPARLTIEAYRAAMQTQWSWILQLCQCVEQHIKENTAYFEFFNDAKEATDYLRNLKDAIQRKYSCDRSSSIHKLEDLVQESMEEKEELLQYKSTIANLMGKAKTIIQLKPRNSDCPLKTSIPIKAICDYRQIEITIYKDDECVLANNSHRAKWKVISPTGNEAMVPSVCFTVPPPNKEAVDLANRIEQQYQNVLTLWHESHINMKSVVSWHYLINEIDRIRASNVASIKTMLPGEHQQVLSNLQSRFEDFLEDSQESQVFSGSDITQLEKEVNVCKQYYQELLKSAEREEQEESVYNLYISEVRNIRLRLENCEDRLIRQIRTPLERDDLHESVFRITEQEKLKKELERLKDDLGTITNKCEEFFSQAAASSSVPTLRSELNVVLQNMNQVYSMSSTYIDKLKTVNLVLKNTQAAEALVKLYETKLCEEEAVIADKNNIENLISTLKQWRSEVDEKRQVFHALEDELQKAKAISDEMFKTYKERDLDFDWHKEKADQLVERWQNVHVQIDNRLRDLEGIGKSLKYYRDTYHPLDDWIQQVETTQRKIQENQPENSKTLATQLNQQKMLVSEIEMKQSKMDECQKYAEQYSATVKDYELQTMTYRAMVDSQQKSPVKRRRMQSSADLIIQEFMDLRTRYTALVTLMTQYIKFAGDSLKRLEEEEIKRCKETSEHGAYSDLLQRQKATVLENSKLTGKISELERMVAELKKQKSRVEEELPKVREAAENELRKQQRNVEDISLQKIRAESEAKQYRRELETIVREKEAAERELERVRQLTIEAEAKRAAVEENLLNFRNQLEENTFTRRTLEDHLKRKDLSLNDLEQQKNKLMEELRRKRDNEEELLKLIKQMEKDLAFQKQVAEKQLKEKQKIELEARRKITEIQYTCRENALPVCPITQATSCRAVTGLQQEHDKQKAEELKQQVDELTAANRKAEQDMRELTYELNALQLEKTSSEEKARLLKDKLDETNNTLRCLKLELERKDQAEKGYSQQLRELGRQLNQTTGKAEEAMQEASDLKKIKRNYQLELESLNHEKGKLQREVDRITRAHAVAEKNIQHLNSQIHSFRDEKELERLQICQRKSDHLKEQFEKSHEQLLQNIKAEKENNDKIQRLNEELEKSNECAEMLKQKVEELTRQNNETKLMMQRIQAESENIVLEKQTIQQRCEALKIQADGFKDQLRSTNEHLHKQTKTEQDFQRKIKCLEEDLAKSQNLVSEFKQKCDQQNIIIQNTKKEVRNLNAELNASKEEKRRGEQKVQLQQAQVQELNNRLKKVQDELHLKTIEEQMTHRKMVLFQEESGKFKQSAEEFRKKMEKLMESKVITENDISGIRLDFVSLQQENSRAQENAKLCETNIKELERQLQQYREQMQQGQHMEANHYQKCQKLEDELIAQKREVENLKQKMDQQIKEHEHQLVLLQCEIQKKSTAKDCTFKPDFEMTVKECQHSGELSSRNTGHLHPTPRSPLLRWTQEPQPLEEKWQHRVVEQIPKEVQFQPPGAPLEKEKSQQCYSEYFSQTSTELQITFDETNPITRLSEIEKIRDQALNNSRPPVRYQDNACEMELVKVLTPLEIAKNKQYDMHTEVTTLKQEKNPVPSAEEWMLEGCRASGGLKKGDFLKKGLEPETFQNFDGDHACSVRDDEFKFQGLRHTVTARQLVEAKLLDMRTIEQLRLGLKTVEEVQKTLNKFLTKATSIAGLYLESTKEKISFASAAERIIIDKMVALAFLEAQAATGFIIDPISGQTYSVEDAVLKGVVDPEFRIRLLEAEKAAVGYSYSSKTLSVFQAMENRMLDRQKGKHILEAQIASGGVIDPVRGIRVPPEIALQQGLLNNAILQFLHEPSSNTRVFPNPNNKQALYYSELLRMCVFDVESQCFLFPFGERNISNLNVKKTHRISVVDTKTGSELTVYEAFQRNLIEKSIYLELSGQQYQWKEAMFFESYGHSSHMLTDTKTGLHFNINEAIEQGTIDKALVKKYQEGLITLTELADSLLSRLVPKKDLHSPVAGYWLTASGERISVLKASRRNLVDRITALRCLEAQVSTGGIIDPLTGKKYRVAEALHRGLVDEGFAQQLRQCELVITGIGHPITNKMMSVVEAVNANIINKEMGIRCLEFQYLTGGLIEPQVHSRLSIEEALQVGIIDVLIATKLKDQKSYVRNIICPQTKRKLTYKEALEKADFDFHTGLKLLEVSEPLMTGISSLYYSS

SEQ ID NO: 26253 - protein, 5375 aa, Homo sapiens
  Payload ID: 5186
  Gene Symbol: DST
  Gene Name: dystonin
  ENSP ID: ENSP00000359824
MAGYLSPAAYLYVEEQEYLQAYEDVLERYKDERDKVQKKTFTKWINQHLMKVRKHVNDLYEDLRDGHNLISLLEVLSGDTLPREKGRMRFHRLQNVQIALDYLKRRQVKLVNIRNDDITDGNPKLTLGLIWTIILHFQISDIHVTGESEDMSAKERLLLWTQQATEGYAGIRCENFTTCWRDGKLFNAIIHKYRPDLIDMNTVAVQSNLANLEHAFYVAEKIGVIRLLDPEDVDVSSPDEKSVITYVSSLYDAFPKVPEGGEGIGANDVEVKWIEYQNMVNYLIQWIRHHVTTMSERTFPNNPVELKALYNQYLQFKETEIPPKETEKSKIKRLYKLLEIWIEFGRIKLLQGYHPNDIEKEWGKLIIAMLEREKALRPEVERLEMLQQIANRVQRDSVICEDKLILAGNALQSDSKRLESGVQFQNEAEIAGYILECENLLRQHVIDVQILIDGKYYQADQLVQRVAKLRDEIMALRNECSSVYSKGRILTTEQTKLMISGITQSLNSGFAQTLHPSLTSGLTQSLTPSLTSSSMTSGLSSGMTSRLTPSVTPAYTPGFPSGLVPNFSSGVEPNSLQTLKLMQIRKPLLKSSLLDQNLTEEEINMKFVQDLLNWVDEMQVQLDRTEWGSDLPSVESHLENHKNVHRAIEEFESSLKEAKISEIQMTAPLKLTYAEKLHRLESQYAKLLNTSRNQERHLDTLHNFVSRATNELIWLNEKEEEEVAYDWSERNTNIARKKDYHAELMRELDQKEENIKSVQEIAEQLLLENHPARLTIEAYRAAMQTQWSWILQLCQCVEQHIKENTAYFEFFNDAKEATDYLRNLKDAIQRKYSCDRSSSIHKLEDLVQESMEEKEELLQYKSTIANLMGKAKTIIQLKPRNSDCPLKTSIPIKAICDYRQIEITIYKDDECVLANNSHRAKWKVISPTGNEAMVPSVCFTVPPPNKEAVDLANRIEQQYQNVLTLWHESHINMKSVVSWHYLINEIDRIRASNVASIKTMLPGEHQQVLSNLQSRFEDFLEDSQESQVFSGSDITQLEKEVNVCKQYYQELLKSAEREEQEESVYNLYISEVRNIRLRLENCEDRLIRQIRTPLERDDLHESVFRITEQEKLKKELERLKDDLGTITNKCEEFFSQAAASSSVPTLRSELNVVLQNMNQVYSMSSTYIDKLKTVNLVLKNTQAAEALVKLYETKLCEEEAVIADKNNIENLISTLKQWRSEVDEKRQVFHALEDELQKAKAISDEMFKTYKERDLDFDWHKEKADQLVERWQNVHVQIDNRLRDLEGIGKSLKYYRDTYHPLDDWIQQVETTQRKIQENQPENSKTLATQLNQQKMLVSEIEMKQSKMDECQKYAEQYSATVKDYELQTMTYRAMVDSQQKSPVKRRRMQSSADLIIQEFMDLRTRYTALVTLMTQYIKFAGDSLKRLEEEEKSLEEEKKEHVEKAKELQKWVSNISKTLKDAEKAGKPPFSKQKISSEEISTKKEQLSEALQTIQLFLAKHGDKMTDEERNELEKQVKTLQESYNLLFSESLKQLQESQTSGDVKVEEKIVAERQQEYKEKLQGICDLLTQTENRLIGHQEAFMIGDGTVELKKYQSKQEELQKDMQGSAQALAEVVKNTENFLKENGEKLSQEDKALIEQKLNEAKIKCEQLNLKAEQSKKELDKVVTTAIKEETEKVAAVKQLEESKTKIENLLDWLSNVDKDSERAGTKHKQVIEQNGTHFQEGDGKSAIGEEDEVNGNLLETDVDGQVGTTQENLNQQYQKVKAQHEKIISQHQAVIIATQSAQVLLEKQGQYLSPEEKEKLQKNMKELKVHYETALAESEKKMKLTHSLQEELEKFDADYTEFEHWLQQSEQELENLEAGADDINGLMTKLKRQKSFSEDVISHKGDLRYITISGNRVLEAAKSCSKRDGGKVDTSATHREVQRKLDHATDRFRSLYSKCNVLGNNLKDLVDKYQHYEDASCGLLAGLQACEATASKHLSEPIAVDPKNLQRQLEETKALQGQISSQQVAVEKLKKTAEVLLDARGSLLPAKNDIQKTLDDIVGRYEDLSKSVNERNEKLQITLTRSLSVQDGLDEMLDWMGNVESSLKEQGQVPLNSTALQDIISKNIMLEQDIAGRQSSINAMNEKVKKFMETTDPSTASSLQAKMKDLSARFSEASHKHKETLAKMEELKTKVELFENLSEKLQTFLETKTQALTEVDVPGKDVTELSQYMQESTSEFLEHKKHLEVLHSLLKEISSHGLPSDKALVLEKTNNLSKKFKEMEDTIKEKKEAVTSCQEQLDAFQVLVKSLKSWIKETTKKVPIVQPSFGAEDLGKSLEDTKKLQEKWSLKTPEIQKVNNSGISLCNLISAVTTPAKAIAAVKSGGAVLNGEGTATNTEEFWANKGLTSIKKDMTDISHGYEDLGLLLKDKIAELNTKLSKLQKAQEESSAMMQWLQKMNKTATKWQQTPAPTDTEAVKTQVEQNKSFEAELKQNVNKVQELKDKLTELLEENPDTPEAPRWKQMLTEIDSKWQELNQLTIDRQQKLEESSNNLTQFQTVEAQLKQWLVEKELMVSVLGPLSIDPNMLNTQRQQVQILLQEFATRKPQYEQLTAAGQGILSRPGEDPSLRGIVKEQLAAVTQKWDSLTGQLSDRCDWIDQAIVKSTQYQSLLRSLSDKLSDLDNKLSSSLAVSTHPDAMNQQLETAQKMKQEIQQEKKQIKVAQALCEDLSALVKEEYLKAELSRQLEGILKSFKDVEQKAENHVQHLQSACASSHQFQQMSRDFQAWLDTKKEEQNKSHPISAKLDVLESLIKDHKDFSKTLTAQSHMYEKTIAEGENLLLKTQGSEKAALQLQLNTIKTNWDTFNKQVKERENKLKESLEKALKYKEQVETLWPWIDKCQNNLEEIKFCLDPAEGENSIAKLKSLQKEMDQHFGMVELLNNTANSLLSVCEIDKEVVTDENKSLIQKVDMVTEQLHSKKFCLENMTQKFKEFQEVSKESKRQLQCAKEQLDIHDSLGSQAYSNKYLTMLQTQQKSLQALKHQVDLAKRLAQDLVVEASDSKGTSDVLLQVETIAQEHSTLSQQVDEKCSFLETKLQGIGHFQNTIREMFSQFAEFDDELDSMAPVGRDAETLQKQKETIKAFLKKLEALMASNDNANKTCKMMLATEETSPDLVGIKRDLEALSKQCNKLLDRAQAREEQVEGTIKRLEEFYSKLKEFSILLQKAEEHEESQGPVGMETETINQQLNMFKVFQKEEIEPLQGKQQDVNWLGQGLIQSAAKSTSTQGLEHDLDDVNARWKTLNKKVAQRAAQLQEALLHCGRFQDALESLLSWMVDTEELVANQKPPSAEFKVVKAQIQEQKLLQRLLDDRKSTVEVIKREGEKIATTAEPADKVKILKQLSLLDSRWEALLNKAETRNRQLEGISVVAQQFHETLEPLNEWLTTIEKRLVNCEPIGTQASKLEEQIAQHKVLQEDILLRKQNVDQALLNGLELLKQTTGDEVLIIQDKLEAIKARYKDITKLSTDVAKTLEQALQLARRLHSTHEELCTWLDKVEVELLSYETQVLKGEEASQAQMRPKELKKEAKNNKALLDSLNEVSSALLELVPWRAREGLEKMVAEDNERYRLVSDTITQKVEEIDAAILRSQQFDQAADAELSWITETEKKLMSLGDIRLEQDQTSAQLQVQKTFTMEILRHKDIIDDLVKSGHKIMTACSEEEKQSMKKKLDKVLKNYDTICQINSERYLQLERAQSLVNQFWETYEELWPWLTETQSIISQLPAPALEYETLRQQQEEHRQLRELIAEHKPHIDKMNKTGPQLLELSPGEGFSIQEKYVAADTLYSQIKEDVKKRAVALDEAISQSTQFHDKIDQILESLERIVERLRQPPSISAEVEKIKEQISENKNVSVDMEKLQPLYETLKQRGEEMIARSGGTDKDISAKAVQDKLDQMVFIWENIHTLVEEREAKLLDVMELAEKFWCDHMSLIVTIKDTQDFIRDLEDPGIDPSVVKQQQEAAETIREEIDGLQEELDIVINLGSELIAACGEPDKPIVKKSIDELNSAWDSLNKAWKDRIDKLEEAMQAAVQYQDGLQAVFDWVDIAGGKLASMSPIGTDLETVKQQIEELKQFKSEAYQQQIEMERLNHQAELLLKKVTEESDKHTVQDPLMELKLIWDSLEERIINRQHKLEGALLALGQFQHALDELLAWLTHTEGLLSEQKPVGGDPKAIEIELAKHHVLQNDVLAHQSTVEAVNKAGNDLIESSAGEEASNLQNKLEVLNQRWQNVLEKTEQRKQQLDGALRQAKGFHGEIEDLQQWLTDTERHLLASKPLGGLPETAKEQLNVHMEVCAAFEAKEETYKSLMQKGQQMLARCPKSAETNIDQDINNLKEKWESVETKLNERKTKLEEALNLAMEFHNSLQDFINWLTQAEQTLNVASRPSLILDTVLFQIDEHKVFANEVNSHREQIIELDKTGTHLKYFSQKQDVVLIKNLLISVQSRWEKVVQRLVERGRSLDDARKRAKQFHEAWSKLMEWLEESEKSLDSELEIANDPDKIKTQLAQHKEFQKSLGAKHSVYDTTNRTGRSLKEKTSLADDNLKLDDMLSELRDKWDTICGKSVERQNKLEEALLFSGQFTDALQALIDWLYRVEPQLAEDQPVHGDIDLVMNLIDNHKAFQKELGKRTSSVQALKRSARELIEGSRDDSSWVKVQMQELSTRWETVCALSISKQTRLEAALRQAEEFHSVVHALLEWLAEAEQTLRFHGVLPDDEDALRTLIDQHKEFMKKLEEKRAELNKATTMGDTVLAICHPDSITTIKHWITIIRARFEEVLAWAKQHQQRLASALAGLIAKQELLEALLAWLQWAETTLTDKDKEVIPQEIEEVKALIAEHQTFMEEMTRKQPDVDKVTKTYKRRAADPSSLQSHIPVLDKGRAGRKRFPASSLYPSGSQTQIETKNPRVNLLVSKWQQVWLLALERRRKLNDALDRLEELREFANFDFDIWRKKYMRWMNHKKSRVMDFFRRIDKDQDGKITRQEFIDGILSSKFPTSRLEMSAVADIFDRDGDGYIDYYEFVAALHPNKDAYKPITDADKIEDEVTRQVAKCKCAKRFQVEQIGDNKYRFFLGNQFGDSQQLRLVRILRSTVMVRVGGGWMALDEFLVKNDPCRVHHHGSKMLRSESNSSITTTQPTIAKGRTNMELREKFILADGASQGMAAFRPRGRRSRPSSRGASPNRSTSVSSQAAQAASPQVPATTTPKGTPIQGSKLRLPGYLSGKGFHSGEDSGLITTAAARVRTQFADSKKTPSRPGSRAGSKAGSRASSRRGSDASDFDISEIQSVCSDVETVPQTHRPTPRAGSRPSTAKPSKIPTPQRKSPASKLDKSSKR

SEQ ID NO: 26254 - protein, 689 aa, Homo sapiens
  Payload ID: 5186
  Gene Symbol: DST
  Gene Name: dystonin
  ENSP ID: ENSP00000393082
MIAAAFLVLLRPYSIQCALFLLLLLLGTIATIVFFCCWHRKLQKGRHPMKSVFSGRSRSRDAVLRSHHFRSEGFRASPRHLRRRVAAAAAARLEEVKPVVEVHHQSEQETSVRKRRIKKSSRVQPEFYHSVQGASIRRPSSGNASYRCSMSSSADFSDEDDFSQKSGSASPAPGDTLPWNLPKHERSKRKIQGGSVLDPAERAVLRIADERDKVQKKTFTKWINQHLMKVRKHVNDLYEDLRDGHNLISLLEVLSGDTLPREKGRMRFHRLQNVQIALDYLKRRQVKLVNIRNDDITDGNPKLTLGLIWTIILHFQISDIHVTGESEDMSAKERLLLWTQQATEGYAGIRCENFTTCWRDGKLFNAIIHKYRPDLIDMNTVAVQSNLANLEHAFYVAEKIGVIRLLDPEDVDVSSPDEKSVITYVSSLYDAFPKVPEGGEGIGANDVEVKWIEYQNMVNYLIQWIRHHVTTMSERTFPNNPVELKALYNQYLQFKETEIPPKETEKSKIKRLYKLLEIWIEFGRIKLLQGYHPNDIEKEWGKLIIAMLEREKALRPEVERLEMLQQIANRVQRDSVICEDKLILAGNALQSDSKRLESGVQFQNEAEIAGYILECENLLRQHVIDVQILIDGKYYQADQLVQRVAKLRDEIMALRNECSSVYSKGRILTTEQTKLMISGITQSLNSGFA

SEQ ID NO: 26255 - protein, 5497 aa, Homo sapiens
  Payload ID: 5186
  Gene Symbol: DST
  Gene Name: dystonin
  ENSP ID: ENSP00000400883
MAGYLSPAAYLYVEEQEYLQAYEDVLERYKDERDKVQKKTFTKWINQHLMKVRKHVNDLYEDLRDGHNLISLLEVLSGDTLPREKGRMRFHRLQNVQIALDYLKRRQVKLVNIRNDDITDGNPKLTLGLIWTIILHFQISDIHVTGESEDMSAKERLLLWTQQATEGYAGIRCENFTTCWRDGKLFNAIIHKYRPDLIDMNTVAVQSNLANLEHAFYVAEKIGVIRLLDPEDVDVSSPDEKSVITYVSSLYDAFPKVPEGGEGIGANDVEVKWIEYQNMVNYLIQWIRHHVTTMSERTFPNNPVELKALYNQYLQFKETEIPPKETEKSKIKRLYKLLEIWIEFGRIKLLQGYHPNDIEKEWGKLIIAMLEREKALRPEVERLEMLQQIANRVQRDSVICEDKLILAGNALQSDSKRLESGVQFQNEAEIAGYILECENLLRQHVIDVQILIDGKYYQADQLVQRVAKLRDEIMALRNECSSVYSKGRILTTEQTKLMISGITQSLNSGFAQTLHPSLTSGLTQSLTPSLTSSSMTSGLSSGMTSRLTPSVTPAYTPGFPSGLVPNFSSGVEPNSLQTLKLMQIRKPLLKSSLLDQNLTEEEINMKFVQDLLNWVDEMQVQLDRTEWGSDLPSVESHLENHKNVHRAIEEFESSLKEAKISEIQMTAPLKLTYAEKLHRLESQYAKLLNTSRNQERHLDTLHNFVSRATNELIWLNEKEEEEVAYDWSERNTNIARKKDYHAELMRELDQKEENIKSVQEIAEQLLLENHPARLTIEAYRAAMQTQWSWILQLCQCVEQHIKENTAYFEFFNDAKEATDYLRNLKDAIQRKYSCDRSSSIHKLEDLVQESMEEKEELLQYKSTIANLMGKAKTIIQLKPRNSDCPLKTSIPIKAICDYRQIEITIYKDDECVLANNSHRAKWKVISPTGNEAMVPSVCFTVPPPNKEAVDLANRIEQQYQNVLTLWHESHINMKSVVSWHYLINEIDRIRASNVASIKTMLPGEHQQVLSNLQSRFEDFLEDSQESQVFSGSDITQLEKEVNVCKQYYQELLKSAEREEQEESVYNLYISEVRNIRLRLENCEDRLIRQIRTPLERDDLHESVFRITEQEKLKKELERLKDDLGTITNKCEEFFSQAAASSSVPTLRSELNVVLQNMNQVYSMSSTYIDKLKTVNLVLKNTQAAEALVKLYETKLCEEEAVIADKNNIENLISTLKQWRSEVDEKRQVFHALEDELQKAKAISDEMFKTYKERDLDFDWHKEKADQLVERWQNVHVQIDNRLRDLEGIGKSLKYYRDTYHPLDDWIQQVETTQRKIQENQPENSKTLATQLNQQKMLVSEIEMKQSKMDECQKYAEQYSATVKDYELQTMTYRAMVDSQQKSPVKRRRMQSSADLIIQEFMDLRTRYTALVTLMTQYIKFAGDSLKRLEEEEKSLEEEKKEHVEKAKELQKWVSNISKTLKDAEKAGKPPFSKQKISSEEISTKKEQLSEALQTIQLFLAKHGDKMTDEERNELEKQVKTLQESYNLLFSESLKQLQESQTSGDVKVEEKIVAERQQEYKEKLQGICDLLTQTENRLIGHQEAFMIGDGTVELKKYQSKQEELQKDMQGSAQALAEVVKNTENFLKENGEKLSQEDKALIEQKLNEAKIKCEQLNLKAEQSKKELDKVVTTAIKEETEKVAAVKQLEESKTKIENLLDWLSNVDKDSERAGTKHKQVIEQNGTHFQEGDGKSAIGEEDEVNGNLLETDVDGQVGTTQENLNQQYQKVKAQHEKIISQHQAVIIATQSAQVLLEKQGQYLSPEEKEKLQKNMKELKVHYETALAESEKKMKLTHSLQEELEKFDADYTEFEHWLQQSEQELENLEAGADDINGLMTKLKRQKSFSEDVISHKGDLRYITISGNRVLEAAKSCSKRDGGKVDTSATHREVQRKLDHATDRFRSLYSKCNVLGNNLKDLVDKYQHYEDASCGLLAGLQACEATASKHLSEPIAVDPKNLQRQLEETKALQGQISSQQVAVEKLKKTAEVLLDARGSLLPAKNDIQKTLDDIVGRYEDLSKSVNERNEKLQITLTRSLSVQDGLDEMLDWMGNVESSLKEQGQVPLNSTALQDIISKNIMLEQDIAGRQSSINAMNEKVKKFMETTDPSTASSLQAKMKDLSARFSEASHKHKETLAKMEELKTKVELFENLSEKLQTFLETKTQALTEVDVPGKDVTELSQYMQESTSEFLEHKKHLEVLHSLLKEISSHGLPSDKALVLEKTNNLSKKFKEMEDTIKEKKEAVTSCQEQLDAFQVLVKSLKSWIKETTKKVPIVQPSFGAEDLGKSLEDTKKLQEKWSLKTPEIQKVNNSGISLCNLISAVTTPAKAIAAVKSGGAVLNGEGTATNTEEFWANKGLTSIKKDMTDISHGYEDLGLLLKDKIAELNTKLSKLQKAQEESSAMMQWLQKMNKTATKWQQTPAPTDTEAVKTQVEQNKSFEAELKQNVNKVQELKDKLTELLEENPDTPEAPRWKQMLTEIDSKWQELNQLTIDRQQKLEESSNNLTQFQTVEAQLKQWLVEKELMVSVLGPLSIDPNMLNTQRQQVQILLQEFATRKPQYEQLTAAGQGILSRPGEDPSLRGIVKEQLAAVTQKWDSLTGQLSDRCDWIDQAIVKSTQYQSLLRSLSDKLSDLDNKLSSSLAVSTHPDAMNQQLETAQKMKQEIQQEKKQIKVAQALCEDLSALVKEEYLKAELSRQLEGILKSFKDVEQKAENHVQHLQSACASSHQFQQMSRDFQAWLDTKKEEQNKSHPISAKLDVLESLIKDHKDFSKTLTAQSHMYEKTIAEGENLLLKTQGSEKAALQLQLNTIKTNWDTFNKQVKERENKLKESLEKALKYKEQVETLWPWIDKCQNNLEEIKFCLDPAEGENSIAKLKSLQKEMDQHFGMVELLNNTANSLLSVCEIDKEVVTDENKSLIQKVDMVTEQLHSKKFCLENMTQKFKEFQEVSKESKRQLQCAKEQLDIHDSLGSQAYSNKYLTMLQTQQKSLQALKHQVDLAKRLAQDLVVEASDSKGTSDVLLQVETIAQEHSTLSQQVDEKCSFLETKLQGIGHFQNTIREMFSQFAEFDDELDSMAPVGRDAETLQKQKETIKAFLKKLEALMASNDNANKTCKMMLATEETSPDLVGIKRDLEALSKQCNKLLDRAQAREEQVEGTIKRLEEFYSKLKEFSILLQKAEEHEESQGPVGMETETINQQLNMFKVFQKEEIEPLQGKQQDVNWLGQGLIQSAAKSTSTQGLEHDLDDVNARWKTLNKKVAQRAAQLQEALLHCGRFQDALESLLSWMVDTEELVANQKPPSAEFKVVKAQIQEQKLLQRLLDDRKSTVEVIKREGEKIATTAEPADKVKILKQLSLLDSRWEALLNKAETRNRQLEGISVVAQQFHETLEPLNEWLTTIEKRLVNCEPIGTQASKLEEQIAQHKALEDDIINHNKHLHQAVSIGQSLKVLSSREDKDMVQSKLDFSQVWYIEIQEKSHSRSELLQQALCNAKIFGEDEVELMNWLNEVHDKLSKLSVQDYSTEGLWKQQSELRVLQEDILLRKQNVDQALLNGLELLKQTTGDEVLIIQDKLEAIKARYKDITKLSTDVAKTLEQALQLARRLHSTHEELCTWLDKVEVELLSYETQVLKGEEASQAQMRPKELKKEAKNNKALLDSLNEVSSALLELVPWRAREGLEKMVAEDNERYRLVSDTITQKVEEIDAAILRSQQFDQAADAELSWITETEKKLMSLGDIRLEQDQTSAQLQVQKTFTMEILRHKDIIDDLVKSGHKIMTACSEEEKQSMKKKLDKVLKNYDTICQINSERYLQLERAQSLVNQFWETYEELWPWLTETQSIISQLPAPALEYETLRQQQEEHRQLRELIAEHKPHIDKMNKTGPQLLELSPGEGFSIQEKYVAADTLYSQIKEDVKKRAVALDEAISQSTQFHDKIDQILESLERIVERLRQPPSISAEVEKIKEQISENKNVSVDMEKLQPLYETLKQRGEEMIARSGGTDKDISAKAVQDKLDQMVFIWENIHTLVEEREAKLLDVMELAEKFWCDHMSLIVTIKDTQDFIRDLEDPGIDPSVVKQQQEAAETIREEIDGLQEELDIVINLGSELIAACGEPDKPIVKKSIDELNSAWDSLNKAWKDRIDKLEEAMQAAVQYQDGLQAVFDWVDIAGGKLASMSPIGTDLETVKQQIEELKQFKSEAYQQQIEMERLNHQAELLLKKVTEESDKHTVQDPLMELKLIWDSLEERIINRQHKLEGALLALGQFQHALDELLAWLTHTEGLLSEQKPVGGDPKAIEIELAKHHVLQNDVLAHQSTVEAVNKAGNDLIESSAGEEASNLQNKLEVLNQRWQNVLEKTEQRKQQLDGALRQAKGFHGEIEDLQQWLTDTERHLLASKPLGGLPETAKEQLNVHMEVCAAFEAKEETYKSLMQKGQQMLARCPKSAETNIDQDINNLKEKWESVETKLNERKTKLEEALNLAMEFHNSLQDFINWLTQAEQTLNVASRPSLILDTVLFQIDEHKVFANEVNSHREQIIELDKTGTHLKYFSQKQDVVLIKNLLISVQSRWEKVVQRLVERGRSLDDARKRAKQFHEAWSKLMEWLEESEKSLDSELEIANDPDKIKTQLAQHKEFQKSLGAKHSVYDTTNRTGRSLKEKTSLADDNLKLDDMLSELRDKWDTICGKSVERQNKLEEALLFSGQFTDALQALIDWLYRVEPQLAEDQPVHGDIDLVMNLIDNHKAFQKELGKRTSSVQALKRSARELIEGSRDDSSWVKVQMQELSTRWETVCALSISKQTRLEAALRQAEEFHSVVHALLEWLAEAEQTLRFHGVLPDDEDALRTLIDQHKEFMKKLEEKRAELNKATTMGDTVLAICHPDSITTIKHWITIIRARFEEVLAWAKQHQQRLASALAGLIAKQELLEALLAWLQWAETTLTDKDKEVIPQEIEEVKALIAEHQTFMEEMTRKQPDVDKVTKTYKRRAADPSSLQSHIPVLDKGRAGRKRFPASSLYPSGSQTQIETKNPRVNLLVSKWQQVWLLALERRRKLNDALDRLEELREFANFDFDIWRKKYMRWMNHKKSRVMDFFRRIDKDQDGKITRQEFIDGILSSKFPTSRLEMSAVADIFDRDGDGYIDYYEFVAALHPNKDAYKPITDADKIEDEVTRQVAKCKCAKRFQVEQIGDNKYRFFLGNQFGDSQQLRLVRILRSTVMVRVGGGWMALDEFLVKNDPCRAKGRTNMELREKFILADGASQGMAAFRPRGRRSRPSSRGASPNRSTSVSSQAAQAASPQVPATTTPKILHPLTRNYGKPWLTNSKMSTPCKAAECSDFPVPSAEGTPIQGSKLRLPGYLSGKGFHSGEDSGLITTAAARVRTQFADSKKTPSRPGSRAGSKAGSRASSRRGSDASDFDISEIQSVCSDVETVPQTHRPTPRAGSRPSTAKPSKIPTPQRKSPASKLDKSSKR

SEQ ID NO: 26256 - protein, 3060 aa, Homo sapiens
  Payload ID: 5186
  Gene Symbol: DST
  Gene Name: dystonin
  Uniprot ID: Q03001
  ENSP ID: ENSP00000404924
MHSSSYSYRSSDSVFSNTTSTRTSLDSNENLLLVHCGPTLINSCISFGSESFDGHRLEMLQQIANRVQRDSVICEDKLILAGNALQSDSKRLESGVQFQNEAEIAGYILECENLLRQHVIDVQILIDGKYYQADQLVQRVAKLRDEIMALRNECSSVYSKGRILTTEQTKLMISGITQSLNSGFAQTLHPSLTSGLTQSLTPSLTSSSMTSGLSSGMTSRLTPSVTPAYTPGFPSGLVPNFSSGVEPNSLQTLKLMQIRKPLLKSSLLDQNLTEEEINMKFVQDLLNWVDEMQVQLDRTEWGSDLPSVESHLENHKNVHRAIEEFESSLKEAKISEIQMTAPLKLTYAEKLHRLESQYAKLLNTSRNQERHLDTLHNFVSRATNELIWLNEKEEEEVAYDWSERNTNIARKKDYHAELMRELDQKEENIKSVQEIAEQLLLENHPARLTIEAYRAAMQTQWSWILQLCQCVEQHIKENTAYFEFFNDAKEATDYLRNLKDAIQRKYSCDRSSSIHKLEDLVQESMEEKEELLQYKSTIANLMGKAKTIIQLKPRNSDCPLKTSIPIKAICDYRQIEITIYKDDECVLANNSHRAKWKVISPTGNEAMVPSVCFTVPPPNKEAVDLANRIEQQYQNVLTLWHESHINMKSVVSWHYLINEIDRIRASNVASIKTMLPGEHQQVLSNLQSRFEDFLEDSQESQVFSGSDITQLEKEVNVCKQYYQELLKSAEREEQEESVYNLYISEVRNIRLRLENCEDRLIRQIRTPLERDDLHESVFRITEQEKLKKELERLKDDLGTITNKCEEFFSQAAASSSVPTLRSELNVVLQNMNQVYSMSSTYIDKLKTVNLVLKNTQAAEALVKLYETKLCEEEAVIADKNNIENLISTLKQWRSEVDEKRQVFHALEDELQKAKAISDEMFKTYKERDLDFDWHKEKADQLVERWQNVHVQIDNRLRDLEGIGKSLKYYRDTYHPLDDWIQQVETTQRKIQENQPENSKTLATQLNQQKMLVSEIEMKQSKMDECQKYAEQYSATVKDYELQTMTYRAMVDSQQKSPVKRRRMQSSADLIIQEFMDLRTRYTALVTLMTQYIKFAGDSLKRLEEEEKSLEEEKKEHVEKAKELQKWVSNISKTLKDAEKAGKPPFSKQKISSEEISTKKEQLSEALQTIQLFLAKHGDKMTDEERNELEKQVKTLQESYNLLFSESLKQLQESQTSGDVKVEEKLDKVIAGTIDQTTGEVLSVFQAVLRGLIDYDTGIRLLETQLMISGLISPELRKCFDLKDAKSHGLIDEQILCQLKELSKAKEIISAASPTTIPVLDALAQSMITESMAIKVLEILLSTGSLVIPATGEQLTLQKAFQQNLVSSALFSKVLERQNMCKDLIDPCTSEKVSLIDMVQRSTLQENTGMWLLPVRPQEGGRITLKCGRNISILRAAHEGLIDRETMFRLLSAQLLSGGLINSNSGQRMTVEEAVREGVIDRDTASSILTYQVQTGGIIQSNPAKRLTVDEAVQCDLITSSSALLVLEAQRGYVGLIWPHSGEIFPTSSSLQQELITNELAYKILNGRQKIAALYIPESSQVIGLDAAKQLGIIDNNTASILKNITLPDKMPDLGDLEACKNARRWLSFCKFQPSTVHDYRQEEDVFDGEEPVTTQTSEETKKLFLSYLMINSYMDANTGQRLLLYDGDLDEAVGMLLEGCHAEFDGNTAIKECLDVLSSSGVFLNNASGREKDECTATPSSFNKCHCGEPEHEETPENRKCAIDEEFNEMRNTVINSEFSQSGKLASTISIDPKVNSSPSVCVPSLISYLTQTELADISMLRSDSENILTNYENQSRVETNERANECSHSKNIQNFPSDLIENPIMKSKMSKFCGVNETENEDNTNRDSPIFDYSPRLSALLSHDKLMHSQGSFNDTHTPESNGNKCEAPALSFSDKTMLSGQRIGEKFQDQFLGIAAINISLPGEQYGQKSLNMISSNPQVQYHNDKYISNTSGEDEKTHPGFQQMPEDKEDESEIEEYSCAVTPGGDTDNAIVSLTCATPLLDETISASDYETSLLNDQQNNTGTDTDSDDDFYDTPLFEDDDHDSLLLDGDDRDCLHPEDYDTLQEENDETASPADVFYDVSKENENSMVPQGAPVGSLSVKNKAHCLQDFLMDVEKDELDSGEKIHLNPVGSDKVNGQSLETGSERECTNILEGDESDSLTDYDIVGGKESFTASLKFDDSGSWRGRKEEYVTGQEFHSDTDHLDSMQSEESYGDYIYDSNDQDDDDDDGIDEEGGGIRDENGKPRCQNVAEDMDIQLCASILNENSDENENINTMILLDKMHSCSSLEKQQRVNVVQLASPSENNLVTEKSNLPEYTTEIAGKSKENLLNHEMVLKDVLPPIIKDTESEKTFGPASISHDNNNISSTSELGTDLANTKVKLIQGSELPELTDSVKGKDEYFKNMTPKVDSSLDHIICTEPDLIGKPAEESHLSLIASVTDKDPQGNGSDLIKGRDGKSDILIEDETSIQKMYLGEGEVLVEGLVEEENRHLKLLPGKNTRDSFKLINSQFPFPQITNNEELNQKGSLKKATVTLKDEPNNLQIIVSKSPVQFENLEEIFDTSVSKEISDDITSDITSWEGNTHFEESFTDGPEKELDLFTYLKHCAKNIKAKDVAKPNEDVPSHVLITAPPMKEHLQLGVNNTKEKSTSTQKDSPLNDMIQSNDLCSKESISGGGTEISQFTPESIEATLSILSRKHVEDVGKNDFLQSERCANGLGNDNSSNTLNTDYSFLEINNKKERIEQQLPKEQALSPRSQEKEVQIPELSQVFVEDVKDILKSRLKEGHMNPQEVEEPSACADTKILIQNLIKRITTSQLVNEASTVPSDSQMSDSSGVSPMTNSSELKPESRDDPFCIGNLKSELLLNILKQDQHSQKITGVFELMRELTHMEYDLEKRGITSKVLPLQLENIFYKLLADGYSEKIEHVGDFNQKACSTSEMMEEKPHILGDIKSKEGNYYSPNLETVKEIGLESSTVWASTLPRDEKLKDLCNDFPSHLECTSGSKEMASGDSSTEQ

SEQ ID NO: 26257 - protein, 177 aa, Homo sapiens
  Payload ID: 5186
  Gene Symbol: DST
  Gene Name: dystonin
  ENSP ID: ENSP00000428068
  MOD_RES (1)..(1): Any amino acid
XQLNQQKMLVSEIEMKQSKMDECQKYAEQYSATVKDYELQTMTYRAMVDSQQKSPVKRRRMQSSADLIIQEFMDLRTRYTALVTLMTQYIKFAGDSLKRLEEEEIAKNKQYDMHTEVTTLKQEKNPVPSAEEWMLEGCRASGGLKKGDFLKKGLEPETFQNFDGDHACSVRDDEFKF

SEQ ID NO: 26258 - protein, 133 aa, Homo sapiens
  Payload ID: 5186
  Gene Symbol: DST
  Gene Name: dystonin
  ENSP ID: ENSP00000429075
MKVRKHVNDLYEDLRDGHNLISLLEVLSGDTLPREKGRMRFHRLQNVQIALDYLKRRQVKLVNIRNDDITDGNPKLTLGLIWTIILHFQISDIHVTGESEDMSAKERLLLWTQQATEGYAGIRCENFTTCWRD

SEQ ID NO: 26259 - protein, 154 aa, Homo sapiens
  Payload ID: 5186
  Gene Symbol: DST
  Gene Name: dystonin
  ENSP ID: ENSP00000429221
MMGQLMKNDQDWNAKLVGLMCCMDERDKVQKKTFTKWINQHLMKVRKHVNDLYEDLRDGHNLISLLEVLSGDTLPREKGRMRFHRLQNVQIALDYLKRRQVKLVNIRNDDITDGNPKLTLGLIWTIILHFQISDIHVTGESEDMSAKERLLLWT

SEQ ID NO: 26260 - protein, 123 aa, Homo sapiens
  Payload ID: 5186
  Gene Symbol: DST
  Gene Name: dystonin
  ENSP ID: ENSP00000430472
EMTRKQPDVDKVTKTYKRRAADPSSLQSHIPVLDKGRAGRKRFPASSLYPSGSQTQIETKNPRVNLLVSKWQQVWLLALERRRKLNDALDRLEEVWKFIPSTPHCHLPSFLITHCHCQNLGIF

SEQ ID NO: 26261 - protein, 1143 aa, Homo sapiens
  Payload ID: 5186
  Gene Symbol: DST
  Gene Name: dystonin
  ENSP ID: ENSP00000431003
MHSSSYSYRSSDSVFSNTTSTRTSLDSNENLLLVHCGPTLINSCISFGSESFDGHRLEMLQQIANRVQRDSVICEDKLILAGNALQSDSKRLESGVQFQNEAEIAGYILECENLLRQHVIDVQILIDGKYYQADQLVQRVAKLRDEIMALRNECSSVYSKGRILTTEQTKLMISGITQSLNSGFAQTLHPSLTSGLTQSLTPSLTSSSMTSGLSSGMTSRLTPSVTPAYTPGFPSGLVPNFSSGVEPNSLQTLKLMQIRKPLLKSSLLDQNLTEEEINMKFVQDLLNWVDEMQVQLDRTEWGSDLPSVESHLENHKNVHRAIEEFESSLKEAKISEIQMTAPLKLTYAEKLHRLESQYAKLLNTSRNQERHLDTLHNFVSRATNELIWLNEKEEEEVAYDWSERNTNIARKKDYHAELMRELDQKEENIKSVQEIAEQLLLENHPARLTIEAYRAAMQTQWSWILQLCQCVEQHIKENTAYFEFFNDAKEATDYLRNLKDAIQRKYSCDRSSSIHKLEDLVQESMEEKEELLQYKSTIANLMGKAKTIIQLKPRNSDCPLKTSIPIKAICDYRQIEITIYKDDECVLANNSHRAKWKVISPTGNEAMVPSVCFTVPPPNKEAVDLANRIEQQYQNVLTLWHESHINMKSVVSWHYLINEIDRIRASNVASIKTMLPGEHQQVLSNLQSRFEDFLEDSQESQVFSGSDITQLEKEVNVCKQYYQELLKSAEREEQEESVYNLYISEVRNIRLRLENCEDRLIRQIRTPLERDDLHESVFRITEQEKLKKELERLKDDLGTITNKCEEFFSQAAASSSVPTLRSELNVVLQNMNQVYSMSSTYIDKLKTVNLVLKNTQAAEALVKLYETKLCEEEAVIADKNNIENLISTLKQWRSEVDEKRQVFHALEDELQKAKAISDEMFKTYKERDLDFDWHKEKADQLVERWQNVHVQIDNRLRDLEGIGKSLKYYRDTYHPLDDWIQQVETTQRKIQENQPENSKTLATQLNQQKMLVSEIEMKQSKMDECQKYAEQYSATVKDYELQTMTYRAMVDSQQKSPVKRRRMQSSADLIIQEFMDLRTRYTALVTLMTQYIKFAGDSLKRLEEEEVIINSEHPVNIKELEMSSNYSVVWESKTCFMINLCGR

SEQ ID NO: 26262 - protein, 259 aa, Homo sapiens
  Payload ID: 5186
  Gene Symbol: DST
  Gene Name: dystonin
  ENSP ID: ENSP00000431020
  MOD_RES (1)..(1): Any amino acid
XTRQVAKCKCAKRFQVEQIGDNKYRFGDSQQLRLVRILRSTVMVRVGGGWMALDEFLVKNDPCRAKGRTNMELREKFILADGASQGMAAFRPRGRRSRPSSRGASPNRSTSVSSQAAQAASPQVPATTTPKGTPIQGSKLRLPGYLSGKGFHSGEDSGLITTAAARVRTQFADSKKTPSRPGSRAGSKAGSRASSRRGSDASDFDISEIQSVCSDVETVPQTHRPTPRAGSRPSTAKPSKIPTPQRKSPASKLDKSSKR

SEQ ID NO: 26263 - protein, 1479 aa, Homo sapiens
  Payload ID: 5186
  Gene Symbol: DST
  Gene Name: dystonin
  ENSP ID: ENSP00000431030
MSSGNASYRCSMSSSADFSDEDDFSQKSGSASPAPGDTLPWNLPKHERSKRKIQGGSVLDPAERAVLRIADERDKVQKKTFTKWINQHLMKVRKHVNDLYEDLRDGHNLISLLEVLSGDTLPREKGRMRFHRLQNVQIALDYLKRRQVKLVNIRNDDITDGNPKLTLGLIWTIILHFQISDIHVTGESEDMSAKERLLLWTQQATEGYAGIRCENFTTCWRDGKLFNAIIHKYRPDLIDMNTVAVQSNLANLEHAFYVAEKIGVIRLLDPEDVDVSSPDEKSVITYVSSLYDAFPKVPEGGEGIGANDVEVKWIEYQNMVNYLIQWIRHHVTTMSERTFPNNPVELKALYNQYLQFKETEIPPKETEKSKIKRLYKLLEIWIEFGRIKLLQGYHPNDIEKEWGKLIIAMLEREKALRPEVERLEMLQQIANRVQRDSVICEDKLILAGNALQSDSKRLESGVQFQNEAEIAGYILECENLLRQHVIDVQILIDGKYYQADQLVQRVAKLRDEIMALRNECSSVYSKGRILTTEQTKLMISGITQSLNSGFAQTLHPSLTSGLTQSLTPSLTSSSMTSGLSSGMTSRLTPSVTPAYTPGFPSGLVPNFSSGVEPNSLQTLKLMQIRKPLLKSSLLDQNLTEEEINMKFVQDLLNWVDEMQVQLDRTEWGSDLPSVESHLENHKNVHRAIEEFESSLKEAKISEIQMTAPLKLTYAEKLHRLESQYAKLLNTSRNQERHLDTLHNFVSRATNELIWLNEKEEEEVAYDWSERNTNIARKKDYHAELMRELDQKEENIKSVQEIAEQLLLENHPARLTIEAYRAAMQTQWSWILQLCQCVEQHIKENTAYFEFFNDAKEATDYLRNLKDAIQRKYSCDRSSSIHKLEDLVQESMEEKEELLQYKSTIANLMGKAKTIIQLKPRNSDCPLKTSIPIKAICDYRQIEITIYKDDECVLANNSHRAKWKVISPTGNEAMVPSVCFTVPPPNKEAVDLANRIEQQYQNVLTLWHESHINMKSVVSWHYLINEIDRIRASNVASIKTMLPGEHQQVLSNLQSRFEDFLEDSQESQVFSGSDITQLEKEVNVCKQYYQELLKSAEREEQEESVYNLYISEVRNIRLRLENCEDRLIRQIRTPLERDDLHESVFRITEQEKLKKELERLKDDLGTITNKCEEFFSQAAASSSVPTLRSELNVVLQNMNQVYSMSSTYIDKLKTVNLVLKNTQAAEALVKLYETKLCEEEAVIADKNNIENLISTLKQWRSEVDEKRQVFHALEDELQKAKAISDEMFKTYKERDLDFDWHKEKADQLVERWQNVHVQIDNRLRDLEGIGKSLKYYRDTYHPLDDWIQQVETTQRKIQENQPENSKTLATQLNQQKMLVSEIEMKQSKMDECQKYAEQYSATVKDYELQTMTYRAMVDSQQKSPVKRRRMQSSADLIIQEFMDLRTRYTALVTLMTQYIKFAGDSLKRLEEEEKSLEEEK

SEQ ID NO: 26264 - protein, 448 aa, Homo sapiens
  Payload ID: 5186
  Gene Symbol: DST
  Gene Name: dystonin
  ENSP ID: ENSP00000431121
  MOD_RES (1)..(1): Any amino acid
XVVTTAIKEETEKVAAVKQLEESKTKIENLLDWLSNVDKDSERAGTKHKQVIEQNGTHFQEGDGKSAIGEEDEVNGNLLETDVDGQVGTTQENLNQQYQKVKAQHEKIISQHQAVIIATQSAQVLLEKQGQYLSPEEKEKLQKNMKELKVHYETALAESEKKMKLTHSLQEELEKFDADYTEFEHWLQQSEQELENLEAGADDINGLMTKLKRQKSFSEDVISHKGDLRYITISGNRVLEAAKSCSKRDGGKVDTSATHREVQRKLDHATDRFRSLYSKCNVLGNNLKDLVDKYQHYEDASCGLLAGLQACEATASKHLSEPIAVDPKNLQRQLEETKALQGQISSQQVAVEKLKKTAEVLLDARGSLLPAKNDIQKTLDDIVGRYEDLSKSVNERNEKLQITLTRSLSVQDGLDEMLDWMGNVESSLKEQDVGTGYCRSSEQYKCHE

SEQ ID NO: 26265 - protein, 304 aa, Homo sapiens
  Payload ID: 5186
  Gene Symbol: DST
  Gene Name: dystonin
  ENSP ID: ENSP00000488192
MGNVCGCVRAEKEEQYVDPAKTPLNPEKYSPGRKYFRRKPIKKTGGDKESVGANNENEGKKKSSSQPSKEQPAPLSRGLVQQESVTLNSALGDGIQQKKTEVVADSVKQKLLPSAVSSWSDCVNTSPAKDSETEVKVSELDERISEKDSTPYCAKRKKHLDDVNTSEITFQEKTDVFSFRKAASLSSIPSGIERSLEKSGFPEDPPKSYSSIQEKQNTERFCPHATQHFQFKKKRCHSLYTSMSSVSKDTDGNEISDIHVTGESEDMSAKERLLLWTQQATEGYAGIRCENFTTCWRDGKLFNA

SEQ ID NO: 26266 - protein, 1674 aa, Homo sapiens
  Payload ID: 5186
  Gene Symbol: DST
  Gene Name: dystonin
  ENSP ID: ENSP00000489032
MGKPLSRPDCLRQNPPCVGKGEEEEDLNIEDCYVPQRSIYDTVRLNEQIDSGSKGSLSSRHFTDRTLPYSHRTLDVSSLCSNGALTSSSVFELRGREANKLDEKMIFDALKLNSDIIRTTGLPKAKSHAEKKEHRRSWRMFVPANFMDYANKSESSFVEPADMSDAVTKASKCRWGTNSLTSEEDDSGLCSPPAEREEKQGILTGDQSRIKSLSSTEDILVTDQYRPFFSVNSISEQKIPLLSCQSAHPDENFKMILHDVSPLEEAKHVNGQREIHDENCCLQNNLKESPVKCDPLIMPRNRENEHIFNLGEEDETYGPGESQITAQSRELLKDSPQDLDLSHTDLGESDVDCGSTSLVENVTLLTQYDSGECNIASKEEVEAPLSAQESEMLYKKFSLKFVSARKKAAPRKTGAQAGILDTVCNGFQLVQVFQKEEIEPLQGKQQDVNWLGQGLIQSAAKSTSTQGLEHDLDDVNARWKTLNKKVAQRAAQLQEALLHCGRFQDALESLLSWMVDTEELVANQKPPSAEFKVVKAQIQEQKLLQRLLDDRKSTVEVIKREGEKIATTAEPADKVKILKQLSLLDSRWEALLNKAETRNRQLEGISVVAQQFHETLEPLNEWLTTIEKRLVNCEPIGTQASKLEEQIAQHKALEDDIINHNKHLHQAVSIGQSLKVLSSREDKDMVQSKLDFSQVWYIEIQEKSHSRSELLQQALCNAKIFGEDEVELMNWLNEVHDKLSKLSVQDYSTEGLWKQQSELRVLQEDILLRKQNVDQALLNGLELLKQTTGDEVLIIQDKLEAIKARYKDITKLSTDVAKTLEQALQLARRLHSTHEELCTWLDKVEVELLSYETQVLKGEEASQAQMRPKELKKEAKNNKALLDSLNEVSSALLELVPWRAREGLEKMVAEDNERYRLVSDTITQKVEEIDAAILRSQQFDQAADAELSWITETEKKLMSLGDIRLEQDQTSAQLQVQKTFTMEILRHKDIIDDLVKSGHKIMTACSEEEKQSMKKKLDKVLKNYDTICQINSERYLQLERAQSLVNQFWETYEELWPWLTETQSIISQLPAPALEYETLRQQQEEHRQLRELIAEHKPHIDKMNKTGPQLLELSPGEGFSIQEKYVAADTLYSQIKEDVKKRAVALDEAISQSTQFHDKIDQILESLERIVERLRQPPSISAEVEKIKEQISENKNVSVDMEKLQPLYETLKQRGEEMIARSGGTDKDISAKAVQDKLDQMVFIWENIHTLVEEREAKLLDVMELAEKFWCDHMSLIVTIKDTQDFIRDLEDPGIDPSVVKQQQEAAETIREEIDGLQEELDIVINLGSELIAACGEPDKPIVKKSIDELNSAWDSLNKAWKDRIDKLEEAMQAAVQYQDGLQAVFDWVDIAGGKLASMSPIGTDLETVKQQIEELKQFKSEAYQQQIEMERLNHQAELLLKKVTEESDKHTVQDPLMELKLIWDSLEERIINRQHKLEGALLALGQFQHALDELLAWLTHTEGLLSEQKPVGGDPKAIEIELAKHHVLQNDVLAHQSTVEAVNKAGNDLIESSAGEEASNLQNKLEVLNQRWQNVLEKTEQRKQQLDGALRQAKGFHGEIEDLQQWLTDTERHLLASKPLGGLPETAKEQLNVHMEVCAAFEAKEETYKSLMQKGQQMLARCPKSAETNIDQD

SEQ ID NO: 26267 - protein, 6 aa, Homo sapiens
  Payload ID: 5186
  Gene Symbol: DST
  Gene Name: dystonin
  ENSP ID: ENSP00000489111
MVDTEE

SEQ ID NO: 26268 - protein, 351 aa, Homo sapiens
  Payload ID: 5187
  Gene Symbol: DTNBP1
  Gene Name: dystrobrevin binding protein 1
  Uniprot ID: Q96EV8
  ENSP ID: ENSP00000341680
MLETLRERLLSVQQDFTSGLKTLSDKSREAKVKSKPRTVPFLPKYSAGLELLSRYEDTWAALHRRAKDCASAGELVDSEVVMLSAHWEKKKTSLVELQEQLQQLPALIADLESMTANLTHLEASFEEVENNLLHLEDLCGQCELERCKHMQSQQLENYKKNKRKELETFKAELDAEHAQKVLEMEHTQQMKLKERQKFFEEAFQQDMEQYLSTGYLQIAERREPIGSMSSMEVNVDMLEQMDLMDISDQEALDVFLNSGGEENTVLSPALGPESSTCQNEITLQVPNPSELRAKPPSSSSTCTDSATRDISEGGESPVVQSDEEEVQVDTALATSHTDREATPDGGEDSDS

SEQ ID NO: 26269 - protein, 303 aa, Homo sapiens
  Payload ID: 5187
  Gene Symbol: DTNBP1
  Gene Name: dystrobrevin binding protein 1
  Uniprot ID: Q96EV8
  ENSP ID: ENSP00000344718
MLETLRERLLSVQQDFTSGLKTLSDKSREAKVKSKPRTVPFLPKYSAGLELLSRYEDTWAALHRRAKDCASAGELVDSEVVMLSAHWEKKKTSLVELQEQLQQLPALIADLESMTANLTHLEASFEEVENNLLHLEDLCGQCELERCKHMQSQQLENYKKNKRKELETFKAELDAEHAQKVLEMEHTQQMKLKERQKFFEEAFQQDMEQYLSTGYLQIAERREPIGSMSSMEVNVDMLEQMDLMDISDQEALDVFLNSGGEENTVLSPALGRVDKLALAEPGQYRCHSPPKVRRENHLPVTYA

SEQ ID NO: 26270 - protein, 334 aa, Homo sapiens
  Payload ID: 5187
  Gene Symbol: DTNBP1
  Gene Name: dystrobrevin binding protein 1
  ENSP ID: ENSP00000348183
MLETLRERLLSVQQDFTSGLKTLSDKSREAKVKSKPRYEDTWAALHRRAKDCASAGELVDSEVVMLSAHWEKKKTSLVELQEQLQQLPALIADLESMTANLTHLEASFEEVENNLLHLEDLCGQCELERCKHMQSQQLENYKKNKRKELETFKAELDAEHAQKVLEMEHTQQMKLKERQKFFEEAFQQDMEQYLSTGYLQIAERREPIGSMSSMEVNVDMLEQMDLMDISDQEALDVFLNSGGEENTVLSPALGPESSTCQNEITLQVPNPSELRAKPPSSSSTCTDSATRDISEGGESPVVQSDEEEVQVDTALATSHTDREATPDGGEDSDS

SEQ ID NO: 26271 - protein, 142 aa, Homo sapiens
  Payload ID: 5187
  Gene Symbol: DTNBP1
  Gene Name: dystrobrevin binding protein 1
  ENSP ID: ENSP00000421797
MEHTQQMKLKERQKFFEEAFQQDMEQYLSTGYLQIAERREPIGSMSSMEVNVDMLEQMDLMDISDQEALDVFLNSGGEENTVLSPALGPESSTCQNEITLQVPNPSELRAKPPSSSSTCTDSATRDISEGGESPVVQSDEEE

SEQ ID NO: 26272 - protein, 46 aa, Homo sapiens
  Payload ID: 5187
  Gene Symbol: DTNBP1
  Gene Name: dystrobrevin binding protein 1
  ENSP ID: ENSP00000424202
MLETLRERLLSVQQDFTSGSLSADKPLDCQCVPLACHLVEKQLISK

SEQ ID NO: 26273 - protein, 46 aa, Homo sapiens; identical to SEQ ID NO: 26272
  Payload ID: 5187
  Gene Symbol: DTNBP1
  Gene Name: dystrobrevin binding protein 1
  ENSP ID: ENSP00000424357

SEQ ID NO: 26274 - protein, 44 aa, Homo sapiens
  Payload ID: 5187
  Gene Symbol: DTNBP1
  Gene Name: dystrobrevin binding protein 1
  ENSP ID: ENSP00000424685
MLETLRERLLSVQQDFTSGLKTLSDKSREAKVKSKPSWLNQEQF

SEQ ID NO: 26275 - protein, 208 aa, Homo sapiens
  Payload ID: 5187
  Gene Symbol: DTNBP1
  Gene Name: dystrobrevin binding protein 1
  ENSP ID: ENSP00000425495
MLETLRERLLSVQQDFTSGLKTLSDKSREAKVKSKPRYEDTWAALHRRAKDCASAGELVDSEVVMLSAHWEKKKTSLVELQEQLQQLPALIADLESMTANLTHLEASFEEVENNLLHLEDLCGQCELERCKHMQSQQLENYKKNKRKELETFKAELDAEHAQKVLEMEHTQQMKLKERQKFFEEAFQQDMEQYLSTGYLQIAERRGDP

SEQ ID NO: 26276 - protein, 195 aa, Homo sapiens
  Payload ID: 5187
  Gene Symbol: DTNBP1
  Gene Name: dystrobrevin binding protein 1
  ENSP ID: ENSP00000427239
MSSPGLTENSQRDPSELDAEHAQKVLEMEHTQQMKLKERQKFFEEAFQQDMEQYLSTGYLQIAERREPIGSMSSMEVNVDMLEQMDLMDISDQEALDVFLNSGGEENTVLSPALGPESSTCQNEITLQVPNPSELRAKPPSSSSTCTDSATRDISEGGESPVVQSDEEEVQVDTALATSHTDREATPDGGEDSDS

SEQ ID NO: 26277 - protein, 230 aa, Homo sapiens
  Payload ID: 5187
  Gene Symbol: DTNBP1
  Gene Name: dystrobrevin binding protein 1
  ENSP ID: ENSP00000427473
MLETLRERLLSVQQDFTSGYEDTWAALHRRAKDCASAGELVDSEVVMLSAHWEKKKTSLVELQEQLQQLPALIADLESMTANLTHLEASFEEVENNLLHLEDLCGQCELERCKHMQSQQLENYKKNKRKELETFKAELDAEHAQKVLEMEHTQQMKLKERQKFFEEAFQQDMEQYLSTGYLQIAERREPIGSMSSMEVNVDMLEQMDLMDISDQEALDVFLNSGGEENTV

SEQ ID NO: 26278 - protein, 316 aa, Homo sapiens
  Payload ID: 5187
  Gene Symbol: DTNBP1
  Gene Name: dystrobrevin binding protein 1
  ENSP ID: ENSP00000481997
MLETLRERLLSVQQDFTSGYEDTWAALHRRAKDCASAGELVDSEVVMLSAHWEKKKTSLVELQEQLQQLPALIADLESMTANLTHLEASFEEVENNLLHLEDLCGQCELERCKHMQSQQLENYKKNKRKELETFKAELDAEHAQKVLEMEHTQQMKLKERQKFFEEAFQQDMEQYLSTGYLQIAERREPIGSMSSMEVNVDMLEQMDLMDISDQEALDVFLNSGGEENTVLSPALGPESSTCQNEITLQVPNPSELRAKPPSSSSTCTDSATRDISEGGESPVVQSDEEEVQVDTALATSHTDREATPDGGEDSDS

SEQ ID NO: 26279 - protein, 452 aa, Homo sapiens
  Payload ID: 5188
  Gene Symbol: DTNA
  Gene Name: dystrobrevin, alpha
  Uniprot ID: Q9Y4J8
  ENSP ID: ENSP00000269192
MFPDQPEKPLNLAHIVPPRPVTSMNDTLFSHSVPSSGSPFITRRLPEGISASSPVAEEHSLIKLYVNQLDHGARSPPKDSEVEQNKLLARAAPAFLKGKGIQYSLNVADRLADEHVLIGLYVNMLRNNPSCMLESSNRLDEEHRLIARYAARLAAESSSSQPPQQRSAPDISFTIDANKQQRQLIAELENKNREILQEIQRLRLEHEQASQPTPEKAQQNPTLLAELRLLRQRKDELEQRMSALQESRRELMVQLEGLMKLLKTQGAGSPRSSPSHTISRPIPMPIRSASACSTPTHTPQDSLTGVGGDVQEAFAQSSRRNLRNDLLVAADSITNTMSSLVKELNSEVGSETESNVDSEFARTQFEDLVPSPTSEKAFLAQIHARKPGYIHSGATTSTMRGDMVTEDADPYVQPEDENYENDSVRQLENELQMEEYLKQKLQDEAYQVSLQG

SEQ ID NO: 26280 - protein, 686 aa, Homo sapiens
  Payload ID: 5188
  Gene Symbol: DTNA
  Gene Name: dystrobrevin, alpha
  Uniprot ID: Q9Y4J8
  ENSP ID: ENSP00000283365
MIEDSGKRGNTMAERRQLFAEMRAQDLDRIRLSTYRTACKLRFVQKKCNLHLVDIWNVIEALRENALNNLDPNTELNVSRLEAVLSTIFYQLNKRMPTTHQIHVEQSISLLLNFLLAAFDPEGHGKISVFAVKMALATLCGGKIMDKLRYIFSMISDSSGVMVYGRYDQFLREVLKLPTAVFEGPSFGYTEQSARSCFSQQKKVTLNGFLDTLMSDPPPQCLVWLPLLHRLANVENVFHPVECSYCHSESMMGFRYRCQQCHNYQLCQDCFWRGHAGGSHSNQHQMKEYTSWKSPAKKLTNALSKSLSCASSREPLHPMFPDQPEKPLNLAHIVDTWPPRPVTSMNDTLFSHSVPSSGSPFITRSMLESSNRLDEEHRLIARYAARLAAESSSSQPPQQRSAPDISFTIDANKQQRQLIAELENKNREILQEIQRLRLEHEQASQPTPEKAQQNPTLLAELRLLRQRKDELEQRMSALQESRRELMVQLEGLMKLLKTQGAGSPRSSPSHTISRPIPMPIRSASACSTPTHTPQDSLTGVGGDVQEAFAQSSRRNLRNDLLVAADSITNTMSSLVKELNSEVGSETESNVDSEFARTQFEDLVPSPTSEKAFLAQIHARKPGYIHSGATTSTMRGDMVTEDADPYVQPEDENYENDSVRQLENELQMEEYLKQKLQDEAYQVSLQG

SEQ ID NO: 26281 - protein, 374 aa, Homo sapiens
  Payload ID: 5188
  Gene Symbol: DTNA
  Gene Name: dystrobrevin, alpha
  Uniprot ID: Q9Y4J8
  ENSP ID: ENSP00000322519
MIEDSGKRGNTMAERRQLFAEMRAQDLDRIRLSTYRTACKLRFVQKKCNLHLVDIWNVIEALRENALNNLDPNTELNVSRLEAVLSTIFYQLNKRMPTTHQIHVEQSISLLLNFLLAAFDPEGHGKISVFAVKMALATLCGGKIMDKLRYIFSMISDSSGVMVYGRYDQFLREVLKLPTAVFEGPSFGYTEQSARSCFSQQKKVTLNGFLDTLMSDPPPQCLVWLPLLHRLANVENVFHPVECSYCHSESMMGFRYRCQQCHNYQLCQDCFWRGHAGGSHSNQHQMKEYTSWKSPAKKLTNALSKSLSCASSREPLHPMFPDQPEKPLNLAHIVDTWPPRPVTSMNDTLFSHSVPSSGSPFITRSSDGAFGGCV

SEQ ID NO: 26282 - protein, 567 aa, Homo sapiens
  Payload ID: 5188
  Gene Symbol: DTNA
  Gene Name: dystrobrevin, alpha
  Uniprot ID: Q9Y4J8
  ENSP ID: ENSP00000336682
MIEDSGKRGNTMAERRQLFAEMRAQDLDRIRLSTYRTACKLRFVQKKCNLHLVDIWNVIEALRENALNNLDPNTELNVSRLEAVLSTIFYQLNKRMPTTHQIHVEQSISLLLNFLLAAFDPEGHGKISVFAVKMALATLCGGKIMDKLRYIFSMISDSSGVMVYGRYDQFLREVLKLPTAVFEGPSFGYTEQSARSCFSQQKKVTLNGFLDTLMSDPPPQCLVWLPLLHRLANVENVFHPVECSYCHSESMMGFRYRCQQCHNYQLCQDCFWRGHAGGSHSNQHQMKEYTSWKSPAKKLTNALSKSLSCASSREPLHPMFPDQPEKPLNLAHIVPPRPVTSMNDTLFSHSVPSSGSPFITRSSPPKDSEVEQNKLLARAAPAFLKGKGIQYSLNVADRLADEHVLIGLYVNMLRNNPSCMLESSNRLDEEHRLIARYAARLAAESSSSQPPQQRSAPDISFTIDANKQQRQLIAELENKNREILQEIQRLRLEHEQASQPTPEKAQQNPTLLAELRLLRQRKDELEQRMSALQESRRELMVQLEGLMKLLKEEELKQGVSYVPYCRS

SEQ ID NO: 26283 - protein, 743 aa, Homo sapiens
  Payload ID: 5188
  Gene Symbol: DTNA
  Gene Name: dystrobrevin, alpha
  Uniprot ID: Q9Y4J8
  ENSP ID: ENSP00000382064
MIEDSGKRGNTMAERRQLFAEMRAQDLDRIRLSTYRTACKLRFVQKKCNLHLVDIWNVIEALRENALNNLDPNTELNVSRLEAVLSTIFYQLNKRMPTTHQIHVEQSISLLLNFLLAAFDPEGHGKISVFAVKMALATLCGGKIMDKLRYIFSMISDSSGVMVYGRYDQFLREVLKLPTAVFEGPSFGYTEQSARSCFSQQKKVTLNGFLDTLMSDPPPQCLVWLPLLHRLANVENVFHPVECSYCHSESMMGFRYRCQQCHNYQLCQDCFWRGHAGGSHSNQHQMKEYTSWKSPAKKLTNALSKSLSCASSREPLHPMFPDQPEKPLNLAHIVDTWPPRPVTSMNDTLFSHSVPSSGSPFITRSSPPKDSEVEQNKLLARAAPAFLKGKGIQYSLNVADRLADEHVLIGLYVNMLRNNPSCMLESSNRLDEEHRLIARYAARLAAESSSSQPPQQRSAPDISFTIDANKQQRQLIAELENKNREILQEIQRLRLEHEQASQPTPEKAQQNPTLLAELRLLRQRKDELEQRMSALQESRRELMVQLEGLMKLLKTQGAGSPRSSPSHTISRPIPMPIRSASACSTPTHTPQDSLTGVGGDVQEAFAQSSRRNLRNDLLVAADSITNTMSSLVKELNSEVGSETESNVDSEFARTQFEDLVPSPTSEKAFLAQIHARKPGYIHSGATTSTMRGDMVTEDADPYVQPEDENYENDSVRQLENELQMEEYLKQKLQDEAYQVSLQG

SEQ ID NO: 26284 - protein, 690 aa, Homo sapiens
  Payload ID: 5188
  Gene Symbol: DTNA
  Gene Name: dystrobrevin, alpha
  Uniprot ID: Q9Y4J8
  ENSP ID: ENSP00000382072
MIEDSGKRGNTMAERRQLFAEMRAQDLDRIRLSTYRTACKLRFVQKKCNLHLVDIWNVIEALRENALNNLDPNTELNVSRLEAVLSTIFYQLNKRMPTTHQIHVEQSISLLLNFLLAAFDPEGHGKISVFAVKMALATLCGGKIMDKLRYIFSMISDSSGVMVYGRYDQFLREVLKLPTAVFEGPSFGYTEQSARSCFSQQKKVTLNGFLDTLMSDPPPQCLVWLPLLHRLANVENVFHPVECSYCHSESMMGFRYRCQQCHNYQLCQDCFWRGHAGGSHSNQHQMKEYTSWKSPAKKLTNALSKSLSCASSREPLHPMFPDQPEKPLNLAHIVPPRPVTSMNDTLFSHSVPSSGSPFITRSMLESSNRLDEEHRLIARYAARLAAESSSSQPPQQRSAPDISFTIDANKQQRQLIAELENKNREILQEIQRLRLEHEQASQPTPEKAQQNPTLLAELRLLRQRKDELEQRMSALQESRRELMVQLEGLMKLLKEEELKQGTQGAGSPRSSPSHTISRPIPMPIRSASACSTPTHTPQDSLTGVGGDVQEAFAQSSRRNLRNDLLVAADSITNTMSSLVKELNSEVGSETESNVDSEFARTQFEDLVPSPTSEKAFLAQIHARKPGYIHSGATTSTMRGDMVTEDADPYVQPEDENYENDSVRQLENELQMEEYLKQKLQDEAYQVSLQG

SEQ ID NO: 26285 - protein, 743 aa, Homo sapiens; identical to SEQ ID NO: 26283
  Payload ID: 5188
  Gene Symbol: DTNA
  Gene Name: dystrobrevin, alpha
  Uniprot ID: Q9Y4J8
  ENSP ID: ENSP00000405819

SEQ ID NO: 26286 - protein, 371 aa, Homo sapiens
  Payload ID: 5188
  Gene Symbol: DTNA
  Gene Name: dystrobrevin, alpha
  Uniprot ID: Q9Y4J8
  ENSP ID: ENSP00000451516
MIEDSGKRGNTMAERRQLFAEMRAQDLDRIRLSTYRTACKLRFVQKKCNLHLVDIWNVIEALRENALNNLDPNTELNVSRLEAVLSTIFYQLNKRMPTTHQIHVEQSISLLLNFLLAAFDPEGHGKISVFAVKMALATLCGGKIMDKLRYIFSMISDSSGVMVYGRYDQFLREVLKLPTAVFEGPSFGYTEQSARSCFSQQKKVTLNGFLDTLMSDPPPQCLVWLPLLHRLANVENVFHPVECSYCHSESMMGFRYRCQQCHNYQLCQDCFWRGHAGGSHSNQHQMKEYTSWKSPAKKLTNALSKSLSCASSREPLHPMFPDQPEKPLNLAHIVPPRPVTSMNDTLFSHSVPSSGSPFITRSSDGAFGGCV

SEQ ID NO: 26287 - protein, 395 aa, Homo sapiens
  Payload ID: 5188
  Gene Symbol: DTNA
  Gene Name: dystrobrevin, alpha
  Uniprot ID: Q9Y4J8
  ENSP ID: ENSP00000452255
MFPDQPEKPLNLAHIVPPRPVTSMNDTLFSHSVPSSGSPFITRRLPEGISASSPVAEEHSLIKLYVNQLDHGARMLESSNRLDEEHRLIARYAARLAAESSSSQPPQQRSAPDISFTIDANKQQRQLIAELENKNREILQEIQRLRLEHEQASQPTPEKAQQNPTLLAELRLLRQRKDELEQRMSALQESRRELMVQLEGLMKLLKTQGAGSPRSSPSHTISRPIPMPIRSASACSTPTHTPQDSLTGVGGDVQEAFAQSSRRNLRNDLLVAADSITNTMSSLVKELNSEVGSETESNVDSEFARTQFEDLVPSPTSEKAFLAQIHARKPGYIHSGATTSTMRGDMVTEDADPYVQPEDENYENDSVRQLENELQMEEYLKQKLQDEAYQVSLQG

SEQ ID NO: 26288 - protein, 18 aa, Homo sapiens
  Payload ID: 5188
  Gene Symbol: DTNA
  Gene Name: dystrobrevin, alpha
  ENSP ID: ENSP00000464904
MIEDSGKRGNTMAERRQL

SEQ ID NO: 26289 - protein, 119 aa, Homo sapiens
  Payload ID: 5188
  Gene Symbol: DTNA
  Gene Name: dystrobrevin, alpha
  ENSP ID: ENSP00000465063
MIEDSGKRGNTMAERRQLFAEMRAQDLDRIRLSTYRTACKLRFVQKKCNLHLVDIWNVIEALRENALNNLDPNTELNVSRLEAVLSTIFYQLNKRMPTTHQIHVEQSISLLLNFLLAAF

SEQ ID NO: 26290 - protein, 33 aa, Homo sapiens
  Payload ID: 5188
  Gene Symbol: DTNA
  Gene Name: dystrobrevin, alpha
  ENSP ID: ENSP00000466573
MAERRQLFAEMRAQDLDRIRLSTYRTACKLRFV

SEQ ID NO: 26291 - protein, 43 aa, Homo sapiens
  Payload ID: 5188
  Gene Symbol: DTNA
  Gene Name: dystrobrevin, alpha
  ENSP ID: ENSP00000466978
MIEDSGKRGNTMAERRQLFAEMRAQDLDRIRLSTYRTACKLRF

SEQ ID NO: 26292 - protein, 391 aa, Homo sapiens
  Payload ID: 5188
  Gene Symbol: DTNA
  Gene Name: dystrobrevin, alpha
  Uniprot ID: Q9Y4J8
  ENSP ID: ENSP00000467720
MFPDQPEKPLNLAHIVPPRPVTSMNDTLFSHSVPSSGSPFITRSSPPKDSEVEQNKLLARAAPAFLKGKGMLESSNRLDEEHRLIARYAARLAAESSSSQPPQQRSAPDISFTIDANKQQRQLIAELENKNREILQEIQRLRLEHEQASQPTPEKAQQNPTLLAELRLLRQRKDELEQRMSALQESRRELMVQLEGLMKLLKTQGAGSPRSSPSHTISRPIPMPIRSASACSTPTHTPQDSLTGVGGDVQEAFAQSSRRNLRNDLLVAADSITNTMSSLVKELNSEVGSETESNVDSEFARTQFEDLVPSPTSEKAFLAQIHARKPGYIHSGATTSTMRGDMVTEDADPYVQPEDENYENDSVRQLENELQMEEYLKQKLQDEAYQVSLQG

SEQ ID NO: 26293 - protein, 104 aa, Homo sapiens
  Payload ID: 5188
  Gene Symbol: DTNA
  Gene Name: dystrobrevin, alpha
  ENSP ID: ENSP00000468138
MMGFRYRCQQCHNYQLCQDCFWRGHAGGSHSNQHQMKEYTSWKSPAKKLTNALSKSLSCASSREPLHPMFPDQPEKPLNLAHIVPPRPVTSMNDTLFSHSVPSS

SEQ ID NO: 26294 - protein, 109 aa, Homo sapiens
  Payload ID: 5188
  Gene Symbol: DTNA
  Gene Name: dystrobrevin, alpha
  ENSP ID: ENSP00000468262
MNDTLFSHSVPSSGSPFITRSMLESSNRLDEEHRLIARYAARLAAESSSSQPPQQRSAPDISFTIDANKQQRQLIAELENKNREILQEIQRLRLEHEQASQPTPEKAQQ

SEQ ID NO: 26295 - protein, 133 aa, Homo sapiens
  Payload ID: 5188
  Gene Symbol: DTNA
  Gene Name: dystrobrevin, alpha
  ENSP ID: ENSP00000468473
MIEDSGKRGNTMAERRQLFAEMRAQDLDRIRLSTYRTACKLRFVQKKCNLHLVDIWNVIEALRENALNNLDPNTELNVSRLEAVLSTIFYQLNKRMPTTHQIHVEQSISLLLNFLLAAFDPEGHGKISVFAVK

SEQ ID NO: 26296 - protein, 101 aa, Homo sapiens
  Payload ID: 5188
  Gene Symbol: DTNA
  Gene Name: dystrobrevin, alpha
  ENSP ID: ENSP00000468631
MCGTVSSPGIVTFVQLQIQQSKEPRAQDLDRIRLSTYRTACKLRFVQKKCNLHLVDIWNVIEALRENALNNLDPNTELNVSRLEAVLSTIFYQLNKRMPTT

SEQ ID NO: 26297 - protein, 320 aa, Homo sapiens
  Payload ID: 5188
  Gene Symbol: DTNA
  Gene Name: dystrobrevin, alpha
  Uniprot ID: Q9Y4J8
  ENSP ID: ENSP00000469121
MIEDSGKRGNTMAERRQLFAEMRAQDLDRIRLSTYRTACKLRFVQKKCNLHLVDIWNVIEALRENALNNLDPNTELNVSRLEAVLSTIFYQLNKRMPTTHQIHVEQSISLLLNFLLAAFDPEGHGKISVFAVKMALATLCGGKIMDKLRYIFSMISDSSGVMVYGRYDQFLREVLKLPTAVFEGPSFGYTEQSARSCFSQQQPPQQRSAPDISFTIDANKQQRQLIAELENKNREILQEIQRLRLEHEQASQPTPEKAQQNPTLLAELRLLRQRKDELEQRMSALQESRRELMVQLEGLMKLLKEEELKQGVSYVPYCRS

SEQ ID NO: 26298 - protein, 724 aa, Homo sapiens
  Payload ID: 5188
  Gene Symbol: DTNA
  Gene Name: dystrobrevin, alpha
  Uniprot ID: Q9Y4J8
  ENSP ID: ENSP00000470152
MIEDSGKRGNTMAERRQLFAEMRAQDLDRIRLSTYRTACKLRFVQKKCNLHLVDIWNVIEALRENALNNLDPNTELNVSRLEAVLSTIFYQLNKRMPTTHQIHVEQSISLLLNFLLAAFDPEGHGKISVFAVKMALATLCGGKIMDKLRYIFSMISDSSGVMVYGRYDQFLREVLKLPTAVFEGPSFGYTEQSARSCFSQQKKVTLNGFLDTLMSDPPPQCLVWLPLLHRLANVENVFHPVECSYCHSESMMGFRYRCQQCHNYQLCQDCFWRGHAGGSHSNQHQMKEYTSWKSPAKKLTNALSKSLSCASSREPLHPMFPDQPEKPLNLAHIVPPRPVTSMNDTLFSHSVPSSGSPFITRSMLESSNRLDEEHRLIARYAARLAAESSSSQPPQQRSAPDISFTIDANKQQRQLIAELENKNREILQEIQRLRLEHEQASQPTPEKAQQNPTLLAELRLLRQRKDELEQRMSALQESRRELMVQLEGLMKLLKTQGAGSPRSSPSHTISRPIPMPIRSASACSTPTHTPQDSLTGVGGDVQEAFAQSSRRNLRNDLLVAADSITNTMSSLVKELNSEVGSETESNVDSEFARTQFEDLVPSPTSEKAFLAQIHARKPGYIHSGATTSTMRGDMVTEDADPYVQPEDENYENDSVRQLENELQMEEYLKQKLQDEAYQLHVSTETRLEHPCPVSETKWRVLFWGFVFFGGFLSLALQIYFWGLF

SEQ ID NO: 26299 - protein, 365 aa, Homo sapiens
  Payload ID: 5188
  Gene Symbol: DTNA
  Gene Name: dystrobrevin, alpha
  ENSP ID: ENSP00000470247
MFPDQPEKPLNLAHIVPPRPVTSMNDTLFSHSVPSSGSPFITRSMLESSNRLDEEHRLIARYAARLAAESSSSQPPQQRSAPDISFTIDANKQQRQLIAELENKNREILQEIQRLRLEHEQASQPTPEKAQQNPTLLAELRLLRQRKDELEQRMSALQESRRELMVQLEGLMKLLKTQGAGSPRSSPSHTISRPIPMPIRSASACSTPTHTPQDSLTGVGGDVQEAFAQSSRRNLRNDLLVAADSITNTMSSLVKELNSEVGSETESNVDSEFARTQFEDLVPSPTSEKAFLAQIHARKPGYIHSGATTSTMRGDMVTEDADPYVQPEDENYENDSVRQLENELQMEEYLKQKLQDEAYQVSLQG

SEQ ID NO: 26300 - protein, 686 aa, Homo sapiens; identical to SEQ ID NO: 26280
  Payload ID: 5188
  Gene Symbol: DTNA
  Gene Name: dystrobrevin, alpha
  Uniprot ID: Q9Y4J8
  ENSP ID: ENSP00000470716

SEQ ID NO: 26301 - protein, 162 aa, Homo sapiens
  Payload ID: 5188
  Gene Symbol: DTNA
  Gene Name: dystrobrevin, alpha
  ENSP ID: ENSP00000470934
MFPDQPEKPLNLAHIVPPRPVTSMNDTLFSHSVPSSGSPFITRSMLESSNRLDEEHRLIARYAARLAAESSSSQPPQQRSAPDISFTIDANKQQRQLIAELENKNREILQEIQRLRLEHEQASQPTPEKAQQNPTLLAELRLLSAKMSWNRECLLSRRAGES

SEQ ID NO: 26302 - protein, 169 aa, Homo sapiens
  Payload ID: 5188
  Gene Symbol: DTNA
  Gene Name: dystrobrevin, alpha
  ENSP ID: ENSP00000471143
MPIRSASACSTPTHTPQDSLTGVGGDVQEAFAQSSRRNLRNDLLVAADSITNTMSSLVKELNSEVGSETESNVDSEFARTQFEDLVPSPTSEKAFLAQIHARKPGYIHSGATTSTMRGDMVTEDADPYVQPEDENYENDSVRQLENELQMEEYLKQKLQDEAYQVSLQG

SEQ ID NO: 26303 - protein, 192 aa, Homo sapiens
  Payload ID: 5188
  Gene Symbol: DTNA
  Gene Name: dystrobrevin, alpha
  Uniprot ID: Q9Y4J8
  ENSP ID: ENSP00000471783
MFPDQPEKPLNLAHIVPPRPVTSMNDTLFSHSVPSSGSPFITRSMLESSNRLDEEHRLIARYAARLAAESSSSQPPQQRSAPDISFTIDANKQQRQLIAELENKNREILQEIQRLRLEHEQASQPTPEKAQQNPTLLAELRLLRQRKDELEQRMSALQESRRELMVQLEGLMKLLKEEELKQGVSYVPYCRS

SEQ ID NO: 26304 - protein, 513 aa, Homo sapiens
  Payload ID: 5188
  Gene Symbol: DTNA
  Gene Name: dystrobrevin, alpha
  Uniprot ID: Q9Y4J8
  ENSP ID: ENSP00000472031
MIEDSGKRGNTMAERRQLFAEMRAQDLDRIRLSTYRTACKLRFVQKKCNLHLVDIWNVIEALRENALNNLDPNTELNVSRLEAVLSTIFYQLNKRMPTTHQIHVEQSISLLLNFLLAAFDPEGHGKISVFAVKMALATLCGGKIMDKLRYIFSMISDSSGVMVYGRYDQFLREVLKLPTAVFEGPSFGYTEQSARSCFSQQKKVTLNGFLDTLMSDPPPQCLVWLPLLHRLANVENVFHPVECSYCHSESMMGFRYRCQQCHNYQLCQDCFWRGHAGGSHSNQHQMKEYTSWKSPAKKLTNALSKSLSCASSREPLHPMFPDQPEKPLNLAHIVDTWPPRPVTSMNDTLFSHSVPSSGSPFITRSMLESSNRLDEEHRLIARYAARLAAESSSSQPPQQRSAPDISFTIDANKQQRQLIAELENKNREILQEIQRLRLEHEQASQPTPEKAQQNPTLLAELRLLRQRKDELEQRMSALQESRRELMVQLEGLMKLLKEEELKQGVSYVPYCRS

SEQ ID NO: 26305 - protein, 683 aa, Homo sapiens
  Payload ID: 5188
  Gene Symbol: DTNA
  Gene Name: dystrobrevin, alpha
  Uniprot ID: Q9Y4J8
  ENSP ID: ENSP00000473078
MIEDSGKRGNTMAERRQLFAEMRAQDLDRIRLSTYRTACKLRFVQKKCNLHLVDIWNVIEALRENALNNLDPNTELNVSRLEAVLSTIFYQLNKRMPTTHQIHVEQSISLLLNFLLAAFDPEGHGKISVFAVKMALATLCGGKIMDKLRYIFSMISDSSGVMVYGRYDQFLREVLKLPTAVFEGPSFGYTEQSARSCFSQQKKVTLNGFLDTLMSDPPPQCLVWLPLLHRLANVENVFHPVECSYCHSESMMGFRYRCQQCHNYQLCQDCFWRGHAGGSHSNQHQMKEYTSWKSPAKKLTNALSKSLSCASSREPLHPMFPDQPEKPLNLAHIVPPRPVTSMNDTLFSHSVPSSGSPFITRSMLESSNRLDEEHRLIARYAARLAAESSSSQPPQQRSAPDISFTIDANKQQRQLIAELENKNREILQEIQRLRLEHEQASQPTPEKAQQNPTLLAELRLLRQRKDELEQRMSALQESRRELMVQLEGLMKLLKTQGAGSPRSSPSHTISRPIPMPIRSASACSTPTHTPQDSLTGVGGDVQEAFAQSSRRNLRNDLLVAADSITNTMSSLVKELNSEVGSETESNVDSEFARTQFEDLVPSPTSEKAFLAQIHARKPGYIHSGATTSTMRGDMVTEDADPYVQPEDENYENDSVRQLENELQMEEYLKQKLQDEAYQVSLQG

SEQ ID NO: 26306 - protein, 510 aa, Homo sapiens
  Payload ID: 5188
  Gene Symbol: DTNA
  Gene Name: dystrobrevin, alpha
  Uniprot ID: Q9Y4J8
  ENSP ID: ENSP00000473119
MIEDSGKRGNTMAERRQLFAEMRAQDLDRIRLSTYRTACKLRFVQKKCNLHLVDIWNVIEALRENALNNLDPNTELNVSRLEAVLSTIFYQLNKRMPTTHQIHVEQSISLLLNFLLAAFDPEGHGKISVFAVKMALATLCGGKIMDKLRYIFSMISDSSGVMVYGRYDQFLREVLKLPTAVFEGPSFGYTEQSARSCFSQQKKVTLNGFLDTLMSDPPPQCLVWLPLLHRLANVENVFHPVECSYCHSESMMGFRYRCQQCHNYQLCQDCFWRGHAGGSHSNQHQMKEYTSWKSPAKKLTNALSKSLSCASSREPLHPMFPDQPEKPLNLAHIVPPRPVTSMNDTLFSHSVPSSGSPFITRSMLESSNRLDEEHRLIARYAARLAAESSSSQPPQQRSAPDISFTIDANKQQRQLIAELENKNREILQEIQRLRLEHEQASQPTPEKAQQNPTLLAELRLLRQRKDELEQRMSALQESRRELMVQLEGLMKLLKEEELKQGVSYVPYCRS

SEQ ID NO: 26307 - protein, 620 aa, Homo sapiens
  Payload ID: 5189
  Gene Symbol: DTNB
  Gene Name: dystrobrevin, beta
  ENSP ID: ENSP00000288642
MIEESGNKRKTMAEKRQLFIEMRAQNFDVIRLSTYRTACKLRFVQKRCNLHLVDIWNMIEAFRDNGLNTLDHTTEISVSRLETVISSIYYQLNKRLPSTHQISVEQSISLLLNFMIAAYDSEGRGKLTVFSVKAMLATMCGGKMLDKLRYVFSQMSDSNGLMIFSKFDQFLKEVLKLPTAVFEGPSFGYTEHSVRTCFPQQRKIMLNMFLDTMMADPPPQCLVWLPLMHRLAHVENVFHPVECSYCRCESMMGFRYRCQQCHNYQLCQNCFWRGHAGGPHSNQHQMKEHSSWKSPAKKLSHAISKSLGCVPTREPPHPVFPEQPEKPLDLAHIVPPRPLTNMNDTMVSHMSSGVPTPTKRLQYSQDIPSHLADEHALIASYVARLQHCARVLDSPSRLDEEHRLIARYAARLAAEAGNVTRPPTDLSFNFDANKQQRQLIAELENKNREILQEIQRLRLEHEQASQPTPEKAQQNPTLLAELRLLRQRKDELEQRMSALQESRRELMVQLEELMKLLKAQATGSPHTSPTHGGGRPMPMPVRSTSAGSTPTHCPQDSLSGVGGDVQEAFAQGTRRNLRNDLLVAADSITNTMSSLVKELHSAEEGAEEEEEKMQNGKDRG

SEQ ID NO: 26308 - protein, 188 aa, Homo sapiens
  Payload ID: 5189
  Gene Symbol: DTNB
  Gene Name: dystrobrevin, beta
  ENSP ID: ENSP00000306529
MIEESGNKRKTMAEKRQLFIEMRAQNFDVIRLSTYRTACKLRFVQKRCNLHLVDIWNMIEAFRDNGLNTLDHTTEISVSRLETVISSIYYQLNKRLPSTHQISVEQSISLLLNFMIAAYDSEGRGKLTVFSVKAMLATMCGGKMLDKLRYVFSQMSDSNGLMIFSKFDQFLKEVLKLPTAVFEGPSFG

SEQ ID NO: 26309 - protein, 132 aa, Homo sapiens
  Payload ID: 5189
  Gene Symbol: DTNB
  Gene Name: dystrobrevin, beta
  ENSP ID: ENSP00000340957
MIEESGNKRKTMAEKRQLFIEMRAQNFDVIRLSTYRTACKLRFVQKRCNLHLVDIWNMIEAFRDNGLNTLDHTTEISVSRLETVISSIYYQLNKRLPSTHQISVEQSISLLLNFMIAAYDSEGRGKLTVFSV

SEQ ID NO: 26310 - protein, 63 aa, Homo sapiens
  Payload ID: 5189
  Gene Symbol: DTNB
  Gene Name: dystrobrevin, beta
  ENSP ID: ENSP00000349007
MIEESGNKRKTMAEKRQLFIEMRAQNFDVIRLSTYRTACKLRFVQKRCNQKDNAKYVFRHNDG

SEQ ID NO: 26311 - protein, 149 aa, Homo sapiens
  Payload ID: 5189
  Gene Symbol: DTNB
  Gene Name: dystrobrevin, beta
  ENSP ID: ENSP00000381924
MIEESGNKRKTMAEKRQLFIEMRAQNFDVIRLSTYRTACKLRFVQKRCNLHLVDIWNMIEAFRDNGLNTLDHTTEISVSRLETVISSIYYQLNKRLPSTHQISVEQSISLLLNFMIAAYDSEGRGKLTVFSVKAMLATMCGGKMLDKLR

SEQ ID NO: 26312 - protein, 627 aa, Homo sapiens
  Payload ID: 5189
  Gene Symbol: DTNB
  Gene Name: dystrobrevin, beta
  Uniprot ID: O60941
  ENSP ID: ENSP00000384084
MIEESGNKRKTMAEKRQLFIEMRAQNFDVIRLSTYRTACKLRFVQKRCNLHLVDIWNMIEAFRDNGLNTLDHTTEISVSRLETVISSIYYQLNKRLPSTHQISVEQSISLLLNFMIAAYDSEGRGKLTVFSVKAMLATMCGGKMLDKLRYVFSQMSDSNGLMIFSKFDQFLKEVLKLPTAVFEGPSFGYTEHSVRTCFPQQRKIMLNMFLDTMMADPPPQCLVWLPLMHRLAHVENVFHPVECSYCRCESMMGFRYRCQQCHNYQLCQNCFWRGHAGGPHSNQHQMKEHSSWKSPAKKLSHAISKSLGCVPTREPPHPVFPEQPEKPLDLAHIVPPRPLTNMNDTMVSHMSSGVPTPTKRLQYSQDIPSHLADEHALIASYVARLQHCARVLDSPSRLDEEHRLIARYAARLAAEAGNVTRPPTDLSFNFDANKQQRQLIAELENKNREILQEIQRLRLEHEQASQPTPEKAQQNPTLLAELRLLRQRKDELEQRMSALQESRRELMVQLEELMKLLKEEEQKQAAQATGSPHTSPTHGGGRPMPMPVRSTSAGSTPTHCPQDSLSGVGGDVQEAFAQGTRRNLRNDLLVAADSITNTMSSLVKELHSAEEGAEEEEEKMQNGKDRG

SEQ ID NO: 26313 - protein, 567 aa, Homo sapiens
  Payload ID: 5189
  Gene Symbol: DTNB
  Gene Name: dystrobrevin, beta
  Uniprot ID: O60941
  ENSP ID: ENSP00000384767
MIEESGNKRKTMAEKRQLFIEMRAQNFDVIRLSTYRTACKLRFVQKRCNLHLVDIWNMIEAFRDNGLNTLDHTTEISVSRLETVISSIYYQLNKRLPSTHQISVEQSISLLLNFMIAAYDSEGRGKLTVFSVKAMLATMCGGKMLDKLRYVFSQMSDSNGLMIFSKFDQFLKEVLKLPTAVFEGPSFGYTEHSVRTCFPQQRKIMLNMFLDTMMADPPPQCLVWLPLMHRLAHVENVFHPVECSYCRCESMMGFRYRCQQCHNYQLCQNCFWRGHAGGPHSNQHQMKEHSSWKSPAKKLSHAISKSLGCVPTREPPHPVFPEQPEKPLDLAHIVPPRPLTNMNDTMVSHMSSGVPTPTKSVLDSPSRLDEEHRLIARYAARLAAEAGNVTRPPTDLSFNFDANKQQRQLIAELENKNREILQEIQRLRLEHEQASQPTPEKAQQNPTLLAELRLLRQRKDELEQRMSALQESRRELMVQLEELMKLLKEEEQKQAAQATGSPHTSPTHGGGRPMPMPVRSTSAGSTPTHCPQDSLSGVGGDVQEAFAQAEEGAEEEEEKMQNGKDRG

SEQ ID NO: 26314 - protein, 560 aa, Homo sapiens
  Payload ID: 5189
  Gene Symbol: DTNB
  Gene Name: dystrobrevin, beta
  Uniprot ID: O60941
  ENSP ID: ENSP00000384787
MIEESGNKRKTMAEKRQLFIEMRAQNFDVIRLSTYRTACKLRFVQKRCNLHLVDIWNMIEAFRDNGLNTLDHTTEISVSRLETVISSIYYQLNKRLPSTHQISVEQSISLLLNFMIAAYDSEGRGKLTVFSVKAMLATMCGGKMLDKLRYVFSQMSDSNGLMIFSKFDQFLKEVLKLPTAVFEGPSFGYTEHSVRTCFPQQRKIMLNMFLDTMMADPPPQCLVWLPLMHRLAHVENVFHPVECSYCRCESMMGFRYRCQQCHNYQLCQNCFWRGHAGGPHSNQHQMKEHSSWKSPAKKLSHAISKSLGCVPTREPPHPVFPEQPEKPLDLAHIVPPRPLTNMNDTMVSHMSSGVPTPTKSVLDSPSRLDEEHRLIARYAARLAAEAGNVTRPPTDLSFNFDANKQQRQLIAELENKNREILQEIQRLRLEHEQASQPTPEKAQQNPTLLAELRLLRQRKDELEQRMSALQESRRELMVQLEELMKLLKAQATGSPHTSPTHGGGRPMPMPVRSTSAGSTPTHCPQDSLSGVGGDVQEAFAQAEEGAEEEEEKMQNGKDRG

SEQ ID NO: 26315 - protein, 609 aa, Homo sapiens
  Payload ID: 5189
  Gene Symbol: DTNB
  Gene Name: dystrobrevin, beta
  Uniprot ID: O60941
  ENSP ID: ENSP00000385193
MIEESGNKRKTMAEKRQLFIEMRAQNFDVIRLSTYRTACKLRFVQKRCNLHLVDIWNMIEAFRDNGLNTLDHTTEISVSRLETVISSIYYQLNKRLPSTHQISVEQSISLLLNFMIAAYDSEGRGKLTVFSVKAMLATMCGGKMLDKLRYVFSQMSDSNGLMIFSKFDQFLKEVLKLPTAVFEGPSFGYTEHSVRTCFPQQRKIMLNMFLDTMMADPPPQCLVWLPLMHRLAHVENVFHPVECSYCRCESMMGFRYRCQQCHNYQLCQNCFWRGHAGGPHSNQHQMKEHSSWKSPAKKLSHAISKSLGCVPTREPPHPVFPEQPEKPLDLAHIVPPRPLTNMNDTMVSHMSSGVPTPTKRLQYSQDIPSHLADEHALIASYVARLQHCARVLDSPSRLDEEHRLIARYAARLAAEAGNVTRPPTDLSFNFDANKQQRQLIAELENKNREILQEIQRLRLEHEQASQPTPEKAQQNPTLLAELRLLRQRKDELEQRMSALQESRRELMVQLEELMKLLKEEEQKQAAQATGSPHTSPTHGGGRPMPMPVRSTSAGSTPTHCPQDSLSGVGGDVQEAFAQGTRRNLRNDLLVAADSITNTMSSLVKELHSG

SEQ ID NO: 26316 - protein, 597 aa, Homo sapiens
  Payload ID: 5189
  Gene Symbol: DTNB
  Gene Name: dystrobrevin, beta
  Uniprot ID: O60941
  ENSP ID: ENSP00000385482
MIEESGNKRKTMAEKRQLFIEMRAQNFDVIRLSTYRTACKLRFVQKRCNLHLVDIWNMIEAFRDNGLNTLDHTTEISVSRLETVISSIYYQLNKRLPSTHQISVEQSISLLLNFMIAAYDSEGRGKLTVFSVKAMLATMCGGKMLDKLRYVFSQMSDSNGLMIFSKFDQFLKEVLKLPTAVFEGPSFGYTEHSVRTCFPQQRKIMLNMFLDTMMADPPPQCLVWLPLMHRLAHVENVFHPVECSYCRCESMMGFRYRCQQCHNYQLCQNCFWRGHAGGPHSNQHQMKEHSSWKSPAKKLSHAISKSLGCVPTREPPHPVFPEQPEKPLDLAHIVPPRPLTNMNDTMVSHMSSGVPTPTKRLQYSQDIPSHLADEHALIASYVARLQHCARVLDSPSRLDEEHRLIARYAARLAAEAGNVTRPPTDLSFNFDANKQQRQLIAELENKNREILQEIQRLRLEHEQASQPTPEKAQQNPTLLAELRLLRQRKDELEQRMSALQESRRELMVQLEELMKLLKEEEQKQAAQATGSPHTSPTHGGGRPMPMPVRSTSAGSTPTHCPQDSLSGVGGDVQEAFAQAEEGAEEEEEKMQNGKDRG

SEQ ID NO: 26317 - protein, 590 aa, Homo sapiens
  Payload ID: 5189
  Gene Symbol: DTNB
  Gene Name: dystrobrevin, beta
  ENSP ID: ENSP00000385784
MIEESGNKRKTMAEKRQLFIEMRAQNFDVIRLSTYRTACKLRFVQKRCNLHLVDIWNMIEAFRDNGLNTLDHTTEISVSRLETVISSIYYQLNKRLPSTHQISVEQSISLLLNFMIAAYDSEGRGKLTVFSVKAMLATMCGGKMLDKLRYVFSQMSDSNGLMIFSKFDQFLKEVLKLPTAVFEGPSFGYTEHSVRTCFPQQRKIMLNMFLDTMMADPPPQCLVWLPLMHRLAHVENVFHPVECSYCRCESMMGFRYRCQQCHNYQLCQNCFWRGHAGGPHSNQHQMKEHSSWKSPAKKLSHAISKSLGCVPTREPPHPVFPEQPEKPLDLAHIVPPRPLTNMNDTMVSHMSSGVPTPTKSVLDSPSRLDEEHRLIARYAARLAAEAGNVTRPPTDLSFNFDANKQQRQLIAELENKNREILQEIQRLRLEHEQASQPTPEKAQQNPTLLAELRLLRQRKDELEQRMSALQESRRELMVQLEELMKLLKAQATGSPHTSPTHGGGRPMPMPVRSTSAGSTPTHCPQDSLSGVGGDVQEAFAQGTRRNLRNDLLVAADSITNTMSSLVKELHSAEEGAEEEEEKMQNGKDRG

SEQ ID NO: 26318 - protein, 545 aa, Homo sapiens
  Payload ID: 5189
  Gene Symbol: DTNB
  Gene Name: dystrobrevin, beta
  Uniprot ID: O60941
  ENSP ID: ENSP00000444463
MIEAFRDNGLNTLDHTTEISVSRLETVISSIYYQLNKRLPSTHQISVEQSISLLLNFMIAAYDSEGRGKLTVFSVKAMLATMCGGKMLDKLRYVFSQMSDSNGLMIFSKFDQFLKEVLKLPTAVFEGPSFGYTEHSVRTCFPQQRKIMLNMFLDTMMADPPPQCLVWLPLMHRLAHVENVFHPVECSYCRCESMMGFRYRCQQCHNYQLCQNCFWRGHAGGPHSNQHQMKEHSSWKSPAKKLSHAISKSLGCVPTREPPHPVFPEQPEKPLDLAHIVPPRPLTNMNDTMVSHMSSGVPTPTKRLQYSQDIPSHLADEHALIASYVARLQHCARVLDSPSRLDEEHRLIARYAARLAAEAGNVTRPPTDLSFNFDANKQQRQLIAELENKNREILQEIQRLRLEHEQASQPTPEKAQQNPTLLAELRLLRQRKDELEQRMSALQESRRELMVQLEELMKLLKAQATGSPHTSPTHGGGRPMPMPVRSTSAGSTPTHCPQDSLSGVGGDVQEAFAQGTRRNLRNDLLVAADSITNTMSSLVKELHSG

SEQ ID NO: 26319 - protein, 895 aa, Homo sapiens
  Payload ID: 5190
  Gene Symbol: DAG1
  Gene Name: dystroglycan 1 (dystrophin-associated glycoprotein 1)
  Uniprot ID: Q14118
  ENSP ID: ENSP00000312435
MRMSVGLSLLLPLSGRTFLLLLSVVMAQSHWPSEPSEAVRDWENQLEASMHSVLSDLHEAVPTVVGIPDGTAVVGRSFRVTIPTDLIASSGDIIKVSAAGKEALPSWLHWDSQSHTLEGLPLDTDKGVHYISVSATRLGANGSHIPQTSSVFSIEVYPEDHSELQSVRTASPDPGEVVSSACAADEPVTVLTVILDADLTKMTPKQRIDLLHRMRSFSEVELHNMKLVPVVNNRLFDMSAFMAGPGNAKKVVENGALLSWKLGCSLNQNSVPDIHGVEAPAREGAMSAQLGYPVVGWHIANKKPPLPKRVRRQIHATPTPVTAIGPPTTAIQEPPSRIVPTPTSPAIAPPTETMAPPVRDPVPGKPTVTIRTRGAIIQTPTLGPIQPTRVSEAGTTVPGQIRPTMTIPGYVEPTAVATPPTTTTKKPRVSTPKPATPSTDSTTTTTRRPTKKPRTPRPVPRVTTKVSITRLETASPPTRIRTTTSGVPRGGEPNQRPELKNHIDRVDAWVGTYFEVKIPSDTFYDHEDTTTDKLKLTLKLREQQLVGEKSWVQFNSNSQLMYGLPDSSHVGKHEYFMHATDKGGLSAVDAFEIHVHRRPQGDRAPARFKAKFVGDPALVLNDIHKKIALVKKLAFAFGDRNCSTITLQNITRGSIVVEWTNNTLPLEPCPKEQIAGLSRRIAEDDGKPRPAFSNALEPDFKATSITVTGSGSCRHLQFIPVVPPRRVPSEAPPTEVPDRDPEKSSEDDVYLHTVIPAVVVAAILLIAGIIAMICYRKKRKGKLTLEDQATFIKKGVPIIFADELDDSKPPPSSSMPLILQEEKAPLPPPEYPNQSVPETTPLNQDTMGEYTPLRDEDPNAPPYQPPPPFTAPMEGKGSRPKNMTPYRSPPPYVPP

SEQ ID NO: 26320 - protein, 41 aa, Homo sapiens
  Payload ID: 5190
  Gene Symbol: DAG1
  Gene Name: dystroglycan 1 (dystrophin-associated glycoprotein 1)
  ENSP ID: ENSP00000387859
MRMSVGLSLLLPLSGRTFLLLLSVVMAQSHWPSEPSEAVRD

SEQ ID NO: 26321 - protein, 117 aa, Homo sapiens
  Payload ID: 5190
  Gene Symbol: DAG1
  Gene Name: dystroglycan 1 (dystrophin-associated glycoprotein 1)
  ENSP ID: ENSP00000388833
MRMSVGLSLLLPLSGRTFLLLLSVVMAQSHWPSEPSEAVRDWENQLEASMHSVLSDLHEAVPTVVGIPDGTAVVGRSFRVTIPTDLIASSGDIIKVSAAGKEALPSWLHWDSQSHTL

SEQ ID NO: 26322 - protein, 95 aa, Homo sapiens
  Payload ID: 5190
  Gene Symbol: DAG1
  Gene Name: dystroglycan 1 (dystrophin-associated glycoprotein 1)
  ENSP ID: ENSP00000401382
MRMSVGLSLLLPLSGRTFLLLLSVVMAQSHWPSEPSEAVRDWENQLEASMHSVLSDLHEAVPTVVGIPDGTAVVGRSFRVTIPTDLIASSGDIIK

SEQ ID NO: 26323 - protein, 8 aa, Homo sapiens
  Payload ID: 5190
  Gene Symbol: DAG1
  Gene Name: dystroglycan 1 (dystrophin-associated glycoprotein 1)
  ENSP ID: ENSP00000401805
MRMSVGLS

SEQ ID NO: 26324 - protein, 15 aa, Homo sapiens
  Payload ID: 5190
  Gene Symbol: DAG1
  Gene Name: dystroglycan 1 (dystrophin-associated glycoprotein 1)
  ENSP ID: ENSP00000402443
MRMSVGLSLLLPLSG

SEQ ID NO: 26325 - protein, 88 aa, Homo sapiens
  Payload ID: 5190
  Gene Symbol: DAG1
  Gene Name: dystroglycan 1 (dystrophin-associated glycoprotein 1)
  ENSP ID: ENSP00000405859
MRMSVGLSLLLPLSGRTFLLLLSVVMAQSHWPSEPSEAVRDWENQLEASMHSVLSDLHEAVPTVVGIPDGTAVVGRSFRVTIPTDLIA

SEQ ID NO: 26326 - protein, 86 aa, Homo sapiens
  Payload ID: 5190
  Gene Symbol: DAG1
  Gene Name: dystroglycan 1 (dystrophin-associated glycoprotein 1)
  ENSP ID: ENSP00000410145
MRMSVGLSLLLPLSGRTFLLLLSVVMAQSHWPSEPSEAVRDWENQLEASMHSVLSDLHEAVPTVVGIPDGTAVVGRSFRVTIPTDL

SEQ ID NO: 26327 - protein, 106 aa, Homo sapiens
  Payload ID: 5190
  Gene Symbol: DAG1
  Gene Name: dystroglycan 1 (dystrophin-associated glycoprotein 1)
  ENSP ID: ENSP00000412067
MRMSVGLSLLLPLSGRTFLLLLSVVMAQSHWPSEPSEAVRDWENQLEASMHSVLSDLHEAVPTVVGIPDGTAVVGRSFRVTIPTDLIASSGDIIKVSAAGKEALPS

SEQ ID NO: 26328 - protein, 52 aa, Homo sapiens
  Payload ID: 5190
  Gene Symbol: DAG1
  Gene Name: dystroglycan 1 (dystrophin-associated glycoprotein 1)
  ENSP ID: ENSP00000415321
MRMSVGLSLLLPLSGRTFLLLLSVVMAQSHWPSEPSEAVRDWENQLEASMHS

SEQ ID NO: 26329 - protein, 895 aa, Homo sapiens; identical to SEQ ID NO: 26319
  Payload ID: 5190
  Gene Symbol: DAG1
  Gene Name: dystroglycan 1 (dystrophin-associated glycoprotein 1)
  Uniprot ID: Q14118
  ENSP ID: ENSP00000438421

SEQ ID NO: 26330 - protein, 895 aa, Homo sapiens; identical to SEQ ID NO: 26319
  Payload ID: 5190
  Gene Symbol: DAG1
  Gene Name: dystroglycan 1 (dystrophin-associated glycoprotein 1)
  Uniprot ID: Q14118
  ENSP ID: ENSP00000439334

SEQ ID NO: 26331 - protein, 895 aa, Homo sapiens; identical to SEQ ID NO: 26319
  Payload ID: 5190
  Gene Symbol: DAG1
  Gene Name: dystroglycan 1 (dystrophin-associated glycoprotein 1)
  Uniprot ID: Q14118
  ENSP ID: ENSP00000440590

SEQ ID NO: 26332 - protein, 895 aa, Homo sapiens; identical to SEQ ID NO: 26319
  Payload ID: 5190
  Gene Symbol: DAG1
  Gene Name: dystroglycan 1 (dystrophin-associated glycoprotein 1)
  Uniprot ID: Q14118
  ENSP ID: ENSP00000440705

SEQ ID NO: 26333 - protein, 895 aa, Homo sapiens; identical to SEQ ID NO: 26319
  Payload ID: 5190
  Gene Symbol: DAG1
  Gene Name: dystroglycan 1 (dystrophin-associated glycoprotein 1)
  Uniprot ID: Q14118
  ENSP ID: ENSP00000442600

SEQ ID NO: 26334 - protein, 674 aa, Homo sapiens
  Payload ID: 5191
  Gene Symbol: DMWD
  Gene Name: dystrophia myotonica, WD repeat containing
  Uniprot ID: Q09019
  ENSP ID: ENSP00000270223
MAAGGAEGGSGPGAAMGDCAEIKSQFRTREGFYKLLPGDGAARRSGPASAQTPVPPQPPQPPPGPASASGPGAAGPASSPPPAGPGPGPALPAVRLSLVRLGEPDSAGAGEPPATPAGLGSGGDRVCFNLGRELYFYPGCCRRGSQRSIDLNKPIDKRIYKGTQPTCHDFNQFTAATETISLLVGFSAGQVQYLDLIKKDTSKLFNEERLIDKTKVTYLKWLPESESLFLASHASGHLYLYNVSHPCASAPPQYSLLKQGEGFSVYAAKSKAPRNPLAKWAVGEGPLNEFAFSPDGRHLACVSQDGCLRVFHFDSMLLRGLMKSYFGGLLCVCWSPDGRYVVTGGEDDLVTVWSFTEGRVVARGHGHKSWVNAVAFDPYTTRAEEAATAAGADGERSGEEEEEEPEAAGTGSAGGAPLSPLPKAGSITYRFGSAGQDTQFCLWDLTEDVLYPHPPLARTRTLPGTPGTTPPAASSSRGGEPGPGPLPRSLSRSNSLPHPAGGGKAGGPGVAAEPGTPFSIGRFATLTLQERRDRGAEKEHKRYHSLGNISRGGSGGSGSGGEKPSGPVPRSRLDPAKVLGTALCPRIHEVPLLEPLVCKKIAQERLTVLLFLEDCIITACQEGLICTWARPGKAFTDEETEAQTGEGSWPRSPSKSVVEGISSQPGNSPSGTVV

SEQ ID NO: 26335 - protein, 649 aa, Homo sapiens
  Payload ID: 5191
  Gene Symbol: DMWD
  Gene Name: dystrophia myotonica, WD repeat containing
  ENSP ID: ENSP00000366964
MAAGGAEGGSGPGAAMGDCAEIKSQFRTREGFYKLLPGDGAARRSGPASAQTPVPPQPPQPPPGPASASGPGAAGPASSPPPAGPGPGPALPAVRLSLVRLGEPDSAGAGEPPATPAGLGSGGDRVCFNLGRELYFYPGCCRRGSQRSIDLNKPIDKRIYKGTQPTCHDFNQFTAATETISLLVGFSAGQVQYLDLIKKDTSKLFNEERLIDKTKVTYLKWLPESESLFLASHASGHLYLYNVSHPCASAPPQYSLLKQGEGFSVYAAKSKAPRNPLAKWAVGEGPLNEFAFSPDGRHLACVSQDGCLRVFHFDSMLLRGLMKSYFGGLLCVCWSPDGRYVVTGGEDDLVTVWSFTEGRVVARGHGHKSWVNAVAFDPYTTRAEEAATAAGADGERSGEEEEEEPEAAGTGSAGGAPLSPLPKAGSITYRFGSAGQDTQFCLWDLTEDVLYPHPPLARTRTLPGTPGTTPPAASSSRGGEPGPGPLPRSLSRSNSLPHPAGGGKAGGPGVAAEPGTPFSIGRFATLTLQERRDRGAEKEHKRYHSLGNISRGGSGGSGSGGEKPSGPVPRSRLDPAKVLGTALCPRIHEVPLLEPLVCKKIAQERLTVLLFLEDCIITACQEGLICTWARPGKAGISSQPGNSPSGTVV

SEQ ID NO: 26336 - protein, 64 aa, Homo sapiens
  Payload ID: 5191
  Gene Symbol: DMWD
  Gene Name: dystrophia myotonica, WD repeat containing
  ENSP ID: ENSP00000444820
EDCIITACQEGLICTWARPGKAFTDEETEAQTGEGSWPRSPSKSVVEVGLSLSSFPSTSGSLPS

SEQ ID NO: 26337 - protein, 161 aa, Homo sapiens
  Payload ID: 5191
  Gene Symbol: DMWD
  Gene Name: dystrophia myotonica, WD repeat containing
  ENSP ID: ENSP00000473377
  MOD_RES (1)..(1): Any amino acid
XERRDRGAEKEHKRYHSLGNISRGGSGGSGSGGEKPSGPVPRSRLDPAKVLGTALCPRIHEVPLLEPLVCKKIAQERLTVLLFLEDCIITACQEGLICTWARPGKAVSGPTPACRGPGRTFRGKRQALAERGLCCCHSLWLRGVRGSQGNLSVSVQDLSDP

SEQ ID NO: 26338 - protein, 149 aa, Homo sapiens
  Payload ID: 5191
  Gene Symbol: DMWD
  Gene Name: dystrophia myotonica, WD repeat containing
  ENSP ID: ENSP00000473415
  MOD_RES (1)..(1): Any amino acid
XGAGEPPATPAGLGSGGDRVCFNLGRELYFYPGCCRRGSQRSIDLNKPIDKRIYKGTQPTCHDFNQFTAATETISLLVGFSAGQVQYLDLIKKDTSKLFNEEVIAAPRAPNFSAFSPTHYMPLGCSCLRNSVGLRGAGPGRDGEWGDSS

SEQ ID NO: 26339 - protein, 102 aa, Homo sapiens
  Payload ID: 5191
  Gene Symbol: DMWD
  Gene Name: dystrophia myotonica, WD repeat containing
  ENSP ID: ENSP00000473426
GTQPTCHDFNQFTAATETISLLVGFSAGQVQYLDLIKKDTSKLFNEEDRCCRIIHGDCSVLGQLGLRGDTSKRPYPRAGTALGFCLILSGPEEVFHKYSQNE

SEQ ID NO: 26340 - protein, 629 aa, Homo sapiens
  Payload ID: 5192
  Gene Symbol: DMPK
  Gene Name: dystrophia myotonica-protein kinase
  Uniprot ID: Q09013
  ENSP ID: ENSP00000291270
MSAEVRLRRLQQLVLDPGFLGLEPLLDLLLGVHQELGASELAQDKYVADFLQWAEPIVVRLKEVRLQRDDFEILKVIGRGAFSEVAVVKMKQTGQVYAMKIMNKWDMLKRGEVSCFREERDVLVNGDRRWITQLHFAFQDENYLYLVMEYYVGGDLLTLLSKFGERIPAEMARFYLAEIVMAIDSVHRLGYVHRDIKPDNILLDRCGHIRLADFGSCLKLRADGTVRSLVAVGTPDYLSPEILQAVGGGPGTGSYGPECDWWALGVFAYEMFYGQTPFYADSTAETYGKIVHYKEHLSLPLVDEGVPEEARDFIQRLLCPPETRLGRGGAGDFRTHPFFFGLDWDGLRDSVPPFTPDFEGATDTCNFDLVEDGLTAMVSGGGETLSDIREGAPLGVHLPFVGYSYSCMALRDSEVPGPTPMELEAEQLLEPHVQAPSLEPSVSPQDETAEVAVPAAVPAAEAEAEVTLRELQEALEEEVLTRQSLSREMEAIRTDNQNFASQLREAEARNRDLEAHVRQLQERMELLQAEGATAVTGVPSPRATDPPSHLDGPPAVAVGQCPLVGPGPMHRRHLLLPARVPRPGLSEALSLLLFAVVLSRAAALGCIGLVAHAGQLTAVWRRPGAARAP

SEQ ID NO: 26341 - protein, 639 aa, Homo sapiens
  Payload ID: 5192
  Gene Symbol: DMPK
  Gene Name: dystrophia myotonica-protein kinase
  Uniprot ID: Q09013
  ENSP ID: ENSP00000345997
MGGHFWPPEPYTVFMWGSPWEADSPRVKLRGREKGRQTEGGAFPLVSSALSGDPRFFSPTTPPAEPIVVRLKEVRLQRDDFEILKVIGRGAFSEVAVVKMKQTGQVYAMKIMNKWDMLKRGEVSCFREERDVLVNGDRRWITQLHFAFQDENYLYLVMEYYVGGDLLTLLSKFGERIPAEMARFYLAEIVMAIDSVHRLGYVHRDIKPDNILLDRCGHIRLADFGSCLKLRADGTVRSLVAVGTPDYLSPEILQAVGGGPGTGSYGPECDWWALGVFAYEMFYGQTPFYADSTAETYGKIVHYKEHLSLPLVDEGVPEEARDFIQRLLCPPETRLGRGGAGDFRTHPFFFGLDWDGLRDSVPPFTPDFEGATDTCNFDLVEDGLTAMVSGGGETLSDIREGAPLGVHLPFVGYSYSCMALRDSEVPGPTPMELEAEQLLEPHVQAPSLEPSVSPQDETAEVAVPAAVPAAEAEAEVTLRELQEALEEEVLTRQSLSREMEAIRTDNQNFASQLREAEARNRDLEAHVRQLQERMELLQAEGATAVTGVPSPRATDPPSHLDGPPAVAVGQCPLVGPGPMHRRHLLLPARVPRPGLSEALSLLLFAVVLSRAAALGCIGLVAHAGQLTAVWRRPGAARAP

SEQ ID NO: 26342 - protein, 530 aa, Homo sapiens
  Payload ID: 5192
  Gene Symbol: DMPK
  Gene Name: dystrophia myotonica-protein kinase
  Uniprot ID: Q09013
  ENSP ID: ENSP00000346168
MSAEVRLRRLQQLVLDPGFLGLEPLLDLLLGVHQELGASELAQDKYVADFLQWAEPIVVRLKEVRLQRDDFEILKVIGRGAFSEVAVVKMKQTGQVYAMKIMNKWDMLKRGEVSCFREERDVLVNGDRRWITQLHFAFQDENYLYLVMEYYVGGDLLTLLSKFGERIPAEMARFYLAEIVMAIDSVHRLGYVHRDIKPDNILLDRCGHIRLADFGSCLKLRADGTVRSLVAVGTPDYLSPEILQAVGGGPGTGSYGPECDWWALGVFAYEMFYGQTPFYADSTAETYGKIVHYKEHLSLPLVDEGVPEEARDFIQRLLCPPETRLGRGGAGDFRTHPFFFGLDWDGLRDSVPPFTPDFEGATDTCNFDLVEDGLTAMETLSDIREGAPLGVHLPFVGYSYSCMALRDSEVPGPTPMELEAEQLLEPHVQAPSLEPSVSPQDETAEVAVPAAVPAAEAEAEVTLRELQEALEEEVLTRQSLSREMEAIRTDNQNFASQLREAEARNRDLEAHVRQLQERMELLQAEGATGP

SEQ ID NO: 26343 - protein, 625 aa, Homo sapiens
  Payload ID: 5192
  Gene Symbol: DMPK
  Gene Name: dystrophia myotonica-protein kinase
  Uniprot ID: Q09013
  ENSP ID: ENSP00000401753
MSAEVRLRRLQQLVLDPGFLGLEPLLDLLLGVHQELGASELAQDKYVADFLQWAEPIVVRLKEVRLQRDDFEILKVIGRGAFSEVAVVKMKQTGQVYAMKIMNKWDMLKRGEVSCFREERDVLVNGDRRWITQLHFAFQDENYLYLVMEYYVGGDLLTLLSKFGERIPAEMARFYLAEIVMAIDSVHRLGYVHRDIKPDNILLDRCGHIRLADFGSCLKLRADGTVRSLVAVGTPDYLSPEILQAVGGGPGTGSYGPECDWWALGVFAYEMFYGQTPFYADSTAETYGKIVHYKEHLSLPLVDEGVPEEARDFIQRLLCPPETRLGRGGAGDFRTHPFFFGLDWDGLRDSVPPFTPDFEGATDTCNFDLVEDGLTAMETLSDIREGAPLGVHLPFVGYSYSCMALRDSEVPGPTPMELEAEQLLEPHVQAPSLEPSVSPQDETAEVAVPAAVPAAEAEAEVTLRELQEALEEEVLTRQSLSREMEAIRTDNQNFASQLREAEARNRDLEAHVRQLQERMELLQAEGATAVTGVPSPRATDPPSHMAPRPWLWASARWWGQAPCTAATCCSLPGSLGLAYRRRFPCSCSPLFCLVPPPWAALGWWPTPANSPQSGAAQEPPALPEP

SEQ ID NO: 26344 - protein, 624 aa, Homo sapiens
  Payload ID: 5192
  Gene Symbol: DMPK
  Gene Name: dystrophia myotonica-protein kinase
  Uniprot ID: Q09013
  ENSP ID: ENSP00000413417
MSAEVRLRRLQQLVLDPGFLGLEPLLDLLLGVHQELGASELAQDKYVADFLQWAEPIVVRLKEVRLQRDDFEILKVIGRGAFSEVAVVKMKQTGQVYAMKIMNKWDMLKRGEVSCFREERDVLVNGDRRWITQLHFAFQDENYLYLVMEYYVGGDLLTLLSKFGERIPAEMARFYLAEIVMAIDSVHRLGYVHRDIKPDNILLDRCGHIRLADFGSCLKLRADGTVRSLVAVGTPDYLSPEILQAVGGGPGTGSYGPECDWWALGVFAYEMFYGQTPFYADSTAETYGKIVHYKEHLSLPLVDEGVPEEARDFIQRLLCPPETRLGRGGAGDFRTHPFFFGLDWDGLRDSVPPFTPDFEGATDTCNFDLVEDGLTAMETLSDIREGAPLGVHLPFVGYSYSCMALRDSEVPGPTPMELEAEQLLEPHVQAPSLEPSVSPQDETAEVAVPAAVPAAEAEAEVTLRELQEALEEEVLTRQSLSREMEAIRTDNQNFASQLREAEARNRDLEAHVRQLQERMELLQAEGATAVTGVPSPRATDPPSHLDGPPAVAVGQCPLVGPGPMHRRHLLLPARVPRPGLSEALSLLLFAVVLSRAAALGCIGLVAHAGQLTAVWRRPGAARAP

SEQ ID NO: 26345 - protein, 78 aa, Homo sapiens
  Payload ID: 5192
  Gene Symbol: DMPK
  Gene Name: dystrophia myotonica-protein kinase
  ENSP ID: ENSP00000468013
MSAEVRLRRLQQLVLDPGFLGLEPLLDLLLGVHQELGASELAQDKYVADFLQWAPNPGFSKVWFKNHLHLNLERSPSW

SEQ ID NO: 26346 - protein, 183 aa, Homo sapiens
  Payload ID: 5192
  Gene Symbol: DMPK
  Gene Name: dystrophia myotonica-protein kinase
  ENSP ID: ENSP00000469220
  MOD_RES (1)..(1): Any amino acid
XDWDGLRDSVPPFTPDFEGATDTCNFDLVEDGLTAMVSGGGETLSDIREGAPLGVHLPFVGYSYSCMALRDSEVPGPTPMELEAEQLLEPHVQAPSLEPSVSPQDETSTTRGRGSEPGPRGTRPAVAGADGVAAGRGSHRSLGLAYRRRFPCSCSPLFCLVPPPWAALGWWPTPANSPQSGAA

SEQ ID NO: 26347 - protein, 125 aa, Homo sapiens
  Payload ID: 5192
  Gene Symbol: DMPK
  Gene Name: dystrophia myotonica-protein kinase
  ENSP ID: ENSP00000470192
MLPLSPCPVPSPSPKSRVFQSVVQEPPASESRAEPIVVRLKEVRLQRDDFEILKVIGRGAFSEVAVVKMKQTGQVYAMKIMNKWDMLKRGEVSCFREERDVLVNGDRRWITQLHFAFQDENYLYL

SEQ ID NO: 26348 - protein, 188 aa, Homo sapiens
  Payload ID: 5192
  Gene Symbol: DMPK
  Gene Name: dystrophia myotonica-protein kinase
  ENSP ID: ENSP00000471832
AEQLLEPHVQAPSLEPSVSPQDETAEVAVPAAVPAAEAEAEVTLRELQEALEEEVLTRQSLSREMEAIRTDNQNFASQLREAEARNRDLEAHVRQLQERMELLQAEGATAVTGVPSPRATDPPSHVRPLSFPCLRPAAHSADPLPGSWSPRPDIGLTLRLCDFRGQKPFIQPQISLRSGLTRFPPGSP

SEQ ID NO: 26349 - protein, 635 aa, Homo sapiens
  Payload ID: 5192
  Gene Symbol: DMPK
  Gene Name: dystrophia myotonica-protein kinase
  ENSP ID: ENSP00000472965
MGGHFWPPEPYTVFMWGSPWEADSPRVKLRGREKGRQTEGGAFPLVSSALSGDPRFFSPTTPPAEPIVVRLKEVRLQRDDFEILKVIGRGAFSEVAVVKMKQTGQVYAMKIMNKWDMLKRGEVSCFREERDVLVNGDRRWITQLHFAFQDENYLYLVMEYYVGGDLLTLLSKFGERIPAEMARFYLAEIVMAIDSVHRLGYVHRDIKPDNILLDRCGHIRLADFGSCLKLRADGTVRSLVAVGTPDYLSPEILQAVGGGPGTGSYGPECDWWALGVFAYEMFYGQTPFYADSTAETYGKIVHYKEHLSLPLVDEGVPEEARDFIQRLLCPPETRLGRGGAGDFRTHPFFFGLDWDGLRDSVPPFTPDFEGATDTCNFDLVEDGLTAMETLSDIREGAPLGVHLPFVGYSYSCMALRDSEVPGPTPMELEAEQLLEPHVQAPSLEPSVSPQDETAEVAVPAAVPAAEAEAEVTLRELQEALEEEVLTRQSLSREMEAIRTDNQNFASQLREAEARNRDLEAHVRQLQERMELLQAEGATAVTGVPSPRATDPPSHMAPRPWLWASARWWGQAPCTAATCCSLPGSLGLAYRRRFPCSCSPLFCLVPPPWAALGWWPTPANSPQSGAAQEPPALPEP

SEQ ID NO: 26350 - protein, 625 aa, Homo sapiens; identical to SEQ ID NO: 26343
  Payload ID: 5192
  Gene Symbol: DMPK
  Gene Name: dystrophia myotonica-protein kinase
  Uniprot ID: Q09013
  ENSP ID: ENSP00000482746

SEQ ID NO: 26351 - protein, 772 aa, Homo sapiens
  Payload ID: 5193
  Gene Symbol: DMD
  Gene Name: dystrophin
  ENSP ID: ENSP00000288447
MEDEREDVQKKTFTKWVNAQFSKFGKQHIENLFSDLQDGRRLLDLLEGLTGQKLPKEKGSTRVHALNNVNKALRVLQNNNVDLVNIGSTDIVDGNHKLTLGLIWNIILHWQVKNVMKNIMAGLQQTNSEKILLSWVRQSTRNYPQVNVINFTTSWSDGLALNALIHSHRPDLFDWNSVVCQQSATQRLEHAFNIARYQLGIEKLLDPEDVDTTYPDKKSILMYITSLFQVLPQQVSIEAIQEVEMLPRPPKVTKEEHFQLHHQMHYSQQITVSLAQGYERTSSPKPRFKSYAYTQAAYVTTSDPTRSPFPSQHLEAPEDKSFGSSLMESEVNLDRYQTALEEVLSWLLSAEDTLQAQGEISNDVEVVKDQFHTHEGYMMDLTAHQGRVGNILQLGSKLIGTGKLSEDEETEVQEQMNLLNSRWECLRVASMEKQSNLHRVLMDLQNQKLKELNDWLTKTEERTRKMEEEPLGPDLEDLKRQVQQHKVLQEDLEQEQVRVNSLTHMVVVVDESSGDHATAALEEQLKVLGDRWANICRWTEDRWVLLQDILLKWQRLTEEQCLFSAWLSEKEDAVNKIHTTGFKDQNEMLSSLQKLAVLKADLEKKKQSMGKLYSLKQDLLSTLKNKSVTQKTEAWLDNFARCWDNLVQKLEKSTAQISQAVTTTQPSLTQTTVMETVTTVTTREQILVKHAQEELPPPPPQKKRQITVDSEIRKRLDVDITELHSWITRSEAVLQSPEFAIFRKEGNFSDLKEKVNVGYALIFISVLILCCL

SEQ ID NO: 26352 - protein, 956 aa, Homo sapiens
  Payload ID: 5193
  Gene Symbol: DMD
  Gene Name: dystrophin
  ENSP ID: ENSP00000340057
MLHRKTYHVKDLQGEIEAHTDVYHNLDENSQKILRSLEGSDDAVLLQRRLDNMNFKWSELRKKSLNIRSHLEASSDQWKRLHLSLQELLVWLQLKDDELSRQAPIGGDFPAVQKQNDVHRAFKRELKTKEPVIMSTLETVRIFLTEQPLEGLEKLYQEPRELPPEERAQNVTRLLRKQAEEVNTEWEKLNLHSADWQRKIDETLERLRELQEATDELDLKLRQAEVIKGSWQPVGDLLIDSLQDHLEKVKALRGEIAPLKENVSHVNDLARQLTTLGIQLSPYNLSTLEDLNTRWKLLQVAVEDRVRQLHEAHRDFGPASQHFLSTSVQGPWERAISPNKVPYYINHETQTTCWDHPKMTELYQSLADLNNVRFSAYRTAMKLRRLQKALCLDLLSLSAACDALDQHNLKQNDQPMDILQIINCLTTIYDRLEQEHNNLVNVPLCVDMCLNWLLNVYDTGRTGRIRVLSFKTGIISLCKAHLEDKYRYLFKQVASSTGFCDQRRLGLLLHDSIQIPRQLGEVASFGGSNIEPSVRSCFQFANNKPEIEAALFLDWMRLEPQSMVWLPVLHRVAAAETAKHQAKCNICKECPIIGFRYRSLKHFNYDICQSCFFSGRVAKGHKMHYPMVEYCTPTTSGEDVRDFAKVLKNKFRTKRYFAKHPRMGYLPVQTVLEGDNMETPVTLINFWPVDSAPASSPQLSHDDTHSRIEHYASRLAEMENSNGSYLNDSISPNESIDDEHLLIQHYCQSLNQDSPLSQPRSPAQILISLESEERGELERILADLEEENRNLQAEYDRLKQQHEHKGLSPLPSPPEMMPTSPQSPRDAELIAEAKLLRQHKGRLEARMQILEDHNKQLESQLHRLRQLLEQPQAEAKVNGTTVSSPSTSLQRSDSSQPMLLRVVGSQTSDSMGEEDLLSPPQDTSTGLEEVMEQLNNSFPSSRGRNTPGKPMREDTM

SEQ ID NO: 26353 - protein, 1386 aa, Homo sapiens
  Payload ID: 5193
  Gene Symbol: DMD
  Gene Name: dystrophin
  ENSP ID: ENSP00000350765
VSRALPEKQGEIEAQIKDLGQLEKKLEDLEEQLNHLLLWLSPIRNQLEIYNQPNQEGPFDVKETEIAVQAKQPDVEEILSKGQHLYKEKPATQPVKRKLEDLSSEWKAVNRLLQELRAKQPDLAPGLTTIGASPTQTVTLVTQPVVTKETAISKLEMPSSLMLEVPALADFNRAWTELTDWLSLLDQVIKSQRVMVGDLEDINEMIIKQKATMQDLEQRRPQLEELITAAQNLKNKTSNQEARTIITDRIERIQNQWDEVQEHLQNRRQQLNEMLKDSTQWLEAKEEAEQVLGQARAKLESWKEGPYTVDAIQKKITETKQLAKDLRQWQTNVDVANDLALKLLRDYSADDTRKVHMITENINASWRSIHKRVSEREAALEETHRLLQQFPLDLEKFLAWLTEAETTANVLQDATRKERLLEDSKGVKELMKQWQDLQGEIEAHTDVYHNLDENSQKILRSLEGSDDAVLLQRRLDNMNFKWSELRKKSLNIRSHLEASSDQWKRLHLSLQELLVWLQLKDDELSRQAPIGGDFPAVQKQNDVHRAFKRELKTKEPVIMSTLETVRIFLTEQPLEGLEKLYQEPRELPPEERAQNVTRLLRKQAEEVNTEWEKLNLHSADWQRKIDETLERLRELQEATDELDLKLRQAEVIKGSWQPVGDLLIDSLQDHLEKVKALRGEIAPLKENVSHVNDLARQLTTLGIQLSPYNLSTLEDLNTRWKLLQVAVEDRVRQLHEAHRDFGPASQHFLSTSVQGPWERAISPNKVPYYINHETQTTCWDHPKMTELYQSLADLNNVRFSAYRTAMKLRRLQKALCLDLLSLSAACDALDQHNLKQNDQPMDILQIINCLTTIYDRLEQEHNNLVNVPLCVDMCLNWLLNVYDTGRTGRIRVLSFKTGIISLCKAHLEDKYRYLFKQVASSTGFCDQRRLGLLLHDSIQIPRQLGEVASFGGSNIEPSVRSCFQFANNKPEIEAALFLDWMRLEPQSMVWLPVLHRVAAAETAKHQAKCNICKECPIIGFRYRSLKHFNYDICQSCFFSGRVAKGHKMHYPMVEYCTPTTSGEDVRDFAKVLKNKFRTKRYFAKHPRMGYLPVQTVLEGDNMETPASSPQLSHDDTHSRIEHYASRLAEMENSNGSYLNDSISPNESIDDEHLLIQHYCQSLNQDSPLSQPRSPAQILISLESEERGELERILADLEEENRNLQAEYDRLKQQHEHKGLSPLPSPPEMMPTSPQSPRDAELIAEAKLLRQHKGRLEARMQILEDHNKQLESQLHRLRQLLEQPQAEAKVNGTTVSSPSTSLQRSDSSQPMLLRVVGSQTSDSMGEEDLLSPPQDTSTGLEEVMEQLNNSFPSSRGHNVGSLFHMADDLGRAMESLVSVMTDEEGAE

SEQ ID NO: 26354 - protein, 1230 aa, Homo sapiens
  Payload ID: 5193
  Gene Symbol: DMD
  Gene Name: dystrophin
  ENSP ID: ENSP00000352894
MPSSLMLEVPALADFNRAWTELTDWLSLLDQVIKSQRVMVGDLEDINEMIIKQKATMQDLEQRRPQLEELITAAQNLKNKTSNQEARTIITDRIERIQNQWDEVQEHLQNRRQQLNEMLKDSTQWLEAKEEAEQVLGQARAKLESWKEGPYTVDAIQKKITETKQLAKDLRQWQTNVDVANDLALKLLRDYSADDTRKVHMITENINASWRSIHKRVSEREAALEETHRLLQQFPLDLEKFLAWLTEAETTANVLQDATRKERLLEDSKGVKELMKQWQDLQGEIEAHTDVYHNLDENSQKILRSLEGSDDAVLLQRRLDNMNFKWSELRKKSLNIRSHLEASSDQWKRLHLSLQELLVWLQLKDDELSRQAPIGGDFPAVQKQNDVHRAFKRELKTKEPVIMSTLETVRIFLTEQPLEGLEKLYQEPRELPPEERAQNVTRLLRKQAEEVNTEWEKLNLHSADWQRKIDETLERLRELQEATDELDLKLRQAEVIKGSWQPVGDLLIDSLQDHLEKVKALRGEIAPLKENVSHVNDLARQLTTLGIQLSPYNLSTLEDLNTRWKLLQVAVEDRVRQLHEAHRDFGPASQHFLSTSVQGPWERAISPNKVPYYINHETQTTCWDHPKMTELYQSLADLNNVRFSAYRTAMKLRRLQKALCLDLLSLSAACDALDQHNLKQNDQPMDILQIINCLTTIYDRLEQEHNNLVNVPLCVDMCLNWLLNVYDTGRTGRIRVLSFKTGIISLCKAHLEDKYRYLFKQVASSTGFCDQRRLGLLLHDSIQIPRQLGEVASFGGSNIEPSVRSCFQFANNKPEIEAALFLDWMRLEPQSMVWLPVLHRVAAAETAKHQAKCNICKECPIIGFRYRSLKHFNYDICQSCFFSGRVAKGHKMHYPMVEYCTPTTSGEDVRDFAKVLKNKFRTKRYFAKHPRMGYLPVQTVLEGDNMETPASSPQLSHDDTHSRIEHYASRLAEMENSNGSYLNDSISPNESIDDEHLLIQHYCQSLNQDSPLSQPRSPAQILISLESEERGELERILADLEEENRNLQAEYDRLKQQHEHKGLSPLPSPPEMMPTSPQSPRDAELIAEAKLLRQHKGRLEARMQILEDHNKQLESQLHRLRQLLEQPQAEAKVNGTTVSSPSTSLQRSDSSQPMLLRVVGSQTSDSMGEEDLLSPPQDTSTGLEEVMEQLNNSFPSSRGHNVGSLFHMADDLGRAMESLVSVMTDEEGAE

SEQ ID NO: 26355 - protein, 622 aa, Homo sapiens
  Payload ID: 5193
  Gene Symbol: DMD
  Gene Name: dystrophin
  Uniprot ID: P11532
  ENSP ID: ENSP00000354464
MREQLKGHETQTTCWDHPKMTELYQSLADLNNVRFSAYRTAMKLRRLQKALCLDLLSLSAACDALDQHNLKQNDQPMDILQIINCLTTIYDRLEQEHNNLVNVPLCVDMCLNWLLNVYDTGRTGRIRVLSFKTGIISLCKAHLEDKYRYLFKQVASSTGFCDQRRLGLLLHDSIQIPRQLGEVASFGGSNIEPSVRSCFQFANNKPEIEAALFLDWMRLEPQSMVWLPVLHRVAAAETAKHQAKCNICKECPIIGFRYRSLKHFNYDICQSCFFSGRVAKGHKMHYPMVEYCTPTTSGEDVRDFAKVLKNKFRTKRYFAKHPRMGYLPVQTVLEGDNMETPASSPQLSHDDTHSRIEHYASRLAEMENSNGSYLNDSISPNESIDDEHLLIQHYCQSLNQDSPLSQPRSPAQILISLESEERGELERILADLEEENRNLQAEYDRLKQQHEHKGLSPLPSPPEMMPTSPQSPRDAELIAEAKLLRQHKGRLEARMQILEDHNKQLESQLHRLRQLLEQPQAEAKVNGTTVSSPSTSLQRSDSSQPMLLRVVGSQTSDSMGEEDLLSPPQDTSTGLEEVMEQLNNSFPSSRGHNVGSLFHMADDLGRAMESLVSVMTDEEGAE

SEQ ID NO: 26356 - protein, 3685 aa, Homo sapiens
  Payload ID: 5193
  Gene Symbol: DMD
  Gene Name: dystrophin
  ENSP ID: ENSP00000354923
MLWWEEVEDCYEREDVQKKTFTKWVNAQFSKFGKQHIENLFSDLQDGRRLLDLLEGLTGQKLPKEKGSTRVHALNNVNKALRVLQNNNVDLVNIGSTDIVDGNHKLTLGLIWNIILHWQVKNVMKNIMAGLQQTNSEKILLSWVRQSTRNYPQVNVINFTTSWSDGLALNALIHSHRPDLFDWNSVVCQQSATQRLEHAFNIARYQLGIEKLLDPEDVDTTYPDKKSILMYITSLFQVLPQQVSIEAIQEVEMLPRPPKVTKEEHFQLHHQMHYSQQITVSLAQGYERTSSPKPRFKSYAYTQAAYVTTSDPTRSPFPSQHLEAPEDKSFGSSLMESEVNLDRYQTALEEVLSWLLSAEDTLQAQGEISNDVEVVKDQFHTHEGYMMDLTAHQGRVGNILQLGSKLIGTGKLSEDEETEVQEQMNLLNSRWECLRVASMEKQSNLHRVLMDLQNQKLKELNDWLTKTEERTRKMEEEPLGPDLEDLKRQVQQHKVLQEDLEQEQVRVNSLTHMVVVVDESSGDHATAALEEQLKVLGDRWANICRWTEDRWVLLQDILLKWQRLTEEQCLFSAWLSEKEDAVNKIHTTGFKDQNEMLSSLQKLAVLKADLEKKKQSMGKLYSLKQDLLSTLKNKSVTQKTEAWLDNFARCWDNLVQKLEKSTAQISQAVTTTQPSLTQTTVMETVTTVTTREQILVKHAQEELPPPPPQKKRQITVDSEIRKRLDVDITELHSWITRSEAVLQSPEFAIFRKEGNFSDLKEKVNAIEREKAEKFRKLQDASRSAQALVEQMVNEGVNADSIKQASEQLNSRWIEFCQLLSERLNWLEYQNNIIAFYNQLQQLEQMTTTAENWLKIQPTTPSEPTAIKSQLKICKDEVNRLSDLQPQIERLKIQSIALKEKGQGPMFLDADFVAFTNHFKQVFSDVQAREKELQTIFDTLPPMRYQETMSAIRTWVQQSETKLSIPQLSVTDYEIMEQRLGELQALQSSLQEQQSGLYYLSTTVKEMSKKAPSEISRKYQSEFEEIEGRWKKLSSQLVEHCQKLEEQMNKLRKIQNHIQTLKKWMAEVDVFLKEEWPALGDSEILKKQLKQCRLLVSDIQTIQPSLNSVNEGGQKIKNEAEPEFASRLETELKELNTQWDHMCQQVYARKEALKGGLEKTVSLQKDLSEMHEWMTQAEEEYLERDFEYKTPDELQKAVEEMKRAKEEAQQKEAKVKLLTESVNSVIAQAPPVAQEALKKELETLTTNYQWLCTRLNGKCKTLEEVWACWHELLSYLEKANKWLNEVEFKLKTTENIPGGAEEISEVLDSLENLMRHSEDNPNQIRILAQTLTDGGVMDELINEELETFNSRWRELHEEAVRRQKLLEQSIQSAQETEKSLHLIQESLTFIDKQLAAYIADKVDAAQMPQEAQKIQSDLTSHEISLEEMKKHNQGKEAAQRVLSQIDVAQKKLQDVSMKFRLFQKPANFEQRLQESKMILDEVKMHLPALETKSVEQEVVQSQLNHCVNLYKSLSEVKSEVEMVIKTGRQIVQKKQTENPKELDERVTALKLHYNELGAKVTERKQQLEKCLKLSRKMRKEMNVLTEWLAATDMELTKRSAVEGMPSNLDSEVAWGKATQKEIEKQKVHLKSITEVGEALKTVLGKKETLVEDKLSLLNSNWIAVTSRAEEWLNLLLEYQKHMETFDQNVDHITKWIIQADTLLDESEKKKPQQKEDVLKRLKAELNDIRPKVDSTRDQAANLMANRGDHCRKLVEPQISELNHRFAAISHRIKTGKASIPLKELEQFNSDIQKLLEPLEAEIQQGVNLKEEDFNKDMNEDNEGTVKELLQRGDNLQQRITDERKREEIKIKQQLLQTKHNALKDLRSQRRKKALEISHQWYQYKRQADDLLKCLDDIEKKLASLPEPRDERKIKEIDRELQKKKEELNAVRRQAEGLSEDGAAMAVEPTQIQLSKRWREIESKFAQFRRLNFAQIHTVREETMMVMTEDMPLEISYVPSTYLTEITHVSQALLEVEQLLNAPDLCAKDFEDLFKQEESLKNIKDSLQQSSGRIDIIHSKKTAALQSATPVERVKLQEALSQLDFQWEKVNKMYKDRQGRFDRSVEKWRRFHYDIKIFNQWLTEAEQFLRKTQIPENWEHAKYKWYLKELQDGIGQRQTVVRTLNATGEEIIQQSSKTDASILQEKLGSLNLRWQEVCKQLSDRKKRLEEQKNILSEFQRDLNEFVLWLEEADNIASIPLEPGKEQQLKEKLEQVKLLVEELPLRQGILKQLNETGGPVLVSAPISPEEQDKLENKLKQTNLQWIKVSRALPEKQGEIEAQIKDLGQLEKKLEDLEEQLNHLLLWLSPIRNQLEIYNQPNQEGPFDVKETEIAVQAKQPDVEEILSKGQHLYKEKPATQPVKRKLEDLSSEWKAVNRLLQELRAKQPDLAPGLTTIGASPTQTVTLVTQPVVTKETAISKLEMPSSLMLEVPALADFNRAWTELTDWLSLLDQVIKSQRVMVGDLEDINEMIIKQKATMQDLEQRRPQLEELITAAQNLKNKTSNQEARTIITDRIERIQNQWDEVQEHLQNRRQQLNEMLKDSTQWLEAKEEAEQVLGQARAKLESWKEGPYTVDAIQKKITETKQLAKDLRQWQTNVDVANDLALKLLRDYSADDTRKVHMITENINASWRSIHKRVSEREAALEETHRLLQQFPLDLEKFLAWLTEAETTANVLQDATRKERLLEDSKGVKELMKQWQDLQGEIEAHTDVYHNLDENSQKILRSLEGSDDAVLLQRRLDNMNFKWSELRKKSLNIRSHLEASSDQWKRLHLSLQELLVWLQLKDDELSRQAPIGGDFPAVQKQNDVHRAFKRELKTKEPVIMSTLETVRIFLTEQPLEGLEKLYQEPRELPPEERAQNVTRLLRKQAEEVNTEWEKLNLHSADWQRKIDETLERLRELQEATDELDLKLRQAEVIKGSWQPVGDLLIDSLQDHLEKVKALRGEIAPLKENVSHVNDLARQLTTLGIQLSPYNLSTLEDLNTRWKLLQVAVEDRVRQLHEAHRDFGPASQHFLSTSVQGPWERAISPNKVPYYINHETQTTCWDHPKMTELYQSLADLNNVRFSAYRTAMKLRRLQKALCLDLLSLSAACDALDQHNLKQNDQPMDILQIINCLTTIYDRLEQEHNNLVNVPLCVDMCLNWLLNVYDTGRTGRIRVLSFKTGIISLCKAHLEDKYRYLFKQVASSTGFCDQRRLGLLLHDSIQIPRQLGEVASFGGSNIEPSVRSCFQFANNKPEIEAALFLDWMRLEPQSMVWLPVLHRVAAAETAKHQAKCNICKECPIIGFRYRSLKHFNYDICQSCFFSGRVAKGHKMHYPMVEYCTPTTSGEDVRDFAKVLKNKFRTKRYFAKHPRMGYLPVQTVLEGDNMETPVTLINFWPVDSAPASSPQLSHDDTHSRIEHYASRLAEMENSNGSYLNDSISPNESIDDEHLLIQHYCQSLNQDSPLSQPRSPAQILISLESEERGELERILADLEEENRNLQAEYDRLKQQHEHKGLSPLPSPPEMMPTSPQSPRDAELIAEAKLLRQHKGRLEARMQILEDHNKQLESQLHRLRQLLEQPQAEAKVNGTTVSSPSTSLQRSDSSQPMLLRVVGSQTSDSMGEEDLLSPPQDTSTGLEEVMEQLNNSFPSSRGRNTPGKPMREDTM

SEQ ID NO: 26357 - protein, 3681 aa, Homo sapiens
  Payload ID: 5193
  Gene Symbol: DMD
  Gene Name: dystrophin
  ENSP ID: ENSP00000367948
MSEVSSDEREDVQKKTFTKWVNAQFSKFGKQHIENLFSDLQDGRRLLDLLEGLTGQKLPKEKGSTRVHALNNVNKALRVLQNNNVDLVNIGSTDIVDGNHKLTLGLIWNIILHWQVKNVMKNIMAGLQQTNSEKILLSWVRQSTRNYPQVNVINFTTSWSDGLALNALIHSHRPDLFDWNSVVCQQSATQRLEHAFNIARYQLGIEKLLDPEDVDTTYPDKKSILMYITSLFQVLPQQVSIEAIQEVEMLPRPPKVTKEEHFQLHHQMHYSQQITVSLAQGYERTSSPKPRFKSYAYTQAAYVTTSDPTRSPFPSQHLEAPEDKSFGSSLMESEVNLDRYQTALEEVLSWLLSAEDTLQAQGEISNDVEVVKDQFHTHEGYMMDLTAHQGRVGNILQLGSKLIGTGKLSEDEETEVQEQMNLLNSRWECLRVASMEKQSNLHRVLMDLQNQKLKELNDWLTKTEERTRKMEEEPLGPDLEDLKRQVQQHKVLQEDLEQEQVRVNSLTHMVVVVDESSGDHATAALEEQLKVLGDRWANICRWTEDRWVLLQDILLKWQRLTEEQCLFSAWLSEKEDAVNKIHTTGFKDQNEMLSSLQKLAVLKADLEKKKQSMGKLYSLKQDLLSTLKNKSVTQKTEAWLDNFARCWDNLVQKLEKSTAQISQAVTTTQPSLTQTTVMETVTTVTTREQILVKHAQEELPPPPPQKKRQITVDSEIRKRLDVDITELHSWITRSEAVLQSPEFAIFRKEGNFSDLKEKVNAIEREKAEKFRKLQDASRSAQALVEQMVNEGVNADSIKQASEQLNSRWIEFCQLLSERLNWLEYQNNIIAFYNQLQQLEQMTTTAENWLKIQPTTPSEPTAIKSQLKICKDEVNRLSDLQPQIERLKIQSIALKEKGQGPMFLDADFVAFTNHFKQVFSDVQAREKELQTIFDTLPPMRYQETMSAIRTWVQQSETKLSIPQLSVTDYEIMEQRLGELQALQSSLQEQQSGLYYLSTTVKEMSKKAPSEISRKYQSEFEEIEGRWKKLSSQLVEHCQKLEEQMNKLRKIQNHIQTLKKWMAEVDVFLKEEWPALGDSEILKKQLKQCRLLVSDIQTIQPSLNSVNEGGQKIKNEAEPEFASRLETELKELNTQWDHMCQQVYARKEALKGGLEKTVSLQKDLSEMHEWMTQAEEEYLERDFEYKTPDELQKAVEEMKRAKEEAQQKEAKVKLLTESVNSVIAQAPPVAQEALKKELETLTTNYQWLCTRLNGKCKTLEEVWACWHELLSYLEKANKWLNEVEFKLKTTENIPGGAEEISEVLDSLENLMRHSEDNPNQIRILAQTLTDGGVMDELINEELETFNSRWRELHEEAVRRQKLLEQSIQSAQETEKSLHLIQESLTFIDKQLAAYIADKVDAAQMPQEAQKIQSDLTSHEISLEEMKKHNQGKEAAQRVLSQIDVAQKKLQDVSMKFRLFQKPANFEQRLQESKMILDEVKMHLPALETKSVEQEVVQSQLNHCVNLYKSLSEVKSEVEMVIKTGRQIVQKKQTENPKELDERVTALKLHYNELGAKVTERKQQLEKCLKLSRKMRKEMNVLTEWLAATDMELTKRSAVEGMPSNLDSEVAWGKATQKEIEKQKVHLKSITEVGEALKTVLGKKETLVEDKLSLLNSNWIAVTSRAEEWLNLLLEYQKHMETFDQNVDHITKWIIQADTLLDESEKKKPQQKEDVLKRLKAELNDIRPKVDSTRDQAANLMANRGDHCRKLVEPQISELNHRFAAISHRIKTGKASIPLKELEQFNSDIQKLLEPLEAEIQQGVNLKEEDFNKDMNEDNEGTVKELLQRGDNLQQRITDERKREEIKIKQQLLQTKHNALKDLRSQRRKKALEISHQWYQYKRQADDLLKCLDDIEKKLASLPEPRDERKIKEIDRELQKKKEELNAVRRQAEGLSEDGAAMAVEPTQIQLSKRWREIESKFAQFRRLNFAQIHTVREETMMVMTEDMPLEISYVPSTYLTEITHVSQALLEVEQLLNAPDLCAKDFEDLFKQEESLKNIKDSLQQSSGRIDIIHSKKTAALQSATPVERVKLQEALSQLDFQWEKVNKMYKDRQGRFDRSVEKWRRFHYDIKIFNQWLTEAEQFLRKTQIPENWEHAKYKWYLKELQDGIGQRQTVVRTLNATGEEIIQQSSKTDASILQEKLGSLNLRWQEVCKQLSDRKKRLEEQKNILSEFQRDLNEFVLWLEEADNIASIPLEPGKEQQLKEKLEQVKLLVEELPLRQGILKQLNETGGPVLVSAPISPEEQDKLENKLKQTNLQWIKVSRALPEKQGEIEAQIKDLGQLEKKLEDLEEQLNHLLLWLSPIRNQLEIYNQPNQEGPFDVKETEIAVQAKQPDVEEILSKGQHLYKEKPATQPVKRKLEDLSSEWKAVNRLLQELRAKQPDLAPGLTTIGASPTQTVTLVTQPVVTKETAISKLEMPSSLMLEVPALADFNRAWTELTDWLSLLDQVIKSQRVMVGDLEDINEMIIKQKATMQDLEQRRPQLEELITAAQNLKNKTSNQEARTIITDRIERIQNQWDEVQEHLQNRRQQLNEMLKDSTQWLEAKEEAEQVLGQARAKLESWKEGPYTVDAIQKKITETKQLAKDLRQWQTNVDVANDLALKLLRDYSADDTRKVHMITENINASWRSIHKRVSEREAALEETHRLLQQFPLDLEKFLAWLTEAETTANVLQDATRKERLLEDSKGVKELMKQWQDLQGEIEAHTDVYHNLDENSQKILRSLEGSDDAVLLQRRLDNMNFKWSELRKKSLNIRSHLEASSDQWKRLHLSLQELLVWLQLKDDELSRQAPIGGDFPAVQKQNDVHRAFKRELKTKEPVIMSTLETVRIFLTEQPLEGLEKLYQEPRELPPEERAQNVTRLLRKQAEEVNTEWEKLNLHSADWQRKIDETLERLRELQEATDELDLKLRQAEVIKGSWQPVGDLLIDSLQDHLEKVKALRGEIAPLKENVSHVNDLARQLTTLGIQLSPYNLSTLEDLNTRWKLLQVAVEDRVRQLHEAHRDFGPASQHFLSTSVQGPWERAISPNKVPYYINHETQTTCWDHPKMTELYQSLADLNNVRFSAYRTAMKLRRLQKALCLDLLSLSAACDALDQHNLKQNDQPMDILQIINCLTTIYDRLEQEHNNLVNVPLCVDMCLNWLLNVYDTGRTGRIRVLSFKTGIISLCKAHLEDKYRYLFKQVASSTGFCDQRRLGLLLHDSIQIPRQLGEVASFGGSNIEPSVRSCFQFANNKPEIEAALFLDWMRLEPQSMVWLPVLHRVAAAETAKHQAKCNICKECPIIGFRYRSLKHFNYDICQSCFFSGRVAKGHKMHYPMVEYCTPTTSGEDVRDFAKVLKNKFRTKRYFAKHPRMGYLPVQTVLEGDNMETPVTLINFWPVDSAPASSPQLSHDDTHSRIEHYASRLAEMENSNGSYLNDSISPNESIDDEHLLIQHYCQSLNQDSPLSQPRSPAQILISLESEERGELERILADLEEENRNLQAEYDRLKQQHEHKGLSPLPSPPEMMPTSPQSPRDAELIAEAKLLRQHKGRLEARMQILEDHNKQLESQLHRLRQLLEQPQAEAKVNGTTVSSPSTSLQRSDSSQPMLLRVVGSQTSDSMGEEDLLSPPQDTSTGLEEVMEQLNNSFPSSRGRNTPGKPMREDTM

SEQ ID NO: 26358 - protein, 525 aa, Homo sapiens
  Payload ID: 5193
  Gene Symbol: DMD
  Gene Name: dystrophin
  Uniprot ID: P11532
  ENSP ID: ENSP00000367951
MREQLKGHETQTTCWDHPKMTELYQSLADLNNVRFSAYRTAMKLRRLQKALCLDLLSLSAACDALDQHNLKQNDQPMDILQIINCLTTIYDRLEQEHNNLVNVPLCVDMCLNWLLNVYDTGRTGRIRVLSFKTGIISLCKAHLEDKYRYLFKQVASSTGFCDQRRLGLLLHDSIQIPRQLGEVASFGGSNIEPSVRSCFQFANNKPEIEAALFLDWMRLEPQSMVWLPVLHRVAAAETAKHQAKCNICKECPIIGFRYRSLKHFNYDICQSCFFSGRVAKGHKMHYPMVEYCTPTTSGEDVRDFAKVLKNKFRTKRYFAKHPRMGYLPVQTVLEGDNMETNLQAEYDRLKQQHEHKGLSPLPSPPEMMPTSPQSPRDAELIAEAKLLRQHKGRLEARMQILEDHNKQLESQLHRLRQLLEQPQAEAKVNGTTVSSPSTSLQRSDSSQPMLLRVVGSQTSDSMGEEDLLSPPQDTSTGLEEVMEQLNNSFPSSRGHNVGSLFHMADDLGRAMESLVSVMTDEEGAE

SEQ ID NO: 26359 - protein, 617 aa, Homo sapiens
  Payload ID: 5193
  Gene Symbol: DMD
  Gene Name: dystrophin
  Uniprot ID: P11532
  ENSP ID: ENSP00000367974
MREQLKGHETQTTCWDHPKMTELYQSLADLNNVRFSAYRTAMKLRRLQKALCLDLLSLSAACDALDQHNLKQNDQPMDILQIINCLTTIYDRLEQEHNNLVNVPLCVDMCLNWLLNVYDTGRTGRIRVLSFKTGIISLCKAHLEDKYRYLFKQVASSTGFCDQRRLGLLLHDSIQIPRQLGEVASFGGSNIEPSVRSCFQFANNKPEIEAALFLDWMRLEPQSMVWLPVLHRVAAAETAKHQAKCNICKECPIIGFRYRSLKHFNYDICQSCFFSGRVAKGHKMHYPMVEYCTPTTSGEDVRDFAKVLKNKFRTKRYFAKHPRMGYLPVQTVLEGDNMETPVTLINFWPVDSAPASSPQLSHDDTHSRIEHYASRLAEMENSNGSYLNDSISPNESIDDEHLLIQHYCQSLNQDSPLSQPRSPAQILISLESEERGELERILADLEEENRNLQAEYDRLKQQHEHKGLSPLPSPPEMMPTSPQSPRDAELIAEAKLLRQHKGRLEARMQILEDHNKQLESQLHRLRQLLEQPQAEAKVNGTTVSSPSTSLQRSDSSQPMLLRVVGSQTSDSMGEEDLLSPPQDTSTGLEEVMEQLNNSFPSSRGRNTPGKPMREDTM

SEQ ID NO: 26360 - protein, 238 aa, Homo sapiens
  Payload ID: 5193
  Gene Symbol: DMD
  Gene Name: dystrophin
  ENSP ID: ENSP00000367977
LEDKYRYLFKQVASSTGFCDQRRLGLLLHDSIQIPRQLGEVASFGGSNIEPSVRSCFQFANNKPEIEAALFLDWMRLEPQSMVWLPVLHRVAAAETAKHQAKCNICKECPIIGFRYRSLKHFNYDICQSCFFSGRVAKGHKMHYPMVEYCTPTTSGEDVRDFAKVLKNKFRTKRYFAKHPRMGYLPVQTVLEGDNMETPVTLINFWPVDSAPASSPQLSHDDTHSRIEHYASRDDEHL

SEQ ID NO: 26361 - protein, 1225 aa, Homo sapiens
  Payload ID: 5193
  Gene Symbol: DMD
  Gene Name: dystrophin
  ENSP ID: ENSP00000367979
MPSSLMLEVPALADFNRAWTELTDWLSLLDQVIKSQRVMVGDLEDINEMIIKQKATMQDLEQRRPQLEELITAAQNLKNKTSNQEARTIITDRIERIQNQWDEVQEHLQNRRQQLNEMLKDSTQWLEAKEEAEQVLGQARAKLESWKEGPYTVDAIQKKITETKQLAKDLRQWQTNVDVANDLALKLLRDYSADDTRKVHMITENINASWRSIHKRVSEREAALEETHRLLQQFPLDLEKFLAWLTEAETTANVLQDATRKERLLEDSKGVKELMKQWQDLQGEIEAHTDVYHNLDENSQKILRSLEGSDDAVLLQRRLDNMNFKWSELRKKSLNIRSHLEASSDQWKRLHLSLQELLVWLQLKDDELSRQAPIGGDFPAVQKQNDVHRAFKRELKTKEPVIMSTLETVRIFLTEQPLEGLEKLYQEPRELPPEERAQNVTRLLRKQAEEVNTEWEKLNLHSADWQRKIDETLERLRELQEATDELDLKLRQAEVIKGSWQPVGDLLIDSLQDHLEKVKALRGEIAPLKENVSHVNDLARQLTTLGIQLSPYNLSTLEDLNTRWKLLQVAVEDRVRQLHEAHRDFGPASQHFLSTSVQGPWERAISPNKVPYYINHETQTTCWDHPKMTELYQSLADLNNVRFSAYRTAMKLRRLQKALCLDLLSLSAACDALDQHNLKQNDQPMDILQIINCLTTIYDRLEQEHNNLVNVPLCVDMCLNWLLNVYDTGRTGRIRVLSFKTGIISLCKAHLEDKYRYLFKQVASSTGFCDQRRLGLLLHDSIQIPRQLGEVASFGGSNIEPSVRSCFQFANNKPEIEAALFLDWMRLEPQSMVWLPVLHRVAAAETAKHQAKCNICKECPIIGFRYRSLKHFNYDICQSCFFSGRVAKGHKMHYPMVEYCTPTTSGEDVRDFAKVLKNKFRTKRYFAKHPRMGYLPVQTVLEGDNMETPVTLINFWPVDSAPASSPQLSHDDTHSRIEHYASRLAEMENSNGSYLNDSISPNESIDDEHLLIQHYCQSLNQDSPLSQPRSPAQILISLESEERGELERILADLEEENRNLQAEYDRLKQQHEHKGLSPLPSPPEMMPTSPQSPRDAELIAEAKLLRQHKGRLEARMQILEDHNKQLESQLHRLRQLLEQPQAEAKVNGTTVSSPSTSLQRSDSSQPMLLRVVGSQTSDSMGEEDLLSPPQDTSTGLEEVMEQLNNSFPSSRGRNTPGKPMREDTM

SEQ ID NO: 26362 - protein, 635 aa, Homo sapiens
  Payload ID: 5193
  Gene Symbol: DMD
  Gene Name: dystrophin
  Uniprot ID: P11532
  ENSP ID: ENSP00000367997
MREQLKGHETQTTCWDHPKMTELYQSLADLNNVRFSAYRTAMKLRRLQKALCLDLLSLSAACDALDQHNLKQNDQPMDILQIINCLTTIYDRLEQEHNNLVNVPLCVDMCLNWLLNVYDTGRTGRIRVLSFKTGIISLCKAHLEDKYRYLFKQVASSTGFCDQRRLGLLLHDSIQIPRQLGEVASFGGSNIEPSVRSCFQFANNKPEIEAALFLDWMRLEPQSMVWLPVLHRVAAAETAKHQAKCNICKECPIIGFRYRSLKHFNYDICQSCFFSGRVAKGHKMHYPMVEYCTPTTSGEDVRDFAKVLKNKFRTKRYFAKHPRMGYLPVQTVLEGDNMETPVTLINFWPVDSAPASSPQLSHDDTHSRIEHYASRLAEMENSNGSYLNDSISPNESIDDEHLLIQHYCQSLNQDSPLSQPRSPAQILISLESEERGELERILADLEEENRNLQAEYDRLKQQHEHKGLSPLPSPPEMMPTSPQSPRDAELIAEAKLLRQHKGRLEARMQILEDHNKQLESQLHRLRQLLEQPQAEAKVNGTTVSSPSTSLQRSDSSQPMLLRVVGSQTSDSMGEEDLLSPPQDTSTGLEEVMEQLNNSFPSSRGHNVGSLFHMADDLGRAMESLVSVMTDEEGAE

SEQ ID NO: 26363 - protein, 41 aa, Homo sapiens
  Payload ID: 5193
  Gene Symbol: DMD
  Gene Name: dystrophin
  ENSP ID: ENSP00000388559
MLWWEEVEDCYEREDVQKKTFTKWVNAQFSKEYQKHMETFD

SEQ ID NO: 26364 - protein, 125 aa, Homo sapiens
  Payload ID: 5193
  Gene Symbol: DMD
  Gene Name: dystrophin
  ENSP ID: ENSP00000395904
ENLFSDLQDGRRLLDLLEGLTGQKLPKEKGSTRVHALNNVNKALRVLQNNNVDLVNIGSTDIVDGNHKLTLGLIWNIILHWQVLGDRWANICRWTEDRWVLLQDILLKWQRLTEEQCLFSAWLSE

SEQ ID NO: 26365 - protein, 101 aa, Homo sapiens
  Payload ID: 5193
  Gene Symbol: DMD
  Gene Name: dystrophin
  ENSP ID: ENSP00000399897
MLWWEEVEDCYEREDVQKKTFTKWVNAQFSKATQKEIEKQKVHLKSITEVGEALKTVLGKKETLVEDKLSLLNSNWIAVTSRAEEWLNLLLEYQKHMETFD

SEQ ID NO: 26366 - protein, 30 aa, Homo sapiens
  Payload ID: 5193
  Gene Symbol: DMD
  Gene Name: dystrophin
  ENSP ID: ENSP00000417075
VEEILSKGQHLYKEKPATQPVKLLLRLLLW

SEQ ID NO: 26367 - protein, 1243 aa, Homo sapiens
  Payload ID: 5193
  Gene Symbol: DMD
  Gene Name: dystrophin
  ENSP ID: ENSP00000417123
MPSSLMLEVPALADFNRAWTELTDWLSLLDQVIKSQRVMVGDLEDINEMIIKQKATMQDLEQRRPQLEELITAAQNLKNKTSNQEARTIITDRIERIQNQWDEVQEHLQNRRQQLNEMLKDSTQWLEAKEEAEQVLGQARAKLESWKEGPYTVDAIQKKITETKQLAKDLRQWQTNVDVANDLALKLLRDYSADDTRKVHMITENINASWRSIHKRVSEREAALEETHRLLQQFPLDLEKFLAWLTEAETTANVLQDATRKERLLEDSKGVKELMKQWQDLQGEIEAHTDVYHNLDENSQKILRSLEGSDDAVLLQRRLDNMNFKWSELRKKSLNIRSHLEASSDQWKRLHLSLQELLVWLQLKDDELSRQAPIGGDFPAVQKQNDVHRAFKRELKTKEPVIMSTLETVRIFLTEQPLEGLEKLYQEPRELPPEERAQNVTRLLRKQAEEVNTEWEKLNLHSADWQRKIDETLERLRELQEATDELDLKLRQAEVIKGSWQPVGDLLIDSLQDHLEKVKALRGEIAPLKENVSHVNDLARQLTTLGIQLSPYNLSTLEDLNTRWKLLQVAVEDRVRQLHEAHRDFGPASQHFLSTSVQGPWERAISPNKVPYYINHETQTTCWDHPKMTELYQSLADLNNVRFSAYRTAMKLRRLQKALCLDLLSLSAACDALDQHNLKQNDQPMDILQIINCLTTIYDRLEQEHNNLVNVPLCVDMCLNWLLNVYDTGRTGRIRVLSFKTGIISLCKAHLEDKYRYLFKQVASSTGFCDQRRLGLLLHDSIQIPRQLGEVASFGGSNIEPSVRSCFQFANNKPEIEAALFLDWMRLEPQSMVWLPVLHRVAAAETAKHQAKCNICKECPIIGFRYRSLKHFNYDICQSCFFSGRVAKGHKMHYPMVEYCTPTTSGEDVRDFAKVLKNKFRTKRYFAKHPRMGYLPVQTVLEGDNMETPVTLINFWPVDSAPASSPQLSHDDTHSRIEHYASRLAEMENSNGSYLNDSISPNESIDDEHLLIQHYCQSLNQDSPLSQPRSPAQILISLESEERGELERILADLEEENRNLQAEYDRLKQQHEHKGLSPLPSPPEMMPTSPQSPRDAELIAEAKLLRQHKGRLEARMQILEDHNKQLESQLHRLRQLLEQPQAEAKVNGTTVSSPSTSLQRSDSSQPMLLRVVGSQTSDSMGEEDLLSPPQDTSTGLEEVMEQLNNSFPSSRGHNVGSLFHMADDLGRAMESLVSVMTDEEGAE

SEQ ID NO: 26368 - protein, 134 aa, Homo sapiens
  Payload ID: 5193
  Gene Symbol: DMD
  Gene Name: dystrophin
  ENSP ID: ENSP00000417725
ELEQFNSDIQKLLEPLEAEIQQGVNLKEEDFNKDMNEDNEGTVKELLQRGDNLQQRITDERKREEIKIKQQLLQTKHNALKDLRSQRRKKALEISHQWYQYKRQADDLLKCLDDIEKKLASLPEPRDERKIKMN

SEQ ID NO: 26369 - protein, 1115 aa, Homo sapiens
  Payload ID: 5193
  Gene Symbol: DMD
  Gene Name: dystrophin
  ENSP ID: ENSP00000444119
MPSSLMLEVPALADFNRAWTELTDWLSLLDQVIKSQRVMVGDLEDINEMIIKQKATMQDLEQRRPQLEELITAAQNLKNKTSNQEARTIITDRIERIQNQWDEVQEHLQNRRQQLNEMLKDSTQWLEAKEEAEQVLGQARAKLESWKEGPYTVDAIQKKITETKQLAKDLRQWQTNVDVANDLALKLLRDYSADDTRKVHMITENINASWRSIHKRVSEREAALEETHRLLQQFPLDLEKFLAWLTEAETTANVLQDATRKERLLEDSKGVKELMKQWQDLQGEIEAHTDVYHNLDENSQKILRSLEGSDDAVLLQRRLDNMNFKWSELRKKSLNIRSHLEASSDQWKRLHLSLQELLVWLQLKDDELSRQAPIGGDFPAVQKQNDVHRAFKRELKTKEPVIMSTLETVRIFLTEQPLEGLEKLYQEPRELPPEERAQNVTRLLRKQAEEVNTEWEKLNLHSADWQRKIDETLERLRELQEATDELDLKLRQAEVIKGSWQPVGDLLIDSLQDHLEKVKALRGEIAPLKENVSHVNDLARQLTTLGIQLSPYNLSTLEDLNTRWKLLQVAVEDRVRQLHEAHRDFGPASQHFLSTSVQGPWERAISPNKVPYYINHETQTTCWDHPKMTELYQSLADLNNVRFSAYRTAMKLRRLQKALCLDLLSLSAACDALDQHNLKQNDQPMDILQIINCLTTIYDRLEQEHNNLVNVPLCVDMCLNWLLNVYDTGRTGRIRVLSFKTGIISLCKAHLEDKYRYLFKQVASSTGFCDQRRLGLLLHDSIQIPRQLGEVASFGGSNIEPSVRSCFQFANNKPEIEAALFLDWMRLEPQSMVWLPVLHRVAAAETAKHQAKCNICKECPIIGFRYRSLKHFNYDICQSCFFSGRVAKGHKMHYPMVEYCTPTTSGEDVRDFAKVLKNKFRTKRYFAKHPRMGYLPVQTVLEGDNMETNLQAEYDRLKQQHEHKGLSPLPSPPEMMPTSPQSPRDAELIAEAKLLRQHKGRLEARMQILEDHNKQLESQLHRLRQLLEQPQAEAKVNGTTVSSPSTSLQRSDSSQPMLLRVVGSQTSDSMGEEDLLSPPQDTSTGLEEVMEQLNNSFPSSRGRNTPGKPMREDTM

SEQ ID NO: 26370 - protein, 3684 aa, Homo sapiens
  Payload ID: 5193
  Gene Symbol: DMD
  Gene Name: dystrophin
  ENSP ID: ENSP00000478150
MLWWEEVEDCYEREDVQKKTFTKWVNAQFSKFGKQHIENLFSDLQDGRRLLDLLEGLTGQKLPKEKGSTRVHALNNVNKALRVLQNNNVDLVNIGSTDIVDGNHKLTLGLIWNIILHWQVKNVMKNIMAGLQQTNSEKILLSWVRQSTRNYPQVNVINFTTSWSDGLALNALIHSHRPDLFDWNSVVCQQSATQRLEHAFNIARYQLGIEKLLDPEDVDTTYPDKKSILMYITSLFQVLPQQVSIEAIQEVEMLPRPPKVTKEEHFQLHHQMHYSQQITVSLAQGYERTSSPKPRFKSYAYTQAAYVTTSDPTRSPFPSQHLEAPEDKSFGSSLMESEVNLDRYQTALEEVLSWLLSAEDTLQAQGEISNDVEVVKDQFHTHEGYMMDLTAHQGRVGNILQLGSKLIGTGKLSEDEETEVQEQMNLLNSRWECLRVASMEKQSNLHRVLMDLQNQKLKELNDWLTKTEERTRKMEEEPLGPDLEDLKRQVQQHKVLQEDLEQEQVRVNSLTHMVVVVDESSGDHATAALEEQLKVLGDRWANICRWTEDRWVLLQDILLKWQRLTEEQCLFSAWLSEKEDAVNKIHTTGFKDQNEMLSSLQKLAVLKADLEKKKQSMGKLYSLKQDLLSTLKNKSVTQKTEAWLDNFARCWDNLVQKLEKSTAQISQAVTTTQPSLTQTTVMETVTTVTTREQILVKHAQEELPPPPPQKKRQITVDSEIRKRLDVDITELHSWITRSEAVLQSPEFAIFRKEGNFSDLKEKVNAIEREKAEKFRKLQDASRSAQALVEQMVNEGVNADSIKQASEQLNSRWIEFCQLLSERLNWLEYQNNIIAFYNQLQQLEQMTTTAENWLKIQPTTPSEPTAIKSQLKICKDEVNRLSDLQPQIERLKIQSIALKEKGQGPMFLDADFVAFTNHFKQVFSDVQAREKELQTIFDTLPPMRYQETMSAIRTWVQQSETKLSIPQLSVTDYEIMEQRLGELQALQSSLQEQQSGLYYLSTTVKEMSKKAPSEISRKYQSEFEEIEGRWKKLSSQLVEHCQKLEEQMNKLRKIQNHIQTLKKWMAEVDVFLKEEWPALGDSEILKKQLKQCRLLVSDIQTIQPSLNSVNEGGQKIKNEAEPEFASRLETELKELNTQWDHMCQQVYARKEALKGGLEKTVSLQKDLSEMHEWMTQAEEEYLERDFEYKTPDELQKAVEEMKRAKEEAQQKEAKVKLLTESVNSVIAQAPPVAQEALKKELETLTTNYQWLCTRLNGKCKTLEEVWACWHELLSYLEKANKWLNEVEFKLKTTENIPGGAEEISEVLDSLENLMRHSEDNPNQIRILAQTLTDGGVMDELINEELETFNSRWRELHEEAVRRQKLLEQSIQSAQETEKSLHLIQESLTFIDKQLAAYIADKVDAAQMPQEAQKIQSDLTSHEISLEEMKKHNQGKEAAQRVLSQIDVAQKKLQDVSMKFRLFQKPANFEQRLQESKMILDEVKMHLPALETKSVEQEVVQSQLNHCVNLYKSLSEVKSEVEMVIKTGRQIVQKKQTENPKELDERVTALKLHYNELGAKVTERKQQLEKCLKLSRKMRKEMNVLTEWLAATDMELTKRSAVEGMPSNLDSEVAWGKATQKEIEKQKVHLKSITEVGEALKTVLGKKETLVEDKLSLLNSNWIAVTSRAEEWLNLLLEYQKHMETFDQNVDHITKWIIQADTLLDESEKKKPQQKEDVLKRLKAELNDIRPKVDSTRDQAANLMANRGDHCRKLVEPQISELNHRFAAISHRIKTGKASIPLKELEQFNSDIQKLLEPLEAEIQQGVNLKEEDFNKDMNEDNEGTVKELLQRGDNLQQRITDERKREEIKIKQQLLQTKHNALKDLRSQRRKKALEISHQWYQYKRQADDLLKCLDDIEKKLASLPEPRDERKIKEIDRELQKKKEELNAVRRQAEGLSEDGAAMAVEPTQIQLSKRWREIESKFAQFRRLNFAQIHTVREETMMVMTEDMPLEISYVPSTYLTEITHVSQALLEVEQLLNAPDLCAKDFEDLFKQEESLKNIKDSLQQSSGRIDIIHSKKTAALQSATPVERVKLQEALSQLDFQWEKVNKMYKDRQGRFDRSVEKWRRFHYDIKIFNQWLTEAEQFLRKTQIPENWEHAKYKWYLKVSLFVFSKHTFCLQRQKTGEEIIQQSSKTDASILQEKLGSLNLRWQEVCKQLSDRKKRLEEQKNILSEFQRDLNEFVLWLEEADNIASIPLEPGKEQQLKEKLEQVKLLVEELPLRQGILKQLNETGGPVLVSAPISPEEQDKLENKLKQTNLQWIKVSRALPEKQGEIEAQIKDLGQLEKKLEDLEEQLNHLLLWLSPIRNQLEIYNQPNQEGPFDVKETEIAVQAKQPDVEEILSKGQHLYKEKPATQPVKRKLEDLSSEWKAVNRLLQELRAKQPDLAPGLTTIGASPTQTVTLVTQPVVTKETAISKLEMPSSLMLEVPALADFNRAWTELTDWLSLLDQVIKSQRVMVGDLEDINEMIIKQKATMQDLEQRRPQLEELITAAQNLKNKTSNQEARTIITDRIERIQNQWDEVQEHLQNRRQQLNEMLKDSTQWLEAKEEAEQVLGQARAKLESWKEGPYTVDAIQKKITETKQLAKDLRQWQTNVDVANDLALKLLRDYSADDTRKVHMITENINASWRSIHKRVSEREAALEETHRLLQQFPLDLEKFLAWLTEAETTANVLQDATRKERLLEDSKGVKELMKQWQDLQGEIEAHTDVYHNLDENSQKILRSLEGSDDAVLLQRRLDNMNFKWSELRKKSLNIRSHLEASSDQWKRLHLSLQELLVWLQLKDDELSRQAPIGGDFPAVQKQNDVHRAFKRELKTKEPVIMSTLETVRIFLTEQPLEGLEKLYQEPRELPPEERAQNVTRLLRKQAEEVNTEWEKLNLHSADWQRKIDETLERLRELQEATDELDLKLRQAEVIKGSWQPVGDLLIDSLQDHLEKVKALRGEIAPLKENVSHVNDLARQLTTLGIQLSPYNLSTLEDLNTRWKLLQVAVEDRVRQLHEAHRDFGPASQHFLSTSVQGPWERAISPNKVPYYINHETQTTCWDHPKMTELYQSLADLNNVRFSAYRTAMKLRRLQKALCLDLLSLSAACDALDQHNLKQNDQPMDILQIINCLTTIYDRLEQEHNNLVNVPLCVDMCLNWLLNVYDTGRTGRIRVLSFKTGIISLCKAHLEDKYRYLFKQVASSTGFCDQRRLGLLLHDSIQIPRQLGEVASFGGSNIEPSVRSCFQFANNKPEIEAALFLDWMRLEPQSMVWLPVLHRVAAAETAKHQAKCNICKECPIIGFRYRSLKHFNYDICQSCFFSGRVAKGHKMHYPMVEYCTPTTSGEDVRDFAKVLKNKFRTKRYFAKHPRMGYLPVQTVLEGDNMETPVTLINFWPVDSAPASSPQLSHDDTHSRIEHYASRLAEMENSNGSYLNDSISPNESIDDEHLLIQHYCQSLNQDSPLSQPRSPAQILISLESEERGELERILADLEEENRNLQAEYDRLKQQHEHKGLSPLPSPPEMMPTSPQSPRDAELIAEAKLLRQHKGRLEARMQILEDHNKQLESQLHRLRQLLEQPQAEAKVNGTTVSSPSTSLQRSDSSQPMLLRVVGSQTSDSMGEEDLLSPPQDTSTGLEEVMEQLNNSFPSSRGRNTPGKPMREDTM

SEQ ID NO: 26371 - protein, 3680 aa, Homo sapiens
  Payload ID: 5193
  Gene Symbol: DMD
  Gene Name: dystrophin
  ENSP ID: ENSP00000479270
MSEVSSDEREDVQKKTFTKWVNAQFSKFGKQHIENLFSDLQDGRRLLDLLEGLTGQKLPKEKGSTRVHALNNVNKALRVLQNNNVDLVNIGSTDIVDGNHKLTLGLIWNIILHWQVKNVMKNIMAGLQQTNSEKILLSWVRQSTRNYPQVNVINFTTSWSDGLALNALIHSHRPDLFDWNSVVCQQSATQRLEHAFNIARYQLGIEKLLDPEDVDTTYPDKKSILMYITSLFQVLPQQVSIEAIQEVEMLPRPPKVTKEEHFQLHHQMHYSQQITVSLAQGYERTSSPKPRFKSYAYTQAAYVTTSDPTRSPFPSQHLEAPEDKSFGSSLMESEVNLDRYQTALEEVLSWLLSAEDTLQAQGEISNDVEVVKDQFHTHEGYMMDLTAHQGRVGNILQLGSKLIGTGKLSEDEETEVQEQMNLLNSRWECLRVASMEKQSNLHRVLMDLQNQKLKELNDWLTKTEERTRKMEEEPLGPDLEDLKRQVQQHKVLQEDLEQEQVRVNSLTHMVVVVDESSGDHATAALEEQLKVLGDRWANICRWTEDRWVLLQDILLKWQRLTEEQCLFSAWLSEKEDAVNKIHTTGFKDQNEMLSSLQKLAVLKADLEKKKQSMGKLYSLKQDLLSTLKNKSVTQKTEAWLDNFARCWDNLVQKLEKSTAQISQAVTTTQPSLTQTTVMETVTTVTTREQILVKHAQEELPPPPPQKKRQITVDSEIRKRLDVDITELHSWITRSEAVLQSPEFAIFRKEGNFSDLKEKVNAIEREKAEKFRKLQDASRSAQALVEQMVNEGVNADSIKQASEQLNSRWIEFCQLLSERLNWLEYQNNIIAFYNQLQQLEQMTTTAENWLKIQPTTPSEPTAIKSQLKICKDEVNRLSDLQPQIERLKIQSIALKEKGQGPMFLDADFVAFTNHFKQVFSDVQAREKELQTIFDTLPPMRYQETMSAIRTWVQQSETKLSIPQLSVTDYEIMEQRLGELQALQSSLQEQQSGLYYLSTTVKEMSKKAPSEISRKYQSEFEEIEGRWKKLSSQLVEHCQKLEEQMNKLRKIQNHIQTLKKWMAEVDVFLKEEWPALGDSEILKKQLKQCRLLVSDIQTIQPSLNSVNEGGQKIKNEAEPEFASRLETELKELNTQWDHMCQQVYARKEALKGGLEKTVSLQKDLSEMHEWMTQAEEEYLERDFEYKTPDELQKAVEEMKRAKEEAQQKEAKVKLLTESVNSVIAQAPPVAQEALKKELETLTTNYQWLCTRLNGKCKTLEEVWACWHELLSYLEKANKWLNEVEFKLKTTENIPGGAEEISEVLDSLENLMRHSEDNPNQIRILAQTLTDGGVMDELINEELETFNSRWRELHEEAVRRQKLLEQSIQSAQETEKSLHLIQESLTFIDKQLAAYIADKVDAAQMPQEAQKIQSDLTSHEISLEEMKKHNQGKEAAQRVLSQIDVAQKKLQDVSMKFRLFQKPANFEQRLQESKMILDEVKMHLPALETKSVEQEVVQSQLNHCVNLYKSLSEVKSEVEMVIKTGRQIVQKKQTENPKELDERVTALKLHYNELGAKVTERKQQLEKCLKLSRKMRKEMNVLTEWLAATDMELTKRSAVEGMPSNLDSEVAWGKATQKEIEKQKVHLKSITEVGEALKTVLGKKETLVEDKLSLLNSNWIAVTSRAEEWLNLLLEYQKHMETFDQNVDHITKWIIQADTLLDESEKKKPQQKEDVLKRLKAELNDIRPKVDSTRDQAANLMANRGDHCRKLVEPQISELNHRFAAISHRIKTGKASIPLKELEQFNSDIQKLLEPLEAEIQQGVNLKEEDFNKDMNEDNEGTVKELLQRGDNLQQRITDERKREEIKIKQQLLQTKHNALKDLRSQRRKKALEISHQWYQYKRQADDLLKCLDDIEKKLASLPEPRDERKIKEIDRELQKKKEELNAVRRQAEGLSEDGAAMAVEPTQIQLSKRWREIESKFAQFRRLNFAQIHTVREETMMVMTEDMPLEISYVPSTYLTEITHVSQALLEVEQLLNAPDLCAKDFEDLFKQEESLKNIKDSLQQSSGRIDIIHSKKTAALQSATPVERVKLQEALSQLDFQWEKVNKMYKDRQGRFDRSVEKWRRFHYDIKIFNQWLTEAEQFLRKTQIPENWEHAKYKWYLKVSLFVFSKHTFCLQRQKTGEEIIQQSSKTDASILQEKLGSLNLRWQEVCKQLSDRKKRLEEQKNILSEFQRDLNEFVLWLEEADNIASIPLEPGKEQQLKEKLEQVKLLVEELPLRQGILKQLNETGGPVLVSAPISPEEQDKLENKLKQTNLQWIKVSRALPEKQGEIEAQIKDLGQLEKKLEDLEEQLNHLLLWLSPIRNQLEIYNQPNQEGPFDVKETEIAVQAKQPDVEEILSKGQHLYKEKPATQPVKRKLEDLSSEWKAVNRLLQELRAKQPDLAPGLTTIGASPTQTVTLVTQPVVTKETAISKLEMPSSLMLEVPALADFNRAWTELTDWLSLLDQVIKSQRVMVGDLEDINEMIIKQKATMQDLEQRRPQLEELITAAQNLKNKTSNQEARTIITDRIERIQNQWDEVQEHLQNRRQQLNEMLKDSTQWLEAKEEAEQVLGQARAKLESWKEGPYTVDAIQKKITETKQLAKDLRQWQTNVDVANDLALKLLRDYSADDTRKVHMITENINASWRSIHKRVSEREAALEETHRLLQQFPLDLEKFLAWLTEAETTANVLQDATRKERLLEDSKGVKELMKQWQDLQGEIEAHTDVYHNLDENSQKILRSLEGSDDAVLLQRRLDNMNFKWSELRKKSLNIRSHLEASSDQWKRLHLSLQELLVWLQLKDDELSRQAPIGGDFPAVQKQNDVHRAFKRELKTKEPVIMSTLETVRIFLTEQPLEGLEKLYQEPRELPPEERAQNVTRLLRKQAEEVNTEWEKLNLHSADWQRKIDETLERLRELQEATDELDLKLRQAEVIKGSWQPVGDLLIDSLQDHLEKVKALRGEIAPLKENVSHVNDLARQLTTLGIQLSPYNLSTLEDLNTRWKLLQVAVEDRVRQLHEAHRDFGPASQHFLSTSVQGPWERAISPNKVPYYINHETQTTCWDHPKMTELYQSLADLNNVRFSAYRTAMKLRRLQKALCLDLLSLSAACDALDQHNLKQNDQPMDILQIINCLTTIYDRLEQEHNNLVNVPLCVDMCLNWLLNVYDTGRTGRIRVLSFKTGIISLCKAHLEDKYRYLFKQVASSTGFCDQRRLGLLLHDSIQIPRQLGEVASFGGSNIEPSVRSCFQFANNKPEIEAALFLDWMRLEPQSMVWLPVLHRVAAAETAKHQAKCNICKECPIIGFRYRSLKHFNYDICQSCFFSGRVAKGHKMHYPMVEYCTPTTSGEDVRDFAKVLKNKFRTKRYFAKHPRMGYLPVQTVLEGDNMETPVTLINFWPVDSAPASSPQLSHDDTHSRIEHYASRLAEMENSNGSYLNDSISPNESIDDEHLLIQHYCQSLNQDSPLSQPRSPAQILISLESEERGELERILADLEEENRNLQAEYDRLKQQHEHKGLSPLPSPPEMMPTSPQSPRDAELIAEAKLLRQHKGRLEARMQILEDHNKQLESQLHRLRQLLEQPQAEAKVNGTTVSSPSTSLQRSDSSQPMLLRVVGSQTSDSMGEEDLLSPPQDTSTGLEEVMEQLNNSFPSSRGRNTPGKPMREDTM

SEQ ID NO: 26372 - protein, 353 aa, Homo sapiens
  Payload ID: 5194
  Gene Symbol: DRP2
  Gene Name: dystrophin related protein 2
  ENSP ID: ENSP00000362007
MQPMVMQGCPYTLPRCHDWQAADQFHHSSSLRSTCPHPQVRAAVTSPAPPQDGAGVPCLSLKLLNGSVGASGPLEPPAMNLCWNEIKKKSHNLRARLEAFSDHSGKLQLPLQEIIDWLSQKDEELSAQLPLQGDVALVQQEKETHAAFMEEVKSRGPYIYSVLESAQAFLSQHPFEELEEPHSESKDTSPKQRIQNLSRFVWKQATVASELWEKLTARCVDQHRHIERTLEQLLEIQGAMEELSTTLSQAEGVRATWEPIGDLFIDSLPEHIQAIKLFKEEFSPMKDGVKLVNDLAHQLAISDVHLSMENSQALEQINVRWKQLQASVSERLKQLQDAHRDFGPGSQHFLSCT

SEQ ID NO: 26373 - protein, 957 aa, Homo sapiens
  Payload ID: 5194
  Gene Symbol: DRP2
  Gene Name: dystrophin related protein 2
  Uniprot ID: Q13474
  ENSP ID: ENSP00000378635
MQPMVMQGCPYTLPRCHDWQAADQFHHSSSLRSTCPHPQVRAAVTSPAPPQDGAGVPCLSLKLLNGSVGASGPLEPPAMNLCWNEIKKKSHNLRARLEAFSDHSGKLQLPLQEIIDWLSQKDEELSAQLPLQGDVALVQQEKETHAAFMEEVKSRGPYIYSVLESAQAFLSQHPFEELEEPHSESKDTSPKQRIQNLSRFVWKQATVASELWEKLTARCVDQHRHIERTLEQLLEIQGAMEELSTTLSQAEGVRATWEPIGDLFIDSLPEHIQAIKLFKEEFSPMKDGVKLVNDLAHQLAISDVHLSMENSQALEQINVRWKQLQASVSERLKQLQDAHRDFGPGSQHFLSSSVQVPWERAISPNKVPYYINHQAQTTCWDHPKMTELYQTLADLNNIKFSAYRTAMKLRRVQKALRLDLVTLTTALEIFNEHDLQASEHVMDVVEVIHCLTALYERLEEERGILVNVPLCVDMSLNWLLNVFDSGRSGKMRALSFKTGIACLCGTEVKEKLQYLFSQVANSGSQCDQRHLGVLLHEAIQVPRQLGEVAAFGGSNVEPSVRSCFRFSTGKPVIEASQFLEWVNLEPQSMVWLAVLHRVTIAEQVKHQTKCSICRQCPIKGFRYRSLKQFNVDICQTCFLTGRASKGNKLHYPIMEYYTPTTSSENMRDFATTLKNKFRSKHYFSKHPQRGYLPVQSVLEADYSETPASSPMWPHADTHSRIEHFASRLAEMESQNCSFFNDSLSPDDSIDEDQYLLRHSSPITDREPAFGQQAPCSVATESKGELQKILAHLEDENRILQGELRRLKWQHEEAAEAPSLADGSTEAATDHRNEELLAEARILRQHKSRLETRMQILEDHNKQLESQLQRLRELLLQPPTESDGSGSAGSSLASSPQQSEGSHPREKGQTTPDTEAADDVGSKSQDVSLCLEDIMEKLRHAFPSVRSSDVTANTLLAS

SEQ ID NO: 26374 - protein, 957 aa, Homo sapiens; identical to SEQ ID NO: 26373
  Payload ID: 5194
  Gene Symbol: DRP2
  Gene Name: dystrophin related protein 2
  Uniprot ID: Q13474
  ENSP ID: ENSP00000385038

SEQ ID NO: 26375 - protein, 957 aa, Homo sapiens; identical to SEQ ID NO: 26373
  Payload ID: 5194
  Gene Symbol: DRP2
  Gene Name: dystrophin related protein 2
  Uniprot ID: Q13474
  ENSP ID: ENSP00000441051

SEQ ID NO: 26376 - protein, 879 aa, Homo sapiens
  Payload ID: 5194
  Gene Symbol: DRP2
  Gene Name: dystrophin related protein 2
  Uniprot ID: Q13474
  ENSP ID: ENSP00000444752
MNLCWNEIKKKSHNLRARLEAFSDHSGKLQLPLQEIIDWLSQKDEELSAQLPLQGDVALVQQEKETHAAFMEEVKSRGPYIYSVLESAQAFLSQHPFEELEEPHSESKDTSPKQRIQNLSRFVWKQATVASELWEKLTARCVDQHRHIERTLEQLLEIQGAMEELSTTLSQAEGVRATWEPIGDLFIDSLPEHIQAIKLFKEEFSPMKDGVKLVNDLAHQLAISDVHLSMENSQALEQINVRWKQLQASVSERLKQLQDAHRDFGPGSQHFLSSSVQVPWERAISPNKVPYYINHQAQTTCWDHPKMTELYQTLADLNNIKFSAYRTAMKLRRVQKALRLDLVTLTTALEIFNEHDLQASEHVMDVVEVIHCLTALYERLEEERGILVNVPLCVDMSLNWLLNVFDSGRSGKMRALSFKTGIACLCGTEVKEKLQYLFSQVANSGSQCDQRHLGVLLHEAIQVPRQLGEVAAFGGSNVEPSVRSCFRFSTGKPVIEASQFLEWVNLEPQSMVWLAVLHRVTIAEQVKHQTKCSICRQCPIKGFRYRSLKQFNVDICQTCFLTGRASKGNKLHYPIMEYYTPTTSSENMRDFATTLKNKFRSKHYFSKHPQRGYLPVQSVLEADYSETPASSPMWPHADTHSRIEHFASRLAEMESQNCSFFNDSLSPDDSIDEDQYLLRHSSPITDREPAFGQQAPCSVATESKGELQKILAHLEDENRILQGELRRLKWQHEEAAEAPSLADGSTEAATDHRNEELLAEARILRQHKSRLETRMQILEDHNKQLESQLQRLRELLLQPPTESDGSGSAGSSLASSPQQSEGSHPREKGQTTPDTEAADDVGSKSQDVSLCLEDIMEKLRHAFPSVRSSDVTANTLLAS

SEQ ID NO: 26377 - protein, 578 aa, Homo sapiens
  Payload ID: 5195
  Gene Symbol: DYTN
  Gene Name: dystrotelin
  Uniprot ID: A2CJ06
  ENSP ID: ENSP00000396593
MDPDKQDALNSIENSIYRTAFKLQSVQTLCQLDLIDSSLIQQVLLRPSFWEARKHSLSVQQLSQALQELFQKAREENPGQVHPRAPELTLSLLTTMYNSKGTGFLQLMPAAAALITLSGDSPLSKYRALFQLYAENSRGGYDSGPRMTRRVLRKLLTDLQQIPTFVGESRALCPVESATRSCFQGVLSPAIKEEKFLSWVQSEPPILLWLPTCHRLSAAERVTHPARCTLCRTFPITGLRYRCLKCLNFDICQMCFLSGLHSKSHQKSHPVIEHCIQMSAMQNTKLLFRTLRNNLLQGRCRKKEAARRQQLLDQVNPKGVPHHAQARLLKKQLNQYKDKLQAIYTSQEERICRFETRIHKLKTNQDSLWTKLQQIRRDLQARLQPPGPSSSSFQNVGNKVDHSSTEKVPKGGDYLQIKNATEDASTGEPLPKLDEVDRSHRSHTNAEHALRNPESPETTLHSTRAQSQTQKMPQKVISALPSYQEGLKQDIPKMVPAEMSSPALAAVEKKEAGNIKERKDELEEEELQELLSKLMDAFNLETPSGPESSVNMDLYSGAQRVCRAFSALVDQIALPNLK

SEQ ID NO: 26378 - protein, 2414 aa, Homo sapiens
  Payload ID: 5196
  Gene Symbol: EP300
  Gene Name: E1A binding protein p300
  Uniprot ID: Q09472
  ENSP ID: ENSP00000263253
MAENVVEPGPPSAKRPKLSSPALSASASDGTDFGSLFDLEHDLPDELINSTELGLTNGGDINQLQTSLGMVQDAASKHKQLSELLRSGSSPNLNMGVGGPGQVMASQAQQSSPGLGLINSMVKSPMTQAGLTSPNMGMGTSGPNQGPTQSTGMMNSPVNQPAMGMNTGMNAGMNPGMLAAGNGQGIMPNQVMNGSIGAGRGRQNMQYPNPGMGSAGNLLTEPLQQGSPQMGGQTGLRGPQPLKMGMMNNPNPYGSPYTQNPGQQIGASGLGLQIQTKTVLSNNLSPFAMDKKAVPGGGMPNMGQQPAPQVQQPGLVTPVAQGMGSGAHTADPEKRKLIQQQLVLLLHAHKCQRREQANGEVRQCNLPHCRTMKNVLNHMTHCQSGKSCQVAHCASSRQIISHWKNCTRHDCPVCLPLKNAGDKRNQQPILTGAPVGLGNPSSLGVGQQSAPNLSTVSQIDPSSIERAYAALGLPYQVNQMPTQPQVQAKNQQNQQPGQSPQGMRPMSNMSASPMGVNGGVGVQTPSLLSDSMLHSAINSQNPMMSENASVPSLGPMPTAAQPSTTGIRKQWHEDITQDLRNHLVHKLVQAIFPTPDPAALKDRRMENLVAYARKVEGDMYESANNRAEYYHLLAEKIYKIQKELEEKRRTRLQKQNMLPNAAGMVPVSMNPGPNMGQPQPGMTSNGPLPDPSMIRGSVPNQMMPRITPQSGLNQFGQMSMAQPPIVPRQTPPLQHHGQLAQPGALNPPMGYGPRMQQPSNQGQFLPQTQFPSQGMNVTNIPLAPSSGQAPVSQAQMSSSSCPVNSPIMPPGSQGSHIHCPQLPQPALHQNSPSPVPSRTPTPHHTPPSIGAQQPPATTIPAPVPTPPAMPPGPQSQALHPPPRQTPTPPTTQLPQQVQPSLPAAPSADQPQQQPRSQQSTAASVPTPTAPLLPPQPATPLSQPAVSIEGQVSNPPSTSSTEVNSQAIAEKQPSQEVKMEAKMEVDQPEPADTQPEDISESKVEDCKMESTETEERSTELKTEIKEEEDQPSTSATQSSPAPGQSKKKIFKPEELRQALMPTLEALYRQDPESLPFRQPVDPQLLGIPDYFDIVKSPMDLSTIKRKLDTGQYQEPWQYVDDIWLMFNNAWLYNRKTSRVYKYCSKLSEVFEQEIDPVMQSLGYCCGRKLEFSPQTLCCYGKQLCTIPRDATYYSYQNRYHFCEKCFNEIQGESVSLGDDPSQPQTTINKEQFSKRKNDTLDPELFVECTECGRKMHQICVLHHEIIWPAGFVCDGCLKKSARTRKENKFSAKRLPSTRLGTFLENRVNDFLRRQNHPESGEVTVRVVHASDKTVEVKPGMKARFVDSGEMAESFPYRTKALFAFEEIDGVDLCFFGMHVQEYGSDCPPPNQRRVYISYLDSVHFFRPKCLRTAVYHEILIGYLEYVKKLGYTTGHIWACPPSEGDDYIFHCHPPDQKIPKPKRLQEWYKKMLDKAVSERIVHDYKDIFKQATEDRLTSAKELPYFEGDFWPNVLEESIKELEQEEEERKREENTSNESTDVTKGDSKNAKKKNNKKTSKNKSSLSRGNKKKPGMPNVSNDLSQKLYATMEKHKEVFFVIRLIAGPAANSLPPIVDPDPLIPCDLMDGRDAFLTLARDKHLEFSSLRRAQWSTMCMLVELHTQSQDRFVYTCNECKHHVETRWHCTVCEDYDLCITCYNTKNHDHKMEKLGLGLDDESNNQQAAATQSPGDSRRLSIQRCIQSLVHACQCRNANCSLPSCQKMKRVVQHTKGCKRKTNGGCPICKQLIALCCYHAKHCQENKCPVPFCLNIKQKLRQQQLQHRLQQAQMLRRRMASMQRTGVVGQQQGLPSPTPATPTTPTGQQPTTPQTPQPTSQPQPTPPNSMPPYLPRTQAAGPVSQGKAAGQVTPPTPPQTAQPPLPGPPPAAVEMAMQIQRAAETQRQMAHVQIFQRPIQHQMPPMTPMAPMGMNPPPMTRGPSGHLEPGMGPTGMQQQPPWSQGGLPQPQQLQSGMPRPAMMSVAQHGQPLNMAPQPGLGQVGISPLKPGTVSQQALQNLLRTLRSPSSPLQQQQVLSILHANPQLLAAFIKQRAAKYANSNPQPIPGQPGMPQGQPGLQPPTMPGQQGVHSNPAMQNMNPMQAGVQRAGLPQQQPQQQLQPPMGGMSPQAQQMNMNHNTMPSQFRDILRRQQMMQQQQQQGAGPGIGPGMANHNQFQQPQGVGYPPQQQQRMQHHMQQMQQGNMGQIGQLPQALGAEAGASLQAYQQRLLQQQMGSPVQPNPMSPQQHMLPNQAQSPHLQGQQIPNSLSNQVRSPQPVPSPRPQSQPPHSSPSPRMQPQPSPHHVSPQTSSPHPGLVAAQANPMEQGHFASPDQNSMLSQLASNPGMANLHGASATDLGLSTDNSDLNSNLSQSTLDIH

SEQ ID NO: 26379 - protein, 133 aa, Homo sapiens
  Payload ID: 5196
  Gene Symbol: EP300
  Gene Name: E1A binding protein p300
  ENSP ID: ENSP00000488981
AEYYHLLAEKIYKIQKELEEKRRTRLQKQNMLPNAAGMVPVSMNPGPNMGQPQPGMTSSLNQFGQMSMAQPPIVPRQTPPLQHHGQLAQPGALNPPMGYGPRMQQPSNQGQFLPQTQFPSQGMNVTNIPLAPS

SEQ ID NO: 26380 - protein, 187 aa, Homo sapiens
  Payload ID: 5196
  Gene Symbol: EP300
  Gene Name: E1A binding protein p300
  ENSP ID: ENSP00000489397
  MOD_RES (1)..(1): Any amino acid
XVNQMPTQPQVQAKNQQNQQPGQSPQGMRPMSNMSASPMGVNGGVGVQTPSLLSDSMLHSAINSQNVQAIFPTPDPAALKDRRMENLVAYARKVEGDMYESANNRAEYYHLLAEKIYKIQKELEEKRRTRLQKQNMLPNAAGMVPVSMNPGPNMGQPQPGMTSNGPLPDPSMIRGSVPNQMMPRITP

SEQ ID NO: 26381 - protein, 374 aa, Homo sapiens
  Payload ID: 5197
  Gene Symbol: EP400
  Gene Name: E1A binding protein p400
  ENSP ID: ENSP00000330620
  MOD_RES (1)..(1): Any amino acid
XQQQQQTTTTSQVQVPQIQGQAQSPAQIKAVGKLTPEHLIKMQKQKLQMPPQPPPPQAQSAPPQPTAQVQVQTSQPPQQQSPQLTTVTAPRPGALLTGTTVANLQVARLLQAQGQMQTQAPQPAQVALAKPPVVSVPAAVVSSPGVTTLPMNVAGISVAIGQPQKAAGQTVVAQPVHMQQLLKLKQQAVQQQKAIQPQAAQGPAAVQQKITAQQITTPGAQQKVAYAAQPALKTQFLTTPISQAQKLAGAQQVQTQIQVAKLPQVVQQQTPVASIQQVASASQQASPQTVALTQATAAGQQVQMIPAVTATAQVVQQKLIQQQVVTTASAPLQTPGAPNPAQVPASSDSPSQQPKLQMRVPAVRLKTPTKPPCQ

SEQ ID NO: 26382 - protein, 826 aa, Homo sapiens
  Payload ID: 5197
  Gene Symbol: EP400
  Gene Name: E1A binding protein p400
  ENSP ID: ENSP00000331737
MHHGTGPQNVQHQLQRSRACPGSEGEEQPAHPNPPPSPAAPFAPSASPSAPQSPSYQIQQLMNRSPATGQNVNITLQSVGPVVGGNQQITLAPLPLPSPTSPGFQFSAQPRRFEHGSPSYIQVTSPLSQQVQTQSPTQPSPGPGQALQNVRAGAPGPGLGLCSSSPTGGFVDASVLVRQISLSPSSGGHFVFQDGSGLTQIAQGAQVQLQHPGTPITVRERRPSQPHTQSGGTIHHLGPQSPAAAGGAGLQPLASPSHITTANLPPQISSIIQGQLVQQQQVLQGPPLPRPLGFERTPGVLLPGAGGAAGFGMTSPPPPTSPSRTAVPPGLSSLPLTSVGNTGMKKVPKKLEEIPPASPEMAQMRKQCLDYHYQEMQALKEVFKEYLIELFFLQHFQGNMMDFLAFKKKHYAPLQAYLRQNDLDIEEEEEEEEEEEEKSEVINDEQALAGSLVAGAGSTVETDLFKRQQAMPSTGMAGGMPPTPQAAQLAGQRQSQQQYDPSTGPPVQNAASLHTPLPQLPGRLPPAGVPTAALSSALQFAQQPQVVEAQTQLQIPVKTQQPNVPIPAPPSSQLPIPPSQPAQLALHVPTPGKVQVQASQLSSLPQMVASTRLPVDPAPPCPRPLPTSSTSSLAPVSGSGPGPSPARSSPVNRPSSATNKALSPVTSRTPGVVASAPTKPQSPAQNATSSQDSSQDTLTEQITLENQVHQRIAELRKAGLWSQRRLPKLQEAPRPKSHWDYLLEEMQWMATDFAQERRWKVAAAKKLVRTVVRHHEEKQLREERGKKEEQSRLRRIAASTAREIECFWSNIEQVVEIKLRVELEEK

SEQ ID NO: 26383 - protein, 985 aa, Homo sapiens
  Payload ID: 5197
  Gene Symbol: EP400
  Gene Name: E1A binding protein p400
  ENSP ID: ENSP00000333602
MHHGTGPQNVQHQLQRSRACPGSEGEEQPAHPNPPPSPAAPFAPSASPSAPQSPSYQIQQLMNRSPATGQNVNITLQSVGPVVGGNQQITLAPLPLPSPTSPGFQFSAQPRRFEHGSPSYIQVTSPLSQQVQTQSPTQPSPGPGQALQNVRAGAPGPGLGLCSSSPTGGFVDASVLVRQISLSPSSGGHFVFQDGSGLTQIAQGAQVQLQHPGTPITVRERRPSQPHTQSGGTIHHLGPQSPAAAGGAGLQPLASPSHITTANLPPQISSIIQGQLVQQQQVLQGPPLPRPLGFERTPGVLLPGAGGAAGFGMTSPPPPTSPSRTAVPPGLSSLPLTSVGNTGMKKVPKKLEEIPPASPEMAQMRKQCLDYHYQEMQALKEVFKEYLIELFFLQHFQGNMMDFLAFKKKHYAPLQAYLRQNDLDIEEEEEEEEEEEEKSEVINDEVKVVTGKDGQTGTPVAIATQLPPKVSAAFSSQQQPFQQALAGSLVAGAGSTVETDLFKRQQAMPSTGMAEQSKRPRLEVGHQGVVFQHPGADAGVPLQQLMPTAQGGMPPTPQAAQLAGQRQSQQQYDPSTGPPVQNAASLHTPLPQLPGRLPPAGVPTAALSSALQFAQQPQVVEAQTQLQIPVKTQQPNVPIPAPPSSQLPIPPSQPAQLALHVPTPGKVQVQASQLSSLPQMVASTRLPVDPAPPCPRPLPTSSTSSLAPVSGSGPGPSPARSSPVNRPSSATNKALSPVTSRTPGVVASAPTKPQSPAQNATSSQDSSQDTLTEQITLENQVHQRIAELRKAGLWSQRRLPKLQEAPRPKSHWDYLLEEMQWMATDFAQERRWKVAAAKKLVRTVVRHHEEKQLREERGKKEEQSRLRRIAASTAREIECFWSNIEQVVEIKLRVELEEKRKKALNLQKVSRRGKELRPKGFDALQESSLDSGMSGRKRKASISLTDDEVDDEEETIEEEEANEGVVDHQTELSNLAKEGRLLLPY

SEQ ID NO: 26384 - protein, 3123 aa, Homo sapiens
  Payload ID: 5197
  Gene Symbol: EP400
  Gene Name: E1A binding protein p400
  Uniprot ID: Q96L91
  ENSP ID: ENSP00000374212
MHHGTGPQNVQHQLQRSRACPGSEGEEQPAHPNPPPSPAAPFAPSASPSAPQSPSYQIQQLMNRSPATGQNVNITLQSVGPVVGGNQQITLAPLPLPSPTSPGFQFSAQPRRFEHGSPSYIQVTSPLSQQVQTQSPTQPSPGPGQALQNVRAGAPGPGLGLCSSSPTGGFVDASVLVRQISLSPSSGGHFVFQDGSGLTQIAQGAQVQLQHPGTPITVRERRPSQPHTQSGGTIHHLGPQSPAAAGGAGLQPLASPSHITTANLPPQISSIIQGQLVQQQQVLQGPPLPRPLGFERTPGVLLPGAGGAAGFGMTSPPPPTSPSRTAVPPGLSSLPLTSVGNTGMKKVPKKLEEIPPASPEMAQMRKQCLDYHYQEMQALKEVFKEYLIELFFLQHFQGNMMDFLAFKKKHYAPLQAYLRQNDLDIEEEEEEEEEEEEKSEVINDEQQALAGSLVAGAGSTVETDLFKRQQAMPSTGMAEQSKRPRLEVGHQGVVFQHPGADAGVPLQQLMPTAQGGMPPTPQAAQLAGQRQSQQQYDPSTGPPVQNAASLHTPLPQLPGRLPPAGVPTAALSSALQFAQQPQVVEAQTQLQIPVKTQQPNVPIPAPPSSQLPIPPSQPAQLALHVPTPGKVQVQASQLSSLPQMVASTRLPVDPAPPCPRPLPTSSTSSLAPVSGSGPGPSPARSSPVNRPSSATNKALSPVTSRTPGVVASAPTKPQSPAQNATSSQDSSQDTLTEQITLENQVHQRIAELRKAGLWSQRRLPKLQEAPRPKSHWDYLLEEMQWMATDFAQERRWKVAAAKKLVRTVVRHHEEKQLREERGKKEEQSRLRRIAASTAREIECFWSNIEQVVEIKLRVELEEKRKKALNLQKVSRRGKELRPKGFDALQESSLDSGMSGRKRKASISLTDDEVDDEEETIEEEEANEGVVDHQTELSNLAKEAELPLLDLMKLYEGAFLPSSQWPRPKPDGEDTSGEEDADDCPGDRESRKDLVLIDSLFIMDQFKAAERMNIGKPNAKDIADVTAVAEAILPKGSARVTTSVKFNAPSLLYGALRDYQKIGLDWLAKLYRKNLNGILADEAGLGKTVQIIAFFAHLACNEGNWGPHLVVVRSCNILKWELELKRWCPGLKILSYIGSHRELKAKRQEWAEPNSFHVCITSYTQFFRGLTAFTRVRWKCLVIDEMQRVKGMTERHWEAVFTLQSQQRLLLIDSPLHNTFLELWTMVHFLVPGISRPYLSSPLRAPSEESQDYYHKVVIRLHRVTQPFILRRTKRDVEKQLTKKYEHVLKCRLSNRQKALYEDVILQPGTQEALKSGHFVNVLSILVRLQRICNHPGLVEPRHPGSSYVAGPLEYPSASLILKALERDFWKEADLSMFDLIGLENKITRHEAELLSKKKIPRKLMEEISTSAAPAARPAAAKLKASRLFQPVQYGQKPEGRTVAFPSTHPPRTAAPTTASAAPQGPLRGRPPIATFSANPEAKAAAAPFQTSQASASAPRHQPASASSTAASPAHPAKLRAQTTAQASTPGQPPPQPQAPSHAAGQSALPQRLVLPSQAQARLPSGEVVKIAQLASITGPQSRVAQPETPVTLQFQGSKFTLSHSQLRQLTAGQPLQLQGSVLQIVSAPGQPYLRAPGPVVMQTVSQAGAVHGALGSKPPAGGPSPAPLTPQVGVPGRVAVNALAVGEPGTASKPASPIGGPTQEEKTRLLKERLDQIYLVNERRCSQAPVYGRDLLRICALPSHGRVQWRGSLDGRRGKEAGPAHSYTSSSESPSELMLTLCRCGESLQDVIDRVAFVIPPVVAAPPSLRVPRPPPLYSHRMRILRQGLREHAAPYFQQLRQTTAPRLLQFPELRLVQFDSGKLEALAILLQKLKSEGRRVLILSQMILMLDILEMFLNFHYLTYVRIDENASSEQRQELMRSFNRDRRIFCAILSTHSRTTGINLVEADTVVFYDNDLNPVMDAKAQEWCDRIGRCKDIHIYRLVSGNSIEEKLLKNGTKDLIREVAAQGNDYSMAFLTQRTIQELFEVYSPMDDAGFPVKAEEFVVLSQEPSVTETIAPKIARPFIEALKSIEYLEEDAQKSAQEGVLGPHTDALSSDSENMPCDEEPSQLEELADFMEQLTPIEKYALNYLELFHTSIEQEKERNSEDAVMTAVRAWEFWNLKTLQEREARLRLEQEEAELLTYTREDAYSMEYVYEDVDGQTEVMPLWTPPTPPQDDSDIYLDSVMCLMYEATPIPEAKLPPVYVRKERKRHKTDPSAAGRKKKQRHGEAVVPPRSLFDRATPGLLKIRREGKEQKKNILLKQQVPFAKPLPTFAKPTAEPGQDNPEWLISEDWALLQAVKQLLELPLNLTIVSPAHTPNWDLVSDVVNSCSRIYRSSKQCRNRYENVIIPREEGKSKNNRPLRTSQIYAQDENATHTQLYTSHFDLMKMTAGKRSPPIKPLLGMNPFQKNPKHASVLAESGINYDKPLPPIQVASLRAERIAKEKKALADQQKAQQPAVAQPPPPQPQPPPPPQQPPPPLPQPQAAGSQPPAGPPAVQPQPQPQPQTQPQPVQAPAKAQPAITTGGSAAVLAGTIKTSVTGTSMPTGAVSGNVIVNTIAGVPAATFQSINKRLASPVAPGALTTPGGSAPAQVVHTQPPPRAVGSPATATPDLVSMATTQGVRAVTSVTASAVVTTNLTPVQTPARSLVPQVSQATGVQLPGKTITPAHFQLLRQQQQQQQQQQQQQQQQQQQQQQQQQQQQQTTTTSQVQVPQIQGQAQSPAQIKAVGKLTPEHLIKMQKQKLQMPPQPPPPQAQSAPPQPTAQVQVQTSQPPQQQSPQLTTVTAPRPGALLTGTTVANLQVARLTRVPTSQLQAQGQMQTQAPQPAQVALAKPPVVSVPAAVVSSPGVTTLPMNVAGISVAIGQPQKAAGQTVVAQPVHMQQLLKLKQQAVQQQKAIQPQAAQGPAAVQQKITAQQITTPGAQQKVAYAAQPALKTQFLTTPISQAQKLAGAQQVQTQIQVAKLPQVVQQQTPVASIQQVASASQQASPQTVALTQATAAGQQVQMIPAVTATAQVVQQKLIQQQVVTTASAPLQTPGAPNPAQVPASSDSPSQQPKLQMRVPAVRLKTPTKPPCQ

SEQ ID NO: 26385 - protein, 3123 aa, Homo sapiens; identical to SEQ ID NO: 26384
  Payload ID: 5197
  Gene Symbol: EP400
  Gene Name: E1A binding protein p400
  Uniprot ID: Q96L91
  ENSP ID: ENSP00000374213

SEQ ID NO: 26386 - protein, 437 aa, Homo sapiens
  Payload ID: 5198
  Gene Symbol: E2F1
  Gene Name: E2F transcription factor 1
  Uniprot ID: Q01094
  ENSP ID: ENSP00000345571
MALAGAPAGGPCAPALEALLGAGALRLLDSSQIVIISAAQDASAPPAPTGPAAPAAGPCDPDLLLFATPQAPRPTPSAPRPALGRPPVKRRLDLETDHQYLAESSGPARGRGRHPGKGVKSPGEKSRYETSLNLTTKRFLELLSHSADGVVDLNWAAEVLKVQKRRIYDITNVLEGIQLIAKKSKNHIQWLGSHTTVGVGGRLEGLTQDLRQLQESEQQLDHLMNICTTQLRLLSEDTDSQRLAYVTCQDLRSIADPAEQMVMVIKAPPETQLQAVDSSENFQISLKSKQGPIDVFLCPEETVGGISPGKTPSQEVTSEEENRATDSATIVSPPPSSPPSSLTTDPSQSLLSLEQEPLLSRMGSLRAPVDEDRLSPLVAADSLLEHVREDFSGLLPEEFISLSPPHEALDYHFGLEEGEGIRDLFDCDFGDLTPLDF

SEQ ID NO: 26387 - protein, 437 aa, Homo sapiens
  Payload ID: 5199
  Gene Symbol: E2F2
  Gene Name: E2F transcription factor 2
  Uniprot ID: Q14209
  ENSP ID: ENSP00000355249
MLQGPRALASAAGQTPKVVPAMSPTELWPSGLSSPQLCPATATYYTPLYPQTAPPAAAPGTCLDATPHGPEGQVVRCLPAGRLPAKRKLDLEGIGRPVVPEFPTPKGKCIRVDGLPSPKTPKSPGEKTRYDTSLGLLTKKFIYLLSESEDGVLDLNWAAEVLDVQKRRIYDITNVLEGIQLIRKKAKNNIQWVGRGMFEDPTRPGKQQQLGQELKELMNTEQALDQLIQSCSLSFKHLTEDKANKRLAYVTYQDIRAVGNFKEQTVIAVKAPPQTRLEVPDRTEDNLQIYLKSTQGPIEVYLCPEEVQEPDSPSEEPLPSTSTLCPSPDSAQPSSSTDPSIMEPTASSVPAPAPTPQQAPPPPSLVPLEATDSLLELPHPLLQQTEDQFLSPTLACSSPLISFSPSLDQDDYLWGLEAGEGISDLFDSYDLGDLLIN

SEQ ID NO: 26388 - protein, 437 aa, Homo sapiens; identical to SEQ ID NO: 26387
  Payload ID: 5199
  Gene Symbol: E2F2
  Gene Name: E2F transcription factor 2
  ENSP ID: ENSP00000489612

SEQ ID NO: 26389 - protein, 465 aa, Homo sapiens
  Payload ID: 5200
  Gene Symbol: E2F3
  Gene Name: E2F transcription factor 3
  Uniprot ID: O00716
  ENSP ID: ENSP00000262904
MRKGIQPALEQYLVTAGGGEGAAVVAAAAAASMDKRALLASPGFAAAAAAAAAPGAYIQILTTNTSTTSCSSSLQSGAVAAGPLLPSAPGAEQTAGSLLYTTPHGPSSRAGLLQQPPALGRGGSGGGGGPPAKRRLELGESGHQYLSDGLKTPKGKGRAALRSPDSPKTPKSPSEKTRYDTSLGLLTKKFIQLLSQSPDGVLDLNKAAEVLKVQKRRIYDITNVLEGIHLIKKKSKNNVQWMGCSLSEDGGMLAQCQGLSKEVTELSQEEKKLDELIQSCTLDLKLLTEDSENQRLAYVTYQDIRKISGLKDQTVIVVKAPPETRLEVPDSIESLQIHLASTQGPIEVYLCPEETETHSPMKTNNQDHNGNIPKPASKDLASTNSGHSDCSVSMGNLSPLASPANLLQQTEDQIPSNLEGPFVNLLPPLLQEDYLLSLGEEEGISDLFDAYDLEKLPLVEDFMCS

SEQ ID NO: 26390 - protein, 334 aa, Homo sapiens
  Payload ID: 5200
  Gene Symbol: E2F3
  Gene Name: E2F transcription factor 3
  Uniprot ID: O00716
  ENSP ID: ENSP00000443418
MPLQQQAKRRLELGESGHQYLSDGLKTPKGKGRAALRSPDSPKKKTRYDTSLGLLTKKFIQLLSQSPDGVLDLNKAAEVLKVQKRRIYDITNVLEGIHLIKKKSKNNVQWMGCSLSEDGGMLAQCQGLSKEVTELSQEEKKLDELIQSCTLDLKLLTEDSENQRLAYVTYQDIRKISGLKDQTVIVVKAPPETRLEVPDSIESLQIHLASTQGPIEVYLCPEETETHSPMKTNNQDHNGNIPKPASKDLASTNSGHSDCSVSMGNLSPLASPANLLQQTEDQIPSNLEGPFVNLLPPLLQEDYLLSLGEEEGISDLFDAYDLEKLPLVEDFMCS

SEQ ID NO: 26391 - protein, 128 aa, Homo sapiens
  Payload ID: 5200
  Gene Symbol: E2F3
  Gene Name: E2F transcription factor 3
  ENSP ID: ENSP00000483249
MDKRALLASPGFAAPPAKRRLELGESGHQYLSDGLKTPKGKGRAALRSPDSPKKKTRYDTSLGLLTKKFIQLLSQSPDGVLDLNKAAEVLKVQKRRIYDITNVLEGISDLFDAYDLEKLPLVEDFMCS

SEQ ID NO: 26392 - protein, 413 aa, Homo sapiens
  Payload ID: 5201
  Gene Symbol: E2F4
  Gene Name: E2F transcription factor 4, p107/p130-binding
  Uniprot ID: Q16254
  ENSP ID: ENSP00000368686
MAEAGPQAPPPPGTPSRHEKSLGLLTTKFVSLLQEAKDGVLDLKLAADTLAVRQKRRIYDITNVLEGIGLIEKKSKNSIQWKGVGPGCNTREIADKLIELKAEIEELQQREQELDQHKVWVQQSIRNVTEDVQNSCLAYVTHEDICRCFAGDTLLAIRAPSGTSLEVPIPEGLNGQKKYQIHLKSVSGPIEVLLVNKEAWSSPPVAVPVPPPEDLLQSPSAVSTPPPLPKPALAQSQEASRPNSPQLTPTAVPGSAEVQGMAGPAAEITVSGGPGTDSKDSGELSSLPLGPTTLDTRPLQSSALLDSSSSSSSSSSSSSNSNSSSSSGPNPSTSFEPIKADPTGVLELPKELSEIFDPTRECMSSELLEELMSSEVFAPLLRLSPPPGDHDYIYNLDESEGVCDLFDVPVLNL

SEQ ID NO: 26393 - protein, 81 aa, Homo sapiens
  Payload ID: 5201
  Gene Symbol: E2F4
  Gene Name: E2F transcription factor 4, p107/p130-binding
  ENSP ID: ENSP00000454477
MAEAGPQAPPPPGTPSRHEKSLGLLTTKFVSLLQEAKDGVLDLKLAADTLAVRQKRRIYDITNVLEGVWGLAAIPGRLLTN

SEQ ID NO: 26394 - protein, 121 aa, Homo sapiens
  Payload ID: 5201
  Gene Symbol: E2F4
  Gene Name: E2F transcription factor 4, p107/p130-binding
  ENSP ID: ENSP00000457239
MAEAGPQAPPPPGTPSRHEKSLGLLTTKFVSLLQEAKDGVLDLKLAADTLAVRQKRRIYDITNVLEGIGLIEKKSKNSIQWKRYPLGHPGPIRHQPGGAHPRGSQWAEEVPDSPEECEWSH

SEQ ID NO: 26395 - protein, 145 aa, Homo sapiens
  Payload ID: 5201
  Gene Symbol: E2F4
  Gene Name: E2F transcription factor 4, p107/p130-binding
  ENSP ID: ENSP00000458082
MAEAGPQAPPPPGTPSRHEKSLGLLTTKFVSLLQEAKDGVLDLKLAADTLAVRQKRRIYDITNVLEGIGLIEKKSKNSIQWNLPSVTIGHQPFSLTLTLWPTSLMRTSADALLEIPSWPSGPHQAPAWRCPSQRVSMGRRSTRFT

SEQ ID NO: 26396 - protein, 144 aa, Homo sapiens
  Payload ID: 5201
  Gene Symbol: E2F4
  Gene Name: E2F transcription factor 4, p107/p130-binding
  ENSP ID: ENSP00000458706
  MOD_RES (1)..(1): Any amino acid
XMAGPAAEITVSGGPGTDSKDSGELSSLPLGPTTLDTRPLQSSALLDSSSSSSSSSSSSSNSNSSSSSGPNPSTSFEPIKADPTGVLELPKELSEIFDPTRECMSSELLEELMSSEGTCPVWLGPRLSDLGVAWGPLPPDPYRA

SEQ ID NO: 26397 - protein, 249 aa, Homo sapiens
  Payload ID: 5202
  Gene Symbol: E2F5
  Gene Name: E2F transcription factor 5, p130-binding
  ENSP ID: ENSP00000256117
  MOD_RES (1)..(1): Any amino acid
XLLQEAKDGVLDLKAAADTLAVRQKRRIYDITNVLEGIDLIEKKSKNSIQWKGVGAGCNTKEVIDRLRYLKAEIEDLELKERELDQQKLWLQQSIKNVMDDSINNRFSYVTHEDICNCFNGDTLLAIQAPSGTQLEVPIPEMGQNGQKKYQINLKSHSGPIHVLLINKESSSSKPVVFPVPPPDDLTQPSSQSLTPVTPQKSSMATQNLPEQHVSERSQALQQTSATDISSAGSISGDIIDELMSSDGK

SEQ ID NO: 26398 - protein, 346 aa, Homo sapiens
  Payload ID: 5202
  Gene Symbol: E2F5
  Gene Name: E2F transcription factor 5, p130-binding
  Uniprot ID: Q15329
  ENSP ID: ENSP00000398124
MAAAEPASSGQQAPAGQGQGQRPPPQPPQAQAPQPPPPPQLGGAGGGSSRHEKSLGLLTTKFVSLLQEAKDGVLDLKAAADTLAVRQKRRIYDITNVLEGIDLIEKKSKNSIQWKGVGAGCNTKEVIDRLRYLKAEIEDLELKERELDQQKLWLQQSIKNVMDDSINNRFSYVTHEDICNCFNGDTLLAIQAPSGTQLEVPIPEMGQNGQKKYQINLKSHSGPIHVLLINKESSSSKPVVFPVPPPDDLTQPSSQSLTPVTPQKSSMATQNLPEQHVSERSQALQQTSATDISSAGSISGDIIDELMSSDVFPLLRLSPTPADDYNFNLDDNEGVCDLFDVQILNY

SEQ ID NO: 26399 - protein, 345 aa, Homo sapiens
  Payload ID: 5202
  Gene Symbol: E2F5
  Gene Name: E2F transcription factor 5, p130-binding
  Uniprot ID: Q15329
  ENSP ID: ENSP00000414312
MAAAEPASSGQQAPAGQGQGQRPPPQPPQAQAPQPPPPPQLGGAGGGSSRHEKSLGLLTTKFVSLLQEAKDGVLDLKAAADTLAVRQKRRIYDITNVLEGIDLIEKKSKNSIQWKGVGAGCNTKEVIDRLRYLKAEIEDLELKERELDQQKLWLQQSIKNVMDDSINNRFSYVTHEDICNCFNGDTLLAIQAPSGTQLEVPIPEMGQNGQKKYQINLKSHSGPIHVLLINKESSSSKPVVFPVPPPDDLTQPSSQSLTPVTPQKSSMATQNLPEQHVSERSQALQQTSATDISSGSISGDIIDELMSSDVFPLLRLSPTPADDYNFNLDDNEGVCDLFDVQILNY

SEQ ID NO: 26400 - protein, 173 aa, Homo sapiens
  Payload ID: 5202
  Gene Symbol: E2F5
  Gene Name: E2F transcription factor 5, p130-binding
  ENSP ID: ENSP00000428606
MKTSVIALMVSDTLLAIQAPSGTQLEVPIPEMGQNGQKKYQINLKSHSGPIHVLLINKESSSSKPVVFPVPPPDDLTQPSSQSLTPVTPQKSSMATQNLPEQHVSERSQALQQTSATDISSAGSISGDIIDELMSSDVFPLLRLSPTPADDYNFNLDDNEGVCDLFDVQILNY

SEQ ID NO: 26401 - protein, 185 aa, Homo sapiens
  Payload ID: 5202
  Gene Symbol: E2F5
  Gene Name: E2F transcription factor 5, p130-binding
  Uniprot ID: Q15329
  ENSP ID: ENSP00000429120
MDDSINNRFSYVTHEDICNCFNGDTLLAIQAPSGTQLEVPIPEMGQNGQKKYQINLKSHSGPIHVLLINKESSSSKPVVFPVPPPDDLTQPSSQSLTPVTPQKSSMATQNLPEQHVSERSQALQQTSATDISSAGSISGDIIDELMSSDVFPLLRLSPTPADDYNFNLDDNEGVCDLFDVQILNY

SEQ ID NO: 26402 - protein, 182 aa, Homo sapiens
  Payload ID: 5202
  Gene Symbol: E2F5
  Gene Name: E2F transcription factor 5, p130-binding
  ENSP ID: ENSP00000429669
SYDSTFSYVTHEDICNCFNGDTLLAIQAPSGTQLEVPIPEMGQNGQKKYQINLKSHSGPIHVLLINKESSSSKPVVFPVPPPDDLTQPSSQSLTPVTPQKSSMATQNLPEQHVSERSQALQQTSATDISSAGSISGDIIDELMSSDVFPLLRLSPTPADDYNFNLDDNEGVCDLFDVQILNY

SEQ ID NO: 26403 - protein, 130 aa, Homo sapiens
  Payload ID: 5202
  Gene Symbol: E2F5
  Gene Name: E2F transcription factor 5, p130-binding
  ENSP ID: ENSP00000430461
  MOD_RES (1)..(1): Any amino acid
XNKESSSSKPVVFPVPPPDDLTQPSSQSLTPVTPQKSSMATQNLPEQHVSERSQALQQTSATDISSAGSISGDIIDELMSSDGGKLKDTTGHQKQVGQGLITCLIFLLPLNCLYFCMSFYPNRRSLPLVK

SEQ ID NO: 26404 - protein, 249 aa, Homo sapiens
  Payload ID: 5203
  Gene Symbol: E2F6
  Gene Name: E2F transcription factor 6
  Uniprot ID: O75461
  ENSP ID: ENSP00000302159
MNPSPSKIRINLEDNVQYVSMRKALKVKRPRFDVSLVYLTRKFMDLVRSAPGGILDLNKVATKLGVRKRRVYDITNVLDGIDLVEKKSKNHIRWIGSDLSNFGAVPQQKKLQEELSDLSAMEDALDELIKDCAQQLFELTDDKENERLAYVTYQDIHSIQAFHEQIVIAVKAPAETRLDVPAPREDSITVHIRSTNGPIDVYLCEVEQGQTSNKRSEGVGTSSSESTHPEGPEEEENPQQSEELLEVSN

SEQ ID NO: 26405 - protein, 281 aa, Homo sapiens
  Payload ID: 5203
  Gene Symbol: E2F6
  Gene Name: E2F transcription factor 6
  Uniprot ID: O75461
  ENSP ID: ENSP00000370936
MSQQRPARKLPSLLLDPTEETVRRRCRDPINVEGLLPSKIRINLEDNVQYVSMRKALKVKRPRFDVSLVYLTRKFMDLVRSAPGGILDLNKVATKLGVRKRRVYDITNVLDGIDLVEKKSKNHIRWIGSDLSNFGAVPQQKKLQEELSDLSAMEDALDELIKDCAQQLFELTDDKENERLAYVTYQDIHSIQAFHEQIVIAVKAPAETRLDVPAPREDSITVHIRSTNGPIDVYLCEVEQGQTSNKRSEGVGTSSSESTHPEGPEEEENPQQSEELLEVSN

SEQ ID NO: 26406 - protein, 38 aa, Homo sapiens
  Payload ID: 5203
  Gene Symbol: E2F6
  Gene Name: E2F transcription factor 6
  ENSP ID: ENSP00000389113
MSQQRPARKLPSLLLDPTEETVRRRCRDPINVEGLLKL

SEQ ID NO: 26407 - protein, 50 aa, Homo sapiens
  Payload ID: 5203
  Gene Symbol: E2F6
  Gene Name: E2F transcription factor 6
  ENSP ID: ENSP00000403449
MSQQRPARKLPSLLLDPTEETVRRRCRDPINVEGLLLFIQANLACWARLS

SEQ ID NO: 26408 - protein, 55 aa, Homo sapiens
  Payload ID: 5203
  Gene Symbol: E2F6
  Gene Name: E2F transcription factor 6
  ENSP ID: ENSP00000406891
MSQQRPARKLPSLLLDPTEETVRRRCRDPINVEGLLPSKIRINLEDNVQYVSMRM

SEQ ID NO: 26409 - protein, 63 aa, Homo sapiens
  Payload ID: 5203
  Gene Symbol: E2F6
  Gene Name: E2F transcription factor 6
  ENSP ID: ENSP00000407650
MSQQRPARKLPSLLLDPTEETVRRRCRDPINVEGLLPSKIRINLEDNVQYVSMRNLLPGVFLT

SEQ ID NO: 26410 - protein, 50 aa, Homo sapiens; identical to SEQ ID NO: 26407
  Payload ID: 5203
  Gene Symbol: E2F6
  Gene Name: E2F transcription factor 6
  ENSP ID: ENSP00000413678

SEQ ID NO: 26411 - protein, 206 aa, Homo sapiens
  Payload ID: 5203
  Gene Symbol: E2F6
  Gene Name: E2F transcription factor 6
  Uniprot ID: O75461
  ENSP ID: ENSP00000438864
MDLVRSAPGGILDLNKVATKLGVRKRRVYDITNVLDGIDLVEKKSKNHIRWIGSDLSNFGAVPQQKKLQEELSDLSAMEDALDELIKDCAQQLFELTDDKENERLAYVTYQDIHSIQAFHEQIVIAVKAPAETRLDVPAPREDSITVHIRSTNGPIDVYLCEVEQGQTSNKRSEGVGTSSSESTHPEGPEEEENPQQSEELLEVSN

SEQ ID NO: 26412 - protein, 206 aa, Homo sapiens; identical to SEQ ID NO: 26411
  Payload ID: 5203
  Gene Symbol: E2F6
  Gene Name: E2F transcription factor 6
  Uniprot ID: O75461
  ENSP ID: ENSP00000446315

SEQ ID NO: 26413 - protein, 911 aa, Homo sapiens
  Payload ID: 5204
  Gene Symbol: E2F7
  Gene Name: E2F transcription factor 7
  Uniprot ID: Q96AV8
  ENSP ID: ENSP00000323246
MEVNCLTLKDLISPRQPRLDFAVEDGENAQKENIFVDRSRMAPKTPIKNEPIDLSKQKKFTPERNPITPVKFVDRQQAEPWTPTANLKMLISAASPDIRDREKKKGLFRPIENKDDAFTDSLQLDVVGDSAVDEFEKQRPSRKQKSLGLLCQKFLARYPSYPLSTEKTTISLDEVAVSLGVERRRIYDIVNVLESLHLVSRVAKNQYGWHGRHSLPKTLRNLQRLGEEQKYEEQMAYLQQKELDLIDYKFGERKKDGDPDSQEQQLLDFSEPDCPSSSANSRKDKSLRIMSQKFVMLFLVSKTKIVTLDVAAKILIEESQDAPDHSKFKTKVRRLYDIANVLTSLALIKKVHVTEERGRKPAFKWIGPVDFSSSDEELVDVSASVLPELKRETYGQIQVCAKQKLARHGSFNTVQASERIQRKVNSEPSSPYREEQGSGGYSLEIGSLAAVYRQKIEDNSQGKAFASKRVVPPSSSLDPVAPFPVLSVDPEYCVNPLAHPVFSVAQTDLQAFSMQNGLNGQVDVSLASAASAVESLKPALLAGQPLVYVPSASLFMLYGSLQEGPASGSGSERDDRSSEAPATVELSSAPSAQKRLCEERKPQEEDEPATKRQSREYEDGPLSLVMPKKPSDSTDLASPKTMGNRASIPLKDIHVNGQLPAAEEISGKATANSLVSSEWGNPSRNTDVEKPSKENESTKEPSLLQYLCVQSPAGLNGFNVLLSGSQTPPTVGPSSGQLPSFSVPCMVLPSPPLGPFPVLYSPAMPGPVSSTLGALPNTGPVNFSLPGLGSIAQLLVGPTAVVNPKSSTLPSADPQLQSQPSLNLSPVMSRSHSVVQQPESPVYVGHPVSVVKLHQSPVPVTPKSIQRTHRETFFKTPGSLGDPVLKRRERNQSRNTSSAQRRLEIPSGGAD

SEQ ID NO: 26414 - protein, 728 aa, Homo sapiens
  Payload ID: 5204
  Gene Symbol: E2F7
  Gene Name: E2F transcription factor 7
  Uniprot ID: Q96AV8
  ENSP ID: ENSP00000393639
MEVNCLTLKDLISPRQPRLDFAVEDGENAQKENIFVDRSRMAPKTPIKNEPIDLSKQKKFTPERNPITPVKFVDRQQAEPWTPTANLKMLISAASPDIRDREKKKGLFRPIENKDDAFTDSLQLDVVGDSAVDEFEKQRPSRKQKSLGLLCQKFLARYPSYPLSTEKTTISLDEVAVSLGVERRRIYDIVNVLESLHLVSRVAKNQYGWHGRHSLPKTLRNLQRLGEEQKYEEQMAYLQQKELDLIDYKFGERKKDGDPDSQEQQLLDFSEPDCPSSSANSRKDKSLRIMSQKFVMLFLVSKTKIVTLDVAAKILIEESQDAPDHSKFKTKVRRLYDIANVLTSLALIKKVHVTEERGRKPAFKWIGPVDFSSSDEELVDVSASVLPELKRETYGQIQVCAKQKLARHGSFNTVQASERIQRKVNSEPSSPYREEQGSGGYSLEIGSLAAVYRQKIEDNSQGKAFASKRVVPPSSSLDPVAPFPVLSVDPEYCVNPLAHPVFSVAQTDLQAFSMQNGLNGQVDVSLASAASAVESLKPALLAGQPLVYVPSASLFMLYGSLQEGPASGSGSERDDRSSEAPATVELSSAPSAQKRLCEERKPQEEDEPATKRQSREYEDGPLSLVMPKKPSDSTDLASPKTMGNRASIPLKDIHVNGQLPAAEEISGKATANSLVSSEWGNPSRNTDVEKPSKENESTKEPSLLQYLCVQSPAVTSSSDPQEHPTHTS

SEQ ID NO: 26415 - protein, 208 aa, Homo sapiens
  Payload ID: 5204
  Gene Symbol: E2F7
  Gene Name: E2F transcription factor 7
  ENSP ID: ENSP00000447963
DVVGDSAVDEFEKQRPSRKQKSLGLLCQKFLARYPSYPLSTEKTTISLDEVAVSLGVERRRIYDIVNVLESLHLVSRVAKNQYGWHGRHSLPKTLRNLQRLGEEQKYEEQMAYLQQKELDLIDYKFGERKKDGDPDSQEQQLLDFSEPDCPSSSANSRKDKSLRIMSQKFVMLFLVSKTKIVTLDVAAKILIEESQDAPDHSKFKRWR

SEQ ID NO: 26416 - protein, 693 aa, Homo sapiens
  Payload ID: 5204
  Gene Symbol: E2F7
  Gene Name: E2F transcription factor 7
  ENSP ID: ENSP00000448245
MEVNCLTLKDLISPRQPRLDFAVEDGENAQKENIFVDRSRMAPKTPIKNEPIDLSKQKKFTPERNPITPVKFVDRQQAEPWTPTANLKMLISAASPDIRDREKKKGLFRPIENKDDAFTDSLQLDVVGDSAVDEFEKQRPSRKQKSLGLLCQKFLARYPSYPLSTEKTTISLDEVAVSLGVERRRIYDIVNVLESLHLVSRVAKNQYGWHGRHSLPKTLRNLQRLGEEQKYEEQMAYLQQKELDLIDYKFGERKKDGDPDSQEQQLLDFSEPDCPSSSANSRKDKSLRIMSQKFVMLFLVSKTKIVTLDVAAKILIEESQDAPDHSKFKTKVRRLYDIANVLTSLALIKKVHVTEERGRKPAFKWIGPVDFSSSDEELVDVSASVLPELKRETYGQIQVCAKQKLARHGSFNTVQASERIQRKVNSEPSSPYREEQGSGGYSLEIGSLAAVYRQKIEDNSQGKAFASKRVVPPSSSLDPVAPFPVLSVDPEYCVNPLAHPVFSVAQTDLQAFSMQNGLNGQVDVSLASAASAVESLKPALLAGQPLVYVPSASLFMLYGSLQEGPASGSGSERDDRSSEAPATVELSSAPSAQKRLCEERKPQEEDEPATKRQSREYEDGPLSLVMPKKPSDSTDLASPKTMGNRASIPLKDIHVNGQLPAAEEISGKATANSLVSSEWGNPSRNTDVEKPSK

SEQ ID NO: 26417 - protein, 115 aa, Homo sapiens
  Payload ID: 5204
  Gene Symbol: E2F7
  Gene Name: E2F transcription factor 7
  ENSP ID: ENSP00000449033
MEVNCLTLKDLISPRQPRLDFAVEDGENAQKENIFVDRSRMAPKTPIKNEPIDLSKQKKFTPERNPITPVKFVDRQQAEPWTPTANLKMLISAASPDIRDREKKKGLFRPIENKD

SEQ ID NO: 26418 - protein, 219 aa, Homo sapiens
  Payload ID: 5204
  Gene Symbol: E2F7
  Gene Name: E2F transcription factor 7
  ENSP ID: ENSP00000449284
  MOD_RES (1)..(1): Any amino acid
XLDVVGDSAVDEFEKQRPSRKQKSLGLLCQKFLARYPSYPLSTEKTTISLDEVAVSLGVERRRIYDIVNVLESLHLVSRVAKNQYGWHGRHSLPKTLRNLQRLGEEQKYEEQMAYLQQKELDLIDYKFGERKKDGDPDSQEQQLLDFSEPDCPSSSANSRKDKSLRIMSQKFVMLFLVSKTKIVTLDVAAKILIEESQDAPDHSKFKSKNLHLHQLTST

SEQ ID NO: 26419 - protein, 867 aa, Homo sapiens
  Payload ID: 5205
  Gene Symbol: E2F8
  Gene Name: E2F transcription factor 8
  Uniprot ID: A0AVK6
  ENSP ID: ENSP00000250024
MENEKENLFCEPHKRGLMKTPLKESTTANIVLAEIQPDFGPLTTPTKPKEGSQGEPWTPTANLKMLISAVSPEIRNRDQKRGLFDNRSGLPEAKDCIHEHLSGDEFEKSQPSRKEKSLGLLCHKFLARYPNYPNPAVNNDICLDEVAEELNVERRRIYDIVNVLESLHMVSRLAKNRYTWHGRHNLNKTLGTLKSIGEENKYAEQIMMIKKKEYEQEFDFIKSYSIEDHIIKSNTGPNGHPDMCFVELPGVEFRAASVNSRKDKSLRVMSQKFVMLFLVSTPQIVSLEVAAKILIGEDHVEDLDKSKFKTKIRRLYDIANVLSSLDLIKKVHVTEERGRKPAFKWTGPEISPNTSGSSPVIHFTPSDLEVRRSSKENCAKNLFSTRGKPNFTRHPSLIKLVKSIESDRRKINSAPSSPIKTNKAESSQNSAPFPSKMAQLAAICKMQLEEQSSESRQKVKVQLARSGPCKPVAPLDPPVNAEMELTAPSLIQPLGMVPLIPSPLSSAVPLILPQAPSGPSYAIYLQPTQAHQSVTPPQGLSPTVCTTHSSKATGSKDSTDATTEKAANDTSKASASTRPGSLLPAPERQGAKSRTREPAGERGSKRASMLEDSGSKKKFKEDLKGLENVSATLFPSGYLIPLTQCSSLGAESILSGKENSSALSPNHRIYSSPIAGVIPVTSSELTAVNFPSFHVTPLKLMVSPTSVAAVPVGNSPALASSHPVPIQNPSSAIVNFTLQHLGLISPNVQLSASPGSGIVPVSPRIESVNVAPENAGTQQGRATNYDSPVPGQSQPNGQSVAVTGAQQPVPVTPKGSQLVAESFFRTPGGPTKPTSSSCMDFEGANKTSLGTLFVPQRKLEVSTEDVH

SEQ ID NO: 26420 - protein, 867 aa, Homo sapiens; identical to SEQ ID NO: 26419
  Payload ID: 5205
  Gene Symbol: E2F8
  Gene Name: E2F transcription factor 8
  Uniprot ID: A0AVK6
  ENSP ID: ENSP00000434199

SEQ ID NO: 26421 - protein, 139 aa, Homo sapiens
  Payload ID: 5205
  Gene Symbol: E2F8
  Gene Name: E2F transcription factor 8
  ENSP ID: ENSP00000437326
MENEKENLFCEPHKRGLMKTPLKESTTANIVLAEIQPDFGPLTTPTKPKEGSQGEPWTPTANLKMLISAVSPEIRNRDQKRGLFDNRSGLPEAKDCIHEHLSGDEFEKSQPSRKEKSLGLLCHKFLARYPNYPNPAVNN

SEQ ID NO: 26422 - protein, 867 aa, Homo sapiens; identical to SEQ ID NO: 26419
  Payload ID: 5205
  Gene Symbol: E2F8
  Gene Name: E2F transcription factor 8
  Uniprot ID: A0AVK6
  ENSP ID: ENSP00000481103

SEQ ID NO: 26423 - protein, 285 aa, Homo sapiens
  Payload ID: 5206
  Gene Symbol: EAPP
  Gene Name: E2F-associated phosphoprotein
  Uniprot ID: Q56P03
  ENSP ID: ENSP00000250454
MNRLPDDYDPYAVEEPSDEEPALSSSEDEVDVLLHGTPDQKRKLIRECLTGESESSSEDEFEKEMEAELNSTMKTMEDKLSSLGTGSSSGNGKVATAPTRYYDDIYFDSDSEDEDRAVQVTKKKKKKQHKIPTNDELLYDPEKDNRDQAWVDAQRRGYHGLGPQRSRQQQPVPNSDAVLNCPACMTTLCLDCQRHESYKTQYRAMFVMNCSINKEEVLRYKASENRKKRRVHKKMRSNREDAAEKAETDVEEIYHPVMCTECSTEVAVYDKDEVFHFFNVLASHS

SEQ ID NO: 26424 - protein, 205 aa, Homo sapiens
  Payload ID: 5206
  Gene Symbol: EAPP
  Gene Name: E2F-associated phosphoprotein
  ENSP ID: ENSP00000450908
MYASSEDEVDVLLHGTPDQKRKLIRECLTGESESSSEDEFEKEMEAELNSTMKTMEDKLSSLGTGSSSGNGKVATAPTRYYDDIYFDSDSEDEDRAVQVTKKKKKKQHKIPTNDELLYDPEKDNRDQAWVDAQRRGYHGLGPQRSRQQQPVPNSDAVLNCPACMTTLCLDCQRHESYKTQYRAMFVMNCSINKEEVLRYKASENR

SEQ ID NO: 26425 - protein, 109 aa, Homo sapiens
  Payload ID: 5206
  Gene Symbol: EAPP
  Gene Name: E2F-associated phosphoprotein
  ENSP ID: ENSP00000452439
MNRLPDDYDPYAVEEPSDEEPALSRWAPAPPWPPRIWVEAWLWSPPFVAPAEPTQTLAAREPVVPVTCAKPKGFPDGVAQSRGEAVPMSPVGRGIFRNHGGPRVNLQKQ

SEQ ID NO: 26426 - protein, 231 aa, Homo sapiens [sequence omitted]

SEQ ID NO: 26427 - protein, 784 aa, Homo sapiens
  Payload ID: 5207
  Gene Symbol: E4F1
  Gene Name: E4F transcription factor 1
  Uniprot ID: Q66K89
  ENSP ID: ENSP00000301727
MEGAMAVRVTAAHTAEAQAEAGREAGEGAVAAVAAALAPSGFLGLPAPFSEEDEDDVHRCGRCQAEFTALEDFVQHKIQKACQRAPPEALPATPATTALLGQEVVPAAPGPEEPITVAHIVVEAASLAADISHASDLVGGGHIKEVIVAAEAELGDGEMAEAPGSPRQQGLGLAGEGEQAQVKLLVNKDGRYVCALCHKTFKTGSILKAHMVTHSSRKDHECKLCGASFRTKGSLIRHHRRHTDERPYKCSKCGKSFRESGALTRHLKSLTPCTEKIRFSVSKDVVVSKEDARAGSGAGAAGLGTATSSVTGEPIETSPVIHLVTDAKGTVIHEVHVQMQELSLGMKALAPEPPVSQELPCSSEGSRENLLHQAMQNSGIVLERAAGEEGALEPAPAAGSSPQPLAVAAPQLPVLEVQPLETQVASEASAVPRTHPCPQCSETFPTAATLEAHKRGHTGPRPFACAQCGKAFPKAYLLKKHQEVHVRERRFRCGDCGKLYKTIAHVRGHRRVHSDERPYPCPKCGKRYKTKNAQQVHFRTHLEEKPHVCQFCSRGFREKGSLVRHVRHHTGEKPFKCYKCGRGFAEHGTLNRHLRTKGGCLLEVEELLVSEDSPAAATTVLTEDPHTVLVEFSSVVADTQEYIIEATADDAETSEATEIIEGTQTEVDSHIMKVVQQIVHQASAGHQIIVQNVTMDEETALGPEAAAADTITIATPESLTEQVAMTLASAISEGTVLAARAGTSGTEQATVTMVSSEDIEILEHAGELVIASPEGQLEVQTVIV

SEQ ID NO: 26428 - protein, 272 aa, Homo sapiens
  Payload ID: 5207
  Gene Symbol: E4F1
  Gene Name: E4F transcription factor 1
  ENSP ID: ENSP00000454652
MARAAGSTDPPRPRHLADLAGPSQPSTKPPDEDDVHRCGRCQAEFTALEDFVQHKIQKACQRAPPEALPATPATTALLGQEVVPAAPGPEEPITVAHIVVEAASLAADISHASDLVGGGHIKEVIVAAEAELGDGEMAEAPGSPRQQGLGLAGEGEQAQVKLLVNKDGRYVCALCHKTFKTGSILKAHMVTHSSRKDHECKLCGASFRTKGSLIRHHRRHTDERPYKCSKCGKSFRESGALTRHLKSLTPCTEKIRFSVSKDVVVSKEDARA

SEQ ID NO: 26429 - protein, 208 aa, Homo sapiens
  Payload ID: 5207
  Gene Symbol: E4F1
  Gene Name: E4F transcription factor 1
  ENSP ID: ENSP00000456005
  MOD_RES (1)..(1): Any amino acid
XEGAMAVRVTAAHTAEAQAEAGREAGEGAVAAVAAALAPSGFLGLPAPFSEEGLEEKPDGALAAQPPPSQALLTAGSLQMRTMCTDAAAARQSSPPWRILFSTRFRRPASGPLRRPCLPPLPPQRCWARRWCRQHQAQRSPSLWPTSWWRRPLWQQTSATHLTLLVVGTSKRSSWLLRRSWETVRWPRPRAAPASRGWGSQGRVSRPR

SEQ ID NO: 26430 - protein, 607 aa, Homo sapiens
  Payload ID: 5207
  Gene Symbol: E4F1
  Gene Name: E4F transcription factor 1
  ENSP ID: ENSP00000456760
MEGAMAVRVTAAHTAEAQAEAGREAGEGAVAAVAAALAPSGFLGLPAPFSEEDEDDVHRCGRCQAEFTALEDFVQHKIQKACQRAPPEALPATPATTALLGQEVVPAAPGPEEPITVAHIVVEAASLAADISHASDLVGGGHIKEVIVAAEAELGDGEMAEAPGSPRQQGLGLAGEGEQAQVKLLVNKDGRYVCALCHKTFKTGSILKAHMVTHSSRKDHECKLCGASFRTKGSLIRHHRRHTDERPYKCSKCGKSFRESGALTRHLKSLTPCTEKIRFSVSKDVVVSKEDARAGSGAGAAGLGTATSSVTGEPIETSPVIHLVTDAKGTVIHEVHVQMQELSLGMKALAPEPPVSQELPCSSEGSRENLLHQFCSRGFREKGSLVRHVRHHTGEKPFKCYKCGRGFAEHGTLNRHLRTKGGCLLEVEELLVSEDSPAAATTVLTEDPHTVLVEFSSVVADTQEYIIEATADDAETSEATEIIEGTQTEVDSHIMKVVQQIVHQASAGHQIIVQNVTMDEETALGPEAAAADTITIATPESLTEQVAMTLASAISEGTVLAARAGTSGTEQATVTMVSSEDIEILEHAGELVIASPEGQLEVQTVIV

SEQ ID NO: 26431 - protein, 654 aa, Homo sapiens
  Payload ID: 5207
  Gene Symbol: E4F1
  Gene Name: E4F transcription factor 1
  ENSP ID: ENSP00000457672
MEGAMAVRVTAAHTAEAQAEAGREAGEGAVAAVAAALAPSGFLGLPAPFSEEDEDDVHRCGRCQAEFTALEDFVQHKIQKACQRAPPEALPATPATTALLGQEVVPAAPGPEEPITVAHIVVEAASLAADISHASDLVGGGHIKEVIVAAEAELGDGEMAEAPGSPRQQGLGLAGEGEQAQVKLLVNKDGRYVCALCHKTFKTGSILKAHMVTHSSRKDHECKLCGASFRTKGSLIRHHRRHTDERPYKCSKCGKSFRESGALTRHLKSLTPCTEKIRFSVSKDVVVSKEDARAGSGAGAAGLGTATSSVTGEPIETSPVIHLVTDAKGTVIHEVHVQMQELSLGMKALAPEPPVSQELPCSSEGSRENLLHQAMQNSGIVLERAAGEEGALEPAPAAGSSPQPLAVAAPQLPVLEVQPLETQVASEASAVPRTHPCPQCSETFPTAATLEAHKRGHTGPRPFACAQCGKAFPKAYLLKKHQEVHVRERRFRCGDCGKLYKTIAHVRGHRRVHSDERPYPCPKCGKRYKTKNAQQVHFRTHLEEKPHVCQFCSRGFREKGSLVRHVRHHTGEKPFKCYKCGRGFAEHGTLNRHLRTKGGCLLEVEELLVSEDSPAAATTVLTEDPHTVPLRTMRRPVRPRRSSRAPRQRWTATS

SEQ ID NO: 26432 - protein, 619 aa, Homo sapiens
  Payload ID: 5208
  Gene Symbol: ELF1
  Gene Name: E74-like factor 1 (ets domain transcription factor)
  Uniprot ID: P32519
  ENSP ID: ENSP00000239882
MAAVVQQNDLVFEFASNVMEDERQLGDPAIFPAVIVEHVPGADILNSYAGLACVEEPNDMITESSLDVAEEEIIDDDDDDITLTVEASCHDGDETIETIEAAEALLNMDSPGPMLDEKRINNNIFSSPEDDMVVAPVTHVSVTLDGIPEVMETQQVQEKYADSPGASSPEQPKRKKGRKTKPPRPDSPATTPNISVKKKNKDGKGNTIYLWEFLLALLQDKATCPKYIKWTQREKGIFKLVDSKAVSRLWGKHKNKPDMNYETMGRALRYYYQRGILAKVEGQRLVYQFKEMPKDLIYINDEDPSSSIESSDPSLSSSATSNRNQTSRSRVSSSPGVKGGATTVLKPGNSKAAKPKDPVEVAQPSEVLRTVQPTQSPYPTQLFRTVHVVQPVQAVPEGEAARTSTMQDETLNSSVQSIRTIQAPTQVPVVVSPRNQQLHTVTLQTVPLTTVIASTDPSAGTGSQKFILQAIPSSQPMTVLKENVMLQSQKAGSPPSIVLGPAQVQQVLTSNVQTICNGTVSVASSPSFSATAPVVTFSPRSSQLVAHPPGTVITSVIKTQETKTLTQEVEKKESEDHLKENTEKTEQQPQPYVMVVSSSNGFTSQVAMKQNELLEPNSF

SEQ ID NO: 26433 - protein, 24 aa, Homo sapiens
  Payload ID: 5208
  Gene Symbol: ELF1
  Gene Name: E74-like factor 1 (ets domain transcription factor)
  ENSP ID: ENSP00000384135
MAAVVQQNDLVFEFASNVMEDERQ

SEQ ID NO: 26434 - protein, 361 aa, Homo sapiens
  Payload ID: 5208
  Gene Symbol: ELF1
  Gene Name: E74-like factor 1 (ets domain transcription factor)
  ENSP ID: ENSP00000405580
MNYETMGRALRYYYQRGILAKVEGQRLVYQFKEMPKDLIYINDEDPSSSIESSDPSLSSSATSNRNQTSRSRVSSSPGVKGGATTVLKPGNSKAAKPKDPVEVAQPSEVLRTVQPTQSPYPTQLFRTVHVVQPVQAVPEGEAARTSTMQDETLNSSVQSIRTIQAPTQVPVVVSPRNQQLHTVTLQTVPLTTVIASTDPSAGTGSQKFILQAIPSSQPMTVLKENVMLQSQKAGSPPSIVLGPAQVQQVLTSNVQTICNGTVSVASSPSFSATAPVVTFSPRSSQLVAHPPGTVITSVIKTQETKTLTQEVEKKESEDHLKENTEKTEQQPQPYVMVVSSSNGFTSQVAMKQNELLEPNSF

SEQ ID NO: 26435 - protein, 595 aa, Homo sapiens
  Payload ID: 5208
  Gene Symbol: ELF1
  Gene Name: E74-like factor 1 (ets domain transcription factor)
  Uniprot ID: P32519
  ENSP ID: ENSP00000486912
MAAVVQQNDLVFEFASNVMEDERQLGDPAIFPAVIVEHVPGADILNSYAGLACVEEPNDMITESSLDVAEEEIIDDDDDDITLTVEASCHDGDETIETIEAAEALLNMDSPGPMLDEKRINGIPEVMETQQVQEKYADSPGASSPEQPKRKKGRKTKPPRPDSPATTPNISVKKKNKDGKGNTIYLWEFLLALLQDKATCPKYIKWTQREKGIFKLVDSKAVSRLWGKHKNKPDMNYETMGRALRYYYQRGILAKVEGQRLVYQFKEMPKDLIYINDEDPSSSIESSDPSLSSSATSNRNQTSRSRVSSSPGVKGGATTVLKPGNSKAAKPKDPVEVAQPSEVLRTVQPTQSPYPTQLFRTVHVVQPVQAVPEGEAARTSTMQDETLNSSVQSIRTIQAPTQVPVVVSPRNQQLHTVTLQTVPLTTVIASTDPSAGTGSQKFILQAIPSSQPMTVLKENVMLQSQKAGSPPSIVLGPAQVQQVLTSNVQTICNGTVSVASSPSFSATAPVVTFSPRSSQLVAHPPGTVITSVIKTQETKTLTQEVEKKESEDHLKENTEKTEQQPQPYVMVVSSSNGFTSQVAMKQNELLEPNSF

SEQ ID NO: 26436 - protein, 124 aa, Homo sapiens
  Payload ID: 5208
  Gene Symbol: ELF1
  Gene Name: E74-like factor 1 (ets domain transcription factor)
  ENSP ID: ENSP00000487240
MAAVVQQNDLVFEFASNVMEDERQLGDPAIFPAVIVEHVPGADILNSYAGLACVEEPNDMITESSLDVAEEEIIDDDDDDITLTVETGFLHVGQSQTPDLKQSACLGFPKCGITGMSHCASQVC

SEQ ID NO: 26437 - protein, 615 aa, Homo sapiens
  Payload ID: 5208
  Gene Symbol: ELF1
  Gene Name: E74-like factor 1 (ets domain transcription factor)
  ENSP ID: ENSP00000489586
MAAVVQQNDLVFEFASNVMEDERQLGDPAIFPAVIVEHVPGADILNSYAGLACVEEPNDMITESSLDVAEEEIIDDDDDDITLTVEASCHDGDETIETIEAAEALLNMDSPGPMLDEKRINNNIFSSPEDDMVVAPVTHVSVTLDGIPEVMETQQVQEKYADSPGASSPEQPKRKKGRKTKPPRPDSPATTPNISVKKKNKDGKGNTIYLWEFLLALLQDKATCPKYIKWTQREKGIFKLVDSKAVSRLWGKHKNKPDMNYETMGRALRYYYQRGILAKVEGQRLVYQFKEMPKDLIYINDEDPSSSIESSDPSLSSSATSNRNQTSRSRVSSSPGVKGGATTVLKPGNSKAAKPKDPVEVAQPSEVLRTVQPTQSPYPTQLFRTVHVVQPVQAVPEGEAARTSTMQDETLNSSVQSIRTIQAPTQVPVVVSPRNQQLHTVTLQTVPLTTVIASTDPSAGTGSQKFILQAIPSSQPMTVLKENVMLQSQKAGSPPSIVLGPAQVQQVLTSNVQTICNGTVSVASSPSFSATAPVVTFSPRSSQLVAHPPGTVITSVIKTQETKTLTQEVEKKESEDHLKENTEKTEQQPQPYVMVVSSSNGFTSQVAMKQNELLE

SEQ ID NO: 26438 - protein, 533 aa, Homo sapiens
  Payload ID: 5209
  Gene Symbol: ELF2
  Gene Name: E74-like factor 2 (ets domain transcription factor)
  Uniprot ID: Q15723
  ENSP ID: ENSP00000351458
MATSLHEGPTNQLDLLIRAVEASVHSSNAHCTDKTIEAAEALLHMESPTCLRDSRSPVEVFVPPCVSTPEFIHAAMRPDVITETVVEVSTEESEPMDTSPIPTSPDSHEPMKKKKVGRKPKTQQSPISNGSPELGIKKKPREGKGNTTYLWEFLLDLLQDKNTCPRYIKWTQREKGIFKLVDSKAVSKLWGKHKNKPDMNYETMGRALRYYYQRGILAKVEGQRLVYQFKDMPKNIVVIDDDKSETCNEDLAGTTDEKSLERVSLSAESLLKAASSVRSGKNSSPINCSRAEKGVARVVNITSPGHDASSRSPTTTASVSATAAPRTVRVAMQVPVVMTSLGQKISTVAVQSVNAGAPLITSTSPTTATSPKVVIQTIPTVMPASTENGDKITMQPAKIITIPATQLAQCQLQTKSNLTGSGSINIVGTPLAVRALTPVSIAHGTPVMRLSMPTQQASGQTPPRVISAVIKGPEVKSEAVAKKQEHDVKTLQLVEEKPADGNKTVTHVVVVSAPSAIALPVTMKTEGLVTCEK

SEQ ID NO: 26439 - protein, 504 aa, Homo sapiens
  Payload ID: 5209
  Gene Symbol: ELF2
  Gene Name: E74-like factor 2 (ets domain transcription factor)
  Uniprot ID: Q15723
  ENSP ID: ENSP00000368867
MATSLHEGPTNQLDLLIRAVEASVHSSNAHCTDKTIEAAEALLHMESPTCLRDSRSPVEVFVPPCVSTPEFIHAAMRPDVITETVVEVSTEESEPMDTSPIPTSPDSHEPMKKKKGNTTYLWEFLLDLLQDKNTCPRYIKWTQREKGIFKLVDSKAVSKLWGKHKNKPDMNYETMGRALRYYYQRGILAKVEGQRLVYQFKDMPKNIVVIDDDKSETCNEDLAGTTDEKSLERVSLSAESLLKAASSVRSGKNSSPINCSRAEKGVARVVNITSPGHDASSRSPTTTASVSATAAPRTVRVAMQVPVVMTSLGQKISTVAVQSVNAGAPLITSTSPTTATSPKVVIQTIPTVMPASTENGDKITMQPAKIITIPATQLAQCQLQTKSNLTGSGSINIVGTPLAVRALTPVSIAHGTPVMRLSMPTQQASGQTPPRVISAVIKGPEVKSEAVAKKQEHDVKTLQLVEEKPADGNKTVTHVVVVSAPSAIALPVTMKTEGLVTCEK

SEQ ID NO: 26440 - protein, 593 aa, Homo sapiens
  Payload ID: 5209
  Gene Symbol: ELF2
  Gene Name: E74-like factor 2 (ets domain transcription factor)
  Uniprot ID: Q15723
  ENSP ID: ENSP00000368868
MTSAVVDSGGTILELSSNGVENQEESEKVSEYPAVIVEPVPSARLEQGYAAQVLVYDDETYMMQDVAEEQEVETENVETVEASVHSSNAHCTDKTIEAAEALLHMESPTCLRDSRSPVEVFVPPCVSTPEFIHAAMRPDVITETVVEVSTEESEPMDTSPIPTSPDSHEPMKKKKVGRKPKTQQSPISNGSPELGIKKKPREGKGNTTYLWEFLLDLLQDKNTCPRYIKWTQREKGIFKLVDSKAVSKLWGKHKNKPDMNYETMGRALRYYYQRGILAKVEGQRLVYQFKDMPKNIVVIDDDKSETCNEDLAGTTDEKSLERVSLSAESLLKAASSVRSGKNSSPINCSRAEKGVARVVNITSPGHDASSRSPTTTASVSATAAPRTVRVAMQVPVVMTSLGQKISTVAVQSVNAGAPLITSTSPTTATSPKVVIQTIPTVMPASTENGDKITMQPAKIITIPATQLAQCQLQTKSNLTGSGSINIVGTPLAVRALTPVSIAHGTPVMRLSMPTQQASGQTPPRVISAVIKGPEVKSEAVAKKQEHDVKTLQLVEEKPADGNKTVTHVVVVSAPSAIALPVTMKTEGLVTCEK

SEQ ID NO: 26441 - protein, 581 aa, Homo sapiens
  Payload ID: 5209
  Gene Symbol: ELF2
  Gene Name: E74-like factor 2 (ets domain transcription factor)
  Uniprot ID: Q15723
  ENSP ID: ENSP00000377782
MTSAVVDSGGTILELSSNGVENQEESEKVSEYPAVIVEPVPSARLEQGYAAQVLVYDDETYMMQDVAEEQEVETENVETVEASVHSSNAHCTDKTIEAAEALLHMESPTCLRDSRSPEFIHAAMRPDVITETVVEVSTEESEPMDTSPIPTSPDSHEPMKKKKVGRKPKTQQSPISNGSPELGIKKKPREGKGNTTYLWEFLLDLLQDKNTCPRYIKWTQREKGIFKLVDSKAVSKLWGKHKNKPDMNYETMGRALRYYYQRGILAKVEGQRLVYQFKDMPKNIVVIDDDKSETCNEDLAGTTDEKSLERVSLSAESLLKAASSVRSGKNSSPINCSRAEKGVARVVNITSPGHDASSRSPTTTASVSATAAPRTVRVAMQVPVVMTSLGQKISTVAVQSVNAGAPLITSTSPTTATSPKVVIQTIPTVMPASTENGDKITMQPAKIITIPATQLAQCQLQTKSNLTGSGSINIVGTPLAVRALTPVSIAHGTPVMRLSMPTQQASGQTPPRVISAVIKGPEVKSEAVAKKQEHDVKTLQLVEEKPADGNKTVTHVVVVSAPSAIALPVTMKTEGLVTCEK

SEQ ID NO: 26442 - protein, 245 aa, Homo sapiens
  Payload ID: 5209
  Gene Symbol: ELF2
  Gene Name: E74-like factor 2 (ets domain transcription factor)
  ENSP ID: ENSP00000397796
MATSLHEGPTNQLDLLIRAVEASVHSSNAHCTDKTIEAAEALLHMESPTCLRDSRSPVEVFVPPCVSTPEFIHAAMRPDVITETVVEVSTEESEPMDTSPIPTSPDSHEPMKKKKGNTTYLWEFLLDLLQDKNTCPRYIKWTQREKGIFKLVDSKAVSKLWGKHKNKPDMNYETMGRALRYYYQRGILAKVEGQRLVYQFKDMPKNIVVIDDDKSETCNEDLAGTTDEKSLERVSLSAESLLKAA

SEQ ID NO: 26443 - protein, 93 aa, Homo sapiens
  Payload ID: 5209
  Gene Symbol: ELF2
  Gene Name: E74-like factor 2 (ets domain transcription factor)
  ENSP ID: ENSP00000421278
MTSAVVDSGGTILELSSNGVENQEESEKVSEYPAVIVEPVPSARLEQGYAAQVLVYDDETYMMQDVAEEQEVETENVETGGISLCHPGWSAVV

SEQ ID NO: 26444 - protein, 192 aa, Homo sapiens
  Payload ID: 5209
  Gene Symbol: ELF2
  Gene Name: E74-like factor 2 (ets domain transcription factor)
  ENSP ID: ENSP00000426087
MATSLHEGPTNQLDLLIRAVEASVHSSNAHCTDKTIEAAEALLHMESPTCLRDSRSPEFIHAAMRPDVITETVVEVSTEESEPMDTSPIPTSPDSHEPMKKKKGNTTYLWEFLLDLLQDKNTCPRYIKWTQREKGIFKLVDSKAVSKLWGKHKNKPDMNYETMGRALRYYYQRGILAKVEGQRLVYQFKDMP

SEQ ID NO: 26445 - protein, 521 aa, Homo sapiens
  Payload ID: 5209
  Gene Symbol: ELF2
  Gene Name: E74-like factor 2 (ets domain transcription factor)
  Uniprot ID: Q15723
  ENSP ID: ENSP00000426997
MATSLHEGPTNQLDLLIRAVEASVHSSNAHCTDKTIEAAEALLHMESPTCLRDSRSPEFIHAAMRPDVITETVVEVSTEESEPMDTSPIPTSPDSHEPMKKKKVGRKPKTQQSPISNGSPELGIKKKPREGKGNTTYLWEFLLDLLQDKNTCPRYIKWTQREKGIFKLVDSKAVSKLWGKHKNKPDMNYETMGRALRYYYQRGILAKVEGQRLVYQFKDMPKNIVVIDDDKSETCNEDLAGTTDEKSLERVSLSAESLLKAASSVRSGKNSSPINCSRAEKGVARVVNITSPGHDASSRSPTTTASVSATAAPRTVRVAMQVPVVMTSLGQKISTVAVQSVNAGAPLITSTSPTTATSPKVVIQTIPTVMPASTENGDKITMQPAKIITIPATQLAQCQLQTKSNLTGSGSINIVGTPLAVRALTPVSIAHGTPVMRLSMPTQQASGQTPPRVISAVIKGPEVKSEAVAKKQEHDVKTLQLVEEKPADGNKTVTHVVVVSAPSAIALPVTMKTEGLVTCEK

SEQ ID NO: 26446 - protein, 371 aa, Homo sapiens
  Payload ID: 5210
  Gene Symbol: ELF3
  Gene Name: E74-like factor 3 (ets domain transcription factor, epithelial-specific )
  Uniprot ID: P78545
  ENSP ID: ENSP00000352673
MAATCEISNIFSNYFSAMYSSEDSTLASVPPAATFGADDLVLTLSNPQMSLEGTEKASWLGEQPQFWSKTQVLDWISYQVEKNKYDASAIDFSRCDMDGATLCNCALEELRLVFGPLGDQLHAQLRDLTSSSSDELSWIIELLEKDGMAFQEALDPGPFDQGSPFAQELLDDGQQASPYHPGSCGAGAPSPGSSDVSTAGTGASRSSHSSDSGGSDVDLDPTDGKLFPSDGFRDCKKGDPKHGKRKRGRPRKLSKEYWDCLEGKKSKHAPRGTHLWEFIRDILIHPELNEGLMKWENRHEGVFKFLRSEAVAQLWGQKKKNSNMTYEKLSRAMRYYYKREILERVDGRRLVYKFGKNSSGWKEEEVLQSRN

SEQ ID NO: 26447 - protein, 371 aa, Homo sapiens; identical to SEQ ID NO: 26446
  Payload ID: 5210
  Gene Symbol: ELF3
  Gene Name: E74-like factor 3 (ets domain transcription factor, epithelial-specific )
  Uniprot ID: P78545
  ENSP ID: ENSP00000356252

SEQ ID NO: 26448 - protein, 371 aa, Homo sapiens; identical to SEQ ID NO: 26446
  Payload ID: 5210
  Gene Symbol: ELF3
  Gene Name: E74-like factor 3 (ets domain transcription factor, epithelial-specific )
  Uniprot ID: P78545
  ENSP ID: ENSP00000356253

SEQ ID NO: 26449 - protein, 232 aa, Homo sapiens
  Payload ID: 5210
  Gene Symbol: ELF3
  Gene Name: E74-like factor 3 (ets domain transcription factor, epithelial-specific )
  ENSP ID: ENSP00000405162
MAATCEISNIFSNYFSAMYSSEDSTLASVPPAATFGADDLVLTLSNPQMSLEEKASWLGEQPQFWSKTQVLDWISYQVEKNKYDASAIDFSRCDMDGATLCNCALEELRLVFGPLGDQLHAQLRDLTSSSSDELSWIIELLEKDGMAFQEALDPGPFDQGSPFAQELLDDGQQASPYHPGSCGAGAPSPGSSDVSTAGTGASRSSHSSDSGGSDVDLDPTDGKLFPSDGFRD

SEQ ID NO: 26450 - protein, 663 aa, Homo sapiens
  Payload ID: 5211
  Gene Symbol: ELF4
  Gene Name: E74-like factor 4 (ets domain transcription factor)
  Uniprot ID: Q99607
  ENSP ID: ENSP00000311280
MAITLQPSDLIFEFASNGMDDDIHQLEDPSVFPAVIVEQVPYPDLLHLYSGLELDDVHNGIITDGTLCMTQDQILEGSFLLTDDNEATSHTMSTAEVLLNMESPSDILDEKQIFSTSEMLPDSDPAPAVTLPNYLFPASEPDALNRAGDTSDQEGHSLEEKASREESAKKTGKSKKRIRKTKGNRSTSPVTDPSIPIRKKSKDGKGSTIYLWEFLLALLQDRNTCPKYIKWTQREKGIFKLVDSKAVSKLWGKQKNKPDMNYETMGRALRYYYQRGILAKVEGQRLVYQFKEMPKDLVVIEDEDESSEATAAPPQASTASVASASTTRRTSSRVSSRSAPQGKGSSSWEKPKIQHVGLQPSASLELGPSLDEEIPTTSTMLVSPAEGQVKLTKAVSASSVPSNIHLGVAPVGSGSALTLQTIPLTTVLTNGPPASTTAPTQLVLQSVPAASTFKDTFTLQASFPLNASFQDSQVAAPGAPLILSGLPQLLAGANRPTNPAPPTVTGAGPAGPSSQPPGTVIAAFIRTSGTTAAPRVKEGPLRSSSYVQGMVTGAPMEGLLVPEETLRELLRDQAHLQPLPTQVVSRGSHNPSLLGNQTLSPPSRPTVGLTPVAELELSSGSGSLLMAEPSVTTSGSLLTRSPTPAPFSPFNPTSLIKMEPHDI

SEQ ID NO: 26451 - protein, 663 aa, Homo sapiens; identical to SEQ ID NO: 26450
  Payload ID: 5211
  Gene Symbol: ELF4
  Gene Name: E74-like factor 4 (ets domain transcription factor)
  Uniprot ID: Q99607
  ENSP ID: ENSP00000338608

SEQ ID NO: 26452 - protein, 76 aa, Homo sapiens
  Payload ID: 5211
  Gene Symbol: ELF4
  Gene Name: E74-like factor 4 (ets domain transcription factor)
  ENSP ID: ENSP00000407572
MDDDIHQLEDPSVFPAVIVEQVPYPDLLHLYSGLELDDVHNGIITDGTLCMTQDQILEGSFLLTDDNEATSHTMST

SEQ ID NO: 26453 - protein, 662 aa, Homo sapiens
  Payload ID: 5211
  Gene Symbol: ELF4
  Gene Name: E74-like factor 4 (ets domain transcription factor)
  ENSP ID: ENSP00000478297
MAITLQPSDLIFEFASNGMDDDIHQLEDPSVFPAVIVEQVPYPDLLHLYSGLELDDVHNGIITDGTLCMTQDQILEGSFLLTDDNEATSHTMSTAEVLLNMESPSDILDEKQIFSTSEMLPDSDPAPAVTLPNYLFPASEPDALNRAGDTSDQEGHSLEEKASREESAKKTGKSKKRIRKTKGNRSTSPVTDPSIPIRKKSKDGKGSTIYLWEFLLALLQDRNTCPKYIKWTQREKGIFKLVDSKAVSKLWGKQKNKPDMNYETMGRALRYYYQRGILAKVEGQRLVYQFKEMPKDLVVIEDEDESSEATAAPPQASTASVASASTTRRTSSRVIQICPPGQGQLFLGEAKNSACRSPAICESGIGTVARRGDPHYLHHARLSSRGPGQAHQSCECIFSAQQHPPRSGPRGSGSALTLQTIPLTTVLTNGPPASTTAPTQLVLQSVPAASTFKDTFTLQASFPLNASFQDSQVAAPGAPLILSGLPQLLAGANRPTNPAPPTVTGAGPAGPSSQPPGTVIAAFIRTSGTTAAPRVKEGPLRSSSYVQGMVTGAPMEGLLVPEETLRELLRDQAHLQPLPTQVVSRGSHNPSLLGNQTLSPPSRPTVGLTPVAELELSSGSGSLLMAEPSVTTSGSLLTRSPTPAPFSPFNPTSLIKMEPHDI

SEQ ID NO: 26454 - protein, 255 aa, Homo sapiens
  Payload ID: 5212
  Gene Symbol: ELF5
  Gene Name: E74-like factor 5 (ets domain transcription factor)
  Uniprot ID: Q9UKW6
  ENSP ID: ENSP00000257832
MLDSVTHSTFLPNASFCDPLMSWTDLFSNEEYYPAFEHQTACDSYWTSVHPEYWTKRHVWEWLQFCCDQYKLDTNCISFCNFNISGLQLCSMTQEEFVEAAGLCGEYLYFILQNIRTQGYSFFNDAEESKATIKDYADSNCLKTSGIKSQDCHSHSRTSLQSSHLWEFVRDLLLSPEENCGILEWEDREQGIFRVVKSEALAKMWGQRKKNDRMTYEKLSRALRYYYKTGILERVDRRLVYKFGKNAHGWQEDKL

SEQ ID NO: 26455 - protein, 265 aa, Homo sapiens
  Payload ID: 5212
  Gene Symbol: ELF5
  Gene Name: E74-like factor 5 (ets domain transcription factor)
  Uniprot ID: Q9UKW6
  ENSP ID: ENSP00000311010
MPSLPHSHRVMLDSVTHSTFLPNASFCDPLMSWTDLFSNEEYYPAFEHQTACDSYWTSVHPEYWTKRHVWEWLQFCCDQYKLDTNCISFCNFNISGLQLCSMTQEEFVEAAGLCGEYLYFILQNIRTQGYSFFNDAEESKATIKDYADSNCLKTSGIKSQDCHSHSRTSLQSSHLWEFVRDLLLSPEENCGILEWEDREQGIFRVVKSEALAKMWGQRKKNDRMTYEKLSRALRYYYKTGILERVDRRLVYKFGKNAHGWQEDKL

SEQ ID NO: 26456 - protein, 160 aa, Homo sapiens
  Payload ID: 5212
  Gene Symbol: ELF5
  Gene Name: E74-like factor 5 (ets domain transcription factor)
  Uniprot ID: Q9UKW6
  ENSP ID: ENSP00000407589
MLDSVTHSTFLPNASFCDPLMSWTDLFSNEEYYPAFEHQTDADSNCLKTSGIKSQDCHSHSRTSLQSSHLWEFVRDLLLSPEENCGILEWEDREQGIFRVVKSEALAKMWGQRKKNDRMTYEKLSRALRYYYKTGILERVDRRLVYKFGKNAHGWQEDKL

SEQ ID NO: 26457 - protein, 138 aa, Homo sapiens
  Payload ID: 5212
  Gene Symbol: ELF5
  Gene Name: E74-like factor 5 (ets domain transcription factor)
  Uniprot ID: Q9UKW6
  ENSP ID: ENSP00000436386
MLDSVTHSTFLPNASFCDPLMSWTDLFSNEEYYPAFEHQTACDSYWTSVHPEYWTKRHVWEWLQFCCDQYKLDTNCISFCNFNISGLQLCSMTQEEFVEAAGLCGEYLYFILQNIRTQGQCSEGQTSRGGTRIRTKQL

SEQ ID NO: 26458 - protein, 187 aa, Homo sapiens
  Payload ID: 5212
  Gene Symbol: ELF5
  Gene Name: E74-like factor 5 (ets domain transcription factor)
  ENSP ID: ENSP00000484521
MPSLPHSHRVMLDSVTHSTFLPNASFCDPLMSWTDLFSNEEYYPAFEHQTGYSFFNDAEESKATIKDYADSNCLKTSGIKSQDCHSHSRTSLQSSHLWEFVRDLLLSPEENCGILEWEDREQGIFRVVKSEALAKMWGQRKKNDRMTYEKLSRALRYYYKTGILERVDRRLVYKFGKNAHGWQEDKL

SEQ ID NO: 26459 - protein, 591 aa, Homo sapiens
  Payload ID: 5213
  Gene Symbol: EBF1
  Gene Name: early B-cell factor 1
  Uniprot ID: Q9UH73
  ENSP ID: ENSP00000322898
MFGIQESIQRSGSSMKEEPLGSGMNAVRTWMQGAGVLDANTAAQSGVGLARAHFEKQPPSNLRKSNFFHFVLALYDRQGQPVEIERTAFVGFVEKEKEANSEKTNNGIHYRLQLLYSNGIRTEQDFYVRLIDSMTKQAIVYEGQDKNPEMCRVLLTHEIMCSRCCDKKSCGNRNETPSDPVIIDRFFLKFFLKCNQNCLKNAGNPRDMRRFQVVVSTTVNVDGHVLAVSDNMFVHNNSKHGRRARRLDPSEGTPSYLEHATPCIKAISPSEGWTTGGATVIIIGDNFFDGLQVIFGTMLVWSELITPHAIRVQTPPRHIPGVVEVTLSYKSKQFCKGTPGRFIYTALNEPTIDYGFQRLQKVIPRHPGDPERLPKEVILKRAADLVEALYGMPHNNQEIILKRAADIAEALYSVPRNHNQLPALANTSVHAGMMGVNSFSGQLAVNVSEASQATNQGFTRNSSSVSPHGYVPSTTPQQTNYNSVTTSMNGYGSAAMSNLGGSPTFLNGSAANSPYAIVPSSPTMASSTSLPSNCSSSSGIFSFSPANMVSAVKQKSAFAPVVRPQTSPPPTCTSTNGNSLQAISGMIVPPM

SEQ ID NO: 26460 - protein, 560 aa, Homo sapiens
  Payload ID: 5213
  Gene Symbol: EBF1
  Gene Name: early B-cell factor 1
  Uniprot ID: Q9UH73
  ENSP ID: ENSP00000370029
MFGIQESIQRSGSSMKEEPLGSGMNAVRTWMQGAGVLDANTAAQSGVGLARAHFEKQPPSNLRKSNFFHFVLALYDRQGQPVEIERTAFVGFVEKEKEANSEKTNNGIHYRLQLLYSNGIRTEQDFYVRLIDSMTKQAIVYEGQDKNPEMCRVLLTHEIMCRFFLKFFLKCNQNCLKNAGNPRDMRRFQVVVSTTVNVDGHVLAVSDNMFVHNNSKHGRRARRLDPSEATPCIKAISPSEGWTTGGATVIIIGDNFFDGLQVIFGTMLVWSELITPHAIRVQTPPRHIPGVVEVTLSYKSKQFCKGTPGRFIYTALNEPTIDYGFQRLQKVIPRHPGDPERLPKEVILKRAADLVEALYGMPHNNQEIILKRAADIAEALYSVPRNHNQLPALANTSVHAGMMGVNSFSGQLAVNVSEASQATNQGFTRNSSSVSPHGYVPSTTPQQTNYNSVTTSMNGYGSAAMSNLGGSPTFLNGSAANSPYAIVPSSPTMASSTSLPSNCSSSSGIFSFSPANMVSAVKQKSAFAPVVRPQTSPPPTCTSTNGNSLQAISGMIVPPM

SEQ ID NO: 26461 - protein, 523 aa, Homo sapiens
  Payload ID: 5213
  Gene Symbol: EBF1
  Gene Name: early B-cell factor 1
  ENSP ID: ENSP00000428020
MFGIQESIQRSGSSMKEEPLGSGMNAVRTWMQGAGVLDANTAAQSGVGLARAHFEKQPPSNLRKSNFFHFVLALYDRQGQPVEIERTAFVGFVEKEKEANSEKTNNGIHYRLQLLYSNGIRTEQDFYVRLIDSMTKQAIVYEGQDKNPEMCRVLLTHEIMCSRCCDKKSCGNRNETPSDPVIIDRFFLKFFLKCNQNCLKNAGNPRDMRRFQVVVSTTVNVDGHVLAVSDNMFVHNNSKHGRRARRLDPSEATPCIKAISPSEGWTTGGATVIIIGDNFFDGLQVIFGTMLVWSELITPHAIRVQTPPRHIPGVVEVTLSYKSKQFCKGTPGRFIYTALNEPTIDYGFQRLQKVIPRHPGDPERLPKEVILKRAADLVEALYGMPHNNQEIILKRAADIAEALYSVPRNHNQLPALANTSVHAGMMGVNSFSGQLAVNVSEASQATNQVVPSSPTMASSTSLPSNCSSSSGIFSFSPANMVSAVKQKSAFAPVVRPQTSPPPTCTSTNGNSLQAISGMIVPPM

SEQ ID NO: 26462 - protein, 407 aa, Homo sapiens
  Payload ID: 5213
  Gene Symbol: EBF1
  Gene Name: early B-cell factor 1
  ENSP ID: ENSP00000477809
RFFLKFFLKCNQNCLKNAGNPRDMRRFQVVVSTTVNVDGHVLAVSDNMFVHNNSKHGRRARRLDPSEGTPSYLEHATPCIKAISPSEGWTTGGATVIIIGDNFFDGLQVIFGTMLVWSELITPHAIRVQTPPRHIPGVVEVTLSYKSKQFCKGTPGRFIYTALNEPTIDYGFQRLQKVIPRHPGDPERLPKEVILKRAADLVEALYGMPHNNQEIILKRAADIAEALYSVPRNHNQLPALANTSVHAGMMGVNSFSGQLAVNVSEASQATNQGFTRNSSSVSPHGYVPSTTPQQTNYNSVTTSMNGYGSAAMSNLGGSPTFLNGSAANSPYAIVPSSPTMASSTSLPSNCSSSSGIFSFSPANMVSAVKQKSAFAPVVRPQTSPPPTCTSTNGNSLQAISGMIVPPM

SEQ ID NO: 26463 - protein, 427 aa, Homo sapiens
  Payload ID: 5214
  Gene Symbol: EBF2
  Gene Name: early B-cell factor 2
  ENSP ID: ENSP00000386178
MCRVLLTHEVMCSRCCEKKSCGNRNETPSDPVIIDRFFLKFFLKCNQNCLKTAGNPRDMRRFQVVLSTTVNVDGHVLAVSDNMFVHNNSKHGRRARRLDPSEATPCIKAISPSEGWTTGGAMVIIIGDNFFDGLQVVFGTMLVWSELITPHAIRVQTPPRHIPGVVEVTLSYKSKQFCKGAPGRFIYTALNEPTIDYGFQRLQKVIPRHPGDPERLAKEMLLKRAADLVEALYGTPHNNQDIILKRAADIAEALYSVPRNPSQLPALSSSPAHSGMMGINSYGSQLGVSISESTQGNNQGYIRNTSSISPRGYSSSSTPQQSNYSTSSNSMNGYSNVPMANLGVPGSPGFLNGSPTGSPYGIMSSSPTVGSSSTSSILPFSSSVFPAVKQKSAFAPVIRPQGSPSPACSSGNGNGFRAMTGLVVPPM

SEQ ID NO: 26464 - protein, 575 aa, Homo sapiens
  Payload ID: 5214
  Gene Symbol: EBF2
  Gene Name: early B-cell factor 2
  Uniprot ID: Q9HAK2
  ENSP ID: ENSP00000430241
MFGIQDTLGRGPTLKEKSLGAEMDSVRSWVRNVGVVDANVAAQSGVALSRAHFEKQPPSNLRKSNFFHFVLALYDRQGQPVEIERTAFVDFVENDKEQGNEKTNNGTHYKLQLLYSNGVRTEQDLYVRLIDSVTKQPIAYEGQNKNPEMCRVLLTHEVMCSRCCEKKSCGNRNETPSDPVIIDRFFLKFFLKCNQNCLKTAGNPRDMRRFQVVLSTTVNVDGHVLAVSDNMFVHNNSKHGRRARRLDPSEATPCIKAISPSEGWTTGGAMVIIIGDNFFDGLQVVFGTMLVWSELITPHAIRVQTPPRHIPGVVEVTLSYKSKQFCKGAPGRFIYTALNEPTIDYGFQRLQKVIPRHPGDPERLAKEMLLKRAADLVEALYGTPHNNQDIILKRAADIAEALYSVPRNPSQLPALSSSPAHSGMMGINSYGSQLGVSISESTQGNNQGYIRNTSSISPRGYSSSSTPQQSNYSTSSNSMNGYSNVPMANLGVPGSPGFLNGSPTGSPYGIMSSSPTVGSSSTSSILPFSSSVFPAVKQKSAFAPVIRPQGSPSPACSSGNGNGFRAMTGLVVPPM

SEQ ID NO: 26465 - protein, 264 aa, Homo sapiens
  Payload ID: 5214
  Gene Symbol: EBF2
  Gene Name: early B-cell factor 2
  Uniprot ID: Q9HAK2
  ENSP ID: ENSP00000437909
MVIIIGDNFFDGLQVVFGTMLVWSELITPHAIRVQTPPRHIPGVVEVTLSYKSKQFCKGAPGRFIYTALNEPTIDYGFQRLQKVIPRHPGDPERLAKEMLLKRAADLVEALYGTPHNNQDIILKRAADIAEALYSVPRNPSQLPALSSSPAHSGMMGINSYGSQLGVSISESTQGNNQGYIRNTSSISPRGYSSSSTPQQSNYSTSSNSMNGYSNVPMANLGVPGSPGFLNGSPTGSPYGTGLWLTWLLKAFWGKKRIETIPFL

SEQ ID NO: 26466 - protein, 596 aa, Homo sapiens
  Payload ID: 5215
  Gene Symbol: EBF3
  Gene Name: early B-cell factor 3
  Uniprot ID: Q9H4W6
  ENSP ID: ENSP00000347463
MFGIQENIPRGGTTMKEEPLGSGMNPVRSWMHTAGVVDANTAAQSGVGLARAHFEKQPPSNLRKSNFFHFVLALYDRQGQPVEIERTAFVDFVEKEKEPNNEKTNNGIHYKLQLLYSNGVRTEQDLYVRLIDSMTKQAIVYEGQDKNPEMCRVLLTHEIMCSRCCDKKSCGNRNETPSDPVIIDRFFLKFFLKCNQNCLKNAGNPRDMRRFQVVVSTTVNVDGHVLAVSDNMFVHNNSKHGRRARRLDPSEGTAPSYLENATPCIKAISPSEGWTTGGATVIIIGDNFFDGLQVVFGTMLVWSELITPHAIRVQTPPRHIPGVVEVTLSYKSKQFCKGAPGRFVYTALNEPTIDYGFQRLQKVIPRHPGDPERLPKEVLLKRAADLVEALYGMPHNNQEIILKRAADIAEALYSVPRNHNQIPTLGNNPAHTGMMGVNSFSSQLAVNVSETSQANDQVGYSRNTSSVSPRGYVPSSTPQQSNYNTVSTSMNGYGSGAMASLGVPGSPGFLNGSSANSPYGIVPSSPTMAASSVTLPSNCSSTHGIFSFSPANVISAVKQKSAFAPVVRPQASPPPSCTSANGNGLQAMSGLVVPPM

SEQ ID NO: 26467 - protein, 551 aa, Homo sapiens
  Payload ID: 5215
  Gene Symbol: EBF3
  Gene Name: early B-cell factor 3
  Uniprot ID: Q9H4W6
  ENSP ID: ENSP00000357637
MFGIQENIPRGGTTMKEEPLGSGMNPVRSWMHTAGVVDANTAAQSGVGLARAHFEKQPPSNLRKSNFFHFVLALYDRQGQPVEIERTAFVDFVEKEKEPNNEKTNNGIHYKLQLLYSNGVRTEQDLYVRLIDSMTKQAIVYEGQDKNPEMCRVLLTHEIMCSRCCDKKSCGNRNETPSDPVIIDRFFLKFFLKCNQNCLKNAGNPRDMRRFQVVVSTTVNVDGHVLAVSDNMFVHNNSKHGRRARRLDPSEATPCIKAISPSEGWTTGGATVIIIGDNFFDGLQVVFGTMLVWSELITPHAIRVQTPPRHIPGVVEVTLSYKSKQFCKGAPGRFVYTALNEPTIDYGFQRLQKVIPRHPGDPERLPKEVLLKRAADLVEALYGMPHNNQEIILKRAADIAEALYSVPRNHNQIPTLGNNPAHTGMMGVNSFSSQLAVNVSETSQANDQVGYSRNTSSVSPRGYVPSSTPQQSNYNTVSTSMNGYGSGAMASLGVPGSPGFLNGSSANSPYGMKQKSAFAPVVRPQASPPPSCTSANGNGLQAMSGLVVPPM

SEQ ID NO: 26468 - protein, 191 aa, Homo sapiens
  Payload ID: 5215
  Gene Symbol: EBF3
  Gene Name: early B-cell factor 3
  ENSP ID: ENSP00000387543
  MOD_RES (1)..(1): Any amino acid
XFSSQLAVNVSETSQANDQVGYSRNTSSVSPRGYVPSSTPQQSNYNTVSTSMNGYGSGAMASLGVPGSPGFLNGSSANSPYGIVPSSPTMAASSVTLPSNCSSTHGIFSFSPANVISAVKQKSAFAPVVRPQASPPPSCTSANGNGLQGSLLGAEDVAAEKTNWPFCEVGGIFHFDELMLKKGTGKLCLGW

SEQ ID NO: 26469 - protein, 621 aa, Homo sapiens
  Payload ID: 5216
  Gene Symbol: EBF4
  Gene Name: early B-cell factor 4
  ENSP ID: ENSP00000345030
RPRRGGAGTGPRGESAGLLLLLLQDALPRSGLNLKEEPLLPAGLGSVRSWMQGAGILDASTAAQSGVGLARAHFEKQPPSNLRKSNFFHFVLAMYDRQGQPVEVERTAFIDFVEKDREPGAEKTNNGIHYRLRLVYNNGLRTEQDLYVRLIDSMSKQAIIYEGQDKNPEMCRVLLTHEIMCSRCCDRKSCGNRNETPSDPVIIDRFFLKFFLKCNQNCLKNAGNPRDMRRFQVVVSTTVSVDGHVLAVSDNMFVHNNSKHGRRARRLDPSEAATPCIKAISPGEGWTTGGATVIVIGDNFFDGLQVVFGNVLVWSELITPHAIRVQTPPRHIPGVVEVTLSYKSKQFCKGCPGRFVYTALNEPTIDYGFQRLQKVIPRHPGDPERLPKEVLLKRAADLAEALYGVPGSNQELLLKRAADVAEALYSTPRAPGPLAPLAPSHPHPAVVGINAFSSPLAIAVGDATPGPEPGYARSCSSASPRGFAPSPGSQQSGYGGGLGAGLGGYGAPGVAGLGVPGSPSFLNGSTATSPFAIMPSSPPLAAASSMSLPAAAPTTSVFSFSPVNMISAVKQRSAFAPVLRPPSSPPQACPRAHGEGLPDQSFEDSDKFHSPARGLQGLAYS

SEQ ID NO: 26470 - protein, 598 aa, Homo sapiens
  Payload ID: 5216
  Gene Symbol: EBF4
  Gene Name: early B-cell factor 4
  ENSP ID: ENSP00000370022
MDALPRSGLNLKEEPLLPAGLGSVRSWMQGAGILDASTAAQSGVGLARAHFEKQPPSNLRKSNFFHFVLAMYDRQGQPVEVERTAFIDFVEKDREPGAEKTNNGIHYRLRLVYNNGLRTEQDLYVRLIDSMSKQAIIYEGQDKNPEMCRVLLTHEIMCSRCCDRKSCGNRNETPSDPVIIDRFFLKFFLKCNQNCLKNAGNPRDMRRFQVVVSTTVSVDGHVLAVSDNMFVHNNSKHGRRARRLDPSEAATPCIKAISPGEGWTTGGATVIVIGDNFFDGLQVVFGNVLVWSELITPHAIRVQTPPRHIPGVVEVTLSYKSKQFCKGCPGRFVYTALNEPTIDYGFQRLQKVIPRHPGDPERLPKEVLLKRAADLAEALYGVPGSNQELLLKRAADVAEALYSTPRAPGPLAPLAPSHPHPAVVGINAFSSPLAIAVGDATPGPEPGYARSCSSASPRGFAPSPGSQQSGYGGGLGAGLGGYGAPGVAGLGVPGSPSFLNGSTATSPFAIMPSSPPLAAASSMSLPAAAPTTSVFSFSPVNMISAVKQRSAFAPVLRPPSSPPQACPRAHGEGLPDQSFEDSDKFHSPARGLQGLAYS

SEQ ID NO: 26471 - protein, 540 aa, Homo sapiens
  Payload ID: 5216
  Gene Symbol: EBF4
  Gene Name: early B-cell factor 4
  ENSP ID: ENSP00000405003
MDALPRSGLNLKEEPLLPAGLGSVRSWMQGAGILDASTAAQSGVGLARAHFEKQPPSNLRKSNFFHFVLAMYDRQGQPVEVERTAFIDFVEKDREPGAEKTNNGIHYRLRLVYNNGLRTEQDLYVRLIDSMSKQAIIYEGQDKNPEMCRVLLTHEIMCSRCCDRKSCGNRNETPSDPVIIDRFFLKFFLKCNQNCLKNAGNPRDMRRFQVVVSTTVSVDGHVLAVSDNMFVHNNSKHGRRARRLDPSEAATPCIKAISPGEGWTTGGATVIVIGDNFFDGLQVVFGNVLVWSELITPHAIRVQTPPRHIPGVVEVTLSYKSKQFCKGCPGRFVYTALNEPTIDYGFQRLQKVIPRHPGDPERLPKEVLLKRAADLAEALYGVPGSNQELLLKRAADVAEALYSTPRAPGPLAPLAPSHPHPAVVGINAFSSPLAIAVGDATPGPEPGYARSCSSASPRGFAPSPGSQQSGYGGGLGAGLGGYGAPGVAGLGVPGSPSFLNGSTATSPFAKERLRPRAAPPKLPTPGLPQSPRRGASRPVF

SEQ ID NO: 26472 - protein, 602 aa, Homo sapiens
  Payload ID: 5216
  Gene Symbol: EBF4
  Gene Name: early B-cell factor 4
  Uniprot ID: Q9BQW3
  ENSP ID: ENSP00000477023
MFPAQDALPRSGLNLKEEPLLPAGLGSVRSWMQGAGILDASTAAQSGVGLARAHFEKQPPSNLRKSNFFHFVLAMYDRQGQPVEVERTAFIDFVEKDREPGAEKTNNGIHYRLRLVYNNGLRTEQDLYVRLIDSMSKQAIIYEGQDKNPEMCRVLLTHEIMCSRCCDRKSCGNRNETPSDPVIIDRFFLKFFLKCNQNCLKNAGNPRDMRRFQVVVSTTVSVDGHVLAVSDNMFVHNNSKHGRRARRLDPSEAATPCIKAISPGEGWTTGGATVIVIGDNFFDGLQVVFGNVLVWSELITPHAIRVQTPPRHIPGVVEVTLSYKSKQFCKGCPGRFVYTALNEPTIDYGFQRLQKVIPRHPGDPERLPKEVLLKRAADLAEALYGVPGSNQELLLKRAADVAEALYSTPRAPGPLAPLAPSHPHPAVVGINAFSSPLAIAVGDATPGPEPGYARSCSSASPRGFAPSPGSQQSGYGGGLGAGLGGYGAPGVAGLGVPGSPSFLNGSTATSPFAIMPSSPPLAAASSMSLPAAAPTTSVFSFSPVNMISAVKQRSAFAPVLRPPSSPPQACPRAHGEGLPDQSFEDSDKFHSPARGLQGLAYS

SEQ ID NO: 26473 - protein, 177 aa, Homo sapiens
  Payload ID: 5216
  Gene Symbol: EBF4
  Gene Name: early B-cell factor 4
  ENSP ID: ENSP00000477107
LIDSMSKQAIIYEGQDKNPEMCRVLLTHEIMCSRCCDRKSCGNRNETPSDPVIIDRFFLKFFLKCNQNCLKNAGNPRDMRRFQVVVSTTVSVDGHVLAVSDNMFVHNNSKHGRRARRLDPSEAAPTSFETCTLMLAASCLPVGALGMEEAEEGVPGLLYLGSSPSGCLMDSGPTHSQ

SEQ ID NO: 26474 - protein, 1411 aa, Homo sapiens
  Payload ID: 5217
  Gene Symbol: EEA1
  Gene Name: early endosome antigen 1
  Uniprot ID: Q15075
  ENSP ID: ENSP00000317955
MLRRILQRTPGRVGSQGSDLDSSATPINTVDVNNESSSEGFICPQCMKSLGSADELFKHYEAVHDAGNDSGHGGESNLALKRDDVTLLRQEVQDLQASLKEEKWYSEELKKELEKYQGLQQQEAKPDGLVTDSSAELQSLEQQLEEAQTENFNIKQMKDLFEQKAAQLATEIADIKSKYDEERSLREAAEQKVTRLTEELNKEATVIQDLKTELLQRPGIEDVAVLKKELVQVQTLMDNMTLERERESEKLKDECKKLQSQYASSEATISQLRSELAKGPQEVAVYVQELQKLKSSVNELTQKNQTLTENLLKKEQDYTKLEEKHNEESVSKKNIQATLHQKDLDCQQLQSRLSASETSLHRIHVELSEKGEATQKLKEELSEVETKYQHLKAEFKQLQQQREEKEQHGLQLQSEINQLHSKLLETERQLGEAHGRLKEQRQLSSEKLMDKEQQVADLQLKLSRLEEQLKEKVTNSTELQHQLDKTKQQHQEQQALQQSTTAKLREAQNDLEQVLRQIGDKDQKIQNLEALLQKSKENISLLEKEREDLYAKIQAGEGETAVLNQLQEKNHTLQEQVTQLTEKLKNQSESHKQAQENLHDQVQEQKAHLRAAQDRVLSLETSVNELNSQLNESKEKVSQLDIQIKAKTELLLSAEAAKTAQRADLQNHLDTAQNALQDKQQELNKITTQLDQVTAKLQDKQEHCSQLESHLKEYKEKYLSLEQKTEELEGQIKKLEADSLEVKASKEQALQDLQQQRQLNTDLELRATELSKQLEMEKEIVSSTRLDLQKKSEALESIKQKLTKQEEEKKILKQDFETLSQETKIQHEELNNRIQTTVTELQKVKMEKEALMTELSTVKDKLSKVSDSLKNSKSEFEKENQKGKAAILDLEKTCKELKHQLQVQMENTLKEQKELKKSLEKEKEASHQLKLELNSMQEQLIQAQNTLKQNEKEEQQLQGNINELKQSSEQKKKQIEALQGELKIAVLQKTELENKLQQQLTQAAQELAAEKEKISVLQNNYEKSQETFKQLQSDFYGRESELLATRQDLKSVEEKLSLAQEDLISNRNQIGNQNKLIQELKTAKATLEQDSAKKEQQLQERCKALQDIQKEKSLKEKELVNEKSKLAEIEEIKCRQEKEITKLNEELKSHKLESIKEITNLKDAKQLLIQQKLELQGKADSLKAAVEQEKRNQQILKDQVKKEEEELKKEFIEKEAKLHSEIKEKEVGMKKHEENEAKLTMQITALNENLGTVKKEWQSSQRRVSELEKQTDDLRGEIAVLEATVQNNQDERRALLERCLKGEGEIEKLQTKVLELQRKLDNTTAAVQELGRENQSLQIKHTQALNRKWAEDNEVQNCMACGKGFSVTVRRHHCRQCGNIFCAECSAKNALTPSSKKPVRVCDACFNDLQG

SEQ ID NO: 26475 - protein, 40 aa, Homo sapiens
  Payload ID: 5217
  Gene Symbol: EEA1
  Gene Name: early endosome antigen 1
  ENSP ID: ENSP00000394312
MLRRILQRTPGRVGSQGSDLDSSATPINTVDVNNESSSER

SEQ ID NO: 26476 - protein, 42 aa, Homo sapiens
  Payload ID: 5217
  Gene Symbol: EEA1
  Gene Name: early endosome antigen 1
  ENSP ID: ENSP00000446785
MKARRRSPSLTYRLKPKPNYYYQQKQQKLLKELIFRIIWTQL

SEQ ID NO: 26477 - protein, 43 aa, Homo sapiens
  Payload ID: 5217
  Gene Symbol: EEA1
  Gene Name: early endosome antigen 1
  ENSP ID: ENSP00000449682
MLRRILQRTPGRVGSQGSDLDSSATPINTVDVNNESSSEVEHP

SEQ ID NO: 26478 - protein, 543 aa, Homo sapiens
  Payload ID: 5218
  Gene Symbol: EGR1
  Gene Name: early growth response 1
  Uniprot ID: P18146
  ENSP ID: ENSP00000239938
MAAAKAEMQLMSPLQISDPFGSFPHSPTMDNYPKLEEMMLLSNGAPQFLGAAGAPEGSGSNSSSSSSGGGGGGGGGSNSSSSSSTFNPQADTGEQPYEHLTAESFPDISLNNEKVLVETSYPSQTTRLPPITYTGRFSLEPAPNSGNTLWPEPLFSLVSGLVSMTNPPASSSSAPSPAASSASASQSPPLSCAVPSNDSSPIYSAAPTFPTPNTDIFPEPQSQAFPGSAGTALQYPPPAYPAAKGGFQVPMIPDYLFPQQQGDLGLGTPDQKPFQGLESRTQQPSLTPLSTIKAFATQSGSQDLKALNTSYQSQLIKPSRMRKYPNRPSKTPPHERPYACPVESCDRRFSRSDELTRHIRIHTGQKPFQCRICMRNFSRSDHLTTHIRTHTGEKPFACDICGRKFARSDERKRHTKIHLRQKDKKADKSVVASSATSSLSSYPSPVATSYPSPVTTSYPSPATTSYPSPVPTSFSSPGSSTYPSPVHSGFPSPSVATTYSSVPPAFPAQVSSFPSSAVTNSFSASTGLSDMTATFSPRTIEIC

SEQ ID NO: 26479 - protein, 476 aa, Homo sapiens
  Payload ID: 5219
  Gene Symbol: EGR2
  Gene Name: early growth response 2
  Uniprot ID: P11161
  ENSP ID: ENSP00000242480
MMTAKAVDKIPVTLSGFVHQLSDNIYPVEDLAATSVTIFPNAELGGPFDQMNGVAGDGMINIDMTGEKRSLDLPYPSSFAPVSAPRNQTFTYMGKFSIDPQYPGASCYPEGIINIVSAGILQGVTSPASTTASSSVTSASPNPLATGPLGVCTMSQTQPDLDHLYSPPPPPPPYSGCAGDLYQDPSAFLSAATTSTSSSLAYPPPPSYPSPKPATDPGLFPMIPDYPGFFPSQCQRDLHGTAGPDRKPFPCPLDTLRVPPPLTPLSTIRNFTLGGPSAGVTGPGASGGSEGPRLPGSSSAAAAAAAAAAYNPHHLPLRPILRPRKYPNRPSKTPVHERPYPCPAEGCDRRFSRSDELTRHIRIHTGHKPFQCRICMRNFSRSDHLTTHIRTHTGEKPFACDYCGRKFARSDERKRHTKIHLRQKERKSSAPSASVPAPSTASCSGGVQPGGTLCSSNSSSLGGGPLAPCSSRTRTP

SEQ ID NO: 26480 - protein, 426 aa, Homo sapiens
  Payload ID: 5219
  Gene Symbol: EGR2
  Gene Name: early growth response 2
  Uniprot ID: P11161
  ENSP ID: ENSP00000387634
MNGVAGDGMINIDMTGEKRSLDLPYPSSFAPVSAPRNQTFTYMGKFSIDPQYPGASCYPEGIINIVSAGILQGVTSPASTTASSSVTSASPNPLATGPLGVCTMSQTQPDLDHLYSPPPPPPPYSGCAGDLYQDPSAFLSAATTSTSSSLAYPPPPSYPSPKPATDPGLFPMIPDYPGFFPSQCQRDLHGTAGPDRKPFPCPLDTLRVPPPLTPLSTIRNFTLGGPSAGVTGPGASGGSEGPRLPGSSSAAAAAAAAAAYNPHHLPLRPILRPRKYPNRPSKTPVHERPYPCPAEGCDRRFSRSDELTRHIRIHTGHKPFQCRICMRNFSRSDHLTTHIRTHTGEKPFACDYCGRKFARSDERKRHTKIHLRQKERKSSAPSASVPAPSTASCSGGVQPGGTLCSSNSSSLGGGPLAPCSSRTRTP

SEQ ID NO: 26481 - protein, 476 aa, Homo sapiens; identical to SEQ ID NO: 26479
  Payload ID: 5219
  Gene Symbol: EGR2
  Gene Name: early growth response 2
  Uniprot ID: P11161
  ENSP ID: ENSP00000402040

SEQ ID NO: 26482 - protein, 387 aa, Homo sapiens
  Payload ID: 5220
  Gene Symbol: EGR3
  Gene Name: early growth response 3
  Uniprot ID: Q06889
  ENSP ID: ENSP00000318057
MTGKLAEKLPVTMSSLLNQLPDNLYPEEIPSALNLFSGSSDSVVHYNQMATENVMDIGLTNEKPNPELSYSGSFQPAPGNKTVTYLGKFAFDSPSNWCQDNIISLMSAGILGVPPASGALSTQTSTASMVQPPQGDVEAMYPALPPYSNCGDLYSEPVSFHDPQGNPGLAYSPQDYQSAKPALDSNLFPMIPDYNLYHHPNDMGSIPEHKPFQGMDPIRVNPPPITPLETIKAFKDKQIHPGFGSLPQPPLTLKPIRPRKYPNRPSKTPLHERPHACPAEGCDRRFSRSDELTRHLRIHTGHKPFQCRICMRSFSRSDHLTTHIRTHTGEKPFACEFCGRKFARSDERKRHAKIHLKQKEKKAEKGGAPSASSAPPVSLAPVVTTCA

SEQ ID NO: 26483 - protein, 71 aa, Homo sapiens
  Payload ID: 5220
  Gene Symbol: EGR3
  Gene Name: early growth response 3
  ENSP ID: ENSP00000429370
MTGKLAEKLPVTMSSLLNQLPDNLYPEEIPSALNLFSGSSDSVVHYNQMATASHPGWSHVRRGVPAVGERM

SEQ ID NO: 26484 - protein, 349 aa, Homo sapiens
  Payload ID: 5220
  Gene Symbol: EGR3
  Gene Name: early growth response 3
  Uniprot ID: Q06889
  ENSP ID: ENSP00000430310
MEPCAAWSPRGGRENVMDIGLTNEKPNPELSYSGSFQPAPGNKTVTYLGKFAFDSPSNWCQDNIISLMSAGILGVPPASGALSTQTSTASMVQPPQGDVEAMYPALPPYSNCGDLYSEPVSFHDPQGNPGLAYSPQDYQSAKPALDSNLFPMIPDYNLYHHPNDMGSIPEHKPFQGMDPIRVNPPPITPLETIKAFKDKQIHPGFGSLPQPPLTLKPIRPRKYPNRPSKTPLHERPHACPAEGCDRRFSRSDELTRHLRIHTGHKPFQCRICMRSFSRSDHLTTHIRTHTGEKPFACEFCGRKFARSDERKRHAKIHLKQKEKKAEKGGAPSASSAPPVSLAPVVTTCA

SEQ ID NO: 26485 - protein, 486 aa, Homo sapiens
  Payload ID: 5221
  Gene Symbol: EGR4
  Gene Name: early growth response 4
  ENSP ID: ENSP00000419687
MLHLSEFSEPDALLVKSTEGCCAEPSAELPRLPARDAPAATGYPGAGDFLSWALNSCGASGDLADSCFLEGPAPTPPPGLSYSGSFFIQAVPEHPHDPEALFNLMSGILGLAPFPGPEAAASRSPLDAPFPAGSDALLPGPPDLYSPDLGAAPFPEAFWEASPCAGAPSQCLYEPQLSPPDVKPGLRAPPASPALDAVSAFKGPYAPWELLSVGAPGNCGSQGDYQAAPEARFPVIGTKIEDLLSISCPAELPAVPANRLYPSGAYDAFPLAPGDLGEGAEGLPGLLTPPSGEGGSSGDGGEFLASTQPQLSPLGLRSAAAADFPKPLVADIPGSSGVAAPPVPPPPPTPFPQAKARRKGRRGGKCSTRCFCPRPHAKAFACPVESCVRSFARSDELNRHLRIHTGHKPFQCRICLRNFSRSDHLTTHVRTHTGEKPFACDVCGRRFARSDEKKRHSKVHLKQKARAEERLKGLGFYSLGLSFASL

SEQ ID NO: 26486 - protein, 589 aa, Homo sapiens
  Payload ID: 5221
  Gene Symbol: EGR4
  Gene Name: early growth response 4
  Uniprot ID: Q05215
  ENSP ID: ENSP00000445626
MAVARGVGSPEPAPPQLYKWGGCGLGEPGSALERRGAAARGRCGRARAPRLPDSFPRGECPKPGARAPRSVRCGEPLPPASPPPARPQAQRARPRAPHSRRRAMLHLSEFSEPDALLVKSTEGCCAEPSAELPRLPARDAPAATGYPGAGDFLSWALNSCGASGDLADSCFLEGPAPTPPPGLSYSGSFFIQAVPEHPHDPEALFNLMSGILGLAPFPGPEAAASRSPLDAPFPAGSDALLPGPPDLYSPDLGAAPFPEAFWEASPCAGAPSQCLYEPQLSPPDVKPGLRAPPASPALDAVSAFKGPYAPWELLSVGAPGNCGSQGDYQAAPEARFPVIGTKIEDLLSISCPAELPAVPANRLYPSGAYDAFPLAPGDLGEGAEGLPGLLTPPSGEGGSSGDGGEFLASTQPQLSPLGLRSAAAADFPKPLVADIPGSSGVAAPPVPPPPPTPFPQAKARRKGRRGGKCSTRCFCPRPHAKAFACPVESCVRSFARSDELNRHLRIHTGHKPFQCRICLRNFSRSDHLTTHVRTHTGEKPFACDVCGRRFARSDEKKRHSKVHLKQKARAEERLKGLGFYSLGLSFASL

SEQ ID NO: 26487 - protein, 306 aa, Homo sapiens
  Payload ID: 5222
  Gene Symbol: EBNA1BP2
  Gene Name: EBNA1 binding protein 2
  Uniprot ID: Q99848
  ENSP ID: ENSP00000236051
MDTPPLSDSESESDESLVTDRELQDAFSRGLLKPGLNVVLEGPKKAVNDVNGLKQCLAEFKRDLEWVERLDVTLGPVPEIGGSEAPAPQNKDQKAVDPEDDFQREMSFYRQAQAAVLAVLPRLHQLKVPTKRPTDYFAEMAKSDLQMQKIRQKLQTKQAAMERSEKAKQLRALRKYGKKVQTEVLQKRQQEKAHMMNAIKKYQKGFSDKLDFLEGDQKPLAQRKKAGAKGQQMRKGPSAKRRYKNQKFGFGGKKKGSKWNTRESYDDVSSFRAKTAHGRGLKRPGKKGSNKRPGKRTREKMKNRTH

SEQ ID NO: 26488 - protein, 361 aa, Homo sapiens
  Payload ID: 5222
  Gene Symbol: EBNA1BP2
  Gene Name: EBNA1 binding protein 2
  ENSP ID: ENSP00000407323
MYPEALPVGILSNPDTFKRRSGSYSNDKPEVWFAAGSGSPNQKLSSSCVGRACGEMDTPPLSDSESESDESLVTDRELQDAFSRGLLKPGLNVVLEGPKKAVNDVNGLKQCLAEFKRDLEWVERLDVTLGPVPEIGGSEAPAPQNKDQKAVDPEDDFQREMSFYRQAQAAVLAVLPRLHQLKVPTKRPTDYFAEMAKSDLQMQKIRQKLQTKQAAMERSEKAKQLRALRKYGKKVQTEVLQKRQQEKAHMMNAIKKYQKGFSDKLDFLEGDQKPLAQRKKAGAKGQQMRKGPSAKRRYKNQKFGFGGKKKGSKWNTRESYDDVSSFRAKTAHGRGLKRPGKKGSNKRPGKRTREKMKNRTH

SEQ ID NO: 26489 - protein, 644 aa, Homo sapiens
  Payload ID: 5223
  Gene Symbol: ECD
  Gene Name: ecdysoneless homolog (Drosophila)
  Uniprot ID: O95905
  ENSP ID: ENSP00000362070
MEETMKLATMEDTVEYCLFLIPDESRDSDKHKEILQKYIERIITRFAPMLVPYIWQNQPFNLKYKPGKGGVPAHMFGVTKFGDNIEDEWFIVYVIKQITKEFPELVARIEDNDGEFLLIEAADFLPKWLDPENSTNRVFFCHGELCIIPAPRKSGAESWLPTTPPTIPQALNIITAHSEKILASESIRAAVNRRIRGYPEKIQASLHRAHCFLPAGIVAVLKQRPRLVAAAVQAFYLRDPIDLRACRVFKTFLPETRIMTSVTFTKCLYAQLVQQRFVPDRRSGYRLPPPSDPQYRAHELGMKLAHGFEILCSKCSPHFSDCKKSLVTASPLWASFLESLKKNDYFKGLIEGSAQYRERLEMAENYFQLSVDWPESSLAMSPGEEILTLLQTIPFDIEDLKKEAANLPPEDDDQWLDLSPDQLDQLLQEAVGKKESESVSKEEKEQNYDLTEVSESMKAFISKVSTHKGAELPREPSEAPITFDADSFLNYFDKILGPRPNESDSDDLDDEDFECLDSDDDLDFETHEPGEEASLKGTLDNLKSYMAQMDQELAHTCISKSFTTRNQVEPVSQTTDNNSDEEDSGTGESVMAPVDVDLNLVSNILESYSSQAGLAGPASNLLQSMGVQLPDNTDHRPTSKPTKN

SEQ ID NO: 26490 - protein, 212 aa, Homo sapiens
  Payload ID: 5223
  Gene Symbol: ECD
  Gene Name: ecdysoneless homolog (Drosophila)
  ENSP ID: ENSP00000391367
MFGVTKFGDNIEDEWFIVYVIKQITKEFPELVARIEDNDGEFLLIEAADFLPKWLDPENSTNRVFFCHGELCIIPAPRKSGAESWLPTTPPTIPQALNIITAHSEKILASESIRAAVNRRIRGYPEKIQASLHRAHCFLPAGIVAVLKQRPRLVAAAVQAFYLRDPIDLRACRVFKTFLPETRIMTSVTFTKCLYAQLVQQRFVPDRRSGYR

SEQ ID NO: 26491 - protein, 601 aa, Homo sapiens
  Payload ID: 5223
  Gene Symbol: ECD
  Gene Name: ecdysoneless homolog (Drosophila)
  Uniprot ID: O95905
  ENSP ID: ENSP00000395786
MEETMKLATMEDTVEYCLFLIPDESRDSDKHKEILQKYIERIITRFAPMLVPYIWQNQPFNLKYKPGKGGVPAHMFGVTKFGDNIEDEWFIVYVIKQITKEFPELVARIEDNDGEFLLIEAADFLPKWLDPENSTNRVFFCHGELCIIPAPRKSGAESWLPTTPPTIPQALNIITAHSEKILASESIRAAVNRRIRGYPEKIQASLHRAHCFLPAGIVAVLKQRPRLVAAAVQAFYLRDPIDLRACRVFKTFLPETRIMTSAHGFEILCSKCSPHFSDCKKSLVTASPLWASFLESLKKNDYFKGLIEGSAQYRERLEMAENYFQLSVDWPESSLAMSPGEEILTLLQTIPFDIEDLKKEAANLPPEDDDQWLDLSPDQLDQLLQEAVGKKESESVSKEEKEQNYDLTEVSESMKAFISKVSTHKGAELPREPSEAPITFDADSFLNYFDKILGPRPNESDSDDLDDEDFECLDSDDDLDFETHEPGEEASLKGTLDNLKSYMAQMDQELAHTCISKSFTTRNQVEPVSQTTDNNSDEEDSGTGESVMAPVDVDLNLVSNILESYSSQAGLAGPASNLLQSMGVQLPDNTDHRPTSKPTKN

SEQ ID NO: 26492 - protein, 677 aa, Homo sapiens
  Payload ID: 5223
  Gene Symbol: ECD
  Gene Name: ecdysoneless homolog (Drosophila)
  Uniprot ID: O95905
  ENSP ID: ENSP00000401566
MEETMKLATMEDTVEYCLFLIPDESRDSDKHKEILQKYIERIITRFAPMLVPYIWQNQPFNLKYKPGKGGVPAHMFGVTKFGDNIEDEWFIVYVIKQITKEFPELVARIEDNDGEFLLIEAADFLPKWLDPENSTNRVFFCHGELCIIPAPRKSGAESWLPTTPPTIPQALNIITAHSEKILASESIRAAVNRRIRGYPEKIQASLHRAHCFLPAGIVAVLKQRPRLVAAAVQAFYLRDPIDLRACRVFKTFLPETRIMTSVTFTKCLYAQLVQQRFVPDRRSGYRLPPPSDPQYRAHELGMKLAHGFEILCSKCSPHFSDCKKSLVTASPLWASFLESLKKNDYFKGLIEGSAQYRERLEMAENYFQLSVDWPERLEVQWRDPGLLQAPPPGFTPFICLSLLSTWDNSSLAMSPGEEILTLLQTIPFDIEDLKKEAANLPPEDDDQWLDLSPDQLDQLLQEAVGKKESESVSKEEKEQNYDLTEVSESMKAFISKVSTHKGAELPREPSEAPITFDADSFLNYFDKILGPRPNESDSDDLDDEDFECLDSDDDLDFETHEPGEEASLKGTLDNLKSYMAQMDQELAHTCISKSFTTRNQVEPVSQTTDNNSDEEDSGTGESVMAPVDVDLNLVSNILESYSSQAGLAGPASNLLQSMGVQLPDNTDHRPTSKPTKN

SEQ ID NO: 26493 - protein, 217 aa, Homo sapiens
  Payload ID: 5223
  Gene Symbol: ECD
  Gene Name: ecdysoneless homolog (Drosophila)
  ENSP ID: ENSP00000416288
MEETMKLATMEDTVEYCLFLIPDESRDSDKHKEILQKYIERIITRFAPMLVPYIWQNQPFNLKYKPGKGGVPAHMFGVTKFGDNIEDEWFIVYVIKQITKEFPELVASTNRVFFCHGELCIIPAPRKSGAESWLPTTPPTIPQALNIITAHSEKILASESIRAAVNRRIRGYPEKIQASLHRAHCFLPAGIVAVLKQRPRLVAAAVQAFYLRDPIDL

SEQ ID NO: 26494 - protein, 163 aa, Homo sapiens
  Payload ID: 5223
  Gene Symbol: ECD
  Gene Name: ecdysoneless homolog (Drosophila)
  ENSP ID: ENSP00000433778
MFGVTKFGDNIEDEWFIVYVIKQITKEFPELVARIEDNDGEFLLIEAADFLPKWLDPENSTNRVFFCHGELCIIPAPRKSGAESWLPTTPPTIPQALNIITAHSEKILASESIRAAVNRRIRGSHSLNVYMHNWCNKGLCQTGGVDTGCLLHLIPSTEPMNWA

SEQ ID NO: 26495 - protein, 87 aa, Homo sapiens
  Payload ID: 5223
  Gene Symbol: ECD
  Gene Name: ecdysoneless homolog (Drosophila)
  ENSP ID: ENSP00000475102
  MOD_RES (1)..(1): Any amino acid
XSVMAPVDVDLNLVSNILESYSSQAGLAGPASNLLQSMGVQLPDNTDHRPTNGVSLCCPGWSAVALSWLNASSTSQVHAILLPQPPE

SEQ ID NO: 26496 - protein, 815 aa, Homo sapiens
  Payload ID: 5224
  Gene Symbol: EML1
  Gene Name: echinoderm microtubule associated protein like 1
  Uniprot ID: O00423
  ENSP ID: ENSP00000262233
MEDGFSSYSSLYDTSSLLQFCNDDSASAASSMEVTDRIASLEQRVQMQEDDIQLLKSALADVVRRLNITEEQQAVLNRKGPTKARPLMQTLPLRTTVNNGTVLPKKPTGSLPSPSGVRKETAVPATKSNIKRTSSSERVSPGGRRESNGDSRGNRNRTGSTSSSSSGKKNSESKPKEPVFSAEEGYVKMFLRGRPVTMYMPKDQVDSYSLEAKVELPTKRLKLEWVYGYRGRDCRNNLYLLPTGETVYFIASVVVLYNVEEQLQRHYAGHNDDVKCLAVHPDRITIATGQVAGTSKDGKQLPPHVRIWDSVTLNTLHVIGIGFFDRAVTCIAFSKSNGGTNLCAVDDSNDHVLSVWDWQKEEKLADVKCSNEAVFAADFHPTDTNIIVTCGKSHLYFWTLEGSSLNKKQGLFEKQEKPKFVLCVTFSENGDTITGDSSGNILVWGKGTNRISYAVQGAHEGGIFALCMLRDGTLVSGGGKDRKLISWSGNYQKLRKTEIPEQFGPIRTVAEGKGDVILIGTTRNFVLQGTLSGDFTPITQGHTDELWGLAIHASKSQFLTCGHDKHATLWDAVGHRPVWDKIIEDPAQSSGFHPSGSVVAVGTLTGRWFVFDTETKDLVTVHTDGNEQLSVMRYSPDGNFLAIGSHDNCIYIYGVSDNGRKYTRVGKCSGHSSFITHLDWSVNSQFLVSNSGDYEILYWVPSACKQVVSVETTRDIEWATYTCTLGFHVFGVWPEGSDGTDINAVCRAHEKKLLSTGDDFGKVHLFSYPCSQFRAPSHIYGGHSSHVTNVDFLCEDSHLISTGGKDTSIMQWRVI

SEQ ID NO: 26497 - protein, 803 aa, Homo sapiens
  Payload ID: 5224
  Gene Symbol: EML1
  Gene Name: echinoderm microtubule associated protein like 1
  ENSP ID: ENSP00000327384
MEVTDRIASLEQRVQMQEDDIQLLKSALADVVRRLNITEEQQAVLNRKGPTKARPLMQTLPLRTTVNNGTVLPKKPTGSLPSPSGVRKETAVPATKRLNRSVSLLNACKLNRSTPSNIKRTSSSERVSPGGRRESNGDSRGNRNRTGSTSSSSSGKKNSESKPKEPVFSAEEGYVKMFLRGRPVTMYMPKDQVDSYSLEAKVELPTKRLKLEWVYGYRGRDCRNNLYLLPTGETVYFIASVVVLYNVEEQLQRHYAGHNDDVKCLAVHPDRITIATGQVAGTSKDGKQLPPHVRIWDSVTLNTLHVIGIGFFDRAVTCIAFSKSNGGTNLCAVDDSNDHVLSVWDWQKEEKLADVKCSNEAVFAADFHPTDTNIIVTCGKSHLYFWTLEGSSLNKKQGLFEKQEKPKFVLCVTFSENGDTITGDSSGNILVWGKGTNRISYAVQGAHEGGIFALCMLRDGTLVSGGGKDRKLISWSGNYQKLRKTEIPEQFGPIRTVAEGKGDVILIGTTRNFVLQGTLSGDFTPITQGHTDELWGLAIHASKSQFLTCGHDKHATLWDAVGHRPVWDKIIEDPAQSSGFHPSGSVVAVGTLTGRWFVFDTETKDLVTVHTDGNEQLSVMRYSPDGNFLAIGSHDNCIYIYGVSDNGRKYTRVGKCSGHSSFITHLDWSVNSQFLVSNSGDYEILYWVPSACKQVVSVETTRDIEWATYTCTLGFHVFGVWPEGSDGTDINAVCRAHEKKLLSTGDDFGKVHLFSYPCSQFRAPSHIYGGHSSHVTNVDFLCEDSHLISTGGKDTSIMQWRVI

SEQ ID NO: 26498 - protein, 834 aa, Homo sapiens
  Payload ID: 5224
  Gene Symbol: EML1
  Gene Name: echinoderm microtubule associated protein like 1
  Uniprot ID: O00423
  ENSP ID: ENSP00000334314
MEDGFSSYSSLYDTSSLLQFCNDDSASAASSMEVTDRIASLEQRVQMQEDDIQLLKSALADVVRRLNITEEQQAVLNRKGPTKARPLMQTLPLRTTVNNGTVLPKKPTGSLPSPSGVRKETAVPATKRLNRSVSLLNACKLNRSTPSNIKRTSSSERVSPGGRRESNGDSRGNRNRTGSTSSSSSGKKNSESKPKEPVFSAEEGYVKMFLRGRPVTMYMPKDQVDSYSLEAKVELPTKRLKLEWVYGYRGRDCRNNLYLLPTGETVYFIASVVVLYNVEEQLQRHYAGHNDDVKCLAVHPDRITIATGQVAGTSKDGKQLPPHVRIWDSVTLNTLHVIGIGFFDRAVTCIAFSKSNGGTNLCAVDDSNDHVLSVWDWQKEEKLADVKCSNEAVFAADFHPTDTNIIVTCGKSHLYFWTLEGSSLNKKQGLFEKQEKPKFVLCVTFSENGDTITGDSSGNILVWGKGTNRISYAVQGAHEGGIFALCMLRDGTLVSGGGKDRKLISWSGNYQKLRKTEIPEQFGPIRTVAEGKGDVILIGTTRNFVLQGTLSGDFTPITQGHTDELWGLAIHASKSQFLTCGHDKHATLWDAVGHRPVWDKIIEDPAQSSGFHPSGSVVAVGTLTGRWFVFDTETKDLVTVHTDGNEQLSVMRYSPDGNFLAIGSHDNCIYIYGVSDNGRKYTRVGKCSGHSSFITHLDWSVNSQFLVSNSGDYEILYWVPSACKQVVSVETTRDIEWATYTCTLGFHVFGVWPEGSDGTDINAVCRAHEKKLLSTGDDFGKVHLFSYPCSQFRAPSHIYGGHSSHVTNVDFLCEDSHLISTGGKDTSIMQWRVI

SEQ ID NO: 26499 - protein, 85 aa, Homo sapiens
  Payload ID: 5224
  Gene Symbol: EML1
  Gene Name: echinoderm microtubule associated protein like 1
  ENSP ID: ENSP00000451269
MEDGFSSYSSLYDTSSLLQFCNDDSASAASSMEVTDRIASLEQRVQMQEDDIQLLKSALADVVRRLNITEEQQAVLNRKGPTKDH

SEQ ID NO: 26500 - protein, 76 aa, Homo sapiens
  Payload ID: 5224
  Gene Symbol: EML1
  Gene Name: echinoderm microtubule associated protein like 1
  ENSP ID: ENSP00000451288
  MOD_RES (1)..(1): Any amino acid
XELWGLAIHASKSQFLTCGHDKHATLWDAVGHRPVWDKIIEGLWLQSEHSLGGGLCLTQKQKTWSPFTQMETNSSL

SEQ ID NO: 26501 - protein, 379 aa, Homo sapiens
  Payload ID: 5224
  Gene Symbol: EML1
  Gene Name: echinoderm microtubule associated protein like 1
  ENSP ID: ENSP00000451346
MSDGEGPSADDSASAASSMEVTDRIASLEQRVQMQEDDIQLLKSALADVVRRLNITEEQQAVLNRKGPTKARPLMQTLPLRTTVNNGTVLPKKPTGSLPSPSGVRKETAVPATKSNIKRTSSSERVSPGGRRESNGDSRGNRNRTGSTSSSSSGKKNSESKPKEPVFSAEEGYVKMFLRGRPVTMYMPKDQVDSYSLEAKVELPTKRLKLEWVYGYRGRDCRNNLYLLPTGETVYFIASVVVLYNVEEQLQRHYAGHNDDVKCLAVHPDRITIATGQVAGTSKDGKQLPPHVRIWDSVTLNTLHVIGIGFFDRAVTCIAFSKSNGGTNLCAVDDSNDHVLSVWDWQKEEKLADVKCSNEAVFAADFHPTDTNIIVTCGK

SEQ ID NO: 26502 - protein, 107 aa, Homo sapiens
  Payload ID: 5224
  Gene Symbol: EML1
  Gene Name: echinoderm microtubule associated protein like 1
  ENSP ID: ENSP00000451669
MEVTDRIASLEQRVQMQEDDIQLLKSALADVVRRLNITEEQQAVLNRKGPTKARPLMQTLPLRTTVNNGTVLPKKPTGSLPSPSGVRKETAVPATKSNIKRTSSSER

SEQ ID NO: 26503 - protein, 121 aa, Homo sapiens
  Payload ID: 5224
  Gene Symbol: EML1
  Gene Name: echinoderm microtubule associated protein like 1
  ENSP ID: ENSP00000451706
VEEQLQRHYAGHNDDVKCLAVHPDRITIATGQVAGTSKDGKQLPPHVRIWDSVTLNTLHVIGIGFFDRAVTCIAFSKSNGGTNLCAVDDSNDHVLSVWDWQKEEKLADVKRCEASESLFFL

SEQ ID NO: 26504 - protein, 128 aa, Homo sapiens
  Payload ID: 5224
  Gene Symbol: EML1
  Gene Name: echinoderm microtubule associated protein like 1
  ENSP ID: ENSP00000451805
MMYNEIGEAKKITERFIDPDKELEIMILNDSASAASSMEVTDRIASLEQRVQMQEDDIQLLKSALADVVRRLNITEEQQAVLNRKGPTKARPLMQTLPLRTTVNNGTVLPKKPTGSLPSPSGVRKETA

SEQ ID NO: 26505 - protein, 85 aa, Homo sapiens
  Payload ID: 5224
  Gene Symbol: EML1
  Gene Name: echinoderm microtubule associated protein like 1
  ENSP ID: ENSP00000451991
MEVTDRIASLEQRVQMQEDDIQLLKSALADVVRRLNITEEQQAVLNRKGPTKARPLMQTLPLRTTVNNGTVLPKKPTGSLPSPSG

SEQ ID NO: 26506 - protein, 66 aa, Homo sapiens
  Payload ID: 5224
  Gene Symbol: EML1
  Gene Name: echinoderm microtubule associated protein like 1
  ENSP ID: ENSP00000452063
GVRKETAVPATKSNIKRTSSSERVSPGGRRESNGDSRGNRNRTGSTSSSSSGKKNSERLRRLSWWR

SEQ ID NO: 26507 - protein, 285 aa, Homo sapiens
  Payload ID: 5224
  Gene Symbol: EML1
  Gene Name: echinoderm microtubule associated protein like 1
  ENSP ID: ENSP00000452089
MEVTDRIASLEQRVQMQEDDIQLLKSALADVVRRLNITEEQQAVLNRKGPTKARPLMQTLPLRTTVNNGTVLPKKPTGSLPSPSGVRKETAVPATKSNIKRTSSSERVSPGGRRESNGDSRGNRNRTGSTSSSSSGKKNSESKPKEPVFSAEEGYVKMFLRGRPVTMYMPKDQVDSYSLEAKVELPTKRLKLEWVYGYRGRDCRNNLYLLPTGETVYFIASVVVLYNVEEQLQRHYAGHNDDVKCLAVHPDRITIATGQVAGTSKDGKQLPPHVRIWDSVTLNTL

SEQ ID NO: 26508 - protein, 156 aa, Homo sapiens
  Payload ID: 5224
  Gene Symbol: EML1
  Gene Name: echinoderm microtubule associated protein like 1
  ENSP ID: ENSP00000452160
MSDGEGPSADDSASAASSMEVTDRIASLEQRVQMQEDDIQLLKSALADVVRRLNITEEQQAVLNRKGPTKARPLMQTLPLRTTVNNGTVLPKKPTGSLPSPSGVRKETAVPATKRLNRSVSLLNACKLNRSTPSNIKRTSSSERVSPGGRRESNGD

SEQ ID NO: 26509 - protein, 92 aa, Homo sapiens
  Payload ID: 5224
  Gene Symbol: EML1
  Gene Name: echinoderm microtubule associated protein like 1
  ENSP ID: ENSP00000452292
MFFDDSASAASSMEVTDRIASLEQRVQMQEDDIQLLKSALADVVRRLNITEEQQAVLNRKGPTKARPLMQTLPLRTTVNNGTVLPKKPTGSL

SEQ ID NO: 26510 - protein, 182 aa, Homo sapiens
  Payload ID: 5224
  Gene Symbol: EML1
  Gene Name: echinoderm microtubule associated protein like 1
  ENSP ID: ENSP00000452474
  MOD_RES (1)..(1): Any amino acid
XLAVHPDRITIATGQVAGTSKDGKQLPPHVRIWDSVTLNTLHVIGIGFFDRAVTCIAFSKSCSNEAVFAADFHPTDTNIIVTCGKSHLYFWTLEGSSLNKKQGLFEKQEKPKFVLCVTFSENGDTITGDSSGNILVWGKGTNRISYAVQGAHEGGIFALCMLRDGTLVSGGGKDRKLISWSG

SEQ ID NO: 26511 - protein, 649 aa, Homo sapiens
  Payload ID: 5225
  Gene Symbol: EML2
  Gene Name: echinoderm microtubule associated protein like 2
  Uniprot ID: O95834
  ENSP ID: ENSP00000245925
MSSFGAGKTKEVIFSVEDGSVKMFLRGRPVPMMIPDELAPTYSLDTRSELPSCRLKLEWVYGYRGRDCRANLYLLPTGEIVYFVASVAVLYSVEEQRQRHYLGHNDDIKCLAIHPDMVTIATGQVAGTTKEGKPLPPHVRIWDSVSLSTLHVLGLGVFDRAVCCVGFSKSNGGNLLCAVDESNDHMLSVWDWAKETKVVDVKCSNEAVLVATFHPTDPTVLITCGKSHIYFWTLEGGSLSKRQGLFEKHEKPKYVLCVTFLEGGDVVTGDSGGNLYVWGKGGNRITQAVLGAHDGGVFGLCALRDGTLVSGGGRDRRVVLWGSDYSKLQEVEVPEDFGPVRTVAEGHGDTLYVGTTRNSILQGSVHTGFSLLVQGHVEELWGLATHPSRAQFVTCGQDKLVHLWSSDSHQPLWSRIIEDPARSAGFHPSGSVLAVGTVTGRWLLLDTETHDLVAIHTDGNEQISVVSFSPDGAYLAVGSHDNLVYVYTVDQGGRKVSRLGKCSGHSSFITHLDWAQDSSCFVTNSGDYEILYWDPATCKQITSADAVRNMEWATATCVLGFGVFGIWSEGADGTDINAVARSHDGKLLASADDFGKVHLFSYPCCQPRALSHKYGGHSSHVTNVAFLWDDSMALTTGGKDTSVLQWRVV

SEQ ID NO: 26512 - protein, 603 aa, Homo sapiens
  Payload ID: 5225
  Gene Symbol: EML2
  Gene Name: echinoderm microtubule associated protein like 2
  ENSP ID: ENSP00000382503
MGVIPEGPLWVSGSDDNLSGTSGMEVDDRVSALEQRLQLQEDELAVLKAALADALRRLRACEEQGAALRARGTPKGRAPPRLGTTASVCQLLKGLPTRTPLNGSGPPRRVGGYATSPSSPKKEATSGRSSVRRYLSPERLASVRREDPRSRTTSSSSNCSAKKEGKTKEVIFSVEDGSVKMFLRGRPVPMMIPDELAPTYSLDTRSELPSCRLKLEWVYGYRGRDCRANLYLLPTGEIVYFVASVAVLYSVEEQRQRHYLGHNDDIKCLAIHPDMVTIATGQVAGTTKEGKPLPPHVRIWDSVSLSTLHVLGLGVFDRAVCCVGFSKSNGGNLLCAVDESNDHMLSVWDWAKETKVVDVKCSNEAVLVATFHPTDPTVLITCGKSHIYFWTLEGGSLSKRQGLFEKHEKPKYVLCVTFLEGGDVVTGDSGGNLYVWGKGGNRITQAVLGAHDGGVFGLCALRDGTLVSGGGRDRRVVLWGSDYSKLQEVEVPEDFGPVRTVAEGHGDTLYVGTTRNSILQGSVHTGFSLLVQGHVEELWGLATHPSRAQFVTCGQDKLVHLWSSDSHQPLWSRIIEVESRSVTQAGGQWHDLGSLQPPPPGFK

SEQ ID NO: 26513 - protein, 796 aa, Homo sapiens
  Payload ID: 5225
  Gene Symbol: EML2
  Gene Name: echinoderm microtubule associated protein like 2
  Uniprot ID: O95834
  ENSP ID: ENSP00000442365
MSLDDNLSGTSGMEVDDRVSALEQRLQLQEDELAVLKAALADALRRLRACEEQGAALRARGTPKGRAPPRLGTTASVCQLLKGLPTRTPLNGSGPPRRVGGYATSPSSPKKEATSGRSSVRRYLSPERLASVRREDPRSRTTSSSSNCSAKKEGKTKEVIFSVEDGSVKMFLRGRPVPMMIPDELAPTYSLDTRSELPSCRLKLEWVYGYRGRDCRANLYLLPTGEIVYFVASVAVLYSVEEQRQRHYLGHNDDIKCLAIHPDMVTIATGQVAGTTKEGKPLPPHVRIWDSVSLSTLHVLGLGVFDRAVCCVGFSKSNGGNLLCAVDESNDHMLSVWDWAKETKVVDVKCSNEAVLVATFHPTDPTVLITCGKSHIYFWTLEGGSLSKRQGLFEKHEKPKYVLCVTFLEGGDVVTGDSGGNLYVWGKGGNRITQAVLGAHDGGVFGLCALRDGTLVSGGGRDRRVVLWGSDYSKLQEVEVPEDFGPVRTVAEGHGDTLYVGTTRNSILQGSVHTGFSLLVQGHVEELWGLATHPSRAQFVTCGQDKLVHLWSSDSHQPLWSRIIEDPARSAGFHPSGSVLAVGTVTGRWLLLDTETHDLVAIHTDGNEQISVVSFSPDGAYLAVGSHDNLVYVYTVDQGGRKVSRLGKCSGHSSFITHLDWAQDSSCFVTNSGDYEILYWDPATCKQITSADAVRNMEWATATCVLGFGVFGIWSEGADGTDINAVARSHDGKLLASADDFGKVHLFSYPCCQPRALSHKYGGHSSHVTNVAFLWDDSMALTTGGKDTSVLQWRVV

SEQ ID NO: 26514 - protein, 181 aa, Homo sapiens
  Payload ID: 5225
  Gene Symbol: EML2
  Gene Name: echinoderm microtubule associated protein like 2
  ENSP ID: ENSP00000464764
FLEGGDVVTGDSGGNLYVWGKGGNRITQAVLGAHDGGVFGLCALRDGTLVSGGGRDRRVVLWGSDYSKLQEVEVPEDFGPVRTVAEGHGDTLYVGTTRNSILQGSVHTGFSLLVQDPARSAGFHPSGSVLAVGTVTGRWLLLDTETHDLVAIHTDGNEQISVVSFSPDGAYLAVGSHDNLV

SEQ ID NO: 26515 - protein, 773 aa, Homo sapiens
  Payload ID: 5225
  Gene Symbol: EML2
  Gene Name: echinoderm microtubule associated protein like 2
  ENSP ID: ENSP00000464789
MSSFGAGKTKEVIFSVEDGSVKMFLRGRPVPMMIPDELAPTYSLDTRSELPSCRLKLEWVYGYRGRDCRANLYLLPTGEIVYFVASVAVLYSVEEQRQRHYLGHNDDIKCLAIHPDMVTIATGQVAGTTKEGKPLPPHVRIWDSVSLSTLHVLGLGVFDRAVCCVGFSKSNGGNLLCAVDESNDHMLSVWDWAKETKVVDVKCSNEAVLVATFHPTDPTVLITCGKSHIYFWTLEGGSLSKRQGLFEKHEKPKYVLCVTFLEGGDVVTGDSGGNLYVWGKGGNRITQAVLGAHDGGVFGLCALRDGTLVSGGGRDRRVVLWGSDYSKLQEVEVPEDFGPVRTVAEGHGDTLYVGTTRNSILQGSVHTGFSLLVQGHVEELWGLATHPSRAQFVTCGQDKLVHLWSSDSHQPLWSRIIEDPARSAGFHPSGSVLAVGTVTGRWLLLDTETHDLVAIHTDGNEQISVVSFSPDGAYLAVGSHDNLVYVYTVDQGGRKVSRLGKCSGHSSFITHLDWAQDSSCFVTNSGDYEILYWDPATCKQITSADAVRNMEWATATCVLGFGVFGIWSEGADGTDINAVARSHDGKLLASADDFGKVHLFSYPCCQPRVLGKWPSAAEAALSSGIRVLFRPLVASLGPAWKNVPRKFCWKSAGDSPRDPPPRPQGHSQPSFPSSGPWETAVCKFYRQGRWREVRVFASWAPPCIPHSQWLWFPSSEPQFLWELELSLETGNRLPPCPFCPRLAMASCPLRMVPWGRPILCGFLHSAHPSINCP

SEQ ID NO: 26516 - protein, 111 aa, Homo sapiens
  Payload ID: 5225
  Gene Symbol: EML2
  Gene Name: echinoderm microtubule associated protein like 2
  ENSP ID: ENSP00000464804
MFLRGRPVPMMIPDELAPTYSLDTRSELPSCRLKLEWVYGYRGRDCRANLYLLPTGEIVYFVASVAVLYSVEEQRQRHYLGHNDDIKCLAIHPDMVTIATGQVAGTTKEGK

SEQ ID NO: 26517 - protein, 51 aa, Homo sapiens
  Payload ID: 5225
  Gene Symbol: EML2
  Gene Name: echinoderm microtubule associated protein like 2
  ENSP ID: ENSP00000464950
WTLEGGSLSKRQGLFEKHEKPKYVLCVTFLEGGDVVTGDSGGNLYVWGKGP

SEQ ID NO: 26518 - protein, 145 aa, Homo sapiens
  Payload ID: 5225
  Gene Symbol: EML2
  Gene Name: echinoderm microtubule associated protein like 2
  ENSP ID: ENSP00000465339
MSSFGAGKTKEVIFSVAWPSTQIWSPSPRDRWREPLRKGSRCRPTCASGTQFPSPPYTCWAWGCLTEPCAVWASPNLMEATCCVQWMNPMITCSRCGTGPRRPRWWMSSAPMRLYWWPPSTPRTPLCLSPAGNLTSTSGPWRGAA

SEQ ID NO: 26519 - protein, 223 aa, Homo sapiens
  Payload ID: 5225
  Gene Symbol: EML2
  Gene Name: echinoderm microtubule associated protein like 2
  ENSP ID: ENSP00000465607
IATGQVAGTTKEGKPLPPHVRIWDSVSLSTLHVLGLGVFDRAVCCVGFSKSCSNEAVLVATFHPTDPTVLITCGKSHIYFWTLEGGSLSKRQGLFEKHEKPKYVLCVTFLEGGDVVTGDSGGNLYVWGKGGNRITQAVLGAHDGGVFGLCALRDGTLVSGGGRDRRVVLWGSDYSKLQEVEVPEDFGPVRTVAEGHGDTLYVGTTRNSILQGSVHTGFSLLVQ

SEQ ID NO: 26520 - protein, 225 aa, Homo sapiens
  Payload ID: 5225
  Gene Symbol: EML2
  Gene Name: echinoderm microtubule associated protein like 2
  ENSP ID: ENSP00000465786
MFLRGRPVPMMIPDELAPTYSLDTRSELPSCRLKLEWVYGYRGRDCRANLYLLPTGEIVYFVASVAVLYSVEEQRQRHYLGHNDDIKCLAIHPDMVTIATGQVAGTTKEGKPLPPHVRIWDSVSLSTLHVLGLGVFDRAVCCVGFSKSNGGNLLCAVDESNDHMLSVWDWAKETKVVDVKCSNEAVLVATFHPTDPTVLITCGKSHIYFWTLEGGSLSKRQGLFE

SEQ ID NO: 26521 - protein, 76 aa, Homo sapiens
  Payload ID: 5225
  Gene Symbol: EML2
  Gene Name: echinoderm microtubule associated protein like 2
  ENSP ID: ENSP00000465885
  MOD_RES (1)..(1): Any amino acid
XGRKVSRLGKCSGHSSFITHLDWAQDSSCFVTNSGDYEILYLEMGFHHLGQAGLELLTSGDPARCCGSCCLLGLQT

SEQ ID NO: 26522 - protein, 73 aa, Homo sapiens
  Payload ID: 5225
  Gene Symbol: EML2
  Gene Name: echinoderm microtubule associated protein like 2
  ENSP ID: ENSP00000465994
  MOD_RES (1)..(1): Any amino acid
XHQPLWSRIIEDPARSAGFHPSGSVLAVGTVTGRWLLLDTETHDLVAIHTDGNEQISVVSFSPGPFQFYHPPG

SEQ ID NO: 26523 - protein, 121 aa, Homo sapiens
  Payload ID: 5225
  Gene Symbol: EML2
  Gene Name: echinoderm microtubule associated protein like 2
  ENSP ID: ENSP00000466100
  MOD_RES (1)..(1): Any amino acid
XLCAVDESNDHMLSVWDWAKETKVVDVKVPEDFGPVRTVAEGHGDTLYVGTTRNSILQGSVHTGFSLLVQGHVEELWGLATHPSRAQFVTCGQDKLVHLWSSDSHQPLWSRIIEDPARSAG

SEQ ID NO: 26524 - protein, 133 aa, Homo sapiens
  Payload ID: 5225
  Gene Symbol: EML2
  Gene Name: echinoderm microtubule associated protein like 2
  ENSP ID: ENSP00000467941
MFLRGRPVPMMIPDELAPTYSLDTRSELPSCRLKLEWVYGYRGRDCRANLYLLPTGEIVYFVASVAVLYSVEEQRQRHYLGHNDDIKCLAIHPDMVTIATGQVAGTTKEGKPLPPHVRIWDSVSLSTLHVLGL

SEQ ID NO: 26525 - protein, 850 aa, Homo sapiens
  Payload ID: 5225
  Gene Symbol: EML2
  Gene Name: echinoderm microtubule associated protein like 2
  Uniprot ID: O95834
  ENSP ID: ENSP00000468312
MLERRALLWQREAGPGWGDRARAGTGGAGGGCGGAMAERGPAFCGLYDTSSLLRYCNDDNLSGTSGMEVDDRVSALEQRLQLQEDELAVLKAALADALRRLRACEEQGAALRARGTPKGRAPPRLGTTASVCQLLKGLPTRTPLNGSGPPRRVGGYATSPSSPKKEATSGRSSVRRYLSPERLASVRREDPRSRTTSSSSNCSAKKEGKTKEVIFSVEDGSVKMFLRGRPVPMMIPDELAPTYSLDTRSELPSCRLKLEWVYGYRGRDCRANLYLLPTGEIVYFVASVAVLYSVEEQRQRHYLGHNDDIKCLAIHPDMVTIATGQVAGTTKEGKPLPPHVRIWDSVSLSTLHVLGLGVFDRAVCCVGFSKSNGGNLLCAVDESNDHMLSVWDWAKETKVVDVKCSNEAVLVATFHPTDPTVLITCGKSHIYFWTLEGGSLSKRQGLFEKHEKPKYVLCVTFLEGGDVVTGDSGGNLYVWGKGGNRITQAVLGAHDGGVFGLCALRDGTLVSGGGRDRRVVLWGSDYSKLQEVEVPEDFGPVRTVAEGHGDTLYVGTTRNSILQGSVHTGFSLLVQGHVEELWGLATHPSRAQFVTCGQDKLVHLWSSDSHQPLWSRIIEDPARSAGFHPSGSVLAVGTVTGRWLLLDTETHDLVAIHTDGNEQISVVSFSPDGAYLAVGSHDNLVYVYTVDQGGRKVSRLGKCSGHSSFITHLDWAQDSSCFVTNSGDYEILYWDPATCKQITSADAVRNMEWATATCVLGFGVFGIWSEGADGTDINAVARSHDGKLLASADDFGKVHLFSYPCCQPRALSHKYGGHSSHVTNVAFLWDDSMALTTGGKDTSVLQWRVV

SEQ ID NO: 26526 - protein, 427 aa, Homo sapiens
  Payload ID: 5225
  Gene Symbol: EML2
  Gene Name: echinoderm microtubule associated protein like 2
  ENSP ID: ENSP00000468329
MSSFGAGKTKEVIFSVEDGSVKMFLRGRPVPMMIPDELAPTYSLDTRSELPSCRLKLEWVYGYRGRDCRANLYLLPTGEIVYFVASVAVLYSVEEQRQRHYLGHNDDIKCLAIHPDMVTIATGQVAGTTKEGKPLPPHVRIWDSVSLSTLHVLGLGVFDRAVCCVGFSKSNGGNLLCAVDESNDHMLSVWDWAKETKVVDVKCSNEAVLVATFHPTDPTVLITCGKSHIYFWTLEGGSLSKRQGLFEKHEKPKYVLCVTFLEGGDVVTGDSGGNLYVWGKGGNRITQAVLGAHDGGVFGLCALRDGTLVSGGGRDRRVVLWGSDYSKLQEVEVPEDFGPVRTVAEGHGDTLYVGTTRNSILQGSVHTGFSLLVQGHVEELWGLATHPSRAQFVTCGQDKLVHLWSSDSHQPLWSRIIEMAAAGHGDP

SEQ ID NO: 26527 - protein, 98 aa, Homo sapiens
  Payload ID: 5225
  Gene Symbol: EML2
  Gene Name: echinoderm microtubule associated protein like 2
  ENSP ID: ENSP00000468373
MFLRGRPVPMMIPDELAPTYSLDTRSELPSCRLKLEWVYGYRGRDCRANLYLLPTGEIVYFVASVAVLYSVEEQRQRHYLGHNDDIKCLAIHPDMVTI

SEQ ID NO: 26528 - protein, 91 aa, Homo sapiens
  Payload ID: 5225
  Gene Symbol: EML2
  Gene Name: echinoderm microtubule associated protein like 2
  ENSP ID: ENSP00000468383
PLPPHVRIWDSVSLSTLHVLGLGVFDRAVCCVGFSKSNGGNLLCAVDESNDHMLSVWDWAKETKVVDVKAGVQWHNLGSLQPPPPRFQRFS

SEQ ID NO: 26529 - protein, 148 aa, Homo sapiens
  Payload ID: 5225
  Gene Symbol: EML2
  Gene Name: echinoderm microtubule associated protein like 2
  ENSP ID: ENSP00000468470
MFLRGRPVPMMIPDELAPTYSLDTRSELPSCRLKLEWVYGYRGRDCRANLYLLPTGEIVYFVASVAVLYSVEEQRQRHYLGHNDDIKCLAIHPDMVTIATGQVAGTTKEGKPLPPHVRIWDSVSLSTLHVLGLGVFDRAVCCVGFSKS

SEQ ID NO: 26530 - protein, 141 aa, Homo sapiens
  Payload ID: 5225
  Gene Symbol: EML2
  Gene Name: echinoderm microtubule associated protein like 2
  ENSP ID: ENSP00000468768
MEVDDRVSALEQRLQLQEDELAVLKAALADALRRLRACEEQGAALRARGTPKGRAPPRLGTTASVCQLLKGLPTRTPLNGSGPPRRVGGYATSPSSPKKEATSGRSSVRRYLSPERLASVRREDPRSRTTSSSSNCSAKKE

SEQ ID NO: 26531 - protein, 897 aa, Homo sapiens
  Payload ID: 5226
  Gene Symbol: EML3
  Gene Name: echinoderm microtubule associated protein like 3
  ENSP ID: ENSP00000278845
MDGAAGPGDGPAREALQSLSQRLRVQEQEMELVKAALAEALRLLRLQVPPSSLQGSGTPAPPGDSSLAAPPGLPPTCTPSLVSRGTQTETEVELKSSPGPPGLSNGPPAPQGASEEPSGTQSEGGGSSSSGAGSPGPPGILRPLQPPQRADTPRRNSSSSSSPSERPRQKLSRKAISSANLLVRSGSTESRGGKDPLSSPGGPGSRRSNYNLEGISVKMFLRGRPITMYIPSGIRSLEELPSGPPPETLSLDWVYGYRGRDSRSNLFVLRSGEVVYFIACVVVLYRPGGGPGGPGGGGQRHYRGHTDCVRCLAVHPDGVRVASGQTAGVDKDGKPLQPVVHIWDSETLLKLQEIGLGAFERGVGALAFSAADQGAFLCVVDDSNEHMLSVWDCSRGMKLAEIKSTNDSVLAVGFNPRDSSCIVTSGKSHVHFWNWSGGVGVPGNGTLTRKQGVFGKYKKPKFIPCFVFLPDGDILTGDSEGNILTWGRSPSDSKTPGRGGAKETYGIVAQAHAHEGSIFALCLRRDGTVLSGGGRDRRLVQWGPGLVALQEAEIPEHFGAVRAIAEGLGSELLVGTTKNALLRGDLAQGFSPVIQGHTDELWGLCTHPSQNRFLTCGHDRQLCLWDGESHALAWSIDLKETGLCADFHPSGAVVAVGLNTGRWLVLDTETREIVSDVIDGNEQLSVVRYSPDGLYLAIGSHDNVIYIYSVSSDGAKSSRFGRCMGHSSFITHLDWSKDGNFIMSNSGDYEILYWDVAGGCKQLKNRYESRDREWATYTCVLGFHVYGVWPDGSDGTDINSLCRSHNERVVAVADDFCKVHLFQYPCARAKAPSRMYGGHGSHVTSVRFTHDDSHLVSLGGKDASIFQWRVLGAGGAGPAPATPSRTPSLSPASSLDV

SEQ ID NO: 26532 - protein, 896 aa, Homo sapiens
  Payload ID: 5226
  Gene Symbol: EML3
  Gene Name: echinoderm microtubule associated protein like 3
  Uniprot ID: Q32P44
  ENSP ID: ENSP00000378254
MDGAAGPGDGPAREALQSLSQRLRVQEQEMELVKAALAEALRLLRLQVPPSSLQGSGTPAPPGDSLAAPPGLPPTCTPSLVSRGTQTETEVELKSSPGPPGLSNGPPAPQGASEEPSGTQSEGGGSSSSGAGSPGPPGILRPLQPPQRADTPRRNSSSSSSPSERPRQKLSRKAISSANLLVRSGSTESRGGKDPLSSPGGPGSRRSNYNLEGISVKMFLRGRPITMYIPSGIRSLEELPSGPPPETLSLDWVYGYRGRDSRSNLFVLRSGEVVYFIACVVVLYRPGGGPGGPGGGGQRHYRGHTDCVRCLAVHPDGVRVASGQTAGVDKDGKPLQPVVHIWDSETLLKLQEIGLGAFERGVGALAFSAADQGAFLCVVDDSNEHMLSVWDCSRGMKLAEIKSTNDSVLAVGFNPRDSSCIVTSGKSHVHFWNWSGGVGVPGNGTLTRKQGVFGKYKKPKFIPCFVFLPDGDILTGDSEGNILTWGRSPSDSKTPGRGGAKETYGIVAQAHAHEGSIFALCLRRDGTVLSGGGRDRRLVQWGPGLVALQEAEIPEHFGAVRAIAEGLGSELLVGTTKNALLRGDLAQGFSPVIQGHTDELWGLCTHPSQNRFLTCGHDRQLCLWDGESHALAWSIDLKETGLCADFHPSGAVVAVGLNTGRWLVLDTETREIVSDVIDGNEQLSVVRYSPDGLYLAIGSHDNVIYIYSVSSDGAKSSRFGRCMGHSSFITHLDWSKDGNFIMSNSGDYEILYWDVAGGCKQLKNRYESRDREWATYTCVLGFHVYGVWPDGSDGTDINSLCRSHNERVVAVADDFCKVHLFQYPCARAKAPSRMYGGHGSHVTSVRFTHDDSHLVSLGGKDASIFQWRVLGAGGAGPAPATPSRTPSLSPASSLDV

SEQ ID NO: 26533 - protein, 911 aa, Homo sapiens
  Payload ID: 5226
  Gene Symbol: EML3
  Gene Name: echinoderm microtubule associated protein like 3
  ENSP ID: ENSP00000378256
  MOD_RES (1)..(1): Any amino acid
XDGPAREALQSLSQRLRVQEQEMELVKAALAEALRLLRLQVPPSSLQGSGTPAPPGDSSLAAPPGLPPTCTPSLVSRGTQTETEVELKSSPGPPGLSNGPPAPQGASEEPSGTQSEGGGSSSSGAGSPGPPGILRPLQPPQRADTPRRNSSSSSSPSERPRQKLSRKAISSANLLVRSGSTESRGGKDPLSSPGGPGSRRSNYNLEGISVKMFLRGRPITMYIPSGIRSLEELPSGPPPETLSLDWVYGYRGRDSRSNLFVLRSGEVVYFIACVVVLYRPGGGPGGPGGGGQRHYRGHTDCVRCLAVHPDGVRVASGQTAGVDKDGKPLQPVVHIWDSETLLKLQEIGLGAFERGVGALAFSAADQGAFLCVVDDSNEHMLSVWDCSRGMKLAEIKSTNDSVLAVGFNPRDSSCIVTSGKSHVHFWNWSGGVGVPGNGTLTRKQGVFGKYKKPKFIPCFVFLPDGDILTGDSEGNILTWGRSPSDSKTPGRGGAKETYGIVAQAHAHEGSIFALCLRRDGTVLSGGGRDRRLVQWGPGLVALQEAEIPEHFGAVRAIAEGLGSELLVGTTKNALLRGDLAQGFSPVIQGHTDELWGLCTHPSQNRFLTCGHDRQLCLWDGESHALAWSIDLKETGLCADFHPSGAVVAVGLNTGRWLVLDTETREIVSDVIDGNEQLSVVRYSPDGLYLAIGSHDNVIYIYSVSSDGAKSSRFGRCMGHSSFITHLDWSKDGNFIMSNSGDYEILYWDVAGGCKQLKNRYESRDREWATYTCVLGFHVYVPVRSCQGAEPHVRGPRQPRDQRPIHARRLAPRLAGRQGRQHLPVASAGRWGRGAGARHALSNPLPVPRLLPRRLIAAWRDRLARRRGPAPPCPSLAQSPTTRGRLFPGLTSRHSRSRIFLEGANGAPAHTV

SEQ ID NO: 26534 - protein, 137 aa, Homo sapiens
  Payload ID: 5226
  Gene Symbol: EML3
  Gene Name: echinoderm microtubule associated protein like 3
  ENSP ID: ENSP00000409611
ILYWDVAGGCKQLKNRYESRDREWATYTCVLGFHVYVPVRSCQGEAAGIAGVGPVGPRAQPPPQLFPPAQAPSRMYGGHGSHVTSVRFTHDDSHLVSLGGKDASIFQWRVLGAGGAGPAPATPSRTPSLSPASSLDV

SEQ ID NO: 26535 - protein, 113 aa, Homo sapiens
  Payload ID: 5226
  Gene Symbol: EML3
  Gene Name: echinoderm microtubule associated protein like 3
  ENSP ID: ENSP00000411572
MELVKAALAEALRLLRLQVPPSSLQGSGTPAPPGDSLAAPPGLPPTCTPSLVSRGTQTETEVELKSSPGPPGLSNGPPAPQGASEEPSGTQSEGGGSSSSGAGSPGPPGILRP

SEQ ID NO: 26536 - protein, 194 aa, Homo sapiens
  Payload ID: 5226
  Gene Symbol: EML3
  Gene Name: echinoderm microtubule associated protein like 3
  Uniprot ID: Q32P44
  ENSP ID: ENSP00000431752
MELVKAALAEALRLLRLQVPPSSLQGSGTPAPPGDSLAAPPGLPPTCTPSLVSRGTQTETEVELKSSPGPPGLSNGPPAPQGASEEPSGTQSEGGGSSSSGAGSPGPPGILRPLQPPQRADTAASAEALQEGNLLRQPVSAVREHREPWGKRPPLQPWGPWISEEQLQFGRHLSEDVPSRAPHYHVHPVWHPQP

SEQ ID NO: 26537 - protein, 679 aa, Homo sapiens
  Payload ID: 5226
  Gene Symbol: EML3
  Gene Name: echinoderm microtubule associated protein like 3
  ENSP ID: ENSP00000433417
MFLRGRPITMYIPSGIRSLEELPSGPPPETLSLDWVYGYRGRDSRSNLFVLRSGEVVYFIACVVVLYRPGGGPGGPGGGGQRHYRGHTDCVRCLAVHPDGVRVASGQTAGVDKDGKPLQPVVHIWDSETLLKLQEIGLGAFERGVGALAFSAADQGAFLCVVDDSNEHMLSVWDCSRGMKLAEIKSTNDSVLAVGFNPRDSSCIVTSGKSHVHFWNWSGGVGVPGNGTLTRKQGVFGKYKKPKFIPCFVFLPDGDILTGDSEGNILTWGRSPSDSKTPGRGGAKETYGIVAQAHAHEGSIFALCLRRDGTVLSGGGRDRRLVQWGPGLVALQEAEIPEHFGAVRAIAEGLGSELLVGTTKNALLRGDLAQGFSPVIQGHTDELWGLCTHPSQNRFLTCGHDRQLCLWDGESHALAWSIDLKETGLCADFHPSGAVVAVGLNTGRWLVLDTETREIVSDVIDGNEQLSVVRYSPDGLYLAIGSHDNVIYIYSVSSDGAKSSRFGRCMGHSSFITHLDWSKDGNFIMSNSGDYEILYWDVAGGCKQLKNRYESRDREWATYTCVLGFHVYGVWPDGSDGTDINSLCRSHNERVVAVADDFCKVHLFQYPCARAKAPSRMYGGHGSHVTSVRFTHDDSHLVSLGGKDASIFQWRVLGAGGAGPAPATPSRTPSLSPASSLDV

SEQ ID NO: 26538 - protein, 127 aa, Homo sapiens
  Payload ID: 5226
  Gene Symbol: EML3
  Gene Name: echinoderm microtubule associated protein like 3
  ENSP ID: ENSP00000433706
MELVKAALAEALRLLRLQVPPSSLQGSGTPAPPGDSLAAPPGLPPTCTPSLVSRGTQTETEVELKSSPGPPGLSNGPPAPQGASEEPSGTQSEGGGSSSSGAGSPGPPGILRPLQPPQRADTPRRNS

SEQ ID NO: 26539 - protein, 917 aa, Homo sapiens
  Payload ID: 5226
  Gene Symbol: EML3
  Gene Name: echinoderm microtubule associated protein like 3
  Uniprot ID: Q32P44
  ENSP ID: ENSP00000434513
MDGAAGPGDGPAREALQSLSQRLRVQEQEMELVKAALAEALRLLRLQVPPSSLQGSGTPAPPGDSLAAPPGLPPTCTPSLVSRGTQTETEVELKSSPGPPGLSNGPPAPQGASEEPSGTQSEGGGSSSSGAGSPGPPGILRPLQPPQRADTPRRNSSSSSSPSERPRQKLSRKAISSANLLVRSGSTESRGGKDPLSSPGGPGSRRSNYNLEGISVKMFLRGRPITMYIPSGIRSLEELPSGPPPETLSLDWVYGYRGRDSRSNLFVLRSGEVVYFIACVVVLYRPGGGPGGPGGGGQRHYRGHTDCVRCLAVHPDGVRVASGQTAGVDKDGKPLQPVVHIWDSETLLKLQEIGLGAFERGVGALAFSAADQGAFLCVVDDSNEHMLSVWDCSRGMKLAEIKSTNDSVLAVGFNPRDSSCIVTSGKSHVHFWNWSGGVGVPGNGTLTRKQGVFGKYKKPKFIPCFVFLPDGDILTGDSEGNILTWGRSPSDSKTPGRGGAKETYGIVAQAHAHEGSIFALCLRRDGTVLSGGGRDRRLVQWGPGLVALQEAEIPEHFGAVRAIAEGLGSELLVGTTKNALLRGDLAQGFSPVIQGHTDELWGLCTHPSQNRFLTCGHDRQLCLWDGESHALAWSIDLKETGLCADFHPSGAVVAVGLNTGRWLVLDTETREIVSDVIDGNEQLSVVRYSPDGLYLAIGSHDNVIYIYSVSSDGAKSSRFGRCMGHSSFITHLDWSKDGNFIMSNSGDYEILYWDVAGGCKQLKNRYESRDREWATYTCVLGFHVYVPVRSCQGAEPHVRGPRQPRDQRPIHARRLAPRLAGRQGRQHLPVASAGRWGRGAGARHALSNPLPVPRLLPRRLIAAWRDRLARRRGPAPPCPSLAQSPTTRGRLFPGLTSRHSRSRIFLEGANGAPAHTV

SEQ ID NO: 26540 - protein, 889 aa, Homo sapiens
  Payload ID: 5226
  Gene Symbol: EML3
  Gene Name: echinoderm microtubule associated protein like 3
  ENSP ID: ENSP00000435064
MELVKAALAEALRLLRLQVPPSSLQGSGTPAPPGDSSLAAPPGLPPTCTPSLVSRGTQTETEVELKSSPGPPGLSNGPPAPQGASEEPSGTQSEGGGSSSSGAGSPGPPGILRPLQPPQRADTPRRNSSSSSSPSERPRQKLSRKAISSANLLVRSGSTESRGGKDPLSSPGGPGSRRSNYNLEGISVKMFLRGRPITMYIPSGIRSLEELPSGPPPETLSLDWVYGYRGRDSRSNLFVLRSGEVVYFIACVVVLYRPGGGPGGPGGGGQRHYRGHTDCVRCLAVHPDGVRVASGQTAGVDKDGKPLQPVVHIWDSETLLKLQEIGLGAFERGVGALAFSAADQGAFLCVVDDSNEHMLSVWDCSRGMKLAEIKSTNDSVLAVGFNPRDSSCIVTSGKSHVHFWNWSGGVGVPGNGTLTRKQGVFGKYKKPKFIPCFVFLPDGDILTGDSEGNILTWGRSPSDSKTPGRGGAKETYGIVAQAHAHEGSIFALCLRRDGTVLSGGGRDRRLVQWGPGLVALQEAEIPEHFGAVRAIAEGLGSELLVGTTKNALLRGDLAQGFSPVIQGHTDELWGLCTHPSQNRFLTCGHDRQLCLWDGESHALAWSIDLKETGLCADFHPSGAVVAVGLNTGRWLVLDTETREIVSDVIDGNEQLSVVRYSPDGLYLAIGSHDNVIYIYSVSSDGAKSSRFGRCMGHSSFITHLDWSKDGNFIMSNSGDYEILYWDVAGGCKQLKNRYESRDREWATYTCVLGFHVYVPVRSCQGAEPHVRGPRQPRDQRPIHARRLAPRLAGRQGRQHLPVASAGRWGRGAGARHALSNPLPVPRLLPRRLIAAWRDRLARRRGPAPPCPSLAQSPTTRGRLFPGLTSRHSRSRIFLEGANGAPAHTV

SEQ ID NO: 26541 - protein, 128 aa, Homo sapiens
  Payload ID: 5226
  Gene Symbol: EML3
  Gene Name: echinoderm microtubule associated protein like 3
  ENSP ID: ENSP00000435832
MELVKAALAEALRLLRLQVPPSSLQGSGTPAPPGDSSLAAPPGLPPTCTPSLVSRGTQTETEVELKSSPGPPGLSNGPPAPQGASEEPSGTQSEGGGSSSSGAGSPGPPGILRPLQPPQRADTPRRNS

SEQ ID NO: 26542 - protein, 981 aa, Homo sapiens
  Payload ID: 5227
  Gene Symbol: EML4
  Gene Name: echinoderm microtubule associated protein like 4
  Uniprot ID: Q9HC35
  ENSP ID: ENSP00000320663
MDGFAGSLDDSISAASTSDVQDRLSALESRVQQQEDEITVLKAALADVLRRLAISEDHVASVKKSVSSKGQPSPRAVIPMSCITNGSGANRKPSHTSAVSIAGKETLSSAAKSGTEKKKEKPQGQREKKEESHSNDQSPQIRASPSPQPSSQPLQIHRQTPESKNATPTKSIKRPSPAEKSHNSWENSDDSRNKLSKIPSTPKLIPKVTKTADKHKDVIINQEGEYIKMFMRGRPITMFIPSDVDNYDDIRTELPPEKLKLEWAYGYRGKDCRANVYLLPTGKIVYFIASVVVLFNYEERTQRHYLGHTDCVKCLAIHPDKIRIATGQIAGVDKDGRPLQPHVRVWDSVTLSTLQIIGLGTFERGVGCLDFSKADSGVHLCIIDDSNEHMLTVWDWQKKAKGAEIKTTNEVVLAVEFHPTDANTIITCGKSHIFFWTWSGNSLTRKQGIFGKYEKPKFVQCLAFLGNGDVLTGDSGGVMLIWSKTTVEPTPGKGPKGVYQISKQIKAHDGSVFTLCQMRNGMLLTGGGKDRKIILWDHDLNPEREIEVPDQYGTIRAVAEGKADQFLVGTSRNFILRGTFNDGFQIEVQGHTDELWGLATHPFKDLLLTCAQDRQVCLWNSMEHRLEWTRLVDEPGHCADFHPSGTVVAIGTHSGRWFVLDAETRDLVSIHTDGNEQLSVMRYSIDGTFLAVGSHDNFIYLYVVSENGRKYSRYGRCTGHSSYITHLDWSPDNKYIMSNSGDYEILYWDIPNGCKLIRNRSDCKDIDWTTYTCVLGFQVFGVWPEGSDGTDINALVRSHNRKVIAVADDFCKVHLFQYPCSKAKAPSHKYSAHSSHVTNVSFTHNDSHLISTGGKDMSIIQWKLVEKLSLPQNETVADTTLTKAPVSSTESVIQSNTPTPPPSQPLNETAEEESRISSSPTLLENSLEQTVEPSEDHSEEESEEGSGDLGEPLYEEPCNEISKEQAKATLLEDQQDPSPSS

SEQ ID NO: 26543 - protein, 992 aa, Homo sapiens
  Payload ID: 5227
  Gene Symbol: EML4
  Gene Name: echinoderm microtubule associated protein like 4
  ENSP ID: ENSP00000384939
MDGFAGSLDDSISAASTSDVQDRLSALESRVQQQEDEITVLKAALADVLRRLAISEDHVASVKKSVSSKGQPSPRAVIPMSCITNGSGANRKPSHTSAVSIAGKETLSSAAKSGTEKKKEKPQGQREKKEESHSNDQSPQIRASPSPQPSSQPLQIHRQTPESKNATPTKSIKRPSPAEKSHNSWENSDDSRNKLSKIPSTPKLIPKVTKTADKHKDVIINQAKMSTREKNSQEGEYIKMFMRGRPITMFIPSDVDNYDDIRTELPPEKLKLEWAYGYRGKDCRANVYLLPTGKIVYFIASVVVLFNYEERTQRHYLGHTDCVKCLAIHPDKIRIATGQIAGVDKDGRPLQPHVRVWDSVTLSTLQIIGLGTFERGVGCLDFSKADSGVHLCIIDDSNEHMLTVWDWQKKAKGAEIKTTNEVVLAVEFHPTDANTIITCGKSHIFFWTWSGNSLTRKQGIFGKYEKPKFVQCLAFLGNGDVLTGDSGGVMLIWSKTTVEPTPGKGPKGVYQISKQIKAHDGSVFTLCQMRNGMLLTGGGKDRKIILWDHDLNPEREIEVPDQYGTIRAVAEGKADQFLVGTSRNFILRGTFNDGFQIEVQGHTDELWGLATHPFKDLLLTCAQDRQVCLWNSMEHRLEWTRLVDEPGHCADFHPSGTVVAIGTHSGRWFVLDAETRDLVSIHTDGNEQLSVMRYSIDGTFLAVGSHDNFIYLYVVSENGRKYSRYGRCTGHSSYITHLDWSPDNKYIMSNSGDYEILYWDIPNGCKLIRNRSDCKDIDWTTYTCVLGFQVFGVWPEGSDGTDINALVRSHNRKVIAVADDFCKVHLFQYPCSKAKAPSHKYSAHSSHVTNVSFTHNDSHLISTGGKDMSIIQWKLVEKLSLPQNETVADTTLTKAPVSSTESVIQSNTPTPPPSQPLNETAEEESRISSSPTLLENSLEQTVEPSEDHSEEESEEGSGDLGEPLYEEPCNEISKEQAKATLLEDQQDPSPSS

SEQ ID NO: 26544 - protein, 923 aa, Homo sapiens
  Payload ID: 5227
  Gene Symbol: EML4
  Gene Name: echinoderm microtubule associated protein like 4
  Uniprot ID: Q9HC35
  ENSP ID: ENSP00000385059
MDGFAGSLDDSISAASTSDVQDRLSALESRVQQQEDEITVLKAALADVLRRLAISEDHVASVKKSVSSKGQPSPRAVIPMSCITNGSGANRKPSHTSAVSIAGKETLSSAAKSIKRPSPAEKSHNSWENSDDSRNKLSKIPSTPKLIPKVTKTADKHKDVIINQEGEYIKMFMRGRPITMFIPSDVDNYDDIRTELPPEKLKLEWAYGYRGKDCRANVYLLPTGKIVYFIASVVVLFNYEERTQRHYLGHTDCVKCLAIHPDKIRIATGQIAGVDKDGRPLQPHVRVWDSVTLSTLQIIGLGTFERGVGCLDFSKADSGVHLCIIDDSNEHMLTVWDWQKKAKGAEIKTTNEVVLAVEFHPTDANTIITCGKSHIFFWTWSGNSLTRKQGIFGKYEKPKFVQCLAFLGNGDVLTGDSGGVMLIWSKTTVEPTPGKGPKGVYQISKQIKAHDGSVFTLCQMRNGMLLTGGGKDRKIILWDHDLNPEREIEVPDQYGTIRAVAEGKADQFLVGTSRNFILRGTFNDGFQIEVQGHTDELWGLATHPFKDLLLTCAQDRQVCLWNSMEHRLEWTRLVDEPGHCADFHPSGTVVAIGTHSGRWFVLDAETRDLVSIHTDGNEQLSVMRYSIDGTFLAVGSHDNFIYLYVVSENGRKYSRYGRCTGHSSYITHLDWSPDNKYIMSNSGDYEILYWDIPNGCKLIRNRSDCKDIDWTTYTCVLGFQVFGVWPEGSDGTDINALVRSHNRKVIAVADDFCKVHLFQYPCSKAKAPSHKYSAHSSHVTNVSFTHNDSHLISTGGKDMSIIQWKLVEKLSLPQNETVADTTLTKAPVSSTESVIQSNTPTPPPSQPLNETAEEESRISSSPTLLENSLEQTVEPSEDHSEEESEEGSGDLGEPLYEEPCNEISKEQAKATLLEDQQDPSPSS

SEQ ID NO: 26545 - protein, 1969 aa, Homo sapiens
  Payload ID: 5228
  Gene Symbol: EML5
  Gene Name: echinoderm microtubule associated protein like 5
  Uniprot ID: Q05BV3
  ENSP ID: ENSP00000370039
MAARSAPSCHLRLEWVYGYRGHQCRNNLYYTAAKEIVYFVAGVGVVYSPREHRQKFYRGHSDDIISLALHPERVLVATGQVGKEPYICIWDSYTVQTISVLKDVHTHGIACLAFDLDGQRLVSVGLDSKNAVCVWDWKRGKMLSMAPGHTDRIFDISWDLYQPNKLVSCGVKHIKFWSLCGNALTPKRGVFGKTGDLQTILCLACARDELTYSGALNGDIYVWKGINLIRTIQGAHAAGIFSMNACEEGFATGGRDGCIRLWDLTFKPITVIDLRETDQGYKGLSVRSVCWRGDHILVGTQDSEIFEIVVQERNKPFLIMQGHCEGELWALAVHPTKPLAVTGSDDRSVRIWSLVDHALIARCNMEEPIRCAAVNADGIHLALGMKDGSFTVLRVRDMTEVVHIKDRKEAIHELKYSPDGTYLAVGCNDSSVDIYGVAQRYKKVGECLGSLSFITHLDWSSDSRYLQTNDGNGKRLFYRMPGGKEVTSTEEIKGVHWASWTCVSGLEVNGIWPKYSDINDINSVDGNYIGQVLVTADDYGIIKLFRYPCLRKGAKFRKYIGHSAHVTNVRWSHDYQWVISIGGADHSVFQWKFIPERKLKDAVHIAPQESLADSHSDESDSDLSDVPELDSEIEQETQLTYRRQVYKEDLPQLKEQCKEKQKSATSKRRERAPGNSIRLHFVHGYRGYDCRSNLFYTQIGEIVYHVAAVGVIYNRQQNTQRFYLGHDDDILCLTIHPLKDYVATGQVGRDPSIHIWDTETIKPLSILKGHHQYGVSAVDFSADGKRLASVGIDDSHTVVLWDWKKGEKLSIARGSKDKIFVVKMNPYVPDKLITAGIKHMKFWRKAGGGLIGRKGYIGTLGKNDTMMCAVYGWTEEMAFSGTSTGDVCIWRDIFLVKTVKAHDGPVFSMHALEKGFVTGGKDGIVALWDDSFERCLKTYAIKRAALAPGSKGLLLEDNPSIRAISLGHGHILVGTKNGEILEVDKSGPITLLVQGHMEGEVWGLATHPYLPICATVSDDKTLRIWDLSPSHCMLAVRKLKKGGRCCCFSPDGKALAVGLNDGSFLMANADTLEDLVSFHHRKDMISDIRFSPGSGKYLAVASHDSFIDIYNVMSSKRVGICKGATSYITHIDWDIRGKLLQVNTGAKEQLFFEAPRGKKQTIPSVEVEKIAWASWTSVLGLCCEGIWPVIGEVTDVTASCLTSDKMVLATGDDLGFVKLFRYPTKGKFGKFKRYVAHSTHVTNVRWTYDDSMLVTLGGTDMSLMVWTNEMEGYREKRPCDSEESDIDSEEDGGYDSDVTRENEISYTIRALSTNIRPMLGIKPHLQQKEPSIDERPPVSRAPPQPEKLQTNNVGKKKRPIEDLVLELIFGYRGRDCRNNVHYLNDGDDIIYHTASVGILHNVATGSQSFYQEHNDDILCLTVNQHPKFINIVATGQVGDSADMSATAPSIHIWDAMNKQTLSILRCYHSKGVCSVSFSATGKLLLSVGLDPEHTITIWRWQEGAKIASRAGHNQRIFVAEFRPDSDTQFVSVGVKHVKFWTLAGRALLSKKGLLSTLEDARMQTMLAIAFGANNLTFTGTISGDVCVWKDHILCRIVARAHNGPVFAMYTTLRDGLIVTGGKERPSKEGGAVKLWDQELRRCRAFRLETGQATDCVRSVCRGKGKILVGTRNAEIIEVGEKNAACNILVNGHVDGPIWGLATHPSRDFFLSAAEDGTVRLWDIADKKMLNKVNLGHAARTVCYSPEGDMVAIGMKNGEFIILLVSSLKIWGKKRDRRCAIHDIRFSPDSRYLAVGSSENSVDFYDLTLGPTLNRISYCKDIPSFVIQMDFSADSSYLQVSSGCYKRHVYEVPSGKHLMDHAAIDRITWATWTSILGDEVLGIWSRHAEKADVNCACVSHSGISLVTGDDFGMVKLFDFPCPEKFAKHKRFLGHSPHVTNIRFTSGDRHVVSAGGDDCSLFVWKCVHTPH

SEQ ID NO: 26546 - protein, 60 aa, Homo sapiens
  Payload ID: 5228
  Gene Symbol: EML5
  Gene Name: echinoderm microtubule associated protein like 5
  ENSP ID: ENSP00000450965
ISDIRFSPGSGKYLAVASHDSFIDIYNVMSSKRVGICKGATSYITHIDWDIRAFTGQHWC

SEQ ID NO: 26547 - protein, 1977 aa, Homo sapiens
  Payload ID: 5228
  Gene Symbol: EML5
  Gene Name: echinoderm microtubule associated protein like 5
  Uniprot ID: Q05BV3
  ENSP ID: ENSP00000451998
MAARSAPSCHLRLEWVYGYRGHQCRNNLYYTAAKEIVYFVAGVGVVYSPREHRQKFYRGHSDDIISLALHPERVLVATGQVGKEPYICIWDSYTVQTISVLKDVHTHGIACLAFDLDGQRLVSVGLDSKNAVCVWDWKRGKMLSMAPGHTDRIFDISWDLYQPNKLVSCGVKHIKFWSLCGNALTPKRGVFGKTGDLQTILCLACARDELTYSGALNGDIYVWKGINLIRTIQGAHAAGIFSMNACEEGFATGGRDGCIRLWDLTFKPITVIDLRETDQGYKGLSVRSVCWRGDHILVGTQDSEIFEIVVQERNKPFLIMQGHCEGELWALAVHPTKPLAVTGSDDRSVRIWSLVDHALIARCNMEEPIRCAAVNADGIHLALGMKDGSFTVLRVRDMTEVVHIKDRKEAIHELKYSPDGTYLAVGCNDSSVDIYGVAQRYKKVGECLGSLSFITHLDWSSDSRYLQTNDGNGKRLFYRMPGGKEVTSTEEIKGVHWASWTCVSGLEVNGIWPKYSDINDINSVDGNYIGQVLVTADDYGIIKLFRYPCLRKGAKFRKYIGHSAHVTNVRWSHDYQWVISIGGADHSVFQWKFIPERKLKDAVHIAPQESLADSHSDESDSDLSDVPELDSEIEQETQLTYRRQVYKEDLPQLKEQCKEKQKSATSKRRERAPGNSIRLHFVHGYRGYDCRSNLFYTQIGEIVYHVAAVGVIYNRQQNTQRFYLGHDDDILCLTIHPLKDYVATGQVGRDPSIHIWDTETIKPLSILKGHHQYGVSAVDFSADGKRLASVGIDDSHTVVLWDWKKGEKLSIARGSKDKIFVVKMNPYVPDKLITAGIKHMKFWRKAGGGLIGRKGYIGTLGKNDTMMCAVYGWTEEMAFSGTSTGDVCIWRDIFLVKTVKAHDGPVFSMHALEKGFVTGGKDGIVALWDDSFERCLKTYAIKRAALAPGSKGLLLEDNPSIRAISLGHGHILVGTKNGEILEVDKSGPITLLVQGHMEGEVWGLATHPYLPICATVSDDKTLRIWDLSPSHCMLAVRKLKKGGRCCCFSPDGKALAVGLNDGSFLMANADTLEDLVSFHHRKDMISDIRFSPGSGKYLAVASHDSFIDIYNVMSSKRVGICKGATSYITHIDWDIRGKLLQVNTGAKEQLFFEAPRGKKQTIPSVEVEKIAWASWTSVLGLCCEGIWPVIGEVTDVTASCLTSDKMVLATGDDLGFVKLFRYPTKGKFGKFKRYVAHSTHVTNVRWTYDDSMLVTLGGTDMSLMVWTNEMEGYREKRPCDSEESDIDSEEDGGYDSDVTRENEISYTIRALSTNIRPMLGIKPHLQQKEPSIDERQGVVRGSRPPVSRAPPQPEKLQTNNVGKKKRPIEDLVLELIFGYRGRDCRNNVHYLNDGDDIIYHTASVGILHNVATGSQSFYQEHNDDILCLTVNQHPKFINIVATGQVGDSADMSATAPSIHIWDAMNKQTLSILRCYHSKGVCSVSFSATGKLLLSVGLDPEHTITIWRWQEGAKIASRAGHNQRIFVAEFRPDSDTQFVSVGVKHVKFWTLAGRALLSKKGLLSTLEDARMQTMLAIAFGANNLTFTGTISGDVCVWKDHILCRIVARAHNGPVFAMYTTLRDGLIVTGGKERPSKEGGAVKLWDQELRRCRAFRLETGQATDCVRSVCRGKGKILVGTRNAEIIEVGEKNAACNILVNGHVDGPIWGLATHPSRDFFLSAAEDGTVRLWDIADKKMLNKVNLGHAARTVCYSPEGDMVAIGMKNGEFIILLVSSLKIWGKKRDRRCAIHDIRFSPDSRYLAVGSSENSVDFYDLTLGPTLNRISYCKDIPSFVIQMDFSADSSYLQVSSGCYKRHVYEVPSGKHLMDHAAIDRITWATWTSILGDEVLGIWSRHAEKADVNCACVSHSGISLVTGDDFGMVKLFDFPCPEKFAKHKRFLGHSPHVTNIRFTSGDRHVVSAGGDDCSLFVWKCVHTPH

SEQ ID NO: 26548 - protein, 256 aa, Homo sapiens
  Payload ID: 5228
  Gene Symbol: EML5
  Gene Name: echinoderm microtubule associated protein like 5
  ENSP ID: ENSP00000452030
GLLSTLEDARMQTMLAIAFGANNLTFTGTISGDVCVWKDHILCRIVARAHNGPVFAMYTTLRDGLIVTGGKERPSKEGGAVKLWDQELRRCRAFRLETGQATDCVRSVCRGKGKILVGTRNAEIIEVGEKNAACNILVNGHVDGPIWGLATHPSRDFFLSAAEDGTVRLWDIADKMLNKVNLGHAARTVCYSPEGDMVAIGMKNGEFIILLVSSLKIWGKKRDRRCAIHDIRISYCKDIPSFVIQMDFSADSSYLQ

SEQ ID NO: 26549 - protein, 205 aa, Homo sapiens
  Payload ID: 5228
  Gene Symbol: EML5
  Gene Name: echinoderm microtubule associated protein like 5
  ENSP ID: ENSP00000452360
  MOD_RES (1)..(1): Any amino acid
XDGTYLAVGCNDSSVDIYGVAQRYKKVGECLGSLSFITHLDWSSDSRYLQTNDGNGKRLFYRMPGGKEVTSTEEIKGVHWASWTCVSGLEVNGIWPKYSDINDINSVDGNYIGQVLVTADDYGIIKLFRYPCLRKGAKFRKYIGHSAHVTNVRWSHDYQWVISIGGADHSVFQWKFIPERKLKDAVHIAPQGYIHLYLHRHLNLM

SEQ ID NO: 26550 - protein, 1958 aa, Homo sapiens
  Payload ID: 5229
  Gene Symbol: EML6
  Gene Name: echinoderm microtubule associated protein like 6
  Uniprot ID: Q6ZMW3
  ENSP ID: ENSP00000348842
MADRTAPRCQLRLEWVYGYRGHQCRNNLYYTAGKEVVYFVAGVGVVYNTREHSQKFFLGHNDDIISLALHPDKTLVATGQVGKEPYICIWDSYNVQTVSLLKDVHTHGVACLAFDSDGQRLASVGLDAKNTVCIWDWRKGKLLASATGHSDRIFDISWDPYQPNRVVSCGVKHIKFWTLCGNALTAKRGIFGKTGDLQTILCLACAKEDITYSGALNGDIYVWKGLNLVRTIQGAHSAGIFSMYACEEGFATGGRDGCIRLWDTDFKPITKIDLRETEQGYKGLSIRSVCWKADRLLAGTQDSEIFEVIVRERDKPMLILQGHCEGELWALALHPKKPLAVTGSDDRSVRLWSLADHALIARCNMEEAVRSVAFSPDGSQLALGMKDGSFIVLRVRDMTEVVHIKDRKEVIHEMKFSPDGSYLAVGSNDGPVDVYAVAQRYKKIGECSKSLSFITHIDWSLDSKYLQTNDGAGERLFYRMPSGKPLTSKEEIKGIPWASWTCVKGPEVSGIWPKYTEVTDINSVDANYNSSVLVSGDDFGLVKLFKFPCLKRGAKFRKYVGHSAHVTNVRWSHDFQWVLSTGGADHSVFQWRFIPEGVSNGMLETAPQEGGADSYSEESDSDLSDVPELDSDIEQEAQINYDRQVYKEDLPQLKQQSKEKNHAVPFLKREKAPEDSLKLQFIHGYRGYDCRNNLFYTQAGEVVYHIAAVAVVYNRQQHSQRLYLGHDDDILSLTIHPVKDYVATGQVGRDAAIHVWDTQTLKCLSLLKGQHQRGVCALDFSADGKCLVSVGLDDFHSIVFWDWKKGEKIATTRGHKDKIFVVKCNPHHVDKLVTVGIKHIKFWQQAGGGFTSKRGTFGSVGKLETMMCVSYGRMEDLVFSGAATGDIFIWKDILLLKTVKAHDGPVFAMYALDKGFVTGGKDGIVELWDDMFERCLKTYAIKRSALSTSSKGLLLEDNPSIRAITLGHGHILVGTKNGEILEIDKSGPMTLLVQGHMEGEVWGLAAHPLLPICATVSDDKTLRIWELSAQHRMLAVRKLKKGGRCCAFSPDGKALAVGLNDGSFLVVNADTVEDMVSFHHRKEMISDIKFSKDTGKYLAVASHDNFVDIYNVLTSKRVGICKGASSYITHIDWDSRGKLLQVNSGAREQLFFEAPRGKRHIIRPSEIEKIEWDTWTCVLGPTCEGIWPAHSDITDVNAASLTKDCSLLATGDDFGFVKLFSYPVKGQHARFKKYVGHSAHVTNVRWLHNDSVLLTVGGADTALMIWTREFVGTQESKLVDSEESDTDVEEDGGYDSDVAREKAIDYTTKIYAVSIREMEGTKPHQQLKEVSVEERPPVSRAAPQPEKLQKNNITKKKKLVEELALDHVFGYRGFDCRNNLHYLNDGADIIFHTAAAGIVQNLSTGSQSFYLEHTDDILCLTVNQHPKYRNVVATSQIGTTPSIHIWDAMTKHTLSMLRCFHSKGVNYINFSATGKLLVSVGVDPEHTITVWRWQEGAKVASRGGHLERIFVVEFRPDSDTQFVSVGVKHMKFWTLAGSALLYKKGVIGSLGAAKMQTMLSVAFGANNLTFTGAINGDVYVWKDHFLIRLVAKAHTGPVFTMYTTLRDGLIVTGGKERPTKEGGAVKLWDQEMKRCRAFQLETGQLVECVRSVCRGKGKILVGTKDGEIIEVGEKNAASNILIDGHMEGEIWGLATHPSKDLFISASNDGTARIWDLADKKLLNKVSLGHAARCAAYSPDGEMVAIGMKNGEFVILLVNSLKVWGKKRDRKSAIQDIRISPDNRFLAVGSSEHTVDFYDLTQGTNLNRIGYCKDIPSFVIQMDFSADGKYIQVSTGAYKRQVHEVPLGKQVTEAVVIEKITWASWTSVLGDEVIGIWPRNADKADVNCACVTHAGLNIVTGDDFGLVKLFDFPCTEKFAKHKRYFGHSAHVTNIRFSYDDKYVVSTGGDDCSVFVWRCL

SEQ ID NO: 26551 - protein, 259 aa, Homo sapiens
  Payload ID: 5230
  Gene Symbol: EVI2A
  Gene Name: ecotropic viral integration site 2A
  Uniprot ID: P22794
  ENSP ID: ENSP00000247270
MLLRSWFGNKDFQALPILARLPSMPTDMEHTGHYLHLAFLMTTVFSLSPGTKANYTRLWANSTSSWDSVIQNKTGRNQNENINTNPITPEVDYKGNSTNMPETSHIVALTSKSEQELYIPSVVSNSPSTVQSIENTSKSHGEIFKKDVCAENNNNMAMLICLIIIAVLFLICTFLFLSTVVLANKVSSLRRSKQVGKRQPRSNGDFLASGLWPAESDTWKRTKQLTGPNLVMQSTGVLTATRERKDEEGTEKLTNKQIG

SEQ ID NO: 26552 - protein, 236 aa, Homo sapiens
  Payload ID: 5230
  Gene Symbol: EVI2A
  Gene Name: ecotropic viral integration site 2A
  Uniprot ID: P22794
  ENSP ID: ENSP00000418064
MPTDMEHTGHYLHLAFLMTTVFSLSPGTKANYTRLWANSTSSWDSVIQNKTGRNQNENINTNPITPEVDYKGNSTNMPETSHIVALTSKSEQELYIPSVVSNSPSTVQSIENTSKSHGEIFKKDVCAENNNNMAMLICLIIIAVLFLICTFLFLSTVVLANKVSSLRRSKQVGKRQPRSNGDFLASGLWPAESDTWKRTKQLTGPNLVMQSTGVLTATRERKDEEGTEKLTNKQIG

SEQ ID NO: 26553 - protein, 236 aa, Homo sapiens; identical to SEQ ID NO: 26552
  Payload ID: 5230
  Gene Symbol: EVI2A
  Gene Name: ecotropic viral integration site 2A
  Uniprot ID: P22794
  ENSP ID: ENSP00000420557

SEQ ID NO: 26554 - protein, 448 aa, Homo sapiens
  Payload ID: 5231
  Gene Symbol: EVI2B
  Gene Name: ecotropic viral integration site 2B
  Uniprot ID: P34910
  ENSP ID: ENSP00000333779
MDPKYFILILFCGHLNNTFFSKTETITTEKQSQPTLFTSSMSQVLANSQNTTGNPLGQPTQFSDTFSGQSISPAKVTAGQPTPAVYTSSEKPEAHTSAGQPLAYNTKQPTPIANTSSQQAVFTSARQLPSARTSTTQPPKSFVYTFTQQSSSVQIPSRKQITVHNPSTQPTSTVKNSPRSTPGFILDTTSNKQTPQKNNYNSIAAILIGVLLTSMLVAIIIIVLWKCLRKPVLNDQNWAGRSPFADGETPDICMDNIRENEISTKRTSIISLTPWKPSKSTLLADDLEIKLFESSENIEDSNNPKTEKIKDQVNGTSEDSADGSTVGTAVSSSDDADLPPPPPLLDLEGQESNQSDKPTMTIVSPLPNDSTSLPPSLDCLNQDCGDHKSEIIQSFPPLDSLNLPLPPVDFMKNQEDSNLEIQCQEFSIPPNSDQDLNESLPPPPAELL

SEQ ID NO: 26555 - protein, 448 aa, Homo sapiens; identical to SEQ ID NO: 26554
  Payload ID: 5231
  Gene Symbol: EVI2B
  Gene Name: ecotropic viral integration site 2B
  Uniprot ID: P34910
  ENSP ID: ENSP00000462682

SEQ ID NO: 26556 - protein, 810 aa, Homo sapiens
  Payload ID: 5232
  Gene Symbol: EVI5
  Gene Name: ecotropic viral integration site 5
  Uniprot ID: O60447
  ENSP ID: ENSP00000359356
MVTNKMTAAFRNPSGKQVATDKVAEKLSSTLSWVKNTVSHTVSQMASQVASPSTSLHTTSSSTTLSTPALSPSSPSQLSPDDLELLAKLEEQNRLLETDSKSLRSVNGSRRNSGSSLVSSSSASSNLSHLEEDSWILWGRIVNEWEDVRKKKEKQVKELVHKGIPHHFRAIVWQLLCSAQSMPIKDQYSELLKMTSPCEKLIRRDIARTYPEHNFFKEKDSLGQEVLFNVMKAYSLVDREVGYCQGSAFIVGLLLMQMPEEEAFCVFVKLMQDYRLRELFKPSMAELGLCMYQFECMIQEHLPELFVHFQSQSFHTSMYASSWFLTIFLTTFPLPIATRIFDIFMSEGLEIVFRVGLALLQMNQAELMQLDMEGMLQHFQKVIPHQFDGVPDKLIQAAYQVKYNSKKMKKLEKEYTTIKTKEMEEQVEIKRLRTENRLLKQRIETLEKHKCSSNYNEDFVLQLEKELVQARLSEAESQCALKEMQDKVLDIEKRNNSLPDENNIARLQEELIAVKLREAEAIMGLKELRQQVKDLEEHWQRHLARTTGRWKDPPKKNAMNELQDELMTIRLREAETQAEIREIKQRMMEMETQNQINSNHLRRAEQEVISLQEKVQYLSAQNKGLLTQLSEAKRKQAEIECKNKEEVMAVRLREADSIAAVAELRQHIAELEIQKEEGKLQGQLNKSDSNQYIGELKDQIAELNHELRCLKGQRGFSGQPPFDGIHIVNHLIGDDESFHSSDEDFIDNSLQETGVGFPLHGKSGSMSLDPAVADGSESETEDSVLETRESNQVVQKERPPRRRESYSTTV

SEQ ID NO: 26557 - protein, 821 aa, Homo sapiens
  Payload ID: 5232
  Gene Symbol: EVI5
  Gene Name: ecotropic viral integration site 5
  Uniprot ID: O60447
  ENSP ID: ENSP00000440826
MVTNKMTAAFRNPSGKQVATDKVAEKLSSTLSWVKNTVSHTVSQMASQVASPSTSLHTTSSSTTLSTPALSPSSPSQLSPDDLELLAKLEEQNRLLETDSKSLRSVNGSRRNSGSSLVSSSSASSNLSHLEEDSWILWGRIVNEWEDVRKKKEKQVKELVHKGIPHHFRAIVWQLLCSAQSMPIKDQYSELLKMTSPCEKLIRRDIARTYPEHNFFKEKDSLGQEVLFNVMKAYSLVDREVGYCQGSAFIVGLLLMQMPEEEAFCVFVKLMQDYRLRELFKPSMAELGLCMYQFECMIQEHLPELFVHFQSQSFHTSMYASSWFLTIFLTTFPLPIATRIFDIFMSEGLEIVFRVGLALLQMNQAELMQLDMEGMLQHFQKVIPHQFDGVPDKLIQAAYQVKYNSKKMKKLEKEYTTIKTKEMEEQVEIKRLRTENRLLKQRIETLEKESASLADRLIQHKCSSNYNEDFVLQLEKELVQARLSEAESQCALKEMQDKVLDIEKRNNSLPDENNIARLQEELIAVKLREAEAIMGLKELRQQVKDLEEHWQRHLARTTGRWKDPPKKNAMNELQDELMTIRLREAETQAEIREIKQRMMEMETQNQINSNHLRRAEQEVISLQEKVQYLSAQNKGLLTQLSEAKRKQAEIECKNKEEVMAVRLREADSIAAVAELRQHIAELEIQKEEGKLQGQLNKSDSNQYIGELKDQIAELNHELRCLKGQRGFSGQPPFDGIHIVNHLIGDDESFHSSDEDFIDNSLQETGVGFPLHGKSGSMSLDPAVADGSESETEDSVLETRESNQVVQKERPPRRRESYSTTV

SEQ ID NO: 26558 - protein, 794 aa, Homo sapiens
  Payload ID: 5233
  Gene Symbol: EVI5L
  Gene Name: ecotropic viral integration site 5-like
  Uniprot ID: Q96CN4
  ENSP ID: ENSP00000270530
MASPTLSPDSSSQEALSAPTCSPTSDSENLSPDELELLAKLEEQNRLLEADSKSMRSMNGSRRNSGSSLVSSSSASSNLSHLEEDTWILWGRIANEWEEWRRRKEKLLKELIRKGIPHHFRAIVWQLLCSATDMPVKNQYSELLKMSSPCEKLIRRDIARTYPEHEFFKGQDSLGQEVLFNVMKAYSLVDREVGYCQGSAFIVGLLLMQMPEEEAFCVFVRLMQEYRLRELFKPSMAELGLCIYQFEYMLQEQLPDLNTHFRSQSFHTSMYASSWFLTLFLTTFPLPVATRVFDIFMYEGLEIVFRVGLALLQVNQAELMQLDMEGMSQYFQRVIPHQFDSCPDKLVLKAYQVKYNPKKMKRLEKEYAAMKSKEMEEQIEIKRLRTENRLLKQRIETLEKGQVTRAQEAEENYVIKRELAVVRQQCSSAAEDLQKAQSTIRQLQEQQENPRLTEDFVSHLETELEQSRLRETETLGALREMQDKVLDMEKRNSSLPDENNVAQLQEELKALKVREGQAVASTRELKLQLQELSDTWQAHLARGGRWKESPRKLVVGELQDELMSVRLREAQALAEGRELRQRVVELETQDHIHRNLLNRVEAERAALQEKLQYLAAQNKGLQTQLSESRRKQAEAECKSKEEVMAVRLREADSMAAVAEMRQRIAELEIQREEGRIQGQLNHSDSSQYIRELKDQIEELKAEVRLLKGPPPFEDPLAFDGLSLARHLDEDSLPSSDEELLGVGVGAALQDALYPLSPRDARFFRRLERPAKDSEGSSDSDADELAAPYSQGLDN

SEQ ID NO: 26559 - protein, 805 aa, Homo sapiens
  Payload ID: 5233
  Gene Symbol: EVI5L
  Gene Name: ecotropic viral integration site 5-like
  Uniprot ID: Q96CN4
  ENSP ID: ENSP00000445905
MASPTLSPDSSSQEALSAPTCSPTSDSENLSPDELELLAKLEEQNRLLEADSKSMRSMNGSRRNSGSSLVSSSSASSNLSHLEEDTWILWGRIANEWEEWRRRKEKLLKELIRKGIPHHFRAIVWQLLCSATDMPVKNQYSELLKMSSPCEKLIRRDIARTYPEHEFFKGQDSLGQEVLFNVMKAYSLVDREVGYCQGSAFIVGLLLMQMPEEEAFCVFVRLMQEYRLRELFKPSMAELGLCIYQFEYMLQEQLPDLNTHFRSQSFHTSMYASSWFLTLFLTTFPLPVATRVFDIFMYEGLEIVFRVGLALLQVNQAELMQLDMEGMSQYFQRVIPHQFDSCPDKLVLKAYQVKYNPKKMKRLEKEYAAMKSKEMEEQIEIKRLRTENRLLKQRIETLEKESAALADRLIQGQVTRAQEAEENYVIKRELAVVRQQCSSAAEDLQKAQSTIRQLQEQQENPRLTEDFVSHLETELEQSRLRETETLGALREMQDKVLDMEKRNSSLPDENNVAQLQEELKALKVREGQAVASTRELKLQLQELSDTWQAHLARGGRWKESPRKLVVGELQDELMSVRLREAQALAEGRELRQRVVELETQDHIHRNLLNRVEAERAALQEKLQYLAAQNKGLQTQLSESRRKQAEAECKSKEEVMAVRLREADSMAAVAEMRQRIAELEIQREEGRIQGQLNHSDSSQYIRELKDQIEELKAEVRLLKGPPPFEDPLAFDGLSLARHLDEDSLPSSDEELLGVGVGAALQDALYPLSPRDARFFRRLERPAKDSEGSSDSDADELAAPYSQGLDN

SEQ ID NO: 26560 - protein, 139 aa, Homo sapiens
  Payload ID: 5233
  Gene Symbol: EVI5L
  Gene Name: ecotropic viral integration site 5-like
  ENSP ID: ENSP00000470145
FVSHLETELEQSRLRETETLGALREMQDKVLDMEKRNSSLPDENNVAQLQEELKALKVREGQAVASTRELKLQLQELSDTWQDQIEELKAEVRLLKGPPPFEDPLAFDGLSLARHLDEDSLPSSDEELLGVGVGAALQD

SEQ ID NO: 26561 - protein, 177 aa, Homo sapiens
  Payload ID: 5233
  Gene Symbol: EVI5L
  Gene Name: ecotropic viral integration site 5-like
  ENSP ID: ENSP00000472181
VFVRLMQEYRLRELFKPSMAELGLCIYQFEYMLQEQLPDLNTHFRSQSFHTSMYASSWFLTLFLTTFPLPVATRVFDIFMYEGLEIVFRVGLALLQVNQAELMQLDMEGMSQYFQRVIPHQFDSCPDKLVLKAYQVKYNPKKMKRLEKEYAAMKSKEMEEQIEIKASCERLPRLTPR

SEQ ID NO: 26562 - protein, 296 aa, Homo sapiens
  Payload ID: 5234
  Gene Symbol: ECSIT
  Gene Name: ECSIT signalling integrator
  Uniprot ID: Q9BQ95
  ENSP ID: ENSP00000252440
MSWVQATLLARGLCRAWGGTCGAALTGTSISQVPRRLPRGLHCSAAAHSSEQSLVPSPPEPRQRPTKALVPFEDLFGQAPGGERDKASFLQTVQKFAEHSVRKRGHIDFIYLALRKMREYGVERDLAVYNQLLNIFPKEVFRPRNIIQRIFVHYPRQQECGIAVLEQMENHGVMPNKETEFLLIQIFGRKSYPMLKLVRLKLWFPRFMNVNPFPVPRDLPQDPVELAMFGLRHMEPDLSARVTIYQVPLPKDSTGAADPPQPHIVGSGRDAGGVEPLLPDAAGPGVCEEWLGQLRV

SEQ ID NO: 26563 - protein, 431 aa, Homo sapiens
  Payload ID: 5234
  Gene Symbol: ECSIT
  Gene Name: ECSIT signalling integrator
  Uniprot ID: Q9BQ95
  ENSP ID: ENSP00000270517
MSWVQATLLARGLCRAWGGTCGAALTGTSISQVPRRLPRGLHCSAAAHSSEQSLVPSPPEPRQRPTKALVPFEDLFGQAPGGERDKASFLQTVQKFAEHSVRKRGHIDFIYLALRKMREYGVERDLAVYNQLLNIFPKEVFRPRNIIQRIFVHYPRQQECGIAVLEQMENHGVMPNKETEFLLIQIFGRKSYPMLKLVRLKLWFPRFMNVNPFPVPRDLPQDPVELAMFGLRHMEPDLSARVTIYQVPLPKDSTGAADPPQPHIVGIQSPDQQAALARHNPARPVFVEGPFSLWLRNKCVYYHILRADLLPPEEREVEETPEEWNLYYPMQLDLEYVRSGWDNYEFDINEVEEGPVFAMCMAGAHDQATMAKWIQGLQETNPTLAQIPVVFRLAGSTRELQTSSAGLEEPPLPEDHQEEDDNLQRQQQGQS

SEQ ID NO: 26564 - protein, 217 aa, Homo sapiens
  Payload ID: 5234
  Gene Symbol: ECSIT
  Gene Name: ECSIT signalling integrator
  Uniprot ID: Q9BQ95
  ENSP ID: ENSP00000412712
MSWVQATLLARGLCRAWGGTCGAALTGTSISQVPLPKDSTGAADPPQPHIVGIQSPDQQAALARHNPARPVFVEGPFSLWLRNKCVYYHILRADLLPPEEREVEETPEEWNLYYPMQLDLEYVRSGWDNYEFDINEVEEGPVFAMCMAGAHDQATMAKWIQGLQETNPTLAQIPVVFRLAGSTRELQTSSAGLEEPPLPEDHQEEDDNLQRQQQGQS

SEQ ID NO: 26565 - protein, 223 aa, Homo sapiens
  Payload ID: 5234
  Gene Symbol: ECSIT
  Gene Name: ECSIT signalling integrator
  ENSP ID: ENSP00000462957
MREYGVERDLAVYNQLLNIFPKEVFRPRNIIQRIFVHYPRQQECGIAVLEQMENHGVMPNKETEFLLIQIFGRKSYPMLKLVRLKLWFPRFMNVNPFPVPRDLPQDPVELAMFGLRHMEPDLSARVTIYQVPLPKDSTGAADPPQPHIVGIQSPDQQAALARHNPARPVFVEGPFSLWLRNKCVYYHILRADLLPPEEREVEETPEEWNLYYPMQLDLEYVRS

SEQ ID NO: 26566 - protein, 59 aa, Homo sapiens
  Payload ID: 5234
  Gene Symbol: ECSIT
  Gene Name: ECSIT signalling integrator
  ENSP ID: ENSP00000464783
  MOD_RES (1)..(1): Any amino acid
XMREYGVERDLAVYNQLLNIFPKEVFRPRNIIQRIFVHYPRQQECGIAVLEQMENHAQV

SEQ ID NO: 26567 - protein, 71 aa, Homo sapiens
  Payload ID: 5234
  Gene Symbol: ECSIT
  Gene Name: ECSIT signalling integrator
  ENSP ID: ENSP00000465162
  MOD_RES (1)..(1): Any amino acid
XVNPFPVPRDLPQDPVELAMFGLRHMEPDLSARVTIYQAPCAAPDAARLPPQRFLCPKTQQVQQIPPSPTS

SEQ ID NO: 26568 - protein, 102 aa, Homo sapiens
  Payload ID: 5234
  Gene Symbol: ECSIT
  Gene Name: ECSIT signalling integrator
  ENSP ID: ENSP00000465181
MREYGVERDLAVYNQLLNIFPKEVFRPRNIIQRIFVHYPRQQECGIAVLEQMENHGVMPNKETEFLLIQIFGRKSYPMLKLVRLKLWFPRFMNVNPFPVPRD

SEQ ID NO: 26569 - protein, 24 aa, Homo sapiens
  Payload ID: 5234
  Gene Symbol: ECSIT
  Gene Name: ECSIT signalling integrator
  ENSP ID: ENSP00000466415
MSWVQATLLARGLCRAWGGTCGAA

SEQ ID NO: 26570 - protein, 296 aa, Homo sapiens
  Payload ID: 5234
  Gene Symbol: ECSIT
  Gene Name: ECSIT signalling integrator
  Uniprot ID: Q9BQ95
  ENSP ID: ENSP00000466559
MSWVQATLLARGLCRAWGGTCGAALTGTSISQVPRRLPRGLHCSAAAHSSEQSLVPSPPEPRQRPTKALVPFEDLFGQAPGGERDKASFLQTVQKFAEHSVRKRGHIDFIYLALRKMREYGVERDLAVYNQLLNIFPKEVFRPRNIIQRIFVHYPRQQECGIAVLEQMENHGVMPNKETEFLLIQIFGRKSYPMLKLVRLKLWFPRFMNVNPFPVPRDLPQDPVELAMFGLRHMEPDLSARVTIYQVPLPKDSTGAADPPQPHIVELTCCPRRRGKWKRRRRSGTSTTRCSWTWSM

SEQ ID NO: 26571 - protein, 267 aa, Homo sapiens
  Payload ID: 5234
  Gene Symbol: ECSIT
  Gene Name: ECSIT signalling integrator
  ENSP ID: ENSP00000466762
MREYGVERDLAVYNQLLNIFPKEVFRPRNIIQRIFVHYPRQQECGIAVLEQMENHGVMPNKETEFLLIQIFGRKSYPMLKLVRLKLWFPRFMNVNPFPVPRDLPQDPVELAMFGLRHMEPDLSARVTIYQVPLPKDSTGAADPPQPHIVGKSESMGAAKSLTLPRPCQVLAGPRLGSLGLWAESLAGHRACMSPHQESRVPISRPPWPATIQPGLSLLRAPSPCGSATSVCITTSSELTCCPRRRGKWKRRRRSGTSTTRCSWTWSM

SEQ ID NO: 26572 - protein, 227 aa, Homo sapiens
  Payload ID: 5234
  Gene Symbol: ECSIT
  Gene Name: ECSIT signalling integrator
  ENSP ID: ENSP00000467436
MSWVQATLLARGLCRAWGGTCGAALTGTSISQVPRRLPRGLHCSAAAHSSEQSLVPSPPEPRQRPTKALVPFEDLFGQAPGGERDKASFLQTVQKFAEHSVRKRGHIDFIYLALRKMREYGVERDLAVYNQLLNIFPKEVFRPRNIIQRIFVHYPRQQECGIAVLEQMENHGVMPNKETEFLLIQIFGRKSYPMLKLVRLKLWFPRFMNVNPFPVPRDLPQDPVELA

SEQ ID NO: 26573 - protein, 82 aa, Homo sapiens
  Payload ID: 5234
  Gene Symbol: ECSIT
  Gene Name: ECSIT signalling integrator
  ENSP ID: ENSP00000468783
MSWVQATLLARGLCRAWGGTCGAALTGTSISQVPLPKDSTGAADPPQPHIVGSGRDAGGVEPLLPDAAGPGVCEEWLGQLRV

SEQ ID NO: 26574 - protein, 589 aa, Homo sapiens
  Payload ID: 5235
  Gene Symbol: ENC1
  Gene Name: ectodermal-neural cortex 1 (with BTB domain)
  Uniprot ID: O14682
  ENSP ID: ENSP00000306356
MSVSVHENRKSRASSGSINIYLFHKSSYADSVLTHLNLLRQQRLFTDVLLHAGNRTFPCHRAVLAACSRYFEAMFSGGLKESQDSEVNFDNSIHPEVLELLLDYAYSSRVIINEENAESLLEAGDMLEFQDIRDACAEFLEKNLHPTNCLGMLLLSDAHQCTKLYELSWRMCLSNFQTIRKNEDFLQLPQDMVVQLLSSEELETEDERLVYESAINWISYDLKKRYCYLPELLQTVRLALLPAIYLMENVAMEELITKQRKSKEIVEEAIRCKLKILQNDGVVTSLCARPRKTGHALFLLGGQTFMCDKLYLVDQKAKEIIPKADIPSPRKEFSACAIGCKVYITGGRGSENGVSKDVWVYDTLHEEWSKAAPMLVARFGHGSAELKHCLYVVGGHTAATGCLPASPSVSLKQVEHYDPTINKWTMVAPLREGVSNAAVVSAKLKLFAFGGTSVSHDKLPKVQCYDQCENRWTVPATCPQPWRYTAAAVLGNQIFIMGGDTEFSACSAYKFNSETYQWTKVGDVTAKRMSCHAVASGNKLYVVGGYFGIQRCKTLDCYDPTLDVWNSITTVPYSLIPTAFVSTWKHLPS

SEQ ID NO: 26575 - protein, 49 aa, Homo sapiens
  Payload ID: 5235
  Gene Symbol: ENC1
  Gene Name: ectodermal-neural cortex 1 (with BTB domain)
  ENSP ID: ENSP00000422943
MSVSVHENRKSRASSGSINIYLFHKSSYADSVLTHLNLLRQQRLFTDVL

SEQ ID NO: 26576 - protein, 516 aa, Homo sapiens
  Payload ID: 5235
  Gene Symbol: ENC1
  Gene Name: ectodermal-neural cortex 1 (with BTB domain)
  Uniprot ID: O14682
  ENSP ID: ENSP00000423804
MFSGGLKESQDSEVNFDNSIHPEVLELLLDYAYSSRVIINEENAESLLEAGDMLEFQDIRDACAEFLEKNLHPTNCLGMLLLSDAHQCTKLYELSWRMCLSNFQTIRKNEDFLQLPQDMVVQLLSSEELETEDERLVYESAINWISYDLKKRYCYLPELLQTVRLALLPAIYLMENVAMEELITKQRKSKEIVEEAIRCKLKILQNDGVVTSLCARPRKTGHALFLLGGQTFMCDKLYLVDQKAKEIIPKADIPSPRKEFSACAIGCKVYITGGRGSENGVSKDVWVYDTLHEEWSKAAPMLVARFGHGSAELKHCLYVVGGHTAATGCLPASPSVSLKQVEHYDPTINKWTMVAPLREGVSNAAVVSAKLKLFAFGGTSVSHDKLPKVQCYDQCENRWTVPATCPQPWRYTAAAVLGNQIFIMGGDTEFSACSAYKFNSETYQWTKVGDVTAKRMSCHAVASGNKLYVVGGYFGIQRCKTLDCYDPTLDVWNSITTVPYSLIPTAFVSTWKHLPS

SEQ ID NO: 26577 - protein, 4 aa, Homo sapiens
  Payload ID: 5235
  Gene Symbol: ENC1
  Gene Name: ectodermal-neural cortex 1 (with BTB domain)
  ENSP ID: ENSP00000426889
MSVS

SEQ ID NO: 26578 - protein, 589 aa, Homo sapiens; identical to SEQ ID NO: 26574
  Payload ID: 5235
  Gene Symbol: ENC1
  Gene Name: ectodermal-neural cortex 1 (with BTB domain)
  Uniprot ID: O14682
  ENSP ID: ENSP00000446289

SEQ ID NO: 26579 - protein, 589 aa, Homo sapiens; identical to SEQ ID NO: 26574
  Payload ID: 5235
  Gene Symbol: ENC1
  Gene Name: ectodermal-neural cortex 1 (with BTB domain)
  Uniprot ID: O14682
  ENSP ID: ENSP00000479101

SEQ ID NO: 26580 - protein, 147 aa, Homo sapiens
  Payload ID: 5236
  Gene Symbol: EDA
  Gene Name: ectodysplasin A
  Uniprot ID: Q92838
  ENSP ID: ENSP00000340611
MGYPEVERRELLPAAAPRERGSQGCGCGGAPARAGEGNSCLLFLGFFGLSLALHLLTLCCYLELRSELRRERGAESRLGGSGTPGTSGTLSSLGGLDPDSPITSHLGQPSPKQQPLEPGEAALHSDSQDGHQVSHLVGAAAAPSPRG

SEQ ID NO: 26581 - protein, 391 aa, Homo sapiens
  Payload ID: 5236
  Gene Symbol: EDA
  Gene Name: ectodysplasin A
  Uniprot ID: Q92838
  ENSP ID: ENSP00000363680
MGYPEVERRELLPAAAPRERGSQGCGCGGAPARAGEGNSCLLFLGFFGLSLALHLLTLCCYLELRSELRRERGAESRLGGSGTPGTSGTLSSLGGLDPDSPITSHLGQPSPKQQPLEPGEAALHSDSQDGHQMALLNFFFPDEKPYSEEESRRVRRNKRSKSNEGADGPVKNKKKGKKAGPPGPNGPPGPPGPPGPQGPPGIPGIPGIPGTTVMGPPGPPGPPGPQGPPGLQGPSGAADKAGTRENQPAVVHLQGQGSAIQVKNDLSGGVLNDWSRITMNPKVFKLHPRSGELEVLVDGTYFIYSQVEVYYINFTDFASYEVVVDEKPFLQCTRSIETGKTNYNTCYTAGVCLLKARQKIAVKMVHADISINMSKHTTFFGAIRLGEAPAS

SEQ ID NO: 26582 - protein, 389 aa, Homo sapiens
  Payload ID: 5236
  Gene Symbol: EDA
  Gene Name: ectodysplasin A
  Uniprot ID: Q92838
  ENSP ID: ENSP00000363681
MGYPEVERRELLPAAAPRERGSQGCGCGGAPARAGEGNSCLLFLGFFGLSLALHLLTLCCYLELRSELRRERGAESRLGGSGTPGTSGTLSSLGGLDPDSPITSHLGQPSPKQQPLEPGEAALHSDSQDGHQMALLNFFFPDEKPYSEEESRRVRRNKRSKSNEGADGPVKNKKKGKKAGPPGPNGPPGPPGPPGPQGPPGIPGIPGIPGTTVMGPPGPPGPPGPQGPPGLQGPSGAADKAGTRENQPAVVHLQGQGSAIQVKNDLSGGVLNDWSRITMNPKVFKLHPRSGELEVLVDGTYFIYSQVYYINFTDFASYEVVVDEKPFLQCTRSIETGKTNYNTCYTAGVCLLKARQKIAVKMVHADISINMSKHTTFFGAIRLGEAPAS

SEQ ID NO: 26583 - protein, 136 aa, Homo sapiens
  Payload ID: 5236
  Gene Symbol: EDA
  Gene Name: ectodysplasin A
  ENSP ID: ENSP00000423037
MALLNFFFPDEKPYSEEESRRVRRNKRSKSNEGADGPVKNKKKGKKAGPPGPNGPPGPPGPPGPQGPPGIPGIPGIPGTTVMGPPGPPGPPGPQGPPGLQGPSGAADKAGTRENQPAVVHLQGQGSAIQVKNDLSG

SEQ ID NO: 26584 - protein, 386 aa, Homo sapiens
  Payload ID: 5236
  Gene Symbol: EDA
  Gene Name: ectodysplasin A
  Uniprot ID: Q92838
  ENSP ID: ENSP00000432585
MGYPEVERRELLPAAAPRERGSQGCGCGGAPARAGEGNSCLLFLGFFGLSLALHLLTLCCYLELRSELRRERGAESRLGGSGTPGTSGTLSSLGGLDPDSPITSHLGQPSPKQQPLEPGEAALHSDSQDGHQMALLNFFFPDEKPYSEEESRRVRRNKRSKSNEGADGPVKNKKKGKKAGPPGPNGPPGPPGPPGPQGPPGIPGIPGIPGTTVMGPPGPPGPPGPQGPPGLQGPSGAADKAGTRENQPAVVHLQGQGSAIQVKNGGVLNDWSRITMNPKVFKLHPRSGELEVLVDGTYFIYSQVYYINFTDFASYEVVVDEKPFLQCTRSIETGKTNYNTCYTAGVCLLKARQKIAVKMVHADISINMSKHTTFFGAIRLGEAPAS

SEQ ID NO: 26585 - protein, 135 aa, Homo sapiens
  Payload ID: 5236
  Gene Symbol: EDA
  Gene Name: ectodysplasin A
  Uniprot ID: Q92838
  ENSP ID: ENSP00000434195
MGYPEVERRELLPAAAPRERGSQGCGCGGAPARAGEGNSCLLFLGFFGLSLALHLLTLCCYLELRSELRRERGAESRLGGSGTPGTSGTLSSLGGLDPDSPITSHLGQPSPKQQPLEPGEAALHSDSQDGHQGHQ

SEQ ID NO: 26586 - protein, 148 aa, Homo sapiens
  Payload ID: 5236
  Gene Symbol: EDA
  Gene Name: ectodysplasin A
  Uniprot ID: Q92838
  ENSP ID: ENSP00000434861
MGYPEVERRELLPAAAPRERGSQGCGCGGAPARAGEGNSCLLFLGFFGLSLALHLLTLCCYLELRSELRRERGAESRLGGSGTPGTSGTLSSLGGLDPDSPITSHLGQPSPKQQPLEPGEAALHSDSQDGHQDFDYIISFSYGLQGFC

SEQ ID NO: 26587 - protein, 259 aa, Homo sapiens
  Payload ID: 5236
  Gene Symbol: EDA
  Gene Name: ectodysplasin A
  ENSP ID: ENSP00000481963
MALLNFFFPDEKPYSEEESRRVRRNKRSKSNEGADGPVKNKKKGKKAGPPGPNGPPGPPGPPGPQGPPGIPGIPGIPGTTVMGPPGPPGPPGPQGPPGLQGPSGAADKAGTRENQPAVVHLQGQGSAIQVKNDLSGGVLNDWSRITMNPKVFKLHPRSGELEVLVDGTYFIYSQVEVYYINFTDFASYEVVVDEKPFLQCTRSIETGKTNYNTCYTAGVCLLKARQKIAVKMVHADISINMSKHTTFFGAIRLGEAPAS

SEQ ID NO: 26588 - protein, 448 aa, Homo sapiens
  Payload ID: 5237
  Gene Symbol: EDAR
  Gene Name: ectodysplasin A receptor
  Uniprot ID: Q9UNE0
  ENSP ID: ENSP00000258443
MAHVGDCTQTPWLPVLVVSLMCSARAEYSNCGENEYYNQTTGLCQECPPCGPGEEPYLSCGYGTKDEDYGCVPCPAEKFSKGGYQICRRHKDCEGFFRATVLTPGDMENDAECGPCLPGYYMLENRPRNIYGMVCYSCLLAPPNTKECVGATSGASANFPGTSGSSTLSPFQHAHKELSGQGHLATALIIAMSTIFIMAIAIVLIIMFYILKTKPSAPACCTSHPGKSVEAQVSKDEEKKEAPDNVVMFSEKDEFEKLTATPAKPTKSENDASSENEQLLSRSVDSDEEPAPDKQGSPELCLLSLVHLAREKSATSNKSAGIQSRRKKILDVYANVCGVVEGLSPTELPFDCLEKTSRMLSSTYNSEKAVVKTWRHLAESFGLKRDEIGGMTDGMQLFDRISTAGYSIPELLTKLVQIERLDAVESLCADILEWAGVVPPASQPHAAS

SEQ ID NO: 26589 - protein, 480 aa, Homo sapiens
  Payload ID: 5237
  Gene Symbol: EDAR
  Gene Name: ectodysplasin A receptor
  Uniprot ID: Q9UNE0
  ENSP ID: ENSP00000365839
MAHVGDCTQTPWLPVLVVSLMCSARAEYSNCGENEYYNQTTGLCQECPPCGPGEEPYLSCGYGTKDEDYGCVPCPAEKFSKGGYQICRRHKDCEGFFRATVLTPGDMENDAECGPCLPGYYMLENRPRNIYGMVCYSCLLAPPNTKECVGATSGASANFPGTSGSSTLSPFQHAHKELSGQGHLATALIIAMSTIFIMAIAIVLIIMFYILKTKPSAPGDGPHAPVPCFLDSPSTPPVGEPGCSLPPLSPACCTSHPGKSVEAQVSKDEEKKEAPDNVVMFSEKDEFEKLTATPAKPTKSENDASSENEQLLSRSVDSDEEPAPDKQGSPELCLLSLVHLAREKSATSNKSAGIQSRRKKILDVYANVCGVVEGLSPTELPFDCLEKTSRMLSSTYNSEKAVVKTWRHLAESFGLKRDEIGGMTDGMQLFDRISTAGYSIPELLTKLVQIERLDAVESLCADILEWAGVVPPASQPHAAS

SEQ ID NO: 26590 - protein, 480 aa, Homo sapiens; identical to SEQ ID NO: 26589
  Payload ID: 5237
  Gene Symbol: EDAR
  Gene Name: ectodysplasin A receptor
  Uniprot ID: Q9UNE0
  ENSP ID: ENSP00000386371

SEQ ID NO: 26591 - protein, 318 aa, Homo sapiens
  Payload ID: 5238
  Gene Symbol: EDA2R
  Gene Name: ectodysplasin A2 receptor
  Uniprot ID: Q9HAV5
  ENSP ID: ENSP00000253392
MDCQENEYWDQWGRCVTCQRCGPGQELSKDCGYGEGGDAYCTACPPRRYKSSWGHHRCQSCITCAVINRVQKVNCTATSNAVCGDCLPRFYRKTRIGGLQDQECIPCTKQTPTSEVQCAFQLSLVEADTPTVPPQEATLVALVSSLLVVFTLAFLGLFFLYCKQFFNRHCQREKLIIFSDPVPASLNLIPEFAGGLLQFEADKTAKEESLFPVPPSKETSAESQVSENIFQTQPLNPILEDDCSSTSGFPTQESFTMASCTSESHSHWVHSPIECTELDLQKFSSSASYTGAETLGGNTVESTGDRLELNVPFEVPSP

SEQ ID NO: 26592 - protein, 297 aa, Homo sapiens
  Payload ID: 5238
  Gene Symbol: EDA2R
  Gene Name: ectodysplasin A2 receptor
  Uniprot ID: Q9HAV5
  ENSP ID: ENSP00000363851
MDCQENEYWDQWGRCVTCQRCGPGQELSKDCGYGEGGDAYCTACPPRRYKSSWGHHRCQSCITCAVINRVQKVNCTATSNAVCGDCLPRFYRKTRIGGLQDQECIPCTKQTPTSEVQCAFQLSLVEADTPTVPPQEATLVALVSSLLVVFTLAFLGLFFLYCKQFFNRHCQRGGLLQFEADKTAKEESLFPVPPSKETSAESQVSENIFQTQPLNPILEDDCSSTSGFPTQESFTMASCTSESHSHWVHSPIECTELDLQKFSSSASYTGAETLGGNTVESTGDRLELNVPFEVPSP

SEQ ID NO: 26593 - protein, 318 aa, Homo sapiens; identical to SEQ ID NO: 26591
  Payload ID: 5238
  Gene Symbol: EDA2R
  Gene Name: ectodysplasin A2 receptor
  Uniprot ID: Q9HAV5
  ENSP ID: ENSP00000379365

SEQ ID NO: 26594 - protein, 297 aa, Homo sapiens; identical to SEQ ID NO: 26592
  Payload ID: 5238
  Gene Symbol: EDA2R
  Gene Name: ectodysplasin A2 receptor
  Uniprot ID: Q9HAV5
  ENSP ID: ENSP00000415242

SEQ ID NO: 26595 - protein, 643 aa, Homo sapiens
  Payload ID: 5239
  Gene Symbol: ENOX1
  Gene Name: ecto-NOX disulfide-thiol exchanger 1
  Uniprot ID: Q8TC92
  ENSP ID: ENSP00000261488
MVDAGGVENITQLPQELPQMMAAAADGLGSIAIDTTQLNMSVTDPTAWATAMNNLGMVPVGLPGQQLVSDSICVPGFDPSLNMMTGITPINPMIPGLGLVPPPPPTEVAVVKEIIHCKSCTLFPQNPNLPPPSTRERPPGCKTVFVGGLPENATEEIIQEVFEQCGDITAIRKSKKNFCHIRFAEEFMVDKAIYLSGYRMRLGSSTDKKDSGRLHVDFAQARDDFYEWECKQRMRAREERHRRKLEEDRLRPPSPPAIMHYSEHEAALLAEKLKDDSKFSEAITVLLSWIERGEVNRRSANQFYSMVQSANSHVRRLMNEKATHEQEMEEAKENFKNALTGILTQFEQIVAVFNASTRQKAWDHFSKAQRKNIDIWRKHSEELRNAQSEQLMGIRREEEMEMSDDENCDSPTKKMRVDESALAAQAYALKEENDSLRWQLDAYRNEVELLKQEKEQLFRTEENLTKDQQLQFLQQTMQGMQQQLLTIQEELNNKKSELEQAKEEQSHTQALLKVLQEQLKGTKELVETNGHSHEDSNEINVLTVALVNQDRENNIEKRSQGLKSEKEALLIGIISTFLHVHPFGANIEYLWSYMQQLDSKISANEIEMLLMRLPRMFKQEFTGVGATLEKRWKLCAFEGIKTT

SEQ ID NO: 26596 - protein, 643 aa, Homo sapiens; identical to SEQ ID NO: 26595
  Payload ID: 5239
  Gene Symbol: ENOX1
  Gene Name: ecto-NOX disulfide-thiol exchanger 1
  Uniprot ID: Q8TC92
  ENSP ID: ENSP00000415054

SEQ ID NO: 26597 - protein, 610 aa, Homo sapiens
  Payload ID: 5240
  Gene Symbol: ENOX2
  Gene Name: ecto-NOX disulfide-thiol exchanger 2
  Uniprot ID: Q16206
  ENSP ID: ENSP00000337146
MQRDFRWLWVYEIGYAADNSRTLNVDSTAMTLPMSDPTAWATAMNNLGMAPLGIAGQPILPDFDPALGMMTGIPPITPMMPGLGIVPPPIPPDMPVVKEIIHCKSCTLFPPNPNLPPPATRERPPGCKTVFVGGLPENGTEQIIVEVFEQCGEIIAIRKSKKNFCHIRFAEEYMVDKALYLSGYRIRLGSSTDKKDTGRLHVDFAQARDDLYEWECKQRMLAREERHRRRMEEERLRPPSPPPVVHYSDHECSIVAEKLKDDSKFSEAVQTLLTWIERGEVNRRSANNFYSMIQSANSHVRRLVNEKAAHEKDMEEAKEKFKQALSGILIQFEQIVAVYHSASKQKAWDHFTKAQRKNISVWCKQAEEIRNIHNDELMGIRREEEMEMSDDEIEEMTETKETEESALVSQAEALKEENDSLRWQLDAYRNEVELLKQEQGKVHREDDPNKEQQLKLLQQALQGMQQHLLKVQEEYKKKEAELEKLKDDKLQVEKMLENLKEKESCASRLCASNQDSEYPLEKTMNSSPIKSEREALLVGIISTFLHVHPFGASIEYICSYLHRLDNKICTSDVECLMGRLQHTFKQEMTGVGASLEKRWKFCGFEGLKLT

SEQ ID NO: 26598 - protein, 610 aa, Homo sapiens; identical to SEQ ID NO: 26597
  Payload ID: 5240
  Gene Symbol: ENOX2
  Gene Name: ecto-NOX disulfide-thiol exchanger 2
  Uniprot ID: Q16206
  ENSP ID: ENSP00000359965

SEQ ID NO: 26599 - protein, 581 aa, Homo sapiens
  Payload ID: 5240
  Gene Symbol: ENOX2
  Gene Name: ecto-NOX disulfide-thiol exchanger 2
  Uniprot ID: Q16206
  ENSP ID: ENSP00000359973
MTLPMSDPTAWATAMNNLGMAPLGIAGQPILPDFDPALGMMTGIPPITPMMPGLGIVPPPIPPDMPVVKEIIHCKSCTLFPPNPNLPPPATRERPPGCKTVFVGGLPENGTEQIIVEVFEQCGEIIAIRKSKKNFCHIRFAEEYMVDKALYLSGYRIRLGSSTDKKDTGRLHVDFAQARDDLYEWECKQRMLAREERHRRRMEEERLRPPSPPPVVHYSDHECSIVAEKLKDDSKFSEAVQTLLTWIERGEVNRRSANNFYSMIQSANSHVRRLVNEKAAHEKDMEEAKEKFKQALSGILIQFEQIVAVYHSASKQKAWDHFTKAQRKNISVWCKQAEEIRNIHNDELMGIRREEEMEMSDDEIEEMTETKETEESALVSQAEALKEENDSLRWQLDAYRNEVELLKQEQGKVHREDDPNKEQQLKLLQQALQGMQQHLLKVQEEYKKKEAELEKLKDDKLQVEKMLENLKEKESCASRLCASNQDSEYPLEKTMNSSPIKSEREALLVGIISTFLHVHPFGASIEYICSYLHRLDNKICTSDVECLMGRLQHTFKQEMTGVGASLEKRWKFCGFEGLKLT

SEQ ID NO: 26600 - protein, 581 aa, Homo sapiens; identical to SEQ ID NO: 26599
  Payload ID: 5240
  Gene Symbol: ENOX2
  Gene Name: ecto-NOX disulfide-thiol exchanger 2
  Uniprot ID: Q16206
  ENSP ID: ENSP00000377890

SEQ ID NO: 26601 - protein, 376 aa, Homo sapiens
  Payload ID: 5240
  Gene Symbol: ENOX2
  Gene Name: ecto-NOX disulfide-thiol exchanger 2
  ENSP ID: ENSP00000400304
MTLPMSDPTAWATAMNNLGMAPLGIAGQPILPDFDPALGMMTGIPPITPMMPGLGIVPPPIPPDMPVVKEIIHCKSCTLFPPNPNLPPPATRERPPGCKTVFVGGLPENGTEQIIVEVFEQCGEIIAIRKSKKNFCHIRFAEEYMVDKALYLSGYRIRLGSSTDKKDTGRLHVDFAQARDDLYEWECKQRMLAREERHRRRMEEERLRPPSPPPVVHYSDHECSIVAEKLKDDSKFSEAVQTLLTWIERGEVNRRSANNFYSMIQSANSHVRRLVNEKAAHEKDMEEAKEKFKQALSGILIQFEQIVAVYHSASKQKAWDHFTKAQRKNISVWCKQAEEIRNIHNDELMGIRREEEMEMSDDEIEEMTETKETEES

SEQ ID NO: 26602 - protein, 263 aa, Homo sapiens
  Payload ID: 5240
  Gene Symbol: ENOX2
  Gene Name: ecto-NOX disulfide-thiol exchanger 2
  ENSP ID: ENSP00000478608
MGPLHKSPAKNISVWCKQAEEIRNIHNDELMGIRREEEMEMSDDEIEEMTETKETEESALVSQAEALKEENDSLRWQLDAYRNEVELLKQEQGKVHREDDPNKEQQLKLLQQALQGMQQHLLKVQEEYKKKEAELEKLKDDKLQVEKMLENLKEKESCASRLCASNQDSEYPLEKTMNSSPIKSEREALLVGIISTFLHVHPFGASIEYICSYLHRLDNKICTSDVECLMGRLQHTFKQEMTGVGASLEKRWKFCGFEGLKLT

SEQ ID NO: 26603 - protein, 510 aa, Homo sapiens
  Payload ID: 5241
  Gene Symbol: ENTPD1
  Gene Name: ectonucleoside triphosphate diphosphohydrolase 1
  Uniprot ID: P49961
  ENSP ID: ENSP00000360248
MEDTKESNVKTFCSKNILAILGFSSIIAVIALLAVGLTQNKALPENVKYGIVLDAGSSHTSLYIYKWPAEKENDTGVVHQVEECRVKGPGISKFVQKVNEIGIYLTDCMERAREVIPRSQHQETPVYLGATAGMRLLRMESEELADRVLDVVERSLSNYPFDFQGARIITGQEEGAYGWITINYLLGKFSQKTRWFSIVPYETNNQETFGALDLGGASTQVTFVPQNQTIESPDNALQFRLYGKDYNVYTHSFLCYGKDQALWQKLAKDIQVASNEILRDPCFHPGYKKVVNVSDLYKTPCTKRFEMTLPFQQFEIQGIGNYQQCHQSILELFNTSYCPYSQCAFNGIFLPPLQGDFGAFSAFYFVMKFLNLTSEKVSQEKVTEMMKKFCAQPWEEIKTSYAGVKEKYLSEYCFSGTYILSLLLQGYHFTADSWEHIHFIGKIQGSDAGWTLGYMLNLTNMIPAEQPLSTPLSHSTYVFLMVLFSLVLFTVAIIGLLIFHKPSYFWKDMV

SEQ ID NO: 26604 - protein, 522 aa, Homo sapiens
  Payload ID: 5241
  Gene Symbol: ENTPD1
  Gene Name: ectonucleoside triphosphate diphosphohydrolase 1
  Uniprot ID: P49961
  ENSP ID: ENSP00000360250
MGREELFLTFSFSSGFQESNVKTFCSKNILAILGFSSIIAVIALLAVGLTQNKALPENVKYGIVLDAGSSHTSLYIYKWPAEKENDTGVVHQVEECRVKGPGISKFVQKVNEIGIYLTDCMERAREVIPRSQHQETPVYLGATAGMRLLRMESEELADRVLDVVERSLSNYPFDFQGARIITGQEEGAYGWITINYLLGKFSQKTRWFSIVPYETNNQETFGALDLGGASTQVTFVPQNQTIESPDNALQFRLYGKDYNVYTHSFLCYGKDQALWQKLAKDIQVASNEILRDPCFHPGYKKVVNVSDLYKTPCTKRFEMTLPFQQFEIQGIGNYQQCHQSILELFNTSYCPYSQCAFNGIFLPPLQGDFGAFSAFYFVMKFLNLTSEKVSQEKVTEMMKKFCAQPWEEIKTSYAGVKEKYLSEYCFSGTYILSLLLQGYHFTADSWEHIHFIGKIQGSDAGWTLGYMLNLTNMIPAEQPLSTPLSHSTYVFLMVLFSLVLFTVAIIGLLIFHKPSYFWKDMV

SEQ ID NO: 26605 - protein, 517 aa, Homo sapiens
  Payload ID: 5241
  Gene Symbol: ENTPD1
  Gene Name: ectonucleoside triphosphate diphosphohydrolase 1
  Uniprot ID: P49961
  ENSP ID: ENSP00000390955
MKGTKDLTSQQKESNVKTFCSKNILAILGFSSIIAVIALLAVGLTQNKALPENVKYGIVLDAGSSHTSLYIYKWPAEKENDTGVVHQVEECRVKGPGISKFVQKVNEIGIYLTDCMERAREVIPRSQHQETPVYLGATAGMRLLRMESEELADRVLDVVERSLSNYPFDFQGARIITGQEEGAYGWITINYLLGKFSQKTRWFSIVPYETNNQETFGALDLGGASTQVTFVPQNQTIESPDNALQFRLYGKDYNVYTHSFLCYGKDQALWQKLAKDIQVASNEILRDPCFHPGYKKVVNVSDLYKTPCTKRFEMTLPFQQFEIQGIGNYQQCHQSILELFNTSYCPYSQCAFNGIFLPPLQGDFGAFSAFYFVMKFLNLTSEKVSQEKVTEMMKKFCAQPWEEIKTSYAGVKEKYLSEYCFSGTYILSLLLQGYHFTADSWEHIHFIGKIQGSDAGWTLGYMLNLTNMIPAEQPLSTPLSHSTYVFLMVLFSLVLFTVAIIGLLIFHKPSYFWKDMV

SEQ ID NO: 26606 - protein, 402 aa, Homo sapiens
  Payload ID: 5241
  Gene Symbol: ENTPD1
  Gene Name: ectonucleoside triphosphate diphosphohydrolase 1
  Uniprot ID: P49961
  ENSP ID: ENSP00000442968
MERAREVIPRSQHQETPVYLGATAGMRLLRMESEELADRVLDVVERSLSNYPFDFQGARIITGQEEGAYGWITINYLLGKFSQKTRWFSIVPYETNNQETFGALDLGGASTQVTFVPQNQTIESPDNALQFRLYGKDYNVYTHSFLCYGKDQALWQKLAKDIQVASNEILRDPCFHPGYKKVVNVSDLYKTPCTKRFEMTLPFQQFEIQGIGNYQQCHQSILELFNTSYCPYSQCAFNGIFLPPLQGDFGAFSAFYFVMKFLNLTSEKVSQEKVTEMMKKFCAQPWEEIKTSYAGVKEKYLSEYCFSGTYILSLLLQGYHFTADSWEHIHFIGKIQGSDAGWTLGYMLNLTNMIPAEQPLSTPLSHSTYVFLMVLFSLVLFTVAIIGLLIFHKPSYFWKDMV

SEQ ID NO: 26607 - protein, 51 aa, Homo sapiens
  Payload ID: 5241
  Gene Symbol: ENTPD1
  Gene Name: ectonucleoside triphosphate diphosphohydrolase 1
  ENSP ID: ENSP00000489250
MEDTKESNVKTFCSKNILAILGFSSIIAVIALLAVGLTQNKALPENVKDGK

SEQ ID NO: 26608 - protein, 63 aa, Homo sapiens
  Payload ID: 5241
  Gene Symbol: ENTPD1
  Gene Name: ectonucleoside triphosphate diphosphohydrolase 1
  ENSP ID: ENSP00000489333
MERAREVIPRSQHQETPVYLGATAGMRLLRVPGSLLAKRKVPMAGLLSTICWANSVRKQGGSA

SEQ ID NO: 26609 - protein, 372 aa, Homo sapiens
  Payload ID: 5242
  Gene Symbol:
  Gene Name: Ectonucleoside triphosphate diphosphohydrolase 1 [Source:UniProtKB/Swiss-Prot Acc:P49961]
  Uniprot ID: P49961
  ENSP ID: ENSP00000440027
MESEELADRVLDVVERSLSNYPFDFQGARIITGQEEGAYGWITINYLLGKFSQKTRWFSIVPYETNNQETFGALDLGGASTQVTFVPQNQTIESPDNALQFRLYGKDYNVYTHSFLCYGKDQALWQKLAKDIQVASNEILRDPCFHPGYKKVVNVSDLYKTPCTKRFEMTLPFQQFEIQGIGNYQQCHQSILELFNTSYCPYSQCAFNGIFLPPLQGDFGAFSAFYFVMKFLNLTSEKVSQEKVTEMMKKFCAQPWEEIKTSYAGVKEKYLSEYCFSGTYILSLLLQGYHFTADSWEHIHFIGKIQGSDAGWTLGYMLNLTNMIPAEQPLSTPLSHSTYVFLMVLFSLVLFTVAIIGLLIFHKPSYFWKDMV

SEQ ID NO: 26610 - protein, 472 aa, Homo sapiens
  Payload ID: 5243
  Gene Symbol: ENTPD2
  Gene Name: ectonucleoside triphosphate diphosphohydrolase 2
  Uniprot ID: Q9Y5L3
  ENSP ID: ENSP00000312494
MAGKVRSLLPPLLLAAAGLAGLLLLCVPTRDVREPPALKYGIVLDAGSSHTSMFIYKWPADKENDTGIVGQHSSCDVPGGGISSYADNPSGASQSLVGCLEQALQDVPKERHAGTPLYLGATAGMRLLNLTNPEASTSVLMAVTHTLTQYPFDFRGARILSGQEEGVFGWVTANYLLENFIKYGWVGRWFRPRKGTLGAMDLGGASTQITFETTSPAEDRASEVQLHLYGQHYRVYTHSFLCYGRDQVLQRLLASALQTHGFHPCWPRGFSTQVLLGDVYQSPCTMAQRPQNFNSSARVSLSGSSDPHLCRDLVSGLFSFSSCPFSRCSFNGVFQPPVAGNFVAFSAFFYTVDFLRTSMGLPVATLQQLEAAAVNVCNQTWAQQLLSRGYGFDERAFGGVIFQKKAADTAVGWALGYMLNLTNLIPADPPGLRKGTDFSSWVVLLLLFASALLAALVLLLRQVHSAKLPSTI

SEQ ID NO: 26611 - protein, 495 aa, Homo sapiens
  Payload ID: 5243
  Gene Symbol: ENTPD2
  Gene Name: ectonucleoside triphosphate diphosphohydrolase 2
  Uniprot ID: Q9Y5L3
  ENSP ID: ENSP00000347213
MAGKVRSLLPPLLLAAAGLAGLLLLCVPTRDVREPPALKYGIVLDAGSSHTSMFIYKWPADKENDTGIVGQHSSCDVPGGGISSYADNPSGASQSLVGCLEQALQDVPKERHAGTPLYLGATAGMRLLNLTNPEASTSVLMAVTHTLTQYPFDFRGARILSGQEEGVFGWVTANYLLENFIKYGWVGRWFRPRKGTLGAMDLGGASTQITFETTSPAEDRASEVQLHLYGQHYRVYTHSFLCYGRDQVLQRLLASALQTHGFHPCWPRGFSTQVLLGDVYQSPCTMAQRPQNFNSSARVSLSGSSDPHLCRDLVSGLFSFSSCPFSRCSFNGVFQPPVAGNFVAFSAFFYTVDFLRTSMGLPVATLQQLEAAAVNVCNQTWAQLQARVPGQRARLADYCAGAMFVQQLLSRGYGFDERAFGGVIFQKKAADTAVGWALGYMLNLTNLIPADPPGLRKGTDFSSWVVLLLLFASALLAALVLLLRQVHSAKLPSTI

SEQ ID NO: 26612 - protein, 529 aa, Homo sapiens
  Payload ID: 5244
  Gene Symbol: ENTPD3
  Gene Name: ectonucleoside triphosphate diphosphohydrolase 3
  Uniprot ID: O75355
  ENSP ID: ENSP00000301825
MFTVLTRQPCEQAGLKALYRTPTIIALVVLLVSIVVLVSITVIQIHKQEVLPPGLKYGIVLDAGSSRTTVYVYQWPAEKENNTGVVSQTFKCSVKGSGISSYGNNPQDVPRAFEECMQKVKGQVPSHLHGSTPIHLGATAGMRLLRLQNETAANEVLESIQSYFKSQPFDFRGAQIISGQEEGVYGWITANYLMGNFLEKNLWHMWVHPHGVETTGALDLGGASTQISFVAGEKMDLNTSDIMQVSLYGYVYTLYTHSFQCYGRNEAEKKFLAMLLQNSPTKNHLTNPCYPRDYSISFTMGHVFDSLCTVDQRPESYNPNDVITFEGTGDPSLCKEKVASIFDFKACHDQETCSFDGVYQPKIKGPFVAFAGFYYTASALNLSGSFSLDTFNSSTWNFCSQNWSQLPLLLPKFDEVYARSYCFSANYIYHLFVNGYKFTEETWPQIHFEKEVGNSSIAWSLGYMLSLTNQIPAESPLIRLPIEPPVFVGTLAFFTAAALLCLAFLAYLCSATRRKRHSEHAFDHAVDSD

SEQ ID NO: 26613 - protein, 529 aa, Homo sapiens; identical to SEQ ID NO: 26612
  Payload ID: 5244
  Gene Symbol: ENTPD3
  Gene Name: ectonucleoside triphosphate diphosphohydrolase 3
  Uniprot ID: O75355
  ENSP ID: ENSP00000401565

SEQ ID NO: 26614 - protein, 452 aa, Homo sapiens
  Payload ID: 5244
  Gene Symbol: ENTPD3
  Gene Name: ectonucleoside triphosphate diphosphohydrolase 3
  Uniprot ID: O75355
  ENSP ID: ENSP00000404671
MFTVLTRQPCEQAGLKALYRTPTIIALVVLLVSIVVLVSITVIQIHKQEVLPPGLKYGIVLDAGSSRTTVYVYQWPAEKENNTGVVSQTFKCSVKGSGISSYGNNPQDVPRAFEECMQKVKGQVPSHLHGSTPIHLGATAGMRLLRLQNETAANEVLESIQSYFKSQPFDFRGAQIISGQEEGVYGWITANYLMGNFLEKNLWHMWVHPHGVETTGALDLGGASTQISFVAGEKMDLNTSDIMQVSLYGYVYTLYTHSFQCYGRNEAEKKFLAMLLQNSPTKNHLTNPCYPRDYSISFTMGHVFDSLCTVDQRPESYNPNDVITFEGTGDPSLCKEKVASIFDFKACHDQETCSFDGVYQPKIKGPFVAFAGFYYTASALNLSGSFSLDTFNSSTWNFCSQNWSQLPLLLPKFDEVYARSYCFSANYIYHLFVNGYKFTEETWPQIHFEKEE

SEQ ID NO: 26615 - protein, 130 aa, Homo sapiens
  Payload ID: 5244
  Gene Symbol: ENTPD3
  Gene Name: ectonucleoside triphosphate diphosphohydrolase 3
  ENSP ID: ENSP00000406555
MFTVLTRQPCEQAGLKALYRTPTIIALVVLLVSIVVLVSITVIQIHKQEVLPPGLKIGFHRVDQASLELLTSGDPPTSASQSGGIISMSHRAQPQLRYGIVLDAGSSRTTVYVYQWPAEKENNTGVVSQT

SEQ ID NO: 26616 - protein, 571 aa, Homo sapiens
  Payload ID: 5245
  Gene Symbol: ENTPD4
  Gene Name: ectonucleoside triphosphate diphosphohydrolase 4
  ENSP ID: ENSP00000348536
MGRIGISCLFPASWHFSISPVGCPRILNTNLRQIMVISVLAAAVSLLYFSVVIIRNKYGRLTRDKKFQRYLARVTDIEATDTNNPNVNYGIVVDCGSSGSRVFVYCWPRHNGNPHDLLDIRQMRDKNRKPVVMKIKPGISEFATSPEKVSDYISPLLNFAAEHVPRAKHKETPLYILCTAGMRILPESQQKAILEDLLTDIPVHFDFLFSDSHAEVISGKQEGVYAWIGINFVLGRFEHIEDDDEAVVEVNIPGSESSEAIVRKRTAGILDMGGVSTQIAYEVPKTEEVAKNLLAEFNLGCDVHQTEHVYRVYVATFLGFGGNAARQRYEDRIFANTIQKNRLLGKQTGLTPDMPYLDPCLPLDIKDEIQQNGQTIYLRGTGDFDLCRETIQPFMNKTNETQTSLNGVYQPPIHFQNSEFYGFSEFYYCTEDVLRMGGDYNAAKFTKAAKDYCATKWSILRERFDRGLYASHADLHRLKYQCFKSAWMFEVFHRGFSFPVNYKSLKTALQVYDKEVQWTLGAILYRTRFLPLRKIGMLIIPCSGGCPKLCCAVWQPPPYGATKHLQCAAWN

SEQ ID NO: 26617 - protein, 616 aa, Homo sapiens
  Payload ID: 5245
  Gene Symbol: ENTPD4
  Gene Name: ectonucleoside triphosphate diphosphohydrolase 4
  Uniprot ID: Q9Y227
  ENSP ID: ENSP00000351520
MGRIGISCLFPASWHFSISPVGCPRILNTNLRQIMVISVLAAAVSLLYFSVVIIRNKYGRLTRDKKFQRYLARVTDIEATDTNNPNVNYGIVVDCGSSGSRVFVYCWPRHNGNPHDLLDIRQMRDKNRKPVVMKIKPGISEFATSPEKVSDYISPLLNFAAEHVPRAKHKETPLYILCTAGMRILPESQQKAILEDLLTDIPVHFDFLFSDSHAEVISGKQEGVYAWIGINFVLGRFEHIEDDDEAVVEVNIPGSESSEAIVRKRTAGILDMGGVSTQIAYEVPKTVSFASSQQEEVAKNLLAEFNLGCDVHQTEHVYRVYVATFLGFGGNAARQRYEDRIFANTIQKNRLLGKQTGLTPDMPYLDPCLPLDIKDEIQQNGQTIYLRGTGDFDLCRETIQPFMNKTNETQTSLNGVYQPPIHFQNSEFYGFSEFYYCTEDVLRMGGDYNAAKFTKAAKDYCATKWSILRERFDRGLYASHADLHRLKYQCFKSAWMFEVFHRGFSFPVNYKSLKTALQVYDKEVQWTLGAILYRTRFLPLRDIQQEAFRASHTHWRGVSFVYNHYLFSGCFLVVLLAILLYLLRLRRIHRRTPRSSSAAALWMEEGLPAQNAPGTL

SEQ ID NO: 26618 - protein, 608 aa, Homo sapiens
  Payload ID: 5245
  Gene Symbol: ENTPD4
  Gene Name: ectonucleoside triphosphate diphosphohydrolase 4
  Uniprot ID: Q9Y227
  ENSP ID: ENSP00000408573
MGRIGISCLFPASWHFSISPVGCPRILNTNLRQIMVISVLAAAVSLLYFSVVIIRNKYGRLTRDKKFQRYLARVTDIEATDTNNPNVNYGIVVDCGSSGSRVFVYCWPRHNGNPHDLLDIRQMRDKNRKPVVMKIKPGISEFATSPEKVSDYISPLLNFAAEHVPRAKHKETPLYILCTAGMRILPESQQKAILEDLLTDIPVHFDFLFSDSHAEVISGKQEGVYAWIGINFVLGRFEHIEDDDEAVVEVNIPGSESSEAIVRKRTAGILDMGGVSTQIAYEVPKTEEVAKNLLAEFNLGCDVHQTEHVYRVYVATFLGFGGNAARQRYEDRIFANTIQKNRLLGKQTGLTPDMPYLDPCLPLDIKDEIQQNGQTIYLRGTGDFDLCRETIQPFMNKTNETQTSLNGVYQPPIHFQNSEFYGFSEFYYCTEDVLRMGGDYNAAKFTKAAKDYCATKWSILRERFDRGLYASHADLHRLKYQCFKSAWMFEVFHRGFSFPVNYKSLKTALQVYDKEVQWTLGAILYRTRFLPLRDIQQEAFRASHTHWRGVSFVYNHYLFSGCFLVVLLAILLYLLRLRRIHRRTPRSSSAAALWMEEGLPAQNAPGTL

SEQ ID NO: 26619 - protein, 117 aa, Homo sapiens
  Payload ID: 5245
  Gene Symbol: ENTPD4
  Gene Name: ectonucleoside triphosphate diphosphohydrolase 4
  ENSP ID: ENSP00000427724
  MOD_RES (1)..(1): Any amino acid
XFVYCWPRHNGNPHDLLDIRQMRDKNRKPVVMKIKPEHVPRAKHKETPLYILCTAGMRILPESQQKAILEDLLTDIPVHFDFLFSDSHAEVISGKQEGVYAWIGINFVLGRFEHIED

SEQ ID NO: 26620 - protein, 127 aa, Homo sapiens
  Payload ID: 5245
  Gene Symbol: ENTPD4
  Gene Name: ectonucleoside triphosphate diphosphohydrolase 4
  ENSP ID: ENSP00000429455
MVISVLAAAVSLLYFSVVIIRNKYGRLTRDKKFQRYLARVTDIEATDTNNPNVNYGIVVDCGSSGSRVFVYCWPRHNGNPHDLLDIRQMRDKNRKPVVMKIKPGISEFATSPEKVSDYISPLLNFAA

SEQ ID NO: 26621 - protein, 214 aa, Homo sapiens
  Payload ID: 5245
  Gene Symbol: ENTPD4
  Gene Name: ectonucleoside triphosphate diphosphohydrolase 4
  ENSP ID: ENSP00000430579
TNETQTSLNGVYQPPIHFQNSEFYGFSEFYYCTEDVLRMGGDYNAAKFTKAAKDYCATKWSILRERFDRGLYASHADLHRLKYQCFKSAWMFEVFHRGFSFPVNYKSLKTALQVYDKEVQWTLGAILYRTRFLPLSHRRPEPPPLLEKGAQRRRKRRGTTVESAVPARPLRIPETKKIGMLIIPCSGGCPKLCCAVWQPPPYGATKHLQCAAWN

SEQ ID NO: 26622 - protein, 428 aa, Homo sapiens
  Payload ID: 5246
  Gene Symbol: ENTPD5
  Gene Name: ectonucleoside triphosphate diphosphohydrolase 5
  Uniprot ID: O75356
  ENSP ID: ENSP00000335246
MATSWGTVFFMLVVSCVCSAVSHRNQQTWFEGIFLSSMCPINVSASTLYGIMFDAGSTGTRIHVYTFVQKMPGQLPILEGEVFDSVKPGLSAFVDQPKQGAETVQGLLEVAKDSIPRSHWKKTPVVLKATAGLRLLPEHKAKALLFEVKEIFRKSPFLVPKGSVSIMDGSDEGILAWVTVNFLTGQLHGHRQETVGTLDLGGASTQITFLPQFEKTLEQTPRGYLTSFEMFNSTYKLYTHSYLGFGLKAARLATLGALETEGTDGHTFRSACLPRWLEAEWIFGGVKYQYGGNQEGEVGFEPCYAEVLRVVRGKLHQPEEVQRGSFYAFSYYYDRAVDTDMIDYEKGGILKVEDFERKAREVCDNLENFTSGSPFLCMDLSYITALLKDGFGFADSTVLQLTKKVNNIETGWALGATFHLLQSLGISH

SEQ ID NO: 26623 - protein, 91 aa, Homo sapiens
  Payload ID: 5246
  Gene Symbol: ENTPD5
  Gene Name: ectonucleoside triphosphate diphosphohydrolase 5
  ENSP ID: ENSP00000451483
MATSWGTVFFMLVVSCVCSAVSHRNQQTWFEGIFLSSMCPINVSASTLYGIMFDAGSTGTRIHVYTFVQKMPGHLWSLGKGGGVRCPPEKW

SEQ ID NO: 26624 - protein, 80 aa, Homo sapiens
  Payload ID: 5246
  Gene Symbol: ENTPD5
  Gene Name: ectonucleoside triphosphate diphosphohydrolase 5
  ENSP ID: ENSP00000451499
  MOD_RES (1)..(1): Any amino acid
XYAFSYYYDRAVDTDMIDYEKGGILKVEDFERKAREVCDNLENFTSGSPFLCMDLSYITALLKDGFGFADSTVLQAAVLR

SEQ ID NO: 26625 - protein, 211 aa, Homo sapiens
  Payload ID: 5246
  Gene Symbol: ENTPD5
  Gene Name: ectonucleoside triphosphate diphosphohydrolase 5
  ENSP ID: ENSP00000451591
MATSWGTVFFMLVVSCVCSAVSHRNQQTWFEGIFLSSMCPINVSASTLYGIMFDAGSTGTRIHVYTFVQKMPGQLPILEGEVFDSVKPGLSAFVDQPKQGAETVQGLLEVAKDSIPRSHWKKTPVVLKATAGLRLLPEHKAKALLFEVKEIFRKSPFLVPKGSVSIMDGSDEGILAWVTVNFLTGQLHGHRQETVGTLDLGGASTQITFLP

SEQ ID NO: 26626 - protein, 407 aa, Homo sapiens
  Payload ID: 5246
  Gene Symbol: ENTPD5
  Gene Name: ectonucleoside triphosphate diphosphohydrolase 5
  ENSP ID: ENSP00000451810
MATSWGTVFFMLVVSCVCSAVSHRNQQTWFEGIFLSSMCPINVSASTLYGIMFDAGSTGTRIHVYTFVQKMPGQLPILEGEVFDSVKPGLSAFVDQPKQGAETVQGLLEVAKDSIPRSHWKKTPVVLKATAGLRLLPEHKAKALLFEVKEIFRKSPFLVPKGSVSIMDGSDEGILAWVTVNFLTGQLHGHRQETVGTLDLGGASTQITFLPQFEKTLEQTPRGYLTSFEMFNSTYKLYTHSYLGFGLKAARLATLGALETEGTDGHTFRSACLPRWLEAEWIFGGVKYQYGGNQEGEVGFEPCYAEVLRVVRGKLHQPEEVQRGSFYAFSYYYDRAVDTDMIDYEKGGILKVEDFERKAREVCDNLENFTSGSPFLCMDLSYITALLKDGFGFADSTVLQHIISWVN

SEQ ID NO: 26627 - protein, 467 aa, Homo sapiens
  Payload ID: 5247
  Gene Symbol: ENTPD6
  Gene Name: ectonucleoside triphosphate diphosphohydrolase 6 (putative)
  Uniprot ID: O75354
  ENSP ID: ENSP00000347084
MQPQHGPWQTRMRKISNHGSLRVAKVAYPLGLCVGVFIYVAYIKWHRATATQAFFSITRAAPGARWGQQAHSPLGTAADGHEVFYGIMFDAGSTGTRVHVFQFTRPPRETPTLTHETFKALKPGLSAYADDVEKSAQGIRELLDVAKQDIPFDFWKATPLVLKATAGLRLLPGEKAQKLLQKVKKVFKASPFLVGDDCVSIMNGTDEGVSAWITINFLTGSLKTPGGSSVGMLDLGGGSTQIAFLPRVEGTLQASPPGYLTALRMFNRTYKLYSYSYLGLGLMSARLAILGGVEGQPAKDGKELVSPCLSPSFKGEWEHAEVTYRVSGQKAAASLHELCAARVSEVLQNRVHRTEEVKHVDFYAFSYYYDLAAGVGLIDAEKGGSLVVGDFEIAAKYVCRTLETQPQSSPFSCMDLTYVSLLLQEFGFPRSKVLKLTRKIDNVETSWALGAIFHYIDSLNRQKSPAS

SEQ ID NO: 26628 - protein, 483 aa, Homo sapiens
  Payload ID: 5247
  Gene Symbol: ENTPD6
  Gene Name: ectonucleoside triphosphate diphosphohydrolase 6 (putative)
  Uniprot ID: O75354
  ENSP ID: ENSP00000353131
MKKGIRYETSRKTSYIFQPQHGPWQTRMRKISNHGSLRVAKVAYPLGLCVGVFIYVAYIKWHRATATQAFFSITRAAPGARWGQQAHSPLGTAADGHEVFYGIMFDAGSTGTRVHVFQFTRPPRETPTLTHETFKALKPGLSAYADDVEKSAQGIRELLDVAKQDIPFDFWKATPLVLKATAGLRLLPGEKAQKLLQKVKKVFKASPFLVGDDCVSIMNGTDEGVSAWITINFLTGSLKTPGGSSVGMLDLGGGSTQIAFLPRVEGTLQASPPGYLTALRMFNRTYKLYSYSYLGLGLMSARLAILGGVEGQPAKDGKELVSPCLSPSFKGEWEHAEVTYRVSGQKAAASLHELCAARVSEVLQNRVHRTEEVKHVDFYAFSYYYDLAAGVGLIDAEKGGSLVVGDFEIAAKYVCRTLETQPQSSPFSCMDLTYVSLLLQEFGFPRSKVLKLTRKIDNVETSWALGAIFHYIDSLNRQKSPAS

SEQ ID NO: 26629 - protein, 484 aa, Homo sapiens
  Payload ID: 5247
  Gene Symbol: ENTPD6
  Gene Name: ectonucleoside triphosphate diphosphohydrolase 6 (putative)
  Uniprot ID: O75354
  ENSP ID: ENSP00000365840
MKKGIRYETSRKTSYIFQQPQHGPWQTRMRKISNHGSLRVAKVAYPLGLCVGVFIYVAYIKWHRATATQAFFSITRAAPGARWGQQAHSPLGTAADGHEVFYGIMFDAGSTGTRVHVFQFTRPPRETPTLTHETFKALKPGLSAYADDVEKSAQGIRELLDVAKQDIPFDFWKATPLVLKATAGLRLLPGEKAQKLLQKVKKVFKASPFLVGDDCVSIMNGTDEGVSAWITINFLTGSLKTPGGSSVGMLDLGGGSTQIAFLPRVEGTLQASPPGYLTALRMFNRTYKLYSYSYLGLGLMSARLAILGGVEGQPAKDGKELVSPCLSPSFKGEWEHAEVTYRVSGQKAAASLHELCAARVSEVLQNRVHRTEEVKHVDFYAFSYYYDLAAGVGLIDAEKGGSLVVGDFEIAAKYVCRTLETQPQSSPFSCMDLTYVSLLLQEFGFPRSKVLKLTRKIDNVETSWALGAIFHYIDSLNRQKSPAS

SEQ ID NO: 26630 - protein, 295 aa, Homo sapiens
  Payload ID: 5247
  Gene Symbol: ENTPD6
  Gene Name: ectonucleoside triphosphate diphosphohydrolase 6 (putative)
  ENSP ID: ENSP00000365854
  MOD_RES (1)..(1): Any amino acid
XVLKATAGLRLLPGEKAQKLLQKVKKVFKASPFLVGDDCVSIMNGTDEGVSAWITINFLTGSLKTPGGSSVGMLDLGGGSTQIAFLPRVEGTLQASPPGYLTALRMFNRTYKLYSYSYLGLGLMSARLAILGGVEGQPAKDGKELVSPCLSPSFKGEWEHAEVTYRVSGQKAAASLHELCAARVSEVLQNRVHRTEEVKHVDFYAFSYYYDLAAGVGLIDAEKGGSLVVGDFEIAAKYGGSHLEREGTCLIPSVSDPGDTAAEQPLLMHGPHLRQPATPGVRLSQEQSAEAHSEN

SEQ ID NO: 26631 - protein, 313 aa, Homo sapiens
  Payload ID: 5247
  Gene Symbol: ENTPD6
  Gene Name: ectonucleoside triphosphate diphosphohydrolase 6 (putative)
  ENSP ID: ENSP00000390095
  MOD_RES (1)..(1): Any amino acid
XNRGVVSRGWRPGWRRPGRGSPKDRLPPAPRKRALVSVGVAERAVHETPTLTHETFKALKPGLSAYADDVEKSAQGIRELLDVAKQDIPFDFWKATPLVLKATAGLRLLPGEKAQKLLQKVKKVFKASPFLVGDDCVSIMNGTDEGVSAWITINFLTGSLKTPGGSSVGMLDLGGGSTQIAFLPRVEGTLQASPPGYLTALRMFNRTYKLYSYSYLGLGLMSARLAILGGVEGQPAKDGKELVSPCLSPSFKGEWEHAEVTYRVSGQKAAASLHELCAARVSEVLQNRVHRTEEVKHVDFYAFSYYYDLAAGV

SEQ ID NO: 26632 - protein, 194 aa, Homo sapiens
  Payload ID: 5247
  Gene Symbol: ENTPD6
  Gene Name: ectonucleoside triphosphate diphosphohydrolase 6 (putative)
  ENSP ID: ENSP00000390511
MQPQHGPWQTRMRKISNHGSLRVAKVAYPLGLCVGVFIYVAYIKWHRATATQAFFSITRAAPGARWGQQAHSPLGTAADGHEVFYGIMFDAGSTGTRVHVFQFTRPPRETPTLTHETFKALKPGLSAYADDVEKVKKVFKASPFLVGDDCVSIMNGTDEGVSAWITINFLTGSLKTPGGSSVGMLDLGGGSTQI

SEQ ID NO: 26633 - protein, 300 aa, Homo sapiens
  Payload ID: 5247
  Gene Symbol: ENTPD6
  Gene Name: ectonucleoside triphosphate diphosphohydrolase 6 (putative)
  ENSP ID: ENSP00000390646
MKKGIRYETSRKTSYIFQQPQHGPWQTRMRKISNHGSLRVAKVAYPLGLCVGVFIYVAYIKWHRATATQAFFSITRAAPGARWGQQAHSPLGTAADGHEVFYGIMFDAGSTGTRVHVFQFTRPPRETPTLTHETFKALKPGLSAYADDVEKVKKVFKASPFLVGDDCVSIMNGTDEGVSAWITINFLTGSLKTPGGSSVGMLDLGGGSTQIAFLPRVEGTLQASPPGYLTALRMFNRTYKLYSYSYLGLGLMSARLAILGGVEGQPAKDGKELVSPCLSPSFKGEWEHAEVTYRVSGQKA

SEQ ID NO: 26634 - protein, 226 aa, Homo sapiens
  Payload ID: 5247
  Gene Symbol: ENTPD6
  Gene Name: ectonucleoside triphosphate diphosphohydrolase 6 (putative)
  ENSP ID: ENSP00000395064
MPQHGPWQTRMRKISNHGSLRVAKVAYPLGLCVGVFIYVAYIKWHRATATQAFFSITRAAPGARWGQQAHSPLGTAADGHEVFYGIMFDAGSTGTRVHVFQFTRPPRETPTLTHETFKALKPGLSAYADDVEKVKKVFKASPFLVGDDCVSIMNGTDEGVSAWITINFLTGSLKTPGGSSVGMLDLGGGSTQIAFLPRVEGTLQASPPGYLTALRMFNRTYKLYSY

SEQ ID NO: 26635 - protein, 188 aa, Homo sapiens
  Payload ID: 5247
  Gene Symbol: ENTPD6
  Gene Name: ectonucleoside triphosphate diphosphohydrolase 6 (putative)
  ENSP ID: ENSP00000398844
MKKGIRYETSRKTSYIFQPQHGPWQTRMRKISNHGSLRVAKVAYPLGLCVGVFIYVAYIKWHRATATQAFFSITRAAPGARWGQQAHSPLGTAADGHEVFYGIMFDAGSTGTRVHVFQFTRPPRETPTLTHETFKALKPGLSAYADDVEKSAQGIRELLDVAKQDIPFDFWKATPLVLKATAGLRLLP

SEQ ID NO: 26636 - protein, 150 aa, Homo sapiens
  Payload ID: 5247
  Gene Symbol: ENTPD6
  Gene Name: ectonucleoside triphosphate diphosphohydrolase 6 (putative)
  ENSP ID: ENSP00000401573
  MOD_RES (1)..(1): Any amino acid
XPGRGSPKDRLPPAPRKRALVSVGVAERAVHETPTLTHETFKALKPGLSAYADDVEKVKKVFKASPFLVGDDCVSIMNGTDEGVSAWITINFLTGSLKTPGGSSVGMLDLGGGSTQIAFLPRVEGTLQASPPGYLTALRMFNRTYKLYSY

SEQ ID NO: 26637 - protein, 437 aa, Homo sapiens
  Payload ID: 5247
  Gene Symbol: ENTPD6
  Gene Name: ectonucleoside triphosphate diphosphohydrolase 6 (putative)
  ENSP ID: ENSP00000401895
MKKGIRYETSRKTSYIFQQPQHGPWQTRMRKISNHGSLRVAKVAYPLGLCVGVFIYVAYIKWHRATATQAFFSITRAAPGARWGQQAHSPLGTAADGHEVFYGIMFDAGSTGTRVHVFQFTRPPRETPTLTHETFKALKPGLSAYADDVEKSAQGIRELLDVAKQDIPFDFWKATPLVLKATAGLRLLPGEKAQKLLQKVKKVFKASPFLVGDDCVSIMNGTDEGVSAWITINFLTGSLKTPGGSSVGMLDLGGGSTQIAFLPRVEGTLQASPPGYLTALRMFNRTYKLYSYSYLGLGLMSARLAILGGVEGQPAASLHELCAARVSEVLQNRVHRTEEVKHVDFYAFSYYYDLAAGVGLIDAEKGGSLVVGDFEIAAKYGGSHLEREGTCLIPSVSDPGDTAAEQPLLMHGPHLRQPATPGVRLSQEQSAEAHSEN

SEQ ID NO: 26638 - protein, 311 aa, Homo sapiens
  Payload ID: 5247
  Gene Symbol: ENTPD6
  Gene Name: ectonucleoside triphosphate diphosphohydrolase 6 (putative)
  ENSP ID: ENSP00000406975
  MOD_RES (1)..(1): Any amino acid
XGSTGTRVHVFQFTRPPRETPTLTHETFKALKPGLSAYADDVEKSAQGIRELLDVAKQDIPFDFWKATPLVLKATAGLRLLPGEKAQKLLQKVKKVFKASPFLVGDDCVSIMNGTDEGVSAWITINFLTGSLKTPGGSSVGMLDLGGGSTQIAFLPRVEGTLQASPPGYLTALRMFNRTYKLYSYSYLGLGLMSARLAILGGVEGQPAASLHELCAARVSEVLQNRVHRTEEVKHVDFYAFSYYYDLAAGVGLIDAEKGGSLVVGDFEIAAKYVCRTLETQPQSSPFSCMDLTYVSLLLQEFGFPRSKVLK

SEQ ID NO: 26639 - protein, 296 aa, Homo sapiens
  Payload ID: 5247
  Gene Symbol: ENTPD6
  Gene Name: ectonucleoside triphosphate diphosphohydrolase 6 (putative)
  ENSP ID: ENSP00000408098
MPQHGPWQTRMRKISNHGSLRVAKVAYPLGLCVGVFIYVAYIKWHRATATQAFFSITRAAPGARWGQQAHSPLGTAADGHEVFYGIMFDAGSTGTRVHVFQFTRPPRETPTLTHETFKALKPGLSAYADDVEKSAQGIRELLDVAKQDIPFDFWKATPLVLKATAGLRLLPGEKAQKLLQKVKKVFKASPFLVGDDCVSIMNGTDEGVSAWITINFLTGSLKTPGGSSVGMLDLGGGSTQIAFLPRVEGTLQASPPGYLTALRMFNRTYKLYSYSYLGLGLMSARLAILGGVEGQP

SEQ ID NO: 26640 - protein, 604 aa, Homo sapiens
  Payload ID: 5248
  Gene Symbol: ENTPD7
  Gene Name: ectonucleoside triphosphate diphosphohydrolase 7
  Uniprot ID: Q9NQZ7
  ENSP ID: ENSP00000359520
MARISFSYLCPASWYFTVPTVSPFLRQRVAFLGLFFISCLLLLMLIIDFRHWSASLPRDRQYERYLARVGELEATDTEDPNLNYGLVVDCGSSGSRIFVYFWPRHNGNPHDLLDIKQMRDRNSQPVVKKIKPGISAMADTPEHASDYLRPLLSFAAAHVPVKKHKETPLYILCTAGMRLLPERKQLAILADLVKDLPLEFDFLFSQSQAEVISGKQEGVYAWIGINFVLGRFDHEDESDAEATQELAAGRRRTVGILDMGGASLQIAYEVPTSTSVLPAKQEEAAKILLAEFNLGCDVQHTEHVYRVYVTTFLGFGGNFARQRYEDLVLNETLNKNRLLGQKTGLSPDNPFLDPCLPVGLTDVVERNSQVLHVRGRGDWVSCGAMLSPLLARSNTSQASLNGIYQSPIDFNNSEFYGFSEFFYCTEDVLRIGGRYHGPTFAKAAQDYCGMAWSVLTQRFKNGLFSSHADEHRLKYQCFKSAWMYQVLHEGFHFPYDYPNLRTAQLVYDREVQWTLGAILYKTRFLPLRDLRQEGVRQAHGSWFRLSFVYNHYLFFACILVVLLAIFLYLLRLRRIHHRQTRASAPLDLLWLEEVVPMMGVQVGP

SEQ ID NO: 26641 - protein, 70 aa, Homo sapiens
  Payload ID: 5248
  Gene Symbol: ENTPD7
  Gene Name: ectonucleoside triphosphate diphosphohydrolase 7
  ENSP ID: ENSP00000474132
  MOD_RES (1)..(1): Any amino acid
XCGAMLSPLLARSNTSQASLNGIYQSPIDFNNSEFYGFSEFFYCTEDVLRIGGRYHGPTFAKAAQLVAHK

SEQ ID NO: 26642 - protein, 458 aa, Homo sapiens
  Payload ID: 5249
  Gene Symbol: ENTPD8
  Gene Name: ectonucleoside triphosphate diphosphohydrolase 8
  Uniprot ID: Q5MY95
  ENSP ID: ENSP00000344089
MGLSRKEQVFLALLGASGVSGLTALILLLVEATSVLLPTDIKFGIVFDAGSSHTSLFLYQWLANKENGTGVVSQALACQVEGPGISSYTSNAAQAGESLQGCLEEALVLIPEAQHRKTPTFLGATAGMRLLSRKNSSQARDIFAAVTQVLGRSPVDFWGAELLAGQAEGAFGWITVNYGLGTLVKYSFTGEWIQPPEEMLVGALDMGGASTQITFVPGGPILDKSTQADFRLYGSDYSVYTHSYLCFGRDQMLSRLLVGLVQSRPAALLRHPCYLSGYQTTLALGPLYESPCVHATPPLSLPQNLTVEGTGNPGACVSAIRELFNFSSCQGQEDCAFDGVYQPPLRGQFYVEASYPGQDRWLRDYCASGLYILTLLHEGYGFSEETWPSLEFRKQAGGVDIGWTLGYMLNLTGMIPADAPAQWRAESYGVWVAKVVFMVLALVAVVGAALVQLFWLQD

SEQ ID NO: 26643 - protein, 495 aa, Homo sapiens
  Payload ID: 5249
  Gene Symbol: ENTPD8
  Gene Name: ectonucleoside triphosphate diphosphohydrolase 8
  Uniprot ID: Q5MY95
  ENSP ID: ENSP00000360561
MGLSRKEQVFLALLGASGVSGLTALILLLVEATSVLLPTDIKFGIVFDAGSSHTSLFLYQWLANKENGTGVVSQALACQVEGPGISSYTSNAAQAGESLQGCLEEALVLIPEAQHRKTPTFLGATAGMRLLSRKNSSQARDIFAAVTQVLGRSPVDFWGAELLAGQAEGAFGWITVNYGLGTLVKYSFTGEWIQPPEEMLVGALDMGGASTQITFVPGGPILDKSTQADFRLYGSDYSVYTHSYLCFGRDQMLSRLLVGLVQSRPAALLRHPCYLSGYQTTLALGPLYESPCVHATPPLSLPQNLTVEGTGNPGACVSAIRELFNFSSCQGQEDCAFDGVYQPPLRGQFYAFSNFYYTFHFLNLTSRQPLSTVNATIWEFCQRPWKLVEASYPGQDRWLRDYCASGLYILTLLHEGYGFSEETWPSLEFRKQAGGVDIGWTLGYMLNLTGMIPADAPAQWRAESYGVWVAKVVFMVLALVAVVGAALVQLFWLQD

SEQ ID NO: 26644 - protein, 222 aa, Homo sapiens
  Payload ID: 5249
  Gene Symbol: ENTPD8
  Gene Name: ectonucleoside triphosphate diphosphohydrolase 8
  ENSP ID: ENSP00000420099
LGASGVSGLTALILLLVEATSVLLPTDIKFGIVFDAGSSHTSLFLYQWLANKENGTGVVSQALACQVEGPGISSYTSNAAQAGESLQGCLEEALVLIPEAQHRKTPTFLGATAGMRLLSSHPGPGPVSRGLLGCRAPGRAGRRCLWLDHCQLRLGDAGQVLLHWRMDPASGGDAGGCPGHGRGLHPDHVRAWGPHLGQEHPGRFSPLRLRLQRLHSQLPVLW

SEQ ID NO: 26645 - protein, 495 aa, Homo sapiens; identical to SEQ ID NO: 26643
  Payload ID: 5249
  Gene Symbol: ENTPD8
  Gene Name: ectonucleoside triphosphate diphosphohydrolase 8
  Uniprot ID: Q5MY95
  ENSP ID: ENSP00000420531

SEQ ID NO: 26646 - protein, 925 aa, Homo sapiens
  Payload ID: 5250
  Gene Symbol: ENPP1
  Gene Name: ectonucleotide pyrophosphatase/phosphodiesterase 1
  Uniprot ID: P22413
  ENSP ID: ENSP00000354238
MERDGCAGGGSRGGEGGRAPREGPAGNGRDRGRSHAAEAPGDPQAAASLLAPMDVGEEPLEKAARARTAKDPNTYKVLSLVLSVCVLTTILGCIFGLKPSCAKEVKSCKGRCFERTFGNCRCDAACVELGNCCLDYQETCIEPEHIWTCNKFRCGEKRLTRSLCACSDDCKDKGDCCINYSSVCQGEKSWVEEPCESINEPQCPAGFETPPTLLFSLDGFRAEYLHTWGGLLPVISKLKKCGTYTKNMRPVYPTKTFPNHYSIVTGLYPESHGIIDNKMYDPKMNASFSLKSKEKFNPEWYKGEPIWVTAKYQGLKSGTFFWPGSDVEINGIFPDIYKMYNGSVPFEERILAVLQWLQLPKDERPHFYTLYLEEPDSSGHSYGPVSSEVIKALQRVDGMVGMLMDGLKELNLHRCLNLILISDHGMEQGSCKKYIYLNKYLGDVKNIKVIYGPAARLRPSDVPDKYYSFNYEGIARNLSCREPNQHFKPYLKHFLPKRLHFAKSDRIEPLTFYLDPQWQLALNPSERKYCGSGFHGSDNVFSNMQALFVGYGPGFKHGIEADTFENIEVYNLMCDLLNLTPAPNNGTHGSLNHLLKNPVYTPKHPKEVHPLVQCPFTRNPRDNLGCSCNPSILPIEDFQTQFNLTVAEEKIIKHETLPYGRPRVLQKENTICLLSQHQFMSGYSQDILMPLWTSYTVDRNDSFSTEDFSNCLYQDFRIPLSPVHKCSFYKNNTKVSYGFLSPPQLNKNSSGIYSEALLTTNIVPMYQSFQVIWRYFHDTLLRKYAEERNGVNVVSGPVFDFDYDGRCDSLENLRQKRRVIRNQEILIPTHFFIVLTSCKDTSQTPLHCENLDTLAFILPHRTDNSESCVHGKHDSSWVEELLMLHRARITDVEHITGLSFYQQRKEPVSDILKLKTHLPTFSQED

SEQ ID NO: 26647 - protein, 378 aa, Homo sapiens
  Payload ID: 5250
  Gene Symbol: ENPP1
  Gene Name: ectonucleotide pyrophosphatase/phosphodiesterase 1
  ENSP ID: ENSP00000422424
MERDGCAGGGSRGGEGGRAPREGPAGNGRDRGRSHAAEAPGDPQAAASLLAPMDVGEEPLEKAARARTAKDPNTYKVLSLVLSVCVLTTILGCIFGLKPSCAKEVKSCKGRCFERTFGNCRCDAACVELGNCCLDYQETCIEPEHIWTCNKFRCGEKRLTRSLCACSDDCKDKGDCCINYSSVCQGEKSWVEEPCESINEPQCPAGFETPPTLLFSLDGFRAEYLHTWGGLLPVISKLKKCGTYTKNMRPVYPTKTFPNHYSIVTGLYPESHGIIDNKMYDPKMNASFSLKSKEKFNPEWYKGEPIWVTAKYQGLKSGTFFWPGSDVEINGIFPDIYKMYNGSVPFEERILAVLQWLQLPKDERRTRFFRSFIWTSQQ

SEQ ID NO: 26648 - protein, 863 aa, Homo sapiens
  Payload ID: 5251
  Gene Symbol: ENPP2
  Gene Name: ectonucleotide pyrophosphatase/phosphodiesterase 2
  Uniprot ID: Q13822
  ENSP ID: ENSP00000075322
MARRSSFQSCQIISLFTFAVGVNICLGFTAHRIKRAEGWEEGPPTVLSDSPWTNISGSCKGRCFELQEAGPPDCRCDNLCKSYTSCCHDFDELCLKTARGWECTKDRCGEVRNEENACHCSEDCLARGDCCTNYQVVCKGESHWVDDDCEEIKAAECPAGFVRPPLIIFSVDGFRASYMKKGSKVMPNIEKLRSCGTHSPYMRPVYPTKTFPNLYTLATGLYPESHGIVGNSMYDPVFDATFHLRGREKFNHRWWGGQPLWITATKQGVKAGTFFWSVVIPHERRILTILQWLTLPDHERPSVYAFYSEQPDFSGHKYGPFGPEMTNPLREIDKIVGQLMDGLKQLKLHRCVNVIFVGDHGMEDVTCDRTEFLSNYLTNVDDITLVPGTLGRIRSKFSNNAKYDPKAIIANLTCKKPDQHFKPYLKQHLPKRLHYANNRRIEDIHLLVERRWHVARKPLDVYKKPSGKCFFQGDHGFDNKVNSMQTVFVGYGSTFKYKTKVPPFENIELYNVMCDLLGLKPAPNNGTHGSLNHLLRTNTFRPTMPEEVTRPNYPGIMYLQSDFDLGCTCDDKVEPKNKLDELNKRLHTKGSTEERHLLYGRPAVLYRTRYDILYHTDFESGYSEIFLMPLWTSYTVSKQAEVSSVPDHLTSCVRPDVRVSPSFSQNCLAYKNDKQMSYGFLFPPYLSSSPEAKYDAFLVTNMVPMYPAFKRVWNYFQRVLVKKYASERNGVNVISGPIFDYDYDGLHDTEDKIKQYVEGSSIPVPTHYYSIITSCLDFTQPADKCDGPLSVSSFILPHRPDNEESCNSSEDESKWVEELMKMHTARVRDIEHLTSLDFFRKTSRSYPEILTLKTYLHTYESEI

SEQ ID NO: 26649 - protein, 915 aa, Homo sapiens
  Payload ID: 5251
  Gene Symbol: ENPP2
  Gene Name: ectonucleotide pyrophosphatase/phosphodiesterase 2
  Uniprot ID: Q13822
  ENSP ID: ENSP00000259486
MARRSSFQSCQIISLFTFAVGVNICLGFTAHRIKRAEGWEEGPPTVLSDSPWTNISGSCKGRCFELQEAGPPDCRCDNLCKSYTSCCHDFDELCLKTARGWECTKDRCGEVRNEENACHCSEDCLARGDCCTNYQVVCKGESHWVDDDCEEIKAAECPAGFVRPPLIIFSVDGFRASYMKKGSKVMPNIEKLRSCGTHSPYMRPVYPTKTFPNLYTLATGLYPESHGIVGNSMYDPVFDATFHLRGREKFNHRWWGGQPLWITATKQGVKAGTFFWSVVIPHERRILTILQWLTLPDHERPSVYAFYSEQPDFSGHKYGPFGPEESSYGSPFTPAKRPKRKVAPKRRQERPVAPPKKRRRKIHRMDHYAAETRQDKMTNPLREIDKIVGQLMDGLKQLKLHRCVNVIFVGDHGMEDVTCDRTEFLSNYLTNVDDITLVPGTLGRIRSKFSNNAKYDPKAIIANLTCKKPDQHFKPYLKQHLPKRLHYANNRRIEDIHLLVERRWHVARKPLDVYKKPSGKCFFQGDHGFDNKVNSMQTVFVGYGSTFKYKTKVPPFENIELYNVMCDLLGLKPAPNNGTHGSLNHLLRTNTFRPTMPEEVTRPNYPGIMYLQSDFDLGCTCDDKVEPKNKLDELNKRLHTKGSTEERHLLYGRPAVLYRTRYDILYHTDFESGYSEIFLMPLWTSYTVSKQAEVSSVPDHLTSCVRPDVRVSPSFSQNCLAYKNDKQMSYGFLFPPYLSSSPEAKYDAFLVTNMVPMYPAFKRVWNYFQRVLVKKYASERNGVNVISGPIFDYDYDGLHDTEDKIKQYVEGSSIPVPTHYYSIITSCLDFTQPADKCDGPLSVSSFILPHRPDNEESCNSSEDESKWVEELMKMHTARVRDIEHLTSLDFFRKTSRSYPEILTLKTYLHTYESEI

SEQ ID NO: 26650 - protein, 884 aa, Homo sapiens
  Payload ID: 5251
  Gene Symbol: ENPP2
  Gene Name: ectonucleotide pyrophosphatase/phosphodiesterase 2
  ENSP ID: ENSP00000403315
MTRHADRIISLFTFAVGVNICLGFTAHRIKRAEGWEEGPPTVLSDSPWTNISGSCKGRCFELQEAGPPDCRCDNLCKSYTSCCHDFDELCLKTARGWECTKDRCGEVRNEENACHCSEDCLARGDCCTNYQVVCKGESHWVDDDCEEIKAAECPAGFVRPPLIIFSVDGFRASYMKKGSKVMPNIEKLRSCGTHSPYMRPVYPTKTFPNLYTLATGLYPESHGIVGNSMYDPVFDATFHLRGREKFNHRWWGGQPLWITATKQGVKAGTFFWSVVIPHERRILTILQWLTLPDHERPSVYAFYSEQPDFSGHKYGPFGPEMTNPLREIDKIVGQLMDGLKQLKLHRCVNVIFVGDHGMEDVTCDRTEFLSNYLTNVDDITLVPGTLGRIRSKFSNNAKYDPKAIIANLTCKKPDQHFKPYLKQHLPKRLHYANNRRIEDIHLLVERRWHVARKPLDVYKKPSGKCFFQGDHGFDNKVNSMQTVFVGYGSTFKYKTKVPPFENIELYNVMCDLLGLKPAPNNGTHGSLNHLLRTNTFRPTMPEEVTRPNYPGIMYLQSDFDLGCTCDDKVEPKNKLDELNKRLHTKGSTEAETRKFRGSRNENKENINGNFEPRKERHLLYGRPAVLYRTRYDILYHTDFESGYSEIFLMPLWTSYTVSKQAEVSSVPDHLTSCVRPDVRVSPSFSQNCLAYKNDKQMSYGFLFPPYLSSSPEAKYDAFLVTNMVPMYPAFKRVWNYFQRVLVKKYASERNGVNVISGPIFDYDYDGLHDTEDKIKQYVEGSSIPVPTHYYSIITSCLDFTQPADKCDGPLSVSSFILPHRPDNEESCNSSEDESKWVEELMKMHTARVRDIEHLTSLDFFRKTSRSYPEILTLKTYLHTYESEI

SEQ ID NO: 26651 - protein, 888 aa, Homo sapiens
  Payload ID: 5251
  Gene Symbol: ENPP2
  Gene Name: ectonucleotide pyrophosphatase/phosphodiesterase 2
  Uniprot ID: Q13822
  ENSP ID: ENSP00000428291
MARRSSFQSCQIISLFTFAVGVNICLGFTAHRIKRAEGWEEGPPTVLSDSPWTNISGSCKGRCFELQEAGPPDCRCDNLCKSYTSCCHDFDELCLKTARGWECTKDRCGEVRNEENACHCSEDCLARGDCCTNYQVVCKGESHWVDDDCEEIKAAECPAGFVRPPLIIFSVDGFRASYMKKGSKVMPNIEKLRSCGTHSPYMRPVYPTKTFPNLYTLATGLYPESHGIVGNSMYDPVFDATFHLRGREKFNHRWWGGQPLWITATKQGVKAGTFFWSVVIPHERRILTILQWLTLPDHERPSVYAFYSEQPDFSGHKYGPFGPEMTNPLREIDKIVGQLMDGLKQLKLHRCVNVIFVGDHGMEDVTCDRTEFLSNYLTNVDDITLVPGTLGRIRSKFSNNAKYDPKAIIANLTCKKPDQHFKPYLKQHLPKRLHYANNRRIEDIHLLVERRWHVARKPLDVYKKPSGKCFFQGDHGFDNKVNSMQTVFVGYGSTFKYKTKVPPFENIELYNVMCDLLGLKPAPNNGTHGSLNHLLRTNTFRPTMPEEVTRPNYPGIMYLQSDFDLGCTCDDKVEPKNKLDELNKRLHTKGSTEAETRKFRGSRNENKENINGNFEPRKERHLLYGRPAVLYRTRYDILYHTDFESGYSEIFLMPLWTSYTVSKQAEVSSVPDHLTSCVRPDVRVSPSFSQNCLAYKNDKQMSYGFLFPPYLSSSPEAKYDAFLVTNMVPMYPAFKRVWNYFQRVLVKKYASERNGVNVISGPIFDYDYDGLHDTEDKIKQYVEGSSIPVPTHYYSIITSCLDFTQPADKCDGPLSVSSFILPHRPDNEESCNSSEDESKWVEELMKMHTARVRDIEHLTSLDFFRKTSRSYPEILTLKTYLHTYESEI

SEQ ID NO: 26652 - protein, 245 aa, Homo sapiens
  Payload ID: 5251
  Gene Symbol: ENPP2
  Gene Name: ectonucleotide pyrophosphatase/phosphodiesterase 2
  ENSP ID: ENSP00000428304
MARRSSFQSCQIISLFTFAVGVNICLGFTAHRIKRAEGWEEGPPTVLSDSPWTNISGSCKGRCFELQEAGPPDCRCDNLSRGWECTKDRCGEVRNEENACHCSEDCLARGDCCTNYQVVCKGESHWVDDDCEEIKAAECPAGFVRPPLIIFSVDGFRASYMKKGSKVMPNIEKLRSCGTHSPYMRPVYPTKTFPNLYTLATGLYPESHGIVGNSMYDPVFDATFHLRGREKFNHRWWGGQPVSFA

SEQ ID NO: 26653 - protein, 162 aa, Homo sapiens
  Payload ID: 5251
  Gene Symbol: ENPP2
  Gene Name: ectonucleotide pyrophosphatase/phosphodiesterase 2
  ENSP ID: ENSP00000429447
MARRSSFQSCQIISLFTFAVGVNICLGFTAHRIKRAEGWEEGPPTVLSDSPWTNISGSCKGRCFELQEAGPPDCRCDNLCKSYTSCCHDFDELCLKTARGWECTKDRCGEVRNEENACHCSEDCLARGDCCTNYQVVCKGESHWVDDDCEEIKAAECPAGGP

SEQ ID NO: 26654 - protein, 498 aa, Homo sapiens
  Payload ID: 5251
  Gene Symbol: ENPP2
  Gene Name: ectonucleotide pyrophosphatase/phosphodiesterase 2
  ENSP ID: ENSP00000429476
MEDVTCDRTEFLSNYLTNVDDITLVPGTLGRIRSKFSNNAKYDPKAIIANLTCKKPDQHFKPYLKQHLPKRLHYANNRRIEDIHLLVERRWHVARKPLDVYKKPSGKCFFQGDHGFDNKVNSMQTVFVGYGSTFKYKTKVPPFENIELYNVMCDLLGLKPAPNNGTHGSLNHLLRTNTFRPTMPEEVTRPNYPGIMYLQSDFDLGCTCDDKNKLDELNKRLHTKGSTEERHLLYGRPAVLYRTRYDILYHTDFESGYSEIFLMPLWTSYTVSKQAEVSSVPDHLTSCVRPDVRVSPSFSQNCLAYKNDKQMSYGFLFPPYLSSSPEAKYDAFLVTNMVPMYPAFKRVWNYFQRVLVKKYASERNGVNVISGPIFDYDYDGLHDTEDKIKQYVEGSSIPVPTHYYSIITSCLDFTQPADKCDGPLSVSSFILPHRPDNEESCNSSEDESKWVEELMKMHTARVRDIEHLTSLDFFRKTSRSYPEILTLKTYLHTYESEI

SEQ ID NO: 26655 - protein, 875 aa, Homo sapiens [sequence omitted]

SEQ ID NO: 26656 - protein, 663 aa, Homo sapiens
  Payload ID: 5252
  Gene Symbol: ENPP3
  Gene Name: ectonucleotide pyrophosphatase/phosphodiesterase 3
  ENSP ID: ENSP00000350964
MESTLTLATEQPVKKNTLKKYKIACIVLLALLVIMSLGLGLGLGLRKLEKQGSCRKKCFDASFRGLENCRCDVACKDRGDCCWDFEDTCVESTRIWMCNKFRCGETRLEASLCSCSDDCLQRKDCCADYKSVCQGETSWLEENCDTAQQSQCPEGFDLPPVILFSMDGFRAEYLYTWDTLMPNINKLKTCGIHSKYMRAMYPTKTFPNHYTIVTGLYPESHGIIDNNMYDVNLNKNFSLSSKEQNNPAWWHGQPMWLTAMYQGLKAATYFWPGSEVAINGSFPSIYMPYNGSVPFEERISTLLKWLDLPKAERPRFYTMYFEEPDSSGHAGGPVSARVIKALQVVDHAFGMLMEGLKQRNLHNCVNIILLADHGMDQTYCNKMEYMTDYFPRINFFYMYEGPAPRIRAHNIPHDFFSFNSEEIVRNLSCRKPDQHFKPYLTPDLPKRLHYAKNVRIDKVHLFVDQQWLAVRSKSNTNCGGGNHGYNNEFRSMEAIFLAHGPSFKEKTEVEPFENIEVYNLMCDLLRIQPAPNNGTHGSLNHLLKVPFYEPSHAEEVSKFSVCGFANPLPTESLDCFCPHLQNSTQLEQVNQMLNLTQEEITATVKVNLPFGRPRVLQKNVDHCLLYHREYVSGFGKAMRMPMWSSYTVPQLPAIEHQIANMML

SEQ ID NO: 26657 - protein, 875 aa, Homo sapiens [sequence omitted]

SEQ ID NO: 26658 - protein, 53 aa, Homo sapiens
  Payload ID: 5252
  Gene Symbol: ENPP3
  Gene Name: ectonucleotide pyrophosphatase/phosphodiesterase 3
  ENSP ID: ENSP00000408642
MESTLTLATEQPVKKNTLKKYKIACITGSLSFGISPHHNLCFPGSSDPPASAS

SEQ ID NO: 26659 - protein, 53 aa, Homo sapiens
  Payload ID: 5252
  Gene Symbol: ENPP3
  Gene Name: ectonucleotide pyrophosphatase/phosphodiesterase 3
  ENSP ID: ENSP00000415589
MESTLTLATEQPVKKNTLKKYKIACIGLSPLGSHLTTTSVSQAQVILLPQPPE

SEQ ID NO: 26660 - protein, 453 aa, Homo sapiens
  Payload ID: 5253
  Gene Symbol: ENPP4
  Gene Name: ectonucleotide pyrophosphatase/phosphodiesterase 4 (putative)
  Uniprot ID: Q9Y6X5
  ENSP ID: ENSP00000318066
MKLLVILLFSGLITGFRSDSSSSLPPKLLLVSFDGFRADYLKNYEFPHLQNFIKEGVLVEHVKNVFITKTFPNHYSIVTGLYEESHGIVANSMYDAVTKKHFSDSNDKDPFWWNEAVPIWVTNQLQENRSSAAAMWPGTDVPIHDTISSYFMNYNSSVSFEERLNNITMWLNNSNPPVTFATLYWEEPDASGHKYGPEDKENMSRVLKKIDDLIGDLVQRLKMLGLWENLNVIITSDHGMTQCSQDRLINLDSCIDHSYYTLIDLSPVAAILPKINRTEVYNKLKNCSPHMNVYLKEDIPNRFYYQHNDRIQPIILVADEGWTIVLNESSQKLGDHGYDNSLPSMHPFLAAHGPAFHKGYKHSTINIVDIYPMMCHILGLKPHPNNGTFGHTKCLLVDQWCINLPEAIAIVIGSLLVLTMLTCLIIIMQNRLSVPRPFSRLQLQEDDDDPLIG

SEQ ID NO: 26661 - protein, 477 aa, Homo sapiens
  Payload ID: 5254
  Gene Symbol: ENPP5
  Gene Name: ectonucleotide pyrophosphatase/phosphodiesterase 5 (putative)
  Uniprot ID: Q9UJA9
  ENSP ID: ENSP00000230565
MTSKFLLVSFILAALSLSTTFSLQPDQQKVLLVSFDGFRWDYLYKVPTPHFHYIMKYGVHVKQVTNVFITKTYPNHYTLVTGLFAENHGIVANDMFDPIRNKSFSLDHMNIYDSKFWEEATPIWITNQRAGHTSGAAMWPGTDVKIHKRFPTHYMPYNESVSFEDRVAKIIEWFTSKEPINLGLLYWEDPDDMGHHLGPDSPLMGPVISDIDKKLGYLIQMLKKAKLWNTLNLIITSDHGMTQCSEERLIELDQYLDKDHYTLIDQSPVAAILPKEGKFDEVYEALTHAHPNLTVYKKEDVPERWHYKYNSRIQPIIAVADEGWHILQNKSDDFLLGNHGYDNALADMHPIFLAHGPAFRKNFSKEAMNSTDLYPLLCHLLNITAMPHNGSFWNVQDLLNSAMPRVVPYTQSTILLPGSVKPAEYDQEGSYPYFIGVSLGSIIVIVFFVIFIKHLIHSQIPALQDMHAEIAQPLLQA

SEQ ID NO: 26662 - protein, 477 aa, Homo sapiens; identical to SEQ ID NO: 26661
  Payload ID: 5254
  Gene Symbol: ENPP5
  Gene Name: ectonucleotide pyrophosphatase/phosphodiesterase 5 (putative)
  Uniprot ID: Q9UJA9
  ENSP ID: ENSP00000360436

SEQ ID NO: 26663 - protein, 440 aa, Homo sapiens
  Payload ID: 5255
  Gene Symbol: ENPP6
  Gene Name: ectonucleotide pyrophosphatase/phosphodiesterase 6
  Uniprot ID: Q6UWR7
  ENSP ID: ENSP00000296741
MAVKLGTLLLALALGLAQPASARRKLLVFLLDGFRSDYISDEALESLPGFKEIVSRGVKVDYLTPDFPSLSYPNYYTLMTGRHCEVHQMIGNYMWDPTTNKSFDIGVNKDSLMPLWWNGSEPLWVTLTKAKRKVYMYYWPGCEVEILGVRPTYCLEYKNVPTDINFANAVSDALDSFKSGRADLAAIYHERIDVEGHHYGPASPQRKDALKAVDTVLKYMTKWIQERGLQDRLNVIIFSDHGMTDIFWMDKVIELNKYISLNDLQQVKDRGPVVSLWPAPGKHSEIYNKLSTVEHMTVYEKEAIPSRFYYKKGKFVSPLTLVADEGWFITENREMLPFWMNSTGRREGWQRGWHGYDNELMDMRGIFLAFGPDFKSNFRAAPIRSVDVYNVMCNVVGITPLPNNGSWSRVMCMLKGRASTAPPVWPSHCALALILLFLLA

SEQ ID NO: 26664 - protein, 194 aa, Homo sapiens
  Payload ID: 5255
  Gene Symbol: ENPP6
  Gene Name: ectonucleotide pyrophosphatase/phosphodiesterase 6
  ENSP ID: ENSP00000423497
MIGNYMWDPTTNKSFDIGVNKDSLMPLWWNGSEPLWVTLTKAKRKVYMYYWPGCEVEILGVRPTYCLEYKNVPTDINFANAVSDALDSFKSGRADLAAIYHERIDVEGHHYGPASPQRKDALKAVDTVLKYMTKWIQERGLQDRLNVIIFSDHGMTDIFWMDKVIELNKYISLNDLQQVKDRGPVVSLWPAPGK

SEQ ID NO: 26665 - protein, 458 aa, Homo sapiens
  Payload ID: 5256
  Gene Symbol: ENPP7
  Gene Name: ectonucleotide pyrophosphatase/phosphodiesterase 7
  Uniprot ID: Q6UWV6
  ENSP ID: ENSP00000332656
MRGPAVLLTVALATLLAPGAGAPVQSQGSQNKLLLVSFDGFRWNYDQDVDTPNLDAMARDGVKARYMTPAFVTMTSPCHFTLVTGKYIENHGVVHNMYYNTTSKVKLPYHATLGIQRWWDNGSVPIWITAQRQGLRAGSFFYPGGNVTYQGVAVTRSRKEGIAHNYKNETEWRANIDTVMAWFTEEDLDLVTLYFGEPDSTGHRYGPESPERREMVRQVDRTVGYLRESIARNHLTDRLNLIITSDHGMTTVDKRAGDLVEFHKFPNFTFRDIEFELLDYGPNGMLLPKEGRLEKVYDALKDAHPKLHVYKKEAFPEAFHYANNPRVTPLLMYSDLGYVIHGRINVQFNNGEHGFDNKDMDMKTIFRAVGPSFRAGLEVEPFESVHVYELMCRLLGIVPEANDGHLATLLPMLHTESALPPDGRPTLLPKGRSALPPSSRPLLVMGLLGTVILLSEVA

SEQ ID NO: 26666 - protein, 159 aa, Homo sapiens
  Payload ID: 5256
  Gene Symbol: ENPP7
  Gene Name: ectonucleotide pyrophosphatase/phosphodiesterase 7
  ENSP ID: ENSP00000460429
LKDAHPKLHVYKKEAFPEAFHYANNPRVTPLLMYSDLGYVIHGRINVQFNNGEHGFDNKDMDMKTIFRAVGPSFRAGLEVEPFESVHVYELMCRLLGIVPEANDGHLATLLPMLHTESALPPDGRPTLLPKGRSALPPSSRPLLVMGLLGTVILLSEVA

SEQ ID NO: 26667 - protein, 2579 aa, Homo sapiens
  Payload ID: 5257
  Gene Symbol: EPG5
  Gene Name: ectopic P-granules autophagy protein 5 homolog (C. elegans)
  Uniprot ID: Q9HCE0
  ENSP ID: ENSP00000282041
MAEAVKPQRRAKAKASRTKTKEKKKYETPQREESSEVSLPKTSREQEIPSLACEFKGDHLKVVTDSQLQDDASGQNESEMFDVPLTSLTISNEESLTCNTEPPKEGGEARPCVGDSAVTPKVHPGDNVGTKVETPKNFTEVEENMSVQGGLSESAPQSNFSYTQPAMENIQVRETQNSKEDKQGLVCSSEVPQNVGLQSSCPAKHGFQTPRVKKLYPQLPAEIAGEAPALVAVKPLLRSERLYPELPSQLELVPFTKEQLKILEPGSWLENVESYLEEFDSMAHQDRHEFYELLLNYSRCRKQLLLAEAELLTLTSDCQNAKSRLWQFKEEQMSVQGICADQVKVFSYHRYQRVEMNENALVELKKLFDAKSEHLHQTLALHSYTSVLSRLQVESYIYALLSSSAVLRSSAIHQQGRASKQTESIPSDLCQLKECISVLFMFTRRVNEDTQFHDDILLWLQKLVSVLQRVGCPGDHLFLLNHILRCPAGVSKWAVPFIQIKVLHNPSGVFHFMQSLALLMSPVKNRAEFMCHMKPSERKPSSSGPGSGTWTLVDEGGEEDEDPETSWILLNEDDLVTILAQFPFHELFQHLLGFKAKGDYLPETTRPQEMMKIFAFANSLVELLAVGLETFNRARYRQFVKRIGYMIRMTLGYVSDHWAQYVSHNQGSGLAQQPYSMEKLQVEFDELFLRAVLHVLKAKRLGIWLFMSEMPFGTLSVQMLWKLFYLMHQVESENLQQLSSSLQPAQCKQQLQDPEHFTNFEKCLSSMNSSEEICLLTTFAQMAQARRTNVDEDFIKIIVLEIYEVSYVTLSTRETFSKVGRELLGTITAVHPEIISVLLDRVQETIDQVGMVSLYLFKELPLYLWQPSASEIAVIRDWLLNYNLTVVKNKLACVILEGLNWGFAKQATLHLDQAVHAEVALMVLEAYQKYLAQKPYAGILSESMKQVSYLASIVRYGETPETSFNQWAWNLILRLKLHKNDYGIQPNCPAVPFSVTVPDMTESPTFHPLLKAVKAGMPIGCYLALSMTAVGHSIEKFCAEGIPLLGILVQSRHLRTVVHVLDKILPLFYPCQYYLLKNEQFLSHLLLFLHLDSGVPQGVTQQVTHKVAQHLTGASHGDNVKLLNSMIQAHISVSTQPNEVGPVAVLEFWVQALISQHLWYREQPILFLMDHLCKAAFQLMQEDCIQKLLYQQHKNALGYHCDRSLLSSLVSWIVAGNITPSFVEGLATPTQVWFAWTVLNMESIFEEDSQLRRVIEGELVINSAFTPDQALKKAQTQLKLPIVPSLQRLLIYRWAHQALVTPSDHPLLPLIWQKFFLLYLHRPGPQYGLPIDGCIGRRFFQSPAHINLLKEMKRRLTEVADFHHAASKALRVPAEGSEGLPESHSGTPGYLTSPELHKELVRLFNVYILWLEDENFQKGDTYIPSLPKHYDIHRLAKVMQNQQDLWMEYLNMERIYHEFQETVGLWTQAKLESHSTPCSLSVQLDFTDPLLAKERVLSNLRKHEAPQPPLALHPTKPPVPVISSAVLLSQKDATQLVCTDLNLLQQQARTAALRESQQVALDGELLDTMPKQYVNREEQTTLHLECRGSSGKKCQGAAVVTVQFEGMHKNEAISQQLHVLRKEVKQLQAEAAKPPSLNIVEAAVHAENLITALVNAYKLQPTPGIQKVGISLFFTIVDYVSDETQRHPPTRQFFTSCIEILGQVFISGIKSECRKVLETILKNSRLCSLLSPFFTPNAAPAEFIQLYEQVVKFLSEDNSDMIFMLLTKFDLKQWLSATKPPLSDRTRLLESIHLALTAWGLEPDEDILMPFNLFCKHWTYLLLYQFPDQYSDILRLLMQSSAEQLLSPECWKATLRALGCCAPSCQQGAASTEGAVLPSSSDALLSDKQVMETIQWLSDFFYKLRLSKMDFKSFGLFSKWSPYMADVKTFLGYLVKRLIDLEMTCLAQDPTASRKTVLKSLHSVIIQLFKPWILVLEDNESSQQRHYPWLESDTVVASSIVQLFTDCIDSLHESFKDKLLPGDAGALWLHLMHYCEACTAPKMPEFILYAFHSTYRKLPWKDLHPDQMLMEAFFKVERGSPKSCFLFLGSVLCEVNWVSVLSDAWNSSPHPETRSMIVCLLFMMILLAKEVQLVDQTDSPLLSLLGQTSSLSWHLVDIVSYQSVLSYFSSHYPPSIILAKESYAELIMKLLKVSAGLSIPTDSQKHLDAVPKCQAFTHQMVQFLSTLEQNGKITLAVLEQEMSKLLDDIIVFNPPDMDSQTRHMALSSLFMEVLMMMNNATIPTAEFLRGSIRTWIGQKMHGLVVLPLLTAACQSLASVRHMAETTEACITAYFKESPLNQNSGWGPILVSLQVPELTMEEFLQECLTLGSYLTLYVYLLQCLNSEQTLRNEMKVLLILSKWLEQVYPSSVEEEAKLFLWWHQVLQLSLIQTEQNDSVLTESVIRILLLVQSRQNLVAEERLSSGILGAIGFGRKSPLSNRFRVVARSMAAFLSVQVPMEDQIRLRPGSELHLTPKAQQALNALESMASSKQYVEYQDQILQATQFIRHPGHCLQDGKSFLALLVNCLYPEVHYLDHIR

SEQ ID NO: 26668 - protein, 657 aa, Homo sapiens
  Payload ID: 5257
  Gene Symbol: EPG5
  Gene Name: ectopic P-granules autophagy protein 5 homolog (C. elegans)
  ENSP ID: ENSP00000466403
MIQAHISVSTQPNEVGPVAVLEFWVQALISQHLWYREQPILFLMDHLCKAAFQLMQEDCIQKLLYQQHKNALGYHCDRSLLSSLVSWIVAGNITPSFVEGLATPTQVWFAWTVLNMESIFEEDSQLRRVIEGELVINSAFTPDQALKKAQTQLKLPIVPSLQRLLIYRWAHQALVTPSDHPLLPLIWQKFFLLYLHRPGPQYGLPIDGCIGRRFFQSPAHINLLKEMKRRLTEVADFHHAASKALRVPAEGSEGLPESHSGTPGYLTSPELHKELVRLFNVYILWLEDENFQKGDTYIPSLPKHYDIHRLAKVMQNQQDLWMEYLNMERIYHEFQETVGLWTQAKLESHSTPCSLSVQLDFTDPLLAKERVLSNLRKHEAPQPPLALHPTKPPVPVISSAVLLSQKDATQLVCTDLNLLQQQARTAALRESQQVALDGELLDTMPKQYVNREEQTTLHLECRGSSGKKCQGAAVVTVQFEGMHKNEAISQQLHVLRKEVKQLQAEAAKPPSLNIVEAAVHAENLITALVNAYKLQPTPGIQKVGISLFFTIVDYVSDETQRHPPTRQFFTSCIEILGQVFISGIKSECRKVLETILKNSRLCSLLSPFFTPNAAPAEFIQLYEQVVKFLSEDNSDMIFMLLTKASGVHSLGTYCLGP

SEQ ID NO: 26669 - protein, 336 aa, Homo sapiens
  Payload ID: 5257
  Gene Symbol: EPG5
  Gene Name: ectopic P-granules autophagy protein 5 homolog (C. elegans)
  ENSP ID: ENSP00000466990
MIQAHISVSTQPNEVGPVAVLEFWVQALISQHLWYREQPILFLMDHLCKAAFQLMQEDCIQKLLYQQHKNALGYHCDRSLLSSLVSWIVAGNITPSFVEGLATPTQVWFAWTVLNMESIFEEDSQLRRVIEGELVINSAFTPDQALKKAQTQLKLPIVPSLQRLLIYRWAHQALVTPSDHPLLPLIWQKFFLLYLHRPGPQYGLPIDGCIGRRFFQSPAHINLLKEMKRRLTEVADFHHAASKALRVPAEGSEGLPESHSGTPGYLTSPELHKELVRLFNVYILWLEDENFQKGDTYIPSLPKHYDIHRLAKVMQNQQGCSLLSIDPSTRMGFRKL

SEQ ID NO: 26670 - protein, 505 aa, Homo sapiens
  Payload ID: 5257
  Gene Symbol: EPG5
  Gene Name: ectopic P-granules autophagy protein 5 homolog (C. elegans)
  ENSP ID: ENSP00000467066
  MOD_RES (1)..(1): Any amino acid
XVERGSPKSCFLFLGSVLCEVNWVSVLSDAWNSSPHPETRSMIVCLLFMMILLAKEVQLVDQTDSPLLSLLGQTSSLSWHLVDIVSYQSVLSYFSSHYPPSIILAKESYAELIMKLLKVSAGLSIPTDSQKHLDAVPKCQAFTHQMVQFLSTLEQNGKITLAVLEQEMSKLLDDIIVFNPPDMDSQTRHMALSSLFMEVLMMMNNATIPTAEFLRGSIRTWIGQKMHGLVVLPLLTAACQSLASVRHMAETTEACITAYFKESPLNQNSGWGPILVSLQVPELTMEEFLQECLTLGSYLTLYVYLLQCLNSEQTLRNEMKVLLILSKWLEQVYPSSVEEEAKLFLWWHQVLQLSLIQTEQNDSVLTESVIRILLLVQSRQNLVAEERLSSGILGAIGFGRKSPLSNRFRVVARSMAAFLSVQVPMEDQIRLRPGSELHLTPKAQQALNALESMASSKQYVEYQDQILQATQFIRHPGHCLQDGKSFLALLVNCLYPEVHYLDHIR

SEQ ID NO: 26671 - protein, 856 aa, Homo sapiens
  Payload ID: 5257
  Gene Symbol: EPG5
  Gene Name: ectopic P-granules autophagy protein 5 homolog (C. elegans)
  ENSP ID: ENSP00000467464
MIQAHISVSTQPNEVGPVAVLEFWVQALISQHLWYREQPILFLMDHLCKAAFQLMQEDCIQKLLYQQHKNALGYHCDRSLLSSLVSWIVAGNITPSFVEGLATPTQVWFAWTVLNMESIFEEDSQLRRVIEGELVINSAFTPDQALKKAQTQLKLPIVPSLQRLLIYRWAHQALVTPSDHPLLPLIWQKFFLLYLHRPGPQYGLPIDGCIGRRFFQSPAHINLLKEMKRRLTEVADFHHAASKALRVPAEGSEGLPESHSGTPGYLTSPELHKELVRLFNVYILWLEDENFQKGDTYIPSLPKHYDIHRLAKVMQNQQDLWMEYLNMERIYHEFQETVGLWTQAKLESHSTPCSLSVQLDFTDPLLAKERVLSNLRKHEAPQPPLALHPTKPPVPVISSAVLLSQKDATQLVCTDLNLLQQQARTAALRESQQVALDGELLDTMPKQYVNREEQTTLHLECRGSSGKKCQGAAVVTVQFEGMHKNEAISQQLHVLRKEVKQLQAEAAKPPSLNIVEAAVHAENLITALVNAYKLQPTPGIQKVGISLFFTIVDYVSDETQRHPPTRQFFTSCIEILGQVFISGIKSECRKVLETILKNSRLCSLLSPFFTPNAAPAEFIQLYEQVVKFLSEDNSDMIFMLLTKFDLKQWLSATKPPLSDRTRLLESIHLALTAWGLEPDEDILMPFNLFCKHWTYLLLYQFPDQYSDILRLLMQSSAEQLLSPECWKATLRALGCCAPSCQQGAASTEGAVLPSSSDALLSDKQVMETIQWLSDFFYKLRLSKMDFKSFGLFSKWSPYMADVKTFLGYLVKRLIDLEMTCLAQDPTASRKTVLKSLHSVIIQLFKPWILVLEDNER

SEQ ID NO: 26672 - protein, 215 aa, Homo sapiens
  Payload ID: 5258
  Gene Symbol: EDARADD
  Gene Name: EDAR-associated death domain
  Uniprot ID: Q8WWZ3
  ENSP ID: ENSP00000335076
MGLRTTKQMGRGTKAPGHQEDHMVKEPVEDTDPSTLSFNMSDKYPIQDTELPKAEECDTITLNCPRNSDMKNQGEENGFPDSTGDPLPEISKDNSCKENCTCSSCLLRAPTISDLLNDQDLLDVIRIKLDPCHPTVKNWRNFASKWGMSYDELCFLEQRPQSPTLEFLLRNSQRTVGQLMELCRLYHRADVEKVLRRWVDEEWPKRERGDPSRHF

SEQ ID NO: 26673 - protein, 205 aa, Homo sapiens
  Payload ID: 5258
  Gene Symbol: EDARADD
  Gene Name: EDAR-associated death domain
  Uniprot ID: Q8WWZ3
  ENSP ID: ENSP00000352320
MASPDDPLRADHMVKEPVEDTDPSTLSFNMSDKYPIQDTELPKAEECDTITLNCPRNSDMKNQGEENGFPDSTGDPLPEISKDNSCKENCTCSSCLLRAPTISDLLNDQDLLDVIRIKLDPCHPTVKNWRNFASKWGMSYDELCFLEQRPQSPTLEFLLRNSQRTVGQLMELCRLYHRADVEKVLRRWVDEEWPKRERGDPSRHF

SEQ ID NO: 26674 - protein, 84 aa, Homo sapiens
  Payload ID: 5258
  Gene Symbol: EDARADD
  Gene Name: EDAR-associated death domain
  ENSP ID: ENSP00000405815
MVKEPVEDTDPSTLSFNMSDKYPIQDTELPKAEECDTITLNCPRNSDMKNQGEENGFPDSTGDPLPEISKDNSCKENCTCSSCL

SEQ ID NO: 26675 - protein, 151 aa, Homo sapiens
  Payload ID: 5259
  Gene Symbol: EEF1E1-BLOC1S5
  Gene Name: EEF1E1-BLOC1S5 readthrough (NMD candidate)
  ENSP ID: ENSP00000380597
MAAAAELSLLEKSLGLSKGNKYSAQGERQIPVLQTNNGPSLTGLTTIAAHLVKQANKEYLLGSTAEEKAIVQQWLEYRVTQVDGHSSKNDIHTLLKDLNSYLEDKVYLTGYNFTLADILLYYGLHRFIILEKFIQGFWITDQLFKVKLVIL

SEQ ID NO: 26676 - protein, 598 aa, Homo sapiens
  Payload ID: 5260
  Gene Symbol: EFCC1
  Gene Name: EF-hand and coiled-coil domain containing 1
  Uniprot ID: Q9HA90
  ENSP ID: ENSP00000414597
MEPVSTGAEAGMEGAGGDPYRRPARRTQWLLSALAHHYGLDRGVENEIVVLATGLDQYLQEVFHHLDCRGAGRLPRADFRALCAVLGLRAEGATTAGQAAGDGNSRDVTPGDAAAELATDGDSDTDEEARLALRAEPPELTFRQFHARLCGYFGTRAGPRLPRGALSEHIETQIRLRRPRRRRRPPCAPGPDSGPDCERVARLEEENSSLRELVEDLRAALQSSDARCLALQVGLWKSQASTHEMGHGGPEAAVRELRQAQGALAAAEARAGRLRRGQAEVRRRAEEARQVVLRSLHRVRELEALAQQVPGLQRWVRRLEAELQRYRSEDSQLPTPQLANPEPGDKSNEPEDAGTRDPDPTPEGAWQSDSSSGSRALDEVDEQLFRSVEGQAASDEEEVEEERWQEEKKTPAAEAKTLLARLSSCRGRCDDQTAEKLMTYFGHFGGANHAHTLGELEACIAMLVEQLRTQGCGGRTLGTSEEEAELQQKVEENEHLRLELQMVETERVRLSLLEEKLVDVLQLLQRLRDLNISKRALGKILLSTLDAFRDPTHEGRPSPAAILDALHQALAACQLLRRQPSAPASAAAALTNPLLVSC

SEQ ID NO: 26677 - protein, 211 aa, Homo sapiens
  Payload ID: 5261
  Gene Symbol: EFCAB1
  Gene Name: EF-hand calcium binding domain 1
  Uniprot ID: Q9HAE3
  ENSP ID: ENSP00000262103
MNRKKLQKLTDTLTKNCKHFNKFEVNCLIKLFYDLVGGVERQGLVVGLDRNAFRNILHVTFGMTDDMIMDRVFRGFDKDNDGCVNVLEWIHGLSLFLRGSLEEKMKYCFEVFDLNGDGFISKEEMFHMLKNSLLKQPSEEDPDEGIKDLVEITLKKMDHDHDGKLSFADYELAVREETLLLEAFGPCLPDPKSQMEFEAQVFKDPNEFNDM

SEQ ID NO: 26678 - protein, 159 aa, Homo sapiens
  Payload ID: 5261
  Gene Symbol: EFCAB1
  Gene Name: EF-hand calcium binding domain 1
  Uniprot ID: Q9HAE3
  ENSP ID: ENSP00000400873
MNRKKLQKLTDTLTKNCKHLFRGFDKDNDGCVNVLEWIHGLSLFLRGSLEEKMKYCFEVFDLNGDGFISKEEMFHMLKNSLLKQPSEEDPDEGIKDLVEITLKKMDHDHDGKLSFADYELAVREETLLLEAFGPCLPDPKSQMEFEAQVFKDPNEFNDM

SEQ ID NO: 26679 - protein, 78 aa, Homo sapiens
  Payload ID: 5261
  Gene Symbol: EFCAB1
  Gene Name: EF-hand calcium binding domain 1
  ENSP ID: ENSP00000429644
  MOD_RES (1)..(1): Any amino acid
XKQPSEEDPDEGIKDLVEITLKKMDHDHDGKLSFADYELAVREETLLLEAFGPCLPDPKSQMEFEAQVFKDPNEFNDM

SEQ ID NO: 26680 - protein, 54 aa, Homo sapiens
  Payload ID: 5261
  Gene Symbol: EFCAB1
  Gene Name: EF-hand calcium binding domain 1
  ENSP ID: ENSP00000430374
MNRKKLQKLTDTLTKNCKHLFRGFDKDNDGCVNVLEWIHGLSLFLRGSLEEKMK

SEQ ID NO: 26681 - protein, 159 aa, Homo sapiens; identical to SEQ ID NO: 26678
  Payload ID: 5261
  Gene Symbol: EFCAB1
  Gene Name: EF-hand calcium binding domain 1
  Uniprot ID: Q9HAE3
  ENSP ID: ENSP00000430765

SEQ ID NO: 26682 - protein, 129 aa, Homo sapiens
  Payload ID: 5261
  Gene Symbol: EFCAB1
  Gene Name: EF-hand calcium binding domain 1
  ENSP ID: ENSP00000430940
  MOD_RES (1)..(1): Any amino acid
XVNVLEWIHGLSLFLRGSLEEKMKYCFEVFDLNGDGFISKEEMFHMLKNSLLKQPSEEDPDEGIKDLVEITLKKMDHDHDGKLSFADYELAVREETLLLEAFGPCLPDPKSQMEFEAQVFKDPNEFNDM

SEQ ID NO: 26683 - protein, 131 aa, Homo sapiens
  Payload ID: 5262
  Gene Symbol: EFCAB10
  Gene Name: EF-hand calcium binding domain 10
  ENSP ID: ENSP00000417484
METSSRELQAAEYLEKHQIKEVVSYLTSALLFFRPEKPKEYLISLLERLRIAKVTGVAFPFFMDNSNIVAMFEMMDSSGRGTISFVQYKEALKTLGLCTEDEDLQDDGHKITLDKFKEEVNKRMKEIWSAF

SEQ ID NO: 26684 - protein, 149 aa, Homo sapiens
  Payload ID: 5262
  Gene Symbol: EFCAB10
  Gene Name: EF-hand calcium binding domain 10
  ENSP ID: ENSP00000417841
METSSRELQAAEYLEKHQIKEVVSYLTSALLFFRPEKPKEYLISLLERLRIAKVTGVAFPFFMDNSNIVAMFEMMDSSGRGTISFVQYKEALKTLGLCTEDEDLQDDGHKITLDKFKEEVNKRMKEICEKTKGKDSESYQTAAGLLLLH

SEQ ID NO: 26685 - protein, 76 aa, Homo sapiens
  Payload ID: 5262
  Gene Symbol: EFCAB10
  Gene Name: EF-hand calcium binding domain 10
  ENSP ID: ENSP00000418425
METSSRELQAAEYLEKHQIKEVVSYLTSALLFFRPALKTLGLCTEDEDLQDDGHKITLDKFKEEVNKRMKEIWSAF

SEQ ID NO: 26686 - protein, 127 aa, Homo sapiens
  Payload ID: 5262
  Gene Symbol: EFCAB10
  Gene Name: EF-hand calcium binding domain 10
  Uniprot ID: A6NFE3
  ENSP ID: ENSP00000418678
METSSRELQAAEYLEKHQIKEVVSYLTSALLFFRPEKPKEYLISLLERLRIAKVTGVAFPFFMDNSNIVAMFEMMDSSGRGTISFVQYKEALKTLGLCTEDEDLQDDGHKITLDKFKEEVNKRMKEI

SEQ ID NO: 26687 - protein, 163 aa, Homo sapiens
  Payload ID: 5263
  Gene Symbol: EFCAB11
  Gene Name: EF-hand calcium binding domain 11
  Uniprot ID: Q9BUY7
  ENSP ID: ENSP00000326267
MFFSEARARSRTWEASPSEHRKWVEVFKACDEDHKGYLSREDFKTAVVMLFGYKPSKIEVDSVMSSINPNTSGILLEGFLNIVRKKKEAQRYRNEVRHIFTAFDTYYRGFLTLEDFKKAFRQVAPKLPERTVLEVFREVDRDSDGHVSFRDFEYALNYGQKEA

SEQ ID NO: 26688 - protein, 142 aa, Homo sapiens
  Payload ID: 5263
  Gene Symbol: EFCAB11
  Gene Name: EF-hand calcium binding domain 11
  Uniprot ID: Q9BUY7
  ENSP ID: ENSP00000438072
MFFSEARARSRTWEASPSEHRKWVEVFKACDEDHKGYLSREDFKTAVVMLFGYKPSKIEVDSVMSSINPNTSGILLEGFLNIVRKKKEAQRYRNEVRHIFTAFDTYYRGFLTLEDFKKAFRQVAPKLPERTVLEVFRGIFSA

SEQ ID NO: 26689 - protein, 118 aa, Homo sapiens
  Payload ID: 5263
  Gene Symbol: EFCAB11
  Gene Name: EF-hand calcium binding domain 11
  Uniprot ID: Q9BUY7
  ENSP ID: ENSP00000452143
MVFKACDEDHKGYLSREDFKTAVVMLFGYKPSKIEVDSVMSSINPNTSGILLEGFLNIVRKKKEAQRYRNEVRHIFTAFDTYYRGFLTLEDFKKAFRQVAPKLPERTVLEVFRGIFSA

SEQ ID NO: 26690 - protein, 139 aa, Homo sapiens
  Payload ID: 5263
  Gene Symbol: EFCAB11
  Gene Name: EF-hand calcium binding domain 11
  Uniprot ID: Q9BUY7
  ENSP ID: ENSP00000452320
MVFKACDEDHKGYLSREDFKTAVVMLFGYKPSKIEVDSVMSSINPNTSGILLEGFLNIVRKKKEAQRYRNEVRHIFTAFDTYYRGFLTLEDFKKAFRQVAPKLPERTVLEVFREVDRDSDGHVSFRDFEYALNYGQKEA

SEQ ID NO: 26691 - protein, 115 aa, Homo sapiens
  Payload ID: 5263
  Gene Symbol: EFCAB11
  Gene Name: EF-hand calcium binding domain 11
  Uniprot ID: Q9BUY7
  ENSP ID: ENSP00000452335
MLFGYKPSKIEVDSVMSSINPNTSGILLEGFLNIVRKKKEAQRYRNEVRHIFTAFDTYYRGFLTLEDFKKAFRQVAPKLPERTVLEVFREVDRDSDGHVSFRDFEYALNYGQKEA

SEQ ID NO: 26692 - protein, 61 aa, Homo sapiens
  Payload ID: 5263
  Gene Symbol: EFCAB11
  Gene Name: EF-hand calcium binding domain 11
  Uniprot ID: Q9BUY7
  ENSP ID: ENSP00000452397
MFFSEARARSRTWEASPSEHRKWVEVFKACDEDHKGYLSREDFKTAVVMLFGYKPSKKWIL

SEQ ID NO: 26693 - protein, 117 aa, Homo sapiens
  Payload ID: 5263
  Gene Symbol: EFCAB11
  Gene Name: EF-hand calcium binding domain 11
  ENSP ID: ENSP00000452403
VFKACDEDHKGYLSREDFKTAVVMLFGYKPSKIEVDSVMSSINPNTSGILLEGFLNIVRKKKEAQRYRNEVRHIFTAFDTYYRGFLTLEDFKKAFRQVAPKLPERTVLEVFRGIFSA

SEQ ID NO: 26694 - protein, 572 aa, Homo sapiens
  Payload ID: 5264
  Gene Symbol: EFCAB12
  Gene Name: EF-hand calcium binding domain 12
  Uniprot ID: Q6NXP0
  ENSP ID: ENSP00000324241
MDDDYEAYHSLFLSLLGLCPSKTPINENAPVFDPEPVIAHCFKQFQQKDFRLPQTRRRIIMVPRKEDQTPLNPASQPQAPPKPIPSFKVLEARDIQEQPEDRKTWLSQRSKLRQELESFGDVKRWLENKPSITPSEAKVLHMIHEEQSAQPNASQATTRTTRKKAPRLSRLSRQMVPQLQLPEPPALSVMYSYLHSRKIKILEIFHKVGQGENQRITREEFIAAVKAVGVPLKNQEVEDIVIYLSSLGKHNTITMDILANTYKQWSMAQQRSSLATAREHYILAKHRDSLKGPLKKQEVDSAPQLPKVDLLTVPAVDTQMETRPMTLEEMEEVGKRYRERQRQHKLTIPSIQYTEQCHLVRCGNRHFDEHCLPSTIHGDMRELIDSARRHNFLVYLQCWKLCKSYGLPLTEDILMKALLYPGDKIIFQMDKVCPIRQPGGYYSDWKVFSPNLALLRSQGPGKSKRTDKKTPKKSKKMRFKEFEEFTRKLKVKRSSGLQQTHPNSFWPGHLLDKLQLYLPTVATDRSLALFSCVQHQPHVYPATYHPDHWWPLRNKNYMTHAHYDAAKVYYIN

SEQ ID NO: 26695 - protein, 572 aa, Homo sapiens; identical to SEQ ID NO: 26694
  Payload ID: 5264
  Gene Symbol: EFCAB12
  Gene Name: EF-hand calcium binding domain 12
  Uniprot ID: Q6NXP0
  ENSP ID: ENSP00000420854

SEQ ID NO: 26696 - protein, 158 aa, Homo sapiens
  Payload ID: 5264
  Gene Symbol: EFCAB12
  Gene Name: EF-hand calcium binding domain 12
  ENSP ID: ENSP00000421462
MKRTTVCSCRCSKKAPRLSRLSRQMVPQLQLPEPPALSVMYSYLHSRKIKILEIFHKVGQGENQRITREEFIAAVKAVGVPLKNQEVEDIVIYLSSLGKHNTITMDILANTYKQWSMAQQRSSLATAREHYILAKHRDSLKGPLKKQEVDSAPQLPKV

SEQ ID NO: 26697 - protein, 973 aa, Homo sapiens
  Payload ID: 5265
  Gene Symbol: EFCAB13
  Gene Name: EF-hand calcium binding domain 13
  Uniprot ID: Q8IY85
  ENSP ID: ENSP00000332111
METKVHLFCQAEENIDLLDDGSNSFATDLSSGTINHKKYIKFSKTIEKEISPEIRSLSPEYKKIFETSIIFCGEEKSSDFSGEKKVGRKSLQVQQHSKRTEIIPPFLKLSKEKVTRKENSLCKLPNQYSVHKTSSPLCTSSAITREKEMLSNLYMTLYDEVTHGYLHSKELSALHKACKIFSKIRSGKIYVNDLPVILCILRISISDLEMRQALKTVDIDAFQDALKIFCRIKGGRVSTDDVFAVLDSMGIPINREILEEVTKHTYIDSNHMVDIGDIIFTLNELQEQYEDVSITEGSPLNEITSDRKLSSVAGCYLKYKKKNSLSSKLPEPSISKKLNKKSNQYYSKIMENDDLESKRPKNTWQIRKFLGGVGSSNVGVQEPYSKNGINFKKHSEKGEIHDSKSKPQSLKSSTSLSKSLDKSDISSIPKLQKPAVRKHSSLQKQVSSTEKTAISTLENFCEAISKLQENYIAAEELQSILPSTGINLLDEEFQKIVTDTSRNENGMVELDDFVNALAKERSFPECNALPGVIKAIDKIKDKNVDYEDLNTCLQNFGIYLSKPEFKKITELTEAGETKKVNFKEFIDTMMSNTECFSEKLVLPDAIETLDDLRKETMSVSDLWNTLSSLNSNLKKDEFLAALELVTVDEGDKVQFEEFAKVVRNMRDAARLEELQEVVLAADLLEGDMIAGKNLEDFLRNVGIKSPKEEVEKILQSDFVSEDNMVNIKDCMRALRDTQKFSNYIDFRKEASNLKLPKVNEIKEAANILSHVDNGKIGIPDLEHALKCLNVNLTEEDFNEALNCCNVSDNMEVDLKDFLMKMKESPHFQKSKATQILLATTQILQNDLVDVSDLKTLLMDKDLHTANAILTVMLRHVPEHESGKVSIQEFMTKLSDILTIPKAAGKFYLICTYCPDLERQAVVYMLKTIQDSIVKAQVSKKQYNMNIKQHKISLHNFCLNSKANIAKLNPNSKF

SEQ ID NO: 26698 - protein, 37 aa, Homo sapiens
  Payload ID: 5265
  Gene Symbol: EFCAB13
  Gene Name: EF-hand calcium binding domain 13
  ENSP ID: ENSP00000427910
METKVHLFCQAEENIDLLDDGSNSFATDLSSGTINHK

SEQ ID NO: 26699 - protein, 200 aa, Homo sapiens
  Payload ID: 5265
  Gene Symbol: EFCAB13
  Gene Name: EF-hand calcium binding domain 13
  ENSP ID: ENSP00000429566
EELQSILPSTGINLLDEEFQKIVTDTSRNENGMVELDDFVNALAKERSFPECNALPGVIKAIDKIKDKNVDYEDLNTCLQNFGIYLSKPEFKKITELTEAGETKKVNFKEFIDTMMSNTECFSEKLVLPDAIETLDDLRKETMSVSDLWNTLSSLNSNLKKDEFLAALELVTVDDNMEVDLKDFLMKMKESPHFQKSKGK

SEQ ID NO: 26700 - protein, 784 aa, Homo sapiens
  Payload ID: 5265
  Gene Symbol: EFCAB13
  Gene Name: EF-hand calcium binding domain 13
  Uniprot ID: Q8IY85
  ENSP ID: ENSP00000430048
METKVHLFCQAEENIDLLDDGSNSFATDLSSGTINHKKYIKFSKTIEKEISPEIRSLSPEYKKIFETSIIFCGEEKSSDFSGEKKVGRKSLQVQQHSKRTEIIPPFLKLSKEKVTRKENSLCKLPNQYSVHKTSSPLCTSSAITREKEMLSNLYMTLYDEVTHGYLHSKELSGNHMVDIGDIIFTLNELQEQYEDVSITEGSPLNEITSDRKLSSVAGCYLKYKKKNSLSSKLPEPSISKKLNKKSNQYYSKIMENDDLESKRPKNTWQIRKFLGGVGSSNVGVQEPYSKNGINFKKHSEKGEIHDSKSKPQSLKSSTSLSKSLDKSDISSIPKLQKPAVRKHSSLQKQVSSTEKTAISTLENFCEAISKLQENYIAAEELQSILPSTGINLLDEEFQKIVTDTSRNENGMVELDDFVNALAKERSFPECNALPGVIKAIDKIKDKNVDYEDLNTCLQNFGIYLSKPEFKKITELTEAGETKKVNFKEFIDTMMSNTECFSEKLVLPDAIETLDDLRKETMSVSDLWNTLSSLNSNLKKDEFLAALELVTVDEGDKVQFEEFAKVVRNMRDAARLEELQEVVLAADLLEGDMIAGKNLEDFLRNVGIKSPKEEVEKILQSDFVSEDNMVNIKDCMRALRDTQKFSNYIDFRKEASNLKLPKVNEIKEAANILSHVDNGKIGIPDLEHALKCLNVNLTEEDFNEALNCCNVSDNMEVDLKDFLMKMKESPHFQKSKATQILLATTQILQNDLVDVSDLKTLLMDKDLHTANAILTVMLRHVPEHG

SEQ ID NO: 26701 - protein, 53 aa, Homo sapiens
  Payload ID: 5265
  Gene Symbol: EFCAB13
  Gene Name: EF-hand calcium binding domain 13
  ENSP ID: ENSP00000430802
METKVHLFCQAEENIDLLDDGSNSFATDLSSGTINHKKYIKFSKTIEKEISPE

SEQ ID NO: 26702 - protein, 104 aa, Homo sapiens
  Payload ID: 5265
  Gene Symbol: EFCAB13
  Gene Name: EF-hand calcium binding domain 13
  ENSP ID: ENSP00000466136
MLSNLYMTLYDEVTHGYLHSKELSGNHMVDIGDIIFTLNELQEQYEDVSITEGSPLNEITSDRKLSSVAGCYLKYKKKNSLSSKLPEPSISKKLNKKSNQYYSK

SEQ ID NO: 26703 - protein, 6 aa, Homo sapiens
  Payload ID: 5265
  Gene Symbol: EFCAB13
  Gene Name: EF-hand calcium binding domain 13
  ENSP ID: ENSP00000467325
METKVH

SEQ ID NO: 26704 - protein, 495 aa, Homo sapiens
  Payload ID: 5266
  Gene Symbol: EFCAB14
  Gene Name: EF-hand calcium binding domain 14
  Uniprot ID: O75071
  ENSP ID: ENSP00000361001
MKKRKELNALIGLAGDSRRKKPKKGPSSHRLLRTEPPDSDSESSSEEEEEFGVVGNRSRFAKGDYLRCCKICYPLCGFVILAACVVACVGLVWMQVALKEDLDALKEKFRTMESNQKSSFQEIPKLNEELLSKQKQLEKIESGEMGLNKVWINITEMNKQISLLTSAVNHLKANVKSAADLISLPTTVEGLQKSVASIGNTLNSVHLAVEALQKTVDEHKKTMELLQSDMNQHFLKETPGSNQIIPSPSATSELDNKTHSENLKQDILYLHNSLEEVNSALVGYQRQNDLKLEGMNETVSNLTQRVNLIESDVVAMSKVEKKANLSFSMMGDRSATLKRQSLDQVTNRTDTVKIQSIKKEDSSNSQVSKLREKLQLISALTNKPESNRPPETADEEQVESFTSKPSALPKFSQFLGDPVEKAAQLRPISLPGVSSTEDLQDLFRKTGQDVDGKLTYQEIWTSLGSAMPEPESLRAFDSDGDGRYSFLELRVALGI

SEQ ID NO: 26705 - protein, 66 aa, Homo sapiens
  Payload ID: 5266
  Gene Symbol: EFCAB14
  Gene Name: EF-hand calcium binding domain 14
  ENSP ID: ENSP00000474599
  MOD_RES (1)..(1): Any amino acid
XATSELDNKTHSENLKQMGDRSATLKRQSLDQVTNRTDTVKIQSIKFCHQLTHHQGETEERSGENL

SEQ ID NO: 26706 - protein, 221 aa, Homo sapiens
  Payload ID: 5267
  Gene Symbol: EFCAB2
  Gene Name: EF-hand calcium binding domain 2
  ENSP ID: ENSP00000355478
  MOD_RES (1)..(1): Any amino acid
XAGTPRPRLSLGISQATGSAARWRTRRTGKGLGYNSDEIRPRTLLIEHLMEGGRRDHHTMTVLWGTQEIIVAEFHKKIKEAFEVFDHESNNTVDVREIGTIIRSLGCCPTEGELHDLIAEVEEEEPTGYIRFEKFLPVMTEILLERKYRPIPEDVLLRAFEVLDSAKRGFLTKDELIKYMTEEGEPFSQEEMEEMLSAAIDPESNSINYKDYITMMVIDEN

SEQ ID NO: 26707 - protein, 269 aa, Homo sapiens
  Payload ID: 5267
  Gene Symbol: EFCAB2
  Gene Name: EF-hand calcium binding domain 2
  Uniprot ID: Q5VUJ9
  ENSP ID: ENSP00000355479
MLGPGQVRLRPRVWRDKAGGRVADGASGLPPARGSWRETGTGRALGASSPPRPAQGSSSPGIQSGPSSRPGSPRGAEQAGTPRPRLSLGISQATGSAARWRTRRTGKGLGYNSDEIRPRTLLIEHLMEGGRRDHHTMTVLWGTQEIIVAEFHKKIKEAFEVFDHESNNTVDVREIGTIIRSLGCCPTEGELHDLIAEVEEEEPTGYIRFEKFLPVMTEILLERKYRPIPEDVLLRAFEVLDSAKRGFLTKDELIKYMTEEDGVSLRRPG

SEQ ID NO: 26708 - protein, 162 aa, Homo sapiens
  Payload ID: 5267
  Gene Symbol: EFCAB2
  Gene Name: EF-hand calcium binding domain 2
  Uniprot ID: Q5VUJ9
  ENSP ID: ENSP00000355480
MADEKDREEIIVAEFHKKIKEAFEVFDHESNNTVDVREIGTIIRSLGCCPTEGELHDLIAEVEEEEPTGYIRFEKFLPVMTEILLERKYRPIPEDVLLRAFEVLDSAKRGFLTKDELIKYMTEEGEPFSQEEMEEMLSAAIDPESNSINYKDYITMMVIDEN

SEQ ID NO: 26709 - protein, 52 aa, Homo sapiens
  Payload ID: 5267
  Gene Symbol: EFCAB2
  Gene Name: EF-hand calcium binding domain 2
  ENSP ID: ENSP00000397120
  MOD_RES (1)..(1): Any amino acid
XEDVLLRAFEVLDSAKRGFLTKDELIKYMTEEGGVVITPILETGKLRWGAVK

SEQ ID NO: 26710 - protein, 127 aa, Homo sapiens
  Payload ID: 5267
  Gene Symbol: EFCAB2
  Gene Name: EF-hand calcium binding domain 2
  ENSP ID: ENSP00000405269
  MOD_RES (1)..(1): Any amino acid
XIIVAEFHKKIKEAFEVFDHESNNTVDVREIGTIIRSLGCCPTEGELHDLIAEVEEEEPTGYIRFEKFLPVMTEILLERKYRPIPEDVLLRAFEVLDSAKRGFLTKDELIKYMTEEETGKLRWGAVK

SEQ ID NO: 26711 - protein, 133 aa, Homo sapiens
  Payload ID: 5267
  Gene Symbol: EFCAB2
  Gene Name: EF-hand calcium binding domain 2
  Uniprot ID: Q5VUJ9
  ENSP ID: ENSP00000408661
MADEKDREEIIVAEFHKKIKEAFEVFDHESNNTVDVREIGTIIRSLGCCPTEGELHDLIAEVEEEEPTGYIRFEKFLPVMTEILLERKYRPIPEDVLLRAFEVLDSAKRGFLTKDELIKYMTEEDGVSLRRPG

SEQ ID NO: 26712 - protein, 131 aa, Homo sapiens
  Payload ID: 5267
  Gene Symbol: EFCAB2
  Gene Name: EF-hand calcium binding domain 2
  ENSP ID: ENSP00000447807
  MOD_RES (1)..(1): Any amino acid
XIIVAEFHKKIKEAFEVFDHESNNTVDVREIGTIIRSLGCCPTEGELHDLIAEVEEEEPTGYIRFEKFLPVMTEILLERKYRPIPEDVLLRAFEVLDSAKRGFLTKDELIKYMTEEGKCDLLLITMTYVRN

SEQ ID NO: 26713 - protein, 438 aa, Homo sapiens
  Payload ID: 5268
  Gene Symbol: EFCAB3
  Gene Name: EF-hand calcium binding domain 3
  Uniprot ID: Q8N7B9
  ENSP ID: ENSP00000302649
MAVSEIKPKLKLNPLTKVPISHNKRDRDLPGSLQCQLQHKEKKLSASQMAAFQDAYNFFYKDKTGCIDFHGLMCTVAKLGMNLTKHDVYNELKCADIDRDGKVNFSDFIKVLTDKNLFLKAVVPEKETCLDLAGNPGILLFEILSRLLETSALPRKSIIEIVSYFQRKFQHTGPGMLWSPYTMGYGKRTLKPDICTPPSSSMAAFANAARIAIMKEKDLFKFLEELKRCNSGSDSPYSKIPIFPLFPNVDGVVMGKPFKDMQKLEMLRIKEPLHFFEDYFFHKRDWKTQAANIKSMDPASGYSNNIFTIDQMLKKKQTCTVADATAIKQHVKRATDTYNLGIALEHRKEMLNLWQKIRGDLIGMDSRNESFYDTFSTYTWSWNVCQELLSPKDLRLYDAYVNRNSSHNSRSSSSSDTSECYTDSGRKRKRKGLKGFQQ

SEQ ID NO: 26714 - protein, 490 aa, Homo sapiens
  Payload ID: 5268
  Gene Symbol: EFCAB3
  Gene Name: EF-hand calcium binding domain 3
  Uniprot ID: Q8N7B9
  ENSP ID: ENSP00000403932
MKELMPHLTFNGNGKINVNSIMEGLKKFKPKGMVTLHKLKTANDIKDRVTGHMAVSEIKPKLKLNPLTKVPISHNKRDRDLPGSLQCQLQHKEKKLSASQMAAFQDAYNFFYKDKTGCIDFHGLMCTVAKLGMNLTKHDVYNELKCADIDRDGKVNFSDFIKVLTDKNLFLKAVVPEKETCLDLAGNPGILLFEILSRLLETSALPRKSIIEIVSYFQRKFQHTGPGMLWSPYTMGYGKRTLKPDICTPPSSSMAAFANAARIAIMKEKDLFKFLEELKRCNSGSDSPYSKIPIFPLFPNVDGVVMGKPFKDMQKLEMLRIKEPLHFFEDYFFHKRDWKTQAANIKSMDPASGYSNNIFTIDQMLKKKQTCTVADATAIKQHVKRATDTYNLGIALEHRKEMLNLWQKIRGDLIGMDSRNESFYDTFSTYTWSWNVCQELLSPKDLRLYDAYVNRNSSHNSRSSSSSDTSECYTDSGRKRKRKGLKGFQQ

SEQ ID NO: 26715 - protein, 162 aa, Homo sapiens
  Payload ID: 5268
  Gene Symbol: EFCAB3
  Gene Name: EF-hand calcium binding domain 3
  ENSP ID: ENSP00000428626
MAVSEIKPKLKLNPLTKVPISHNKRDRDLPGSLQCQLQHKEKKLSASQMAAFQDAYNFFYKDKTGCIDFHGLMCTVAKLGMNLTKHDVYNELKCADIDRDGKVNFSDFIKVLTDKNLFLKAVVPEKETCLDLAGNPGILLFEILSRLLETSALPRKSIIEIV

SEQ ID NO: 26716 - protein, 174 aa, Homo sapiens
  Payload ID: 5268
  Gene Symbol: EFCAB3
  Gene Name: EF-hand calcium binding domain 3
  ENSP ID: ENSP00000429124
MAVSEIKPKLKLNPLTKVPISHNKRDRDLPGSLQCQLQHKEKKLSASQMAAFQDAYNFFYKDKTGCIDFHGLMCTVAKLGMNLTKHDVYNELKCADIDRDGKVNFSDFIKVLTDKNLFLKAVVPEKETCLDLAGNPGILLFEILSRLLETSALPRKSIIEIVSYFQRKFQHTGP

SEQ ID NO: 26717 - protein, 1503 aa, Homo sapiens
  Payload ID: 5269
  Gene Symbol: EFCAB5
  Gene Name: EF-hand calcium binding domain 5
  Uniprot ID: A4FU69
  ENSP ID: ENSP00000378312
MNESASQEELRPAQENRKEDKERKWNLTEVKELHETLQSVPDVPVKEDTNSVVEKAMDEIKSQELNLEGQRKISPGSIKDSKTEASGNIAIRKSAKVIFALDETELKSKPEHTWKKNLFERMEARAQAMQQKIIDKENLKKELEKKAEKKLPRDNLAKEWFNTDSMTLNNTAYLLDKLLPTLVPGVENMLTQVEKKKVLTEADTPSKFDPINYLGEYLIRNNPNYIKDPGMSGYQRLMKEVTEDLKIYVPDTICNRVSKMKENVKQNRKQRESIDKIIVKVANTRKQALQEQFDEWILDPKGMIPKSVIQNVLQEFFQNPDFKLGSHCKQLDITDSTEPRLNKMEFTEYISSHIKDLKSEMFEELLKHLCHSADEFREVIKADMRRQMFAELFLHCDHGKVGFLDRQRTLALLELFYDHSSQMLRSLLRNPRQWPFIEFEEINLTELWGDMDNQKHIYEGFDKVLLEMNTLLSANHASKTQSKLLESPDQPKLNEQRTSTPSPNPPEQQRGVTAEQGPQRISIEEQQQGKKPTAEQELYIESVIEPGTHTESTLEQGSSRRLLTEQETHRESTTEQGQHKGSIEGQGPRRVSVSEQGSSRESVAEQGSRRESIAEQDRHKGSVAEQGSRRMSAAEQGSLRESVIEEPYQKSEQGPYGEIISEEQEDIGSTSQSRKDSILKSTKYGEPITSEYIEVPLQEKRSWEQTYEEEIFLSSELQEEVPTLSRKDHFPETTKKEVQKDKPCEPKSQKIEGKSWSGEFFTCNWKMKYVTFEDEEQANLIYGNSRFTDLHSIIRNIQSCKEVKGRTAFNGVSFNLLQFVQLLETFVGEDAPLSVSETLTSFFKEGYVETEQEKMNALEQFSQNAFQVRQRLLLEAIFQKWDSDGSGFLDLKEVDELLYTYKEGMEKESMKKAKLHIQFPKPHPGHEVRLSSKQFQNYIELVVSELRGNEDQVLESVVEFLMNALERSHIESLRNSARRKWLHQIQCAAETSGVSLEPVYSETFKALMQDAEAHGNKKISAHISLLEENLLLPEKGNVLLRNVACTLDDAQFVLNRVLYRDMKGISFTVVDEGKPIHVPQVQYHGNIFFWNQSRNKHDYNGSFLALPLQDAYMRIFGVLAVDTLRDPHEINIFLPHEIRFYQGVANVFSTAYHYVHSREHILHIVITGIGWLYDVTSSITSITTYFVEPSPAQDSDYVLRNMMVTGQLGLTEIHKNPPTIHRKSCIFRDFLFKCTDSSEVVLASACGETHIVVPLRERTGEALGVLDFNIGQNRMLLCQEYKDLQKMMKVVQVACYEILGEFSGEIKKKYILEIENVREVQRAGILFFRIMLLELQESIQLLNSMEFVSLLLYDHTLVTEPNSPQDSKSMELEANVKLVRDILKAVILFFHPELEFSSDFGSWDKCKFYVNKYLVNNICAFDPTAKHVEVNVQLIDEYIRDHSRTEVWKFGNVVIEHLYHWIHICSALMKITKQLNSGITPPLPSKTDNYMYAKMPGEGLQEK

SEQ ID NO: 26718 - protein, 56 aa, Homo sapiens
  Payload ID: 5269
  Gene Symbol: EFCAB5
  Gene Name: EF-hand calcium binding domain 5
  ENSP ID: ENSP00000392831
MDEIKSQELNLEGQRKISPGSIKDSKTEASDSECSSRILSKSRFQAWITLQTTGYY

SEQ ID NO: 26719 - protein, 926 aa, Homo sapiens
  Payload ID: 5269
  Gene Symbol: EFCAB5
  Gene Name: EF-hand calcium binding domain 5
  Uniprot ID: A4FU69
  ENSP ID: ENSP00000393095
MNESASQEELRPAQENRKEDKERKWNLTEVKELHETLQSVPDVPVKEDTNSVVEKAMDEIKSQELNLEGQRKISPGSIKDSKTEASGNIAIRKSAKVIFALDETELKSKPEHTWKKNLFERMEARAQAMQQKIIDKENLKKELEKKAEKKLPRDNLAKEWFNTDSMTLNNTAYLLDKLLPTLVPGVENMLTQVEKKKVLTEADTPSKFDPINYLGEYLIRNNPNYIKDPGMSGYQRLMKEVTEDLKIYVPDTICNRVSKMKENVKQNRKQRESIDKIIVKVANTRKQALQEQFDEWILDPKGMIPKSVIQNVLQEFFQNPDFKLGSHCKQLDITDSTEPRLNKMEFTEYISSHIKDLKSEMFEELLKHLCHSADEFREVIKADMRRQMFAELFLHCDHGKVGFLDRQRTLALLELFYDHSSQMLRSLLRNPRQWPFIEFEEINLTELWGDMDNQKHIYEGFDKVLLEMNTLLSANHASKTQSKLLESPDQPKLNEQRTSTPSPNPPEQQRGVTAEQGPQRISIEEQQQGKKPTAEQELYIESVIEPGTHTESTLEQGSSRRLLTEQETHRESTTEQGQHKGSIEGQGPRRVSVSEQGSSRESVAEQGSRRESIAEQDRHKGSVAEQGSRRMSAAEQGSLRESVIEEPYQKSEQGPYGEIISEEQEDIGSTSQSRKDSILKSTKYGEPITSEYIEVPLQEKRSWEQTYEEEIFLSSELQEEVPTLSRKDHFPETTKKEVQKDKPCEPKSQKIEGKSWSGEFFTCNWKMKYVTFEDEEQANLIYGNSRFTDLHSIIRNIQSCKEVKGRTAFNGVSFNLLQFVQLLETFVGEDAPLSVSETLTSFFKEGYVETEQEKMNALEQFSQNAFQVRQRLLLEAIFQKWDSDGSGFLDLKEVDELLYTYKEGMEKESMKKGLTLSPGWSAVAQL

SEQ ID NO: 26720 - protein, 103 aa, Homo sapiens
  Payload ID: 5269
  Gene Symbol: EFCAB5
  Gene Name: EF-hand calcium binding domain 5
  ENSP ID: ENSP00000400023
MDEIKSQELNLEGQRKISPGSIKDSKTEASGNIAIRKSAKVIFALDETELKSKPEHTWKKNLFERMEARAQAMQQKIIDKENLKKELEKKAEKKLPRDNLAKE

SEQ ID NO: 26721 - protein, 1185 aa, Homo sapiens
  Payload ID: 5269
  Gene Symbol: EFCAB5
  Gene Name: EF-hand calcium binding domain 5
  ENSP ID: ENSP00000417009
KKKVLTEADTPSKFDPINYLGEYLIRNNPNYIKDPGMSGYQRLMKEVTEDLKIYVPDTICNRVSKMKENVKQNRKQRESIDKIIVKVANTRKQALQEQFDEWILDPKGMIPKSVIQNVLQEFFQNPDFKLGSHCKQLDITDSTEPRLNKMEFTEYISSHIKDLKSEMFEELLKHLCHSADEFREVIKADMRRQMFAELFLHCDHGKVGFLDRQRTLALLELFYDHSSQMLRSLLRNPRQWPFIEFEEINLTELWGDMDNQKHIYEGFDKVLLEMNTLLSANHASKTQSKLLESPDQPKLNEQRTSTPSPNPPEQQRGVTAEQGPQRISIEEQQQGKKPTAEQELYIESVIEPGTHTESTLEQGSSRRLLTEQETHRESTTEQGQHKGSIEGQGPRRVSVSEQGSSRESVAEQGSRRESIAEQDRHKGSVAEQGSRRMSAAEQGSLRESVIEEPYQKSEQGPYGEIISEEQEDIGSTSQSRKDSILKSTKYGEPITSEYIEVPLQEKRSWEQTYEEEIFLSSELQEEVPTLSRKDHFPETTKKEVQKDKPCEPKSQKIEGKSWSGEFFTCNWKMKYVTFEDEEQANLIYGNSRFTAKLHIQFPKPHPGHEVRLSSKQFQNYIELVVSELRGNEDQVLESVVEFLMNALERSHIESLRNSARRKWLHQIQCAAETSGVSLEPVYSETFKALMQDAEAHGNKKISAHISLLEENLLLPEKGNVLLRNVACTLDDAQFVLNRVLYRDMKGISFTVVDEGKPIHVPQVQYHGNIFFWNQSRNKHDYNGSFLALPLQDAYMRIFGVLAVDTLRDPHEINIFLPHEIRFYQGVANVFSTAYHYVHSREHILHIVITGIGWLYDVTSSITSITTYFVEPSPAQDSDYVLRNMMVTGQLGLTEIHKNPPTIHRKSCIFRDFLFKCTDSSEVVLASACGETHIVVPLRERTGEALGVLDFNIGQNRMLLCQEYKDLQKMMKVVQVACYEILGEFSGEIKKKYILEIENVREVQRAGILFFRIMLLELQESIQLLNSMEFVSLLLYDHTLVTEPNSPQDSKSMELEANVKLVRDILKAVILFFHPELEFSSDFGSWDKCKFYVNKYLVNNICAFDPTAKHVEVNVQLIDEYIRDHSRTEVWKFGNVVIEHLYHWIHICSALMKITKQLNSGITPPLPSKTDNYMYAKMPGEGLQEK

SEQ ID NO: 26722 - protein, 856 aa, Homo sapiens
  Payload ID: 5269
  Gene Symbol: EFCAB5
  Gene Name: EF-hand calcium binding domain 5
  Uniprot ID: A4FU69
  ENSP ID: ENSP00000440619
MDEIKSQELNLEGQRKISPGSIKDSKTEASGNIAIRKSAKVIFALDETELKSKPEHTWKKNLFERMEARAQAMQQKIIDKENLKKELEKKAEKKLPRDNLAKEWFNTDSMTLNNTAYLLDKLLPTLVPGVENMLTQVEKKKVLTEADTPSKFDPINYLGEYLIRNNPNYIKDPGMSGYQRLMKEVTEDLKIYVPDTICNRVSKMKENVKQNRKQRESIDKIIVKVANTRKQALQEQFDEWILDPKGMIPKSVIQNVLQEFFQNPDFKLGSHCKQLDITDSTEPRLNKMEFTEYISSHIKDLKSEMFEELLKHLCHSADEFREVIKADMRRQMFAELFLHCDHGKVGFLDRQRTLALLELFYDHSSQMLRSLLRNPRQWPFIEFEEINLTELWGDMDNQKHIYEGFDKVLLEMNTLLSANHASKTQSKLLESPDQPKLNEQRTSTPSPNPPEQQRGVTAEQGPQRISIEEQQQGKKPTAEQELYIESVIEPGTHTESTLEQGSSRRLLTEQETHRESTTEQGQHKGSIEGQGPRRVSVSEQGSSRESVAEQGSRRESIAEQDRHKGSVAEQGSRRMSAAEQGSLRESVIEEPYQKSEQGPYGEIISEEQEDIGSTSQSRKDSILKSTKYGEPITSEYIEVPLQEKRSWEQTYEEEIFLSSELQEEVPTLSRKDHFPETTKKEVQKDKPCEPKSQKIEGKSWSGEFFTCNWKMKYVTFEDEEQANLIYGNSRFTDLHSIIRNIQSCKEVKGRTAFNGVSFNLLQFVQLLETFVGEDAPLSVSETLTSFFKEGYVETEQEKMNALEQVSLCRQAGVQWRNCSSLQPPTPGLKRSSHHRLLSNWDYRERRKFFPLETKFP

SEQ ID NO: 26723 - protein, 774 aa, Homo sapiens
  Payload ID: 5269
  Gene Symbol: EFCAB5
  Gene Name: EF-hand calcium binding domain 5
  ENSP ID: ENSP00000465109
  MOD_RES (1)..(1): Any amino acid
XDTPSKFDPINYLGEYLIRNNPNYIKDPGMSGYQRLMKEVTEDLKIYVPDTICNRVSKMKENVKQNRKQRESIDKIIVKVANTRKQALQEQFDEWILDPKGMIPKSVIQNVLQEFFQNPDFKLGSHCKQLDITDSTEPRLNKMEFTEYISSHIKDLKSEMFEELLKHLCHSADEFREVIKADMRRQMFAELFLHCDHGKVGFLDRQRTLALLELFYDHSSQMLRSLLRNPRQWPFIEFEEINLTELWGDMDNQKHIYEGFDKVLLEMNTLLSANHASKTQSKLLESPDQPKLNEQRTSTPSPNPPEQQRGVTAEQGPQRISIEEQQQGKKPTAEQELYIESVIEPGTHTESTLEQGSSRRLLTEQETHRESTTEQGQHKGSIEGQGPRRVSVSEQGSSRESVAEQGSRRESIAEQDRHKGSVAEQGSRRMSAAEQGSLRESVIEEPYQKSEQGPYGEIISEEQEDIGSTSQSRKDSILKSTKYGEPITSEYIEVPLQEKRSWEQTYEEEIFLSSELQEEVPTLSRKDHFPETTKKEVQKDKPCEPKSQKIEGKSWSGEFFTCNWKMKYVTFEDEEQANLIYGNSRFTDLHSIIRNIQSCKEVKGRTAFNGVSFNLLQFVQLLETFVGEDAPLSVSETLTSFFKEGYVETEQEKMNALEQFSQNAFQVRQRLLLEAIFQKWDSDGSGFLDLKEVDELLYTYKEGMEKESMKKDHSRTEVWKFGNVVIEHLYHWIHICSALMKITKQLNSGITPPLPSKTDNYMYAKMPGEGLQEK

SEQ ID NO: 26724 - protein, 1501 aa, Homo sapiens
  Payload ID: 5270
  Gene Symbol: EFCAB6
  Gene Name: EF-hand calcium binding domain 6
  Uniprot ID: Q5THR3
  ENSP ID: ENSP00000262726
MCKMAIIPDWLRSHPHTRKFTHSRPHSSPCRVYSRNGSPNKFRSSSTTAVANPTLSSLDVKRILFQKITDRGDELQKAFQLLDTGQNLTVSKSELRRIITDFLMPLTREQFQDVLAQIPLSTSGTVPYLAFLSRFGGIDLYINGIKRGGGNEMNCCRTLRELEIQVGEKVFKNIKTVMKAFELIDVNKTGLVRPQELRRVLETFCMKLRDEEYEKFSKHYNIHKDTAVDYNVFLKNLSINNDLNLRYCMGNQEVSLENQQAKNSKKERLLGSASSEDIWRNYSLDEIERNFCLQLSKSYEKVEKALSAGDPCKGGYVSFNYLKIVLDTFVYQIPRRIFIQLMKRFGLKATTKINWKQFLTSFHEPQGLQVSSKGPLTKRNSINSRNESHKENIITKLFRHTEDHSASLKKALLIINTKPDGPITREEFRYILNCMAVKLSDSEFKELMQMLDPGDTGVVNTSMFIDLIEENCRMRKTSPCTDAKTPFLLAWDSVEEIVHDTITRNLQAFYNMLRSYDLGDTGRIGRNNFKKIMHVFCPFLTNAHFIKLCSKIQDIGSGRILYKKLLACIGIDGPPTVSPVLVPKDQLLSEHLQKDEQQQPDLSERTKLTEDKTTLTKKMTTEEVIEKFKKCIQQQDPAFKKRFLDFSKEPNGKINVHDFKKVLEDTGMPMDDDQYALLTTKIGFEKEGMSYLDFAAGFEDPPMRGPETTPPQPPTPSKSYVNSHFITAEECLKLFPRRLKESFRDPYSAFFKTDADRDGIINMHDLHRLLLHLLLNLKDDEFERFLGLLGLRLSVTLNFREFQNLCEKRPWRTDEAPQRLIRPKQKVADSELACEQAHQYLVTKAKNRWSDLSKNFLETDNEGNGILRRRDIKNALYGFDIPLTPREFEKLWARYDTEGKGHITYQEFLQKLGINYSPAVHRPCAEDYFNFMGHFTKPQQLQEEMKELQQSTEKAVAARDKLMDRHQDISKAFTKTDQSKTNYISICKMQEVLEECGCSLTEGELTHLLNSWGVSRHDNAINYLDFLRAVENSKSTGAQPKEKEESMPINFATLNPQEAVRKIQEVVESSQLALSTAFSALDKEDTGFVKATEFGQVLKDFCYKLTDNQYHYFLRKLRIHLTPYINWKYFLQNFSCFLEETADEWAEKMPKGPPPTSPKATADRDILARLHKAVTSHYHAITQEFENFDTMKTNTISREEFRAICNRRVQILTDEQFDRLWNEMPVNAKGRLKYPDFLSRFSSETAATPMATGDSAVAQRGSSVPDVSEGTRSALSLPTQELRPGSKSQSHPCTPASTTVIPGTPPLQNCDPIESRLRKRIQGCWRQLLKECKEKDVARQGDINASDFLALVEKFNLDISKEECQQLIIKYDLKSNGKFAYCDFIQSCVLLLKAKESSLMHRMKIQNAHKMKEAGAETPSFYSALLRIQPKIVHCWRPMRRTFKSYDEAGTGLLSVADFRTVLRQYSINLSEEEFFHILEYYDKTLSSKISYNDFLRAFLQ

SEQ ID NO: 26725 - protein, 200 aa, Homo sapiens
  Payload ID: 5270
  Gene Symbol: EFCAB6
  Gene Name: EF-hand calcium binding domain 6
  ENSP ID: ENSP00000348391
MVPQISSDLLQIPLSTSGTVPYLAFLSRFGGIDLYINGIKRGGGNEMNCCRTLRELEIQVGEKVFKNIKTVMKAFELIDVNKTGLVRPQELRRVLETFCMKLRDEEYEKFSKHYNIHKDTAVDYNVFLKNLSINNDLNLRYCMGNQEVSLENQQAKNSKKERLLGSASSEDIWRNYSLDEIERNFCLQVRCFPKPQLPTE

SEQ ID NO: 26726 - protein, 1349 aa, Homo sapiens
  Payload ID: 5270
  Gene Symbol: EFCAB6
  Gene Name: EF-hand calcium binding domain 6
  Uniprot ID: Q5THR3
  ENSP ID: ENSP00000379533
MNCCRTLRELEIQVGEKVFKNIKTVMKAFELIDVNKTGLVRPQELRRVLETFCMKLRDEEYEKFSKHYNIHKDTAVDYNVFLKNLSINNDLNLRYCMGNQEVSLENQQAKNSKKERLLGSASSEDIWRNYSLDEIERNFCLQLSKSYEKVEKALSAGDPCKGGYVSFNYLKIVLDTFVYQIPRRIFIQLMKRFGLKATTKINWKQFLTSFHEPQGLQVSSKGPLTKRNSINSRNESHKENIITKLFRHTEDHSASLKKALLIINTKPDGPITREEFRYILNCMAVKLSDSEFKELMQMLDPGDTGVVNTSMFIDLIEENCRMRKTSPCTDAKTPFLLAWDSVEEIVHDTITRNLQAFYNMLRSYDLGDTGRIGRNNFKKIMHVFCPFLTNAHFIKLCSKIQDIGSGRILYKKLLACIGIDGPPTVSPVLVPKDQLLSEHLQKDEQQQPDLSERTKLTEDKTTLTKKMTTEEVIEKFKKCIQQQDPAFKKRFLDFSKEPNGKINVHDFKKVLEDTGMPMDDDQYALLTTKIGFEKEGMSYLDFAAGFEDPPMRGPETTPPQPPTPSKSYVNSHFITAEECLKLFPRRLKESFRDPYSAFFKTDADRDGIINMHDLHRLLLHLLLNLKDDEFERFLGLLGLRLSVTLNFREFQNLCEKRPWRTDEAPQRLIRPKQKVADSELACEQAHQYLVTKAKNRWSDLSKNFLETDNEGNGILRRRDIKNALYGFDIPLTPREFEKLWARYDTEGKGHITYQEFLQKLGINYSPAVHRPCAEDYFNFMGHFTKPQQLQEEMKELQQSTEKAVAARDKLMDRHQDISKAFTKTDQSKTNYISICKMQEVLEECGCSLTEGELTHLLNSWGVSRHDNAINYLDFLRAVENSKSTGAQPKEKEESMPINFATLNPQEAVRKIQEVVESSQLALSTAFSALDKEDTGFVKATEFGQVLKDFCYKLTDNQYHYFLRKLRIHLTPYINWKYFLQNFSCFLEETADEWAEKMPKGPPPTSPKATADRDILARLHKAVTSHYHAITQEFENFDTMKTNTISREEFRAICNRRVQILTDEQFDRLWNEMPVNAKGRLKYPDFLSRFSSETAATPMATGDSAVAQRGSSVPDVSEGTRSALSLPTQELRPGSKSQSHPCTPASTTVIPGTPPLQNCDPIESRLRKRIQGCWRQLLKECKEKDVARQGDINASDFLALVEKFNLDISKEECQQLIIKYDLKSNGKFAYCDFIQSCVLLLKAKESSLMHRMKIQNAHKMKEAGAETPSFYSALLRIQPKIVHCWRPMRRTFKSYDEAGTGLLSVADFRTVLRQYSINLSEEEFFHILEYYDKTLSSKISYNDFLRAFLQ

SEQ ID NO: 26727 - protein, 629 aa, Homo sapiens
  Payload ID: 5271
  Gene Symbol: EFCAB7
  Gene Name: EF-hand calcium binding domain 7
  Uniprot ID: A8K855
  ENSP ID: ENSP00000360129
MAISPRSDATFSSQKSTPSESPRTKKFPLTEEEIFYMNCRAAYLTVFKSSLENIISKDQLYLALQHAGRNPSQKTINKYWTPQTAKLNFDDFCIILRKEKPTSKAELLKSFKQLDVNDDGCILHTDLYKFLTKRGEKMTREEVNAIINLADVNADGKFDYIKFCKLYMTTNEQCLKTTLEKLEVDSKLMRHQFGNHIEGSPERDPSPVPKPSPKITRKTDPETFLNKGDTRSSLLSATRKFKTSVSFTVTMGANGNRNSKLMEPNLIKDWQHMQSKGCFFLEEDGEIISHQYRMQIAQRSMVYLTIKPLNLSQVEGKPSPWLSVDTALYILKENESQANLQLVCFTELRNREVFGWTGELGPGIYWLIPSTTGCRLRKKIKPVTDEAQLVYRDETGELFLTKEFKSTLSDIFEVIDLDGNGLLSLEEYNFFELRTSGEKCDEDAWAVCRENFDTKRNELTRQGFMDLNLMEANDREGDPCDLWVTLHSMGYNKALELTEACPFVIDIYAEKCKPKIKAVHMEACSGQLEKAICKSVLSNGDAKVMDGYENIIVHTYSCDTWITSVIENKSDEKVIIHISNELSKNCINNRGLNIFAVEVGPKSTMVCQHVMPLNERQEWIYYCIYSLIS

SEQ ID NO: 26728 - protein, 1288 aa, Homo sapiens
  Payload ID: 5272
  Gene Symbol: EFCAB8
  Gene Name: EF-hand calcium binding domain 8
  ENSP ID: ENSP00000383366
MSSEDLAEIPQLQKLSIPHGFQNKEAASSPTPSITLSQVPDLQPGSQLFTEIHLAKIEKMFEEDINSTGALGMDAFIKAMKKVLSSVSDEMLKELFLKVDSDCEGFVTWQKYVDYMMREFQGKEDMRKSQYRLHFYLPMTVVPLNHGCEVVKVVFLIHRFKKIGCFLTVTKDGILQFWSESFSLMSSFRLNQTQQLYNQPMWVIDMVCLHNMNLVAVASTRQKIDFFDISDHKCVRAFTFVDLDSCALVMDYWSDYHRGVFCYGDAKGNVIVFTSENMTSGLFNPRILPRASKWDHWIKVSLQKLLNEKSALHRSYRLKALHPNWCEQVKFIPQMNVVVSCSAIEKSSLVLTILPAKASKKPRLSVLRLRKGILCFDYCPDRNFLVTGGYDAFIRLWNPFVSKRPVWLMKGHQTSVTHILVDSRNNSILISVSKDKNIRVWDMLDYICLQSFCGKFFALGNCPITSAYFFEKDNTLICSTYSIGILKGYLEAQGLIKARKRTTHCSPLCAVLYSKIFKQVVSGCLRGTVSVWEVVTGRKTMEFAVSGGQHVEMTAMALDESERCLLTGLRDGTMKMWNYNIGKCLLTFPSPEQLEISGIIHMNKVFYVTGWSKRITHFLFHKTKPVLLCYHWQTYHTEDILSMAKYRNQFLGTSSYSGDILFWNTGTLKPIFNFNASRSPSPLQPKRVQDVNNCLAESHRPSRPYVEREKWTYKTSRKLSSLSPESVANTNLRRSLVSAPPVMRCPRDKEPDRPVPQQKPSSASGTSRQSSKIHSKQSIYKEDETRKGEWQKNMLVQSSASVEKIIFLQTRPRLPHTAALLSSCMDGYIYAWSLHENGGLLGKFPVDLDNGDVVVGAMATDKNDWILITGDCKGYIKIWDIKDYCALIDKQPFQSSGAKVVSEAHNKFRLLIPQQLGTNFPHYIPLEDKEVVAGHTISLVPPTLLMTWKGHLNSVADILYVDNFQLVISAGQDRDVKAWKLSGDAIGTFGLSVWKRLQDACDGPRENRASLEEDGDSTGTTQKVLHLELQEQRDLAEALIYQRREQAALMALLHGKADKEADTWAKLQKMALMSPWAGERPLEDIEDSWNKWESRDKQVSKVLGAAYKPKERLQNTRFLSTRVPYGWMKHQISPQVYQSLHFSDLMPTQQPDFLTSRGPDQQDQHIRLVAHHVQKDLVPSREQAVLDTTDSTPAAASSPSSLLSVTASASRLLDSSLPTFLTPQFSFLLRPQSASTAHSTPSVPSPVSKSTLQGSVTPKHIVSSFERPPRPLKATFMSSVKGSSHVRF

SEQ ID NO: 26729 - protein, 144 aa, Homo sapiens
  Payload ID: 5272
  Gene Symbol: EFCAB8
  Gene Name: EF-hand calcium binding domain 8
  Uniprot ID: A8MWE9
  ENSP ID: ENSP00000481567
MSSEDLAEIPQLQKLSIPHGFQNKEAASSPTPSITLSQVPDLQPGSQLFTEIHLAKIEKMFEEDINSTGALGMDAFIKAMKKVLSSVSDEMLKELFLKVDSDCEGFVTWQKYVDYMMREFQGKEDMRKSQYRLHFYLPMTVVPL

SEQ ID NO: 26730 - protein, 197 aa, Homo sapiens
  Payload ID: 5273
  Gene Symbol: EFCAB9
  Gene Name: EF-hand calcium binding domain 9
  Uniprot ID: A8MZ26
  ENSP ID: ENSP00000381247
MRLKQGSFLWYLYLDKIYCLLSVRNVKALAEYFHILDVHGKNTLNDVLFYHFLHHVTDLKKAQINIVFDMLDWNAVGEIDFEKFYMLVCMLLAHQNHLEGQFMYRHSRPVFDLLDLKGDLRIGAKNFEMYRFLFNIQKQELKDLFRDFDITGDNRLNYQEFKLYTIIYTDKLQKRQKTEEKEKGERKRSLYSKCHIK

SEQ ID NO: 26731 - protein, 640 aa, Homo sapiens
  Payload ID: 5274
  Gene Symbol: EFHC1
  Gene Name: EF-hand domain (C-terminal) containing 1
  Uniprot ID: Q5JVL4
  ENSP ID: ENSP00000360107
MVSNPVHGLPFLPGTSFKDSTKTAFHRSQTLSYRNGYAIVRRPTVGIGGDRLQFNQLSQAELDELASKAPVLTYGQPKQAPPADFIPAHVAFDKKVLKFDAYFQEDVPMSTEEQYRIRQVNIYYYLEDDSMSVIEPVVENSGILQGKLIKRQRLAKNDRGDHYHWKDLNRGINITIYGKTFRVVDCDQFTQVFLESQGIELNPPEKMALDPYTELRKQPLRKYVTPSDFDQLKQFLTFDKQVLRFYAIWDDTDSMYGECRTYIIHYYLMDDTVEIREVHERNDGRDPFPLLMNRQRVPKVLVENAKNFPQCVLEISDQEVLEWYTAKDFIVGKSLTILGRTFFIYDCDPFTRRYYKEKFGITDLPRIDVSKREPPPVKQELPPYNGFGLVEDSAQNCFALIPKAPKKDVIKMLVNDNKVLRYLAVLESPIPEDKDRRFVFSYFLATDMISIFEPPVRNSGIIGGKYLGRTKVVKPYSTVDNPVYYGPSDFFIGAVIEVFGHRFIILDTDEYVLKYMESNAAQYSPEALASIQNHVRKREAPAPEAESKQTEKDPGVQELEALIDTIQKQLKDHSCKDNIREAFQIYDKEASGYVDRDMFFKICESLNVPVDDSLVKELIRMCSHGEGKINYYNFVRAFSN

SEQ ID NO: 26732 - protein, 278 aa, Homo sapiens
  Payload ID: 5274
  Gene Symbol: EFHC1
  Gene Name: EF-hand domain (C-terminal) containing 1
  Uniprot ID: Q5JVL4
  ENSP ID: ENSP00000434498
MVSNPVHGLPFLPGTSFKDSTKTAFHRSQTLSYRNGYAIVRRPTVGIGGDRLQFNQLSQAELDELASKAPVLTYGQPKQAPPADFIPAHVAFDKKVLKFDAYFQEDVPMSTEEQYRIRQVNIYYYLEDDSMSVIEPVVENSGILQGKLIKRQRLAKNDRGDHYHWKDLNRGINITIYGKTFRVVDCDQFTQVFLESQGIELNPPEKMALDPYTELRKQPLRKYVTPSDFDQLKQFLTFDKQVSDIGTTIGLLISKCDLHLLAKGLGSCIGNYFETLQL

SEQ ID NO: 26733 - protein, 621 aa, Homo sapiens
  Payload ID: 5274
  Gene Symbol: EFHC1
  Gene Name: EF-hand domain (C-terminal) containing 1
  Uniprot ID: Q5JVL4
  ENSP ID: ENSP00000444521
MLKTAFHRSQTLSYRNGYAIVRRPTVGIGGDRLQFNQLSQAELDELASKAPVLTYGQPKQAPPADFIPAHVAFDKKVLKFDAYFQEDVPMSTEEQYRIRQVNIYYYLEDDSMSVIEPVVENSGILQGKLIKRQRLAKNDRGDHYHWKDLNRGINITIYGKTFRVVDCDQFTQVFLESQGIELNPPEKMALDPYTELRKQPLRKYVTPSDFDQLKQFLTFDKQVLRFYAIWDDTDSMYGECRTYIIHYYLMDDTVEIREVHERNDGRDPFPLLMNRQRVPKVLVENAKNFPQCVLEISDQEVLEWYTAKDFIVGKSLTILGRTFFIYDCDPFTRRYYKEKFGITDLPRIDVSKREPPPVKQELPPYNGFGLVEDSAQNCFALIPKAPKKDVIKMLVNDNKVLRYLAVLESPIPEDKDRRFVFSYFLATDMISIFEPPVRNSGIIGGKYLGRTKVVKPYSTVDNPVYYGPSDFFIGAVIEVFGHRFIILDTDEYVLKYMESNAAQYSPEALASIQNHVRKREAPAPEAESKQTEKDPGVQELEALIDTIQKQLKDHSCKDNIREAFQIYDKEASGYVDRDMFFKICESLNVPVDDSLVKELIRMCSHGEGKINYYNFVRAFSN

SEQ ID NO: 26734 - protein, 749 aa, Homo sapiens
  Payload ID: 5275
  Gene Symbol: EFHC2
  Gene Name: EF-hand domain (C-terminal) containing 2
  Uniprot ID: Q5JST6
  ENSP ID: ENSP00000404232
MALPLLPGNSFNRNVGKEKFHKSQHWGFCNNVMMLVSDEKPGIGGEPLLGQKIKPKCSIYPKGDGSDVPSWVAFDKQVLSFDAYLEEEVLDKSQTNYRIRYYKIYFYPEDDTIQVNEPEVKNSGLLQGTSIRRHRITLPPPDEDQFYTVYHFNVGTEVVFYGRTFKIYDCDAFTRNFLRKIGVKVNPPVQCPEDPYMKIRREVVEHVEPLRPYESLDTLKQFLQYHGKILCFFCLWDDSVSMFGDRRELILHYFLCDDTIEIKELLPHSSGRDALKMFLRRSKLPKNCPPRVYQPGQITDRAVLNSYGDFIKNQADGYLFDRYKLGKVDQEFYKDSDLSLGVTINVWGRKVLLYDCDEFTKSYYKSKYGIENFTSVSCKPPSPPPKIERKFPPYNGFGSEEDSLRNCIDLKPTPHRRNFKKFMEKDSYGSKSNILRFFAKLVTDKCVDLDRMFVISYYLGDDTISVFEPIERNSGIAGGMFLKRSRVKKPGQEVFKSELSEYIKAEELYIGVTVNVNGYLFRLLNADEYTLNYMEQNTDKYPFSNLKLALQKLKQEEGKSRELKQVFKAADSKHTNMVDYNTFRDILMSLTVGNLAEQEFVTIARHYRVPEGTCSDMDFLIALAHEKFKKNMFENFDTFIYSCVYEDREKKNVLPTKDIKRLCKSSRLPLSDDLLESLLSRFEDSEKQIDYKSFFSALNWRKNPVPELQPASYLKERCEDVWLGMPSPIPAKYIDYWTFLKDAFGLEEE

SEQ ID NO: 26735 - protein, 833 aa, Homo sapiens
  Payload ID: 5276
  Gene Symbol: EFHB
  Gene Name: EF-hand domain family, member B
  Uniprot ID: Q8N7U6
  ENSP ID: ENSP00000295824
MNMEIGHPHEGKDDLGDKRVIMGTKFPMELGIRVGLGKEDSRCGESPVVSNKCEGRMAPPETKFPLSKGLEMGLERQNISRTVMQRGSLGVDSVSASQGTKPSLLPGRMGLENESLLAGYTHERIIQPPLGRVCGSSQAAGSRRAPLASGPEGVEELVGKPAFVMEPRQEMEKESTCVLMKPNTEIKLPVEVDIGLTQAEGPDETKNTEPQMGLVIEPPQCQFAQQHEQRKEAGNIESGVEPPDRIRPIYSGKFFDRTPCWPSAGKVIPVGYRVATCLTEKLPRLITPPEAKKYFNFRYPPAGVERVFYGRANDPQIAPYLTHGIRSKISVLANTLINPQPITTFQQKIKDKKESIYLSNRRAPLGKSHDQAPGLPKGMDTTNTTFGTAVIKEYSAKDVVNPPKSYEEVFKEGNEGHDLYVVSHNDYYAGEAKNRKYNPSSFHRCSVYGVPTPHFNDGRAMAKSLYWLHELQMKRGAKFVSKRADDFKEKFQHKLGRVLDPIAETMNVPPDCTFGACLRPEEYGVGDLIHNRLPDEYLRGKDRQRALIAAVRHHLKKVNYQKFDTLLAAFRHYDKKGDGMIDKDELQEACDQANLSLDDKLLDQLFDYCDVDNDGFINYLEFANFLNWKDKMLLKEYEERVIIKGRKPDCVNPTEANVEEPEQTLLIKPEDIVLKEAGSTEKTLRTLLRPSDKVSNYYKTTSSEINAIVGAIPSTCYPICGVPTIRSDIPAPRIRRISDRTNYGEEGSAYSLLYPTIFARKGVFERDFFKTRSKEEIAEILCNIGVKLSDEEFENVWNLASKKHHRGEVCVENIRNVLDELRHADRIKCKTLM

SEQ ID NO: 26736 - protein, 703 aa, Homo sapiens
  Payload ID: 5276
  Gene Symbol: EFHB
  Gene Name: EF-hand domain family, member B
  Uniprot ID: Q8N7U6
  ENSP ID: ENSP00000342263
MMAHCRIDLLGSSDPPTSASQIAETTDVSHHAGLIEFLALSNSSALASRSVEITEIKLPVEVDIGLTQAEGPDETKNTEPQMGLVIEPPQCQFAQQHEQRKEAGNIESGVEPPDRIRPIYSGKFFDRTPCWPSAGKVIPVGYRVATCLTEKLPRLITPPEAKKYFNFRYPPAGVERVFYGRANDPQIAPYLTHGIRSKISVLANTLINPQPITTFQQKIKDKKESIYLSNRRAPLGKSHDQAPGLPKGMDTTNTTFGTAVIKEYSAKDVVNPPKSYEEVFKEGNEGHDLYVVSHNDYYAGEAKNRKYNPSSFHRCSVYGVPTPHFNDGRAMAKSLYWLHELQMKRGAKFVSKRADDFKEKFQHKLGRVLDPIAETMNVPPDCTFGACLRPEEYGVGDLIHNRLPDEYLRGKDRQRALIAAVRHHLKKVNYQKFDTLLAAFRHYDKKGDGMIDKDELQEACDQANLSLDDKLLDQLFDYCDVDNDGFINYLEFANFLNWKDKMLLKEYEERVIIKGRKPDCVNPTEANVEEPEQTLLIKPEDIVLKEAGSTEKTLRTLLRPSDKVSNYYKTTSSEINAIVGAIPSTCYPICGVPTIRSDIPAPRIRRISDRTNYGEEGSAYSLLYPTIFARKGVFERDFFKTRSKEEIAEILCNIGVKLSDEEFENVWNLASKKHHRGEVCVENIRNVLDELRHADRIKCKTLM

SEQ ID NO: 26737 - protein, 623 aa, Homo sapiens
  Payload ID: 5276
  Gene Symbol: EFHB
  Gene Name: EF-hand domain family, member B
  ENSP ID: ENSP00000373908
MNMEIGHPHEGKDDLGDKRVIMGTKFPMELGIRVGLGKEDSRCGESPVVSNKCEGRMAPPETKFPLSKGLEMGLERQNISRTVMQRGSLGVDSVSASQGTKPSLLPGRMGLENESLLAGYTHERIIQPPLGRVCGSSQAAGSRRAPLASGPEGVEELVGKPAFVMEPRQEMEKESTCVLMKPNTEIKLPVEVDIGLTQAEGPDETKNTEPQMGLVIEPPQCQFAQQHEQRKEAGNIESGVEPPDRIRPIYSGKFFDRTPCWPSAGKVIPVGYRVATCLTEKLPRLITPPEAKKYFNFRYPPAGVERVFYGRANDPQIAPYLTHGIRSKISVLANTLINPQPITTFQQKIKDKKESIYLSNRRAPLGKSHDQAPGLPKGMDTTNTTFGTAVIKEYSAKDVVNPPKSYEEVFKEGNEGHDLYVVSHNDYYAGEAKNRKYNPSSFHRCSVYGVPTPHFNDGRAMAKSLYWLHELQMKRGAKFVSKRADDFKEKFQHKLGRVLDPIAETMNVPPDCTFGACLRPEEYGVGDLIHNRLPDEYLRGKDRQRALIAAVRHHLKKVNYQKFDTLLAAFRHYDKASNGGELFGNAWAYRSQQFGVDQGSANYSLWAKSSPLFVCVSKVLLEH

SEQ ID NO: 26738 - protein, 260 aa, Homo sapiens
  Payload ID: 5276
  Gene Symbol: EFHB
  Gene Name: EF-hand domain family, member B
  ENSP ID: ENSP00000396778
PDRIRPIYSGKFFDRTPCWPSLITPPEAKKYFNFRYPPAGVERVFYGRANDPQIAPYLTHGIRSKISVLANTLINPQPITTFQQKIKDKKESIYLSNRRAPLGKSHDQAPGLPKGMDTTNTTFGTAVIKEYSAKDVVNPPKSYEEVFKEGNEGHDLYVVSHNDYYAGEAKNRKYNPSSFHRCSVYGVPTPHFNDGRAMAKSLYWLHELQMKRGAKFVSKRADDFKEKFQHKLGRVLDPIAETMNVPPDCTFGACLRPEEY

SEQ ID NO: 26739 - protein, 239 aa, Homo sapiens
  Payload ID: 5277
  Gene Symbol: EFHD1
  Gene Name: EF-hand domain family, member D1
  Uniprot ID: Q9BUP0
  ENSP ID: ENSP00000264059
MASEELACKLERRLRREEAEESGPQLAPLGAPAPEPKPEPEPPARAPTASADAELSAQLSRRLDINEGAARPRRCRVFNPYTEFPEFSRRLIKDLESMFKLYDAGRDGFIDLMELKLMMEKLGAPQTHLGLKSMIKEVDEDFDGKLSFREFLLIFHKAAAGELQEDSGLMALAKLSEIDVALEGVKGAKNFFEAKVQALSSASKFEAELKAEQDERKREEEERRLRQAAFQKLKANFNT

SEQ ID NO: 26740 - protein, 127 aa, Homo sapiens
  Payload ID: 5277
  Gene Symbol: EFHD1
  Gene Name: EF-hand domain family, member D1
  ENSP ID: ENSP00000386243
MELKLMMEKLGAPQTHLGLKSMIKEVDEDFDGKLSFREFLLIFHKAAAGELQEDSGLMALAKLSEIDVALEGVKGAKNFFEAKVQALSSASKFEAELKAEQDERKREEEERRLRQAAFQKLKANFNT

SEQ ID NO: 26741 - protein, 143 aa, Homo sapiens
  Payload ID: 5277
  Gene Symbol: EFHD1
  Gene Name: EF-hand domain family, member D1
  Uniprot ID: Q9BUP0
  ENSP ID: ENSP00000386556
MGELQYDAGRDGFIDLMELKLMMEKLGAPQTHLGLKSMIKEVDEDFDGKLSFREFLLIFHKAAAGELQEDSGLMALAKLSEIDVALEGVKGAKNFFEAKVQALSSASKFEAELKAEQDERKREEEERRLRQAAFQKLKANFNT

SEQ ID NO: 26742 - protein, 127 aa, Homo sapiens; identical to SEQ ID NO: 26740
  Payload ID: 5277
  Gene Symbol: EFHD1
  Gene Name: EF-hand domain family, member D1
  ENSP ID: ENSP00000386685

SEQ ID NO: 26743 - protein, 99 aa, Homo sapiens
  Payload ID: 5277
  Gene Symbol: EFHD1
  Gene Name: EF-hand domain family, member D1
  ENSP ID: ENSP00000395119
  MOD_RES (1)..(1): Any amino acid
XELACKLERRLRREEAEESGPQLAPLGAPAPEPKPEPEPPARAPTASADAELSAQLSRRLDINEGAARPRRCRVFNPYTEFPEFSRRLIKDLESMFKLI

SEQ ID NO: 26744 - protein, 81 aa, Homo sapiens
  Payload ID: 5277
  Gene Symbol: EFHD1
  Gene Name: EF-hand domain family, member D1
  ENSP ID: ENSP00000401073
MELKLMMEKLGAPQTHLGLKSMIKEVDEDFDGKLSFREFLLIFHKAAAGELQEDSGLMALAKLSEIDVALEGVKGAKNFFE

SEQ ID NO: 26745 - protein, 142 aa, Homo sapiens [sequence omitted]

SEQ ID NO: 26746 - protein, 240 aa, Homo sapiens
  Payload ID: 5278
  Gene Symbol: EFHD2
  Gene Name: EF-hand domain family, member D2
  Uniprot ID: Q96C19
  ENSP ID: ENSP00000365147
MATDELATKLSRRLQMEGEGGGETPEQPGLNGAAAAAAGAPDEAAEALGSADCELSAKLLRRADLNQGIGEPQSPSRRVFNPYTEFKEFSRKQIKDMEKMFKQYDAGRDGFIDLMELKLMMEKLGAPQTHLGLKNMIKEVDEDFDSKLSFREFLLIFRKAAAGELQEDSGLCVLARLSEIDVSSEGVKGAKSFFEAKVQAINVSSRFEEEIKAEQEERKKQAEEMKQRKAAFKELQSTFK

SEQ ID NO: 26747 - protein, 179 aa, Homo sapiens
  Payload ID: 5278
  Gene Symbol: EFHD2
  Gene Name: EF-hand domain family, member D2
  ENSP ID: ENSP00000395153
  MOD_RES (1)..(1): Any amino acid
XKMFKQYDAGRDGFIDLMELKLMMEKLGAPQTHLGLKNMIKEVDEDFDSKLSFREFLLIFRKAAAGELQEDSGLCVLARLSEIDVSSEGVKGAKSFFEAKWNWVCRWAPRTGSRGSGWQQLERLPSSALALQQPQNIGPGHQRVQPLRGGDQGRAGGKEEAGGGDEAAESGLQGAAVHL

SEQ ID NO: 26748 - protein, 821 aa, Homo sapiens
  Payload ID: 5279
  Gene Symbol: EFR3A
  Gene Name: EFR3 homolog A
  Uniprot ID: Q14156
  ENSP ID: ENSP00000254624
MPTRVCCCCSALRPRYKRLVDNIFPEDPKDGLVKTDMEKLTFYAVSAPEKLDRIGSYLAERLSRDVVRHRSGYVLIAMEALDQLLMACHSQSIKPFVESFLHMVAKLLESGEPKLQVLGTNSFVKFANIEEDTPSYHRRYDFFVSRFSAMCHSCHSDPEIRTEIRIAGIRGIQGVVRKTVNDELRATIWEPQHMDKIVPSLLFNMQKIEEVDSRIGPPSSPSATDKEENPAVLAENCFRELLGRATFGNMNNAVRPVFAHLDHHKLWDPNEFAVHCFKIIMYSIQAQYSHHVIQEILGHLDARKKDAPRVRAGIIQVLLEAVAIAAKGSIGPTVLEVFNTLLKHLRLSVEFEANDLQGGSVGSVNLNTSSKDNDEKIVQNAIIQTIGFFGSNLPDYQRSEIMMFIMGKVPVFGTSTHTLDISQLGDLGTRRIQIMLLRSLLMVTSGYKAKTIVTALPGSFLDPLLSPSLMEDYELRQLVLEVMHNLMDRHDNRAKLRGIRIIPDVADLKIKREKICRQDTSFMKKNGQQLYRHIYLGCKEEDNVQKNYELLYTSLALITIELANEEVVIDLIRLAIALQDSAIINEDNLPMFHRCGIMALVAAYLNFVSQMIAVPAFCQHVSKVIEIRTMEAPYFLPEHIFRDKCMLPKSLEKHEKDLYFLTNKIAESLGGSGYSVERLSVPYVPQVTDEDRLSRRKSIVDTVSIQVDILSNNVPSDDVVSNTEEITFEALKKAIDTSGMEEQEKEKRRLVIEKFQKAPFEEIAAQCESKANLLHDRLAQILELTIRPPPSPSGTLTITSGHAQYQSVPVYEMKFPDLCVY

SEQ ID NO: 26749 - protein, 785 aa, Homo sapiens
  Payload ID: 5279
  Gene Symbol: EFR3A
  Gene Name: EFR3 homolog A
  Uniprot ID: Q14156
  ENSP ID: ENSP00000428086
MEKLTFYAVSAPEKLDRIGSYLAERLSRDVVRHRSGYVLIAMEALDQLLMACHSQSIKPFVESFLHMVAKLLESGEPKLQVLGTNSFVKFANIEEDTPSYHRRYDFFVSRFSAMCHSCHSDPEIRTEIRIAGIRGIQGVVRKTVNDELRATIWEPQHMDKIVPSLLFNMQKIEEVDSRIGPPSSPSATDKEENPAVLAENCFRELLGRATFGNMNNAVRPVFAHLDHHKLWDPNEFAVHCFKIIMYSIQAQYSHHVIQEILGHLDARKKDAPRVRAGIIQVLLEAVAIAAKGSIGPTVLEVFNTLLKHLRLSVEFEANDLQGGSVGSVNLNTSSKDNDEKIVQNAIIQTIGFFGSNLPDYQRSEIMMFIMGKVPVFGTSTHTLDISQLGDLGTRRIQIMLLRSLLMVTSGYKAKTIVTALPGSFLDPLLSPSLMEDYELRQLVLEVMHNLMDRHDNRAKLRGIRIIPDVADLKIKREKICRQDTSFMKKNGQQLYRHIYLGCKEEDNVQKNYELLYTSLALITIELANEEVVIDLIRLAIALQDSAIINEDNLPMFHRCGIMALVAAYLNFVSQMIAVPAFCQHVSKVIEIRTMEAPYFLPEHIFRDKCMLPKSLEKHEKDLYFLTNKIAESLGGSGYSVERLSVPYVPQVTDEDRLSRRKSIVDTVSIQVDILSNNVPSDDVVSNTEEITFEALKKAIDTSGMEEQEKEKRRLVIEKFQKAPFEEIAAQCESKANLLHDRLAQILELTIRPPPSPSGTLTITSGHAQYQSVPVYEMKFPDLCVY

SEQ ID NO: 26750 - protein, 13 aa, Homo sapiens
  Payload ID: 5279
  Gene Symbol: EFR3A
  Gene Name: EFR3 homolog A
  ENSP ID: ENSP00000428844
MEKLTFYAVSAPE

SEQ ID NO: 26751 - protein, 133 aa, Homo sapiens
  Payload ID: 5279
  Gene Symbol: EFR3A
  Gene Name: EFR3 homolog A
  ENSP ID: ENSP00000430512
MEKLTFYAVSAPEKLDRIGSYLAERLSRDVVRHRSGYVLIAMEALDQLLMACHSQSIKPFVESFLHMVAKLLESGEPKLQVLGTNSFVKFANIEEDTPSYHRRYDFFVSRFSAMCHSCHSDPEIRTEIRIAGI

SEQ ID NO: 26752 - protein, 652 aa, Homo sapiens
  Payload ID: 5280
  Gene Symbol: EFR3B
  Gene Name: EFR3 homolog B
  ENSP ID: ENSP00000264719
FVKFANIEEDTPSYHRSYDFFVSRFSEMCHSSHDDLEIKTKIRMSGIKGLQGVVRKTVNDELQANIWDPQHMDKIVPSLLFNLQHVEEAESRSPSPLQAPEKEKESPAELAERCLRELLGRAAFGNIKNAIKPVLIHLDNHSLWEPKVFAIRCFKIIMYSIQPQHSHLVIQQLLGHLDANSRSAATVRAGIVEVLSEAAVIAATGSVGPTVLEMFNTLLRQLRLSIDYALTGSYDGAVSLGTKIIKEHEERMFQEAVIKTVGSFASTLPTYQRSEVILFIMSKVPRPSLHQAVDTGRTGENRNRLTQIMLLKSLLQVSTGFQCNNMMSALPSNFLDRLLSTALMEDAEIRLFVLEILISFIDRHGNRHKFSTISTLSDISVLKLKVDKCSRQDTVFMKKHSQQLYRHIYLSCKEETNVQKHYEALYGLLALISIELANEEVVVDLIRLVLAVQVIETRKKEAPYMLPEDVFVERPRLSQNLDGVVIELLFRQSKISEVLGGSGYNSDRLCLPYIPQLTDEDRLSKRRSIGETISLQVEVESRNSPEKEERVPAEEITYETLKKAIVDSVAVEEQERERRRQVVEKFQKAPFEEIAAHCGARASLLQSKLNQIFEITIRPPPSPSGTITAAYGQPQNHSIPVYEMKFPDLCVY

SEQ ID NO: 26753 - protein, 817 aa, Homo sapiens
  Payload ID: 5280
  Gene Symbol: EFR3B
  Gene Name: EFR3 homolog B
  Uniprot ID: Q9Y2G0
  ENSP ID: ENSP00000384081
MYGVCGCCGALRPRYKRLVDNIFPEDPEDGLVKTNMEKLTFYALSAPEKLDRIGAYLSERLIRDVGRHRYGYVCIAMEALDQLLMACHCQSINLFVESFLKMVAKLLESEKPNLQILGTNSFVKFANIEEDTPSYHRSYDFFVSRFSEMCHSSHDDLEIKTKIRMSGIKGLQGVVRKTVNDELQANIWDPQHMDKIVPSLLFNLQHVEEAESRSPSPLQAPEKEKESPAELAERCLRELLGRAAFGNIKNAIKPVLIHLDNHSLWEPKVFAIRCFKIIMYSIQPQHSHLVIQQLLGHLDANSRSAATVRAGIVEVLSEAAVIAATGSVGPTVLEMFNTLLRQLRLSIDYALTGSYDGAVSLGTKIIKEHEERMFQEAVIKTVGSFASTLPTYQRSEVILFIMSKVPRPSLHQAVDTGRTGENRNRLTQIMLLKSLLQVSTGFQCNNMMSALPSNFLDRLLSTALMEDAEIRLFVLEILISFIDRHGNRHKFSTISTLSDISVLKLKVDKCSRQDTVFMKKHSQQLYRHIYLSCKEETNVQKHYEALYGLLALISIELANEEVVVDLIRLVLAVQDVAQVNEENLPVYNRCALYALGAAYLNLISQLTTVPAFCQHIHEVIETRKKEAPYMLPEDVFVERPRLSQNLDGVVIELLFRQSKISEVLGGSGYNSDRLCLPYIPQLTDEDRLSKRRSIGETISLQVEVESRNSPEKEERVPAEEITYETLKKAIVDSVAVEEQERERRRQVVEKFQKAPFEEIAAHCGARASLLQSKLNQIFEITIRPPPSPSGTITAAYGQPQNHSIPVYEMKFPDLCVY

SEQ ID NO: 26754 - protein, 669 aa, Homo sapiens
  Payload ID: 5280
  Gene Symbol: EFR3B
  Gene Name: EFR3 homolog B
  Uniprot ID: Q9Y2G0
  ENSP ID: ENSP00000384454
MCHSSHDDLEIKTKIRMSGIKGLQGVVRKTVNDELQANIWDPQHMDKIVPSLLFNLQHVEEAESRSPSPLQAPEKEKESPAELAERCLRELLGRAAFGNIKNAIKPVLIHLDNHSLWEPKVFAIRCFKIIMYSIQPQHSHLVIQQLLGHLDANSRSAATVRAGIVEVLSEAAVIAATGSVGPTVLEMFNTLLRQLRLSIDYALTGSYDGAVSLGTKIIKEHEERMFQEAVIKTVGSFASTLPTYQRSEVILFIMSKVPRPSLHQAVDTGRTGENRNRLTQIMLLKSLLQVSTGFQCNNMMSALPSNFLDRLLSTALMEDAEIRLFVLEILISFIDRHGNRHKFSTISTLSDISVLKLKVDKCSRQDTVFMKKHSQQLYRHIYLSCKEETNVQKHYEALYGLLALISIELANEEVVVDLIRLVLAVQDVAQVNEENLPVYNRCALYALGAAYLNLISQLTTVPAFCQHIHEVIETRKKEAPYMLPEDVFVERPRLSQNLDGVVIELLFRQSKISEVLGGSGYNSDRLCLPYIPQLTDEDRLSKRRSIGETISLQVEVESRNSPEKEERVPAEEITYETLKKAIVDSVAVEEQERERRRQVVEKFQKAPFEEIAAHCGARASLLQSKLNQIFEITIRPPPSPSGTITAAYGQPQNHSIPVYEMKFPDLCVY

SEQ ID NO: 26755 - protein, 782 aa, Homo sapiens
  Payload ID: 5280
  Gene Symbol: EFR3B
  Gene Name: EFR3 homolog B
  ENSP ID: ENSP00000385832
MEKLTFYALSAPEKLDRIGAYLSERLIRDVGRHRYGYVCIAMEALDQLLMACHCQSINLFVESFLKMVAKLLESEKPNLQILGTNSFVKFANIEEDTPSYHRSYDFFVSRFSEMCHSSHDDLEIKTKIRMSGIKGLQGVVRKTVNDELQANIWDPQHMDKIVPSLLFNLQHVEEAESRSPSPLQAPEKEKESPAELAERCLRELLGRAAFGNIKNAIKPVLIHLDNHSLWEPKVFAIRCFKIIMYSIQPQHSHLVIQQLLGHLDANSRSAATVRAGIVEVLSEAAVIAATGSVGPTVLEMFNTLLRQLRLSIDYALTGSYDGAVSLGTKIIKEHEERMFQEAVIKTVGSFASTLPTYQRSEVILFIMSKVPRPSLHQAVDTGRTGENRNRLTQIMLLKSLLQVSTGFQCNNMMSALPSNFLDRLLSTALMEDAEIRLFVLEILISFIDRHGNRHKFSTISTLSDISVLKLKVDKCSRQDTVFMKKHSQQLYRHIYLSCKEETNVQKHYEALYGLLALISIELANEEVVVDLIRLVLAVQDVAQVNEENLPVYNRCALYALGAAYLNLISQLTTVPAFCQHIHEVIETRKKEAPYMLPEDVFVERPRLSQNLDGVVIELLFRQSKISEVLGGSGYNSDRLCLPYIPQLTDEDRLSKRRSIGETISLQVEVESRNSPEKEERVPAEEITYETLKKAIVDSVAVEEQERERRRQVVEKFQKAPFEEIAAHCGARASLLQSKLNQIFEITIRPPPSPSGTITAAYGQPQNHSIPVYEMKFPDLCVY

SEQ ID NO: 26756 - protein, 728 aa, Homo sapiens
  Payload ID: 5280
  Gene Symbol: EFR3B
  Gene Name: EFR3 homolog B
  Uniprot ID: Q9Y2G0
  ENSP ID: ENSP00000386082
MYGVCGCCGALRPRYKRLVDNIFPEDPEDGLVKTNMEKLTFYALSAPEKLDRIGAYLSERLIRDVGRHRYGYVCIAMEALDQLLMACHCQSINLFVESFLKMVAKLLESEKPNLQILGTNSFVKFANIEEDTPSYHRSYDFFVSRFSEMCHSSHDDLEIKTKIRMSGIKGLQGVVRKTVNDELQANIWDPQHMDKIVPSLLFNLQHVEEAESRSPSPLQAPEKEKESPAELAERCLRELLGRAAFGNIKNAIKPVLIHLDNHSLWEPKVFAIRCFKIIMYSIQPQHSHLVIQQLLGHLDANSRSAATVRAGIVEVLSEAAVIAATGSVGPTVLEMFNTLLRQLRLSIDYALTGSYDGAVSLGTKIIKEHEERMFQEAVIKTVGSFASTLPTYQRSEVILFIMSKVPRPSLHQAVDTGRTGENRNRLTQIMLLKSLLQVSTGFQCNNMMSALPSNFLDRLLSTALMEDAEIRLFVLEILISFIDRHGNRHKFSTISTLSDISVLKLKVDKCSRQDTVFMKKHSQQLYRHIYLSCKEETNVQKHYEALYGLLALISIELANEEVVVDLIRLVLAVQDVAQVNEENLPVYNRCALYALGAAYLNLISQLTTVPAFCQHIHEVIETRKKEAPYMLPEDVFVERPRLSQNLDGVVIELLFRQSKISEVLGGSGYNSDRLCLPYIPQLTDEDRLSKRRSIGETISLQVEVESRNSPEKEEVSVRATVLGQPHLL

SEQ ID NO: 26757 - protein, 493 aa, Homo sapiens
  Payload ID: 5281
  Gene Symbol: EFEMP1
  Gene Name: EGF containing fibulin-like extracellular matrix protein 1
  Uniprot ID: Q12805
  ENSP ID: ENSP00000347596
MLKALFLTMLTLALVKSQDTEETITYTQCTDGYEWDPVRQQCKDIDECDIVPDACKGGMKCVNHYGGYLCLPKTAQIIVNNEQPQQETQPAEGTSGATTGVVAASSMATSGVLPGGGFVASAAAVAGPEMQTGRNNFVIRRNPADPQRIPSNPSHRIQCAAGYEQSEHNVCQDIDECTAGTHNCRADQVCINLRGSFACQCPPGYQKRGEQCVDIDECTIPPYCHQRCVNTPGSFYCQCSPGFQLAANNYTCVDINECDASNQCAQQCYNILGSFICQCNQGYELSSDRLNCEDIDECRTSSYLCQYQCVNEPGKFSCMCPQGYQVVRSRTCQDINECETTNECREDEMCWNYHGGFRCYPRNPCQDPYILTPENRCVCPVSNAMCRELPQSIVYKYMSIRSDRSVPSDIFQIQATTIYANTINTFRIKSGNENGEFYLRQTSPVSAMLVLVKSLSGPREHIVDLEMLTVSSIGTFRTSSVLRLTIIVGPFSF

SEQ ID NO: 26758 - protein, 493 aa, Homo sapiens; identical to SEQ ID NO: 26757
  Payload ID: 5281
  Gene Symbol: EFEMP1
  Gene Name: EGF containing fibulin-like extracellular matrix protein 1
  Uniprot ID: Q12805
  ENSP ID: ENSP00000378058

SEQ ID NO: 26759 - protein, 87 aa, Homo sapiens
  Payload ID: 5281
  Gene Symbol: EFEMP1
  Gene Name: EGF containing fibulin-like extracellular matrix protein 1
  ENSP ID: ENSP00000389319
MLKALFLTMLTLALVKSQDTEETITYTQCTDGYEWDPVRQQCKDIDECDIVPDACKGGMKCVNHYGGYLCLPKTAQIIVNNEQPQQE

SEQ ID NO: 26760 - protein, 172 aa, Homo sapiens
  Payload ID: 5281
  Gene Symbol: EFEMP1
  Gene Name: EGF containing fibulin-like extracellular matrix protein 1
  ENSP ID: ENSP00000392055
MLKALFLTMLTLALVKSQDTEETITYTQCTDGYEWDPVRQQCKDIDECDIVPDACKGGMKCVNHYGGYLCLPKTAQIIVNNEQPQQETQPAEGTSGATTGVVAASSMATSGVLPGGGFVASAAAVAGPEMQTGRNNFVIRRNPADPQRIPSNPSHRIQCAAGYEQSEHNVCQ

SEQ ID NO: 26761 - protein, 106 aa, Homo sapiens
  Payload ID: 5281
  Gene Symbol: EFEMP1
  Gene Name: EGF containing fibulin-like extracellular matrix protein 1
  ENSP ID: ENSP00000398345
MLKALFLTMLTLALVKSQDTEETITYTQCTDGYEWDPVRQQCKDIDECDIVPDACKGGMKCVNHYGGYLCLPKTAQIIVNNEQPQQETQPAEGTSGATTGVVAASS

SEQ ID NO: 26762 - protein, 27 aa, Homo sapiens
  Payload ID: 5281
  Gene Symbol: EFEMP1
  Gene Name: EGF containing fibulin-like extracellular matrix protein 1
  ENSP ID: ENSP00000398387
MLKALFLTMLTLALVKSQDTEETITYT

SEQ ID NO: 26763 - protein, 61 aa, Homo sapiens
  Payload ID: 5281
  Gene Symbol: EFEMP1
  Gene Name: EGF containing fibulin-like extracellular matrix protein 1
  ENSP ID: ENSP00000399480
MLKALFLTMLTLALVKSQDTEETITYTQCTDGYEWDPVRQQCKDIDECDIVPDACKGGMKC

SEQ ID NO: 26764 - protein, 51 aa, Homo sapiens
  Payload ID: 5281
  Gene Symbol: EFEMP1
  Gene Name: EGF containing fibulin-like extracellular matrix protein 1
  ENSP ID: ENSP00000405686
MLKALFLTMLTLALVKSQDTEETITYTQCTDGYEWDPVRQQCKDIDECDIV

SEQ ID NO: 26765 - protein, 119 aa, Homo sapiens
  Payload ID: 5281
  Gene Symbol: EFEMP1
  Gene Name: EGF containing fibulin-like extracellular matrix protein 1
  ENSP ID: ENSP00000408195
MLKALFLTMLTLALVKSQDTEETITYTQCTDGYEWDPVRQQCKDIDECDIVPDACKGGMKCVNHYGGYLCLPKTAQIIVNNEQPQQETQPAEGTSGATTGVVAASSMATSGVLPGGGFV

SEQ ID NO: 26766 - protein, 280 aa, Homo sapiens
  Payload ID: 5281
  Gene Symbol: EFEMP1
  Gene Name: EGF containing fibulin-like extracellular matrix protein 1
  ENSP ID: ENSP00000489183
  MOD_RES (1)..(1): Any amino acid
XNNFVIRRNPADPQRIPSNPSHRIQCAAGYEQSEHNVCQDIDECTAGTHNCRADQVCINLRGSFACQCPPGYQKRGEQCVDIDECRTSSYLCQYQCVNEPGKFSCMCPQGYQVVRSRTCQDINECETTNECREDEMCWNYHGGFRCYPRNPCQDPYILTPENRCVCPVSNAMCRELPQSIVYKYMSIRSDRSVPSDIFQIQATTIYANTINTFRIKSGNENGEFYLRQTSPVSAMLVLVKSLSGPREHIVDLEMLTVSSIGTFRTSSVLRLTIIVGPFSF

SEQ ID NO: 26767 - protein, 46 aa, Homo sapiens
  Payload ID: 5281
  Gene Symbol: EFEMP1
  Gene Name: EGF containing fibulin-like extracellular matrix protein 1
  ENSP ID: ENSP00000489578
MLKALFLTMLTLALVKSQDTEETITYTQCTDGYEWDPVRQQCKEDS

SEQ ID NO: 26768 - protein, 443 aa, Homo sapiens
  Payload ID: 5282
  Gene Symbol: EFEMP2
  Gene Name: EGF containing fibulin-like extracellular matrix protein 2
  Uniprot ID: O95967
  ENSP ID: ENSP00000309953
MLPCASCLPGSLLLWALLLLLLGSASPQDSEEPDSYTECTDGYEWDPDSQHCRDVNECLTIPEACKGEMKCINHYGGYLCLPRSAAVINDLHGEGPPPPVPPAQHPNPCPPGYEPDDQDSCVDVDECAQALHDCRPSQDCHNLPGSYQCTCPDGYRKIGPECVDIDECRYRYCQHRCVNLPGSFRCQCEPGFQLGPNNRSCVDVNECDMGAPCEQRCFNSYGTFLCRCHQGYELHRDGFSCSDIDECSYSSYLCQYRCINEPGRFSCHCPQGYQLLATRLCQDIDECESGAHQCSEAQTCVNFHGGYRCVDTNRCVEPYIQVSENRCLCPASNPLCREQPSSIVHRYMTITSERSVPADVFQIQATSVYPGAYNAFQIRAGNSQGDFYIRQINNVSAMLVLARPVTGPREYVLDLEMVTMNSLMSYRASSVLRLTVFVGAYTF

SEQ ID NO: 26769 - protein, 54 aa, Homo sapiens
  Payload ID: 5282
  Gene Symbol: EFEMP2
  Gene Name: EGF containing fibulin-like extracellular matrix protein 2
  ENSP ID: ENSP00000431305
  MOD_RES (1)..(1): Any amino acid
XQINNVSAMLVLARPVTGPREYVLDLEMVTMNSLMSYRASSVLRLTVFVGAYTF

SEQ ID NO: 26770 - protein, 69 aa, Homo sapiens
  Payload ID: 5282
  Gene Symbol: EFEMP2
  Gene Name: EGF containing fibulin-like extracellular matrix protein 2
  ENSP ID: ENSP00000432191
  MOD_RES (1)..(1): Any amino acid
XFQIRAGNSQGDFYIRQINNVSAMLVLARPVTGPREYVLDLEMVTMNSLMSYRASSVLRLTVFVGAYTF

SEQ ID NO: 26771 - protein, 436 aa, Homo sapiens
  Payload ID: 5282
  Gene Symbol: EFEMP2
  Gene Name: EGF containing fibulin-like extracellular matrix protein 2
  ENSP ID: ENSP00000434151
MLPCASCLPGSLLLWALLLLLLGSASPQDSEEPDSYTECTDGYEWDPDSQHCRDVNECLTIPEACKGEMKCINHYGGYLCLPRSAAVINDLHGEGPPPPVPPAQHPNPCPPGYEPDDQDSCVDVDECAQALHDCRPSQDCHNLPGSYQCTCPDGYRKIGPECVDIDECRYRYCQHRCVNLPGSFRCQCEPGFQLGPNNRSCVDVNECDMGAPCEQRCFNSYGTFLCRCHQGYELHRDGFSCSDIDECSYSSYLCQYRCINEPGRFSCHCPQGYQLLATRLCQDIDECESGAHQCSEAQTCVNFHGGYRCVDTNRCVEPYIQVSENRCLCPASNPLCREQPSSIVHRYMTITSERSVPADVFQIQATSVYPGAYNAFQIRAGNSQGDFYIRAQGPPLTGAGSSAPRASVTPRGEEVTRRADSRPRPRDLDLAGLQGS

SEQ ID NO: 26772 - protein, 443 aa, Homo sapiens; identical to SEQ ID NO: 26768
  Payload ID: 5282
  Gene Symbol: EFEMP2
  Gene Name: EGF containing fibulin-like extracellular matrix protein 2
  Uniprot ID: O95967
  ENSP ID: ENSP00000435295

SEQ ID NO: 26773 - protein, 202 aa, Homo sapiens
  Payload ID: 5282
  Gene Symbol: EFEMP2
  Gene Name: EGF containing fibulin-like extracellular matrix protein 2
  ENSP ID: ENSP00000435419
MLPCASCLPGSLLLWALLLLLLGSASPQDSEEPDSYTECTDGYEWDPDSQHCRDVNECLTIPEACKGEMKCINHYGGYLCLPRSAAVINDLHGEGPPPPVPPAQHPNPCPPGYEPDDQDSCVDVDECAQALHDCRPSQDCHNLPGSYQCTCPDGYRKIGPECVDIDECRYRYCQHRCVNLPGSFRCQCEPGFQLGPNNRSCV

SEQ ID NO: 26774 - protein, 77 aa, Homo sapiens
  Payload ID: 5282
  Gene Symbol: EFEMP2
  Gene Name: EGF containing fibulin-like extracellular matrix protein 2
  ENSP ID: ENSP00000435823
MLPCASCLPGSLLLWALLLLLLGSASPQDSEEPDSYTECTDGYEWDPDSQHCRGPAQETGCAQQAPLCRCQRVSDHP

SEQ ID NO: 26775 - protein, 183 aa, Homo sapiens
  Payload ID: 5282
  Gene Symbol: EFEMP2
  Gene Name: EGF containing fibulin-like extracellular matrix protein 2
  ENSP ID: ENSP00000435963
MLPCASCLPGSLLLWALLLLLLGSASPQDSEEPDSYTECTDGYEWDPDSQHCRDVNECLTIPEACKGEMKCINHYGGYLCLPRSAAVINDLHGEGPPPPVPPAQHPNPCPPGYEPDDQDSCVDVDECAQALHDCRPSQDCHNLPGSYQCTCPDGYRKIGPECVDIDECRYRYCQHRCVNLPGS

SEQ ID NO: 26776 - protein, 182 aa, Homo sapiens
  Payload ID: 5282
  Gene Symbol: EFEMP2
  Gene Name: EGF containing fibulin-like extracellular matrix protein 2
  ENSP ID: ENSP00000436521
DECESGAHQCSEAQTCVNFHGGYRCVDTNRCVEPYIQVSENRCLCPASNPLCREQPSSIVHRYMTITSERSVPADVFQIQATSVYPGAYNAFQIRAGNSQGDFYIRGPTPSEEQEGATLPAATLAEEPVVRGRMRKAQGPPLTGAGSSAPRASVTPRGEEVTRRADSRPRPRDLDLAGLQGS

SEQ ID NO: 26777 - protein, 76 aa, Homo sapiens
  Payload ID: 5282
  Gene Symbol: EFEMP2
  Gene Name: EGF containing fibulin-like extracellular matrix protein 2
  ENSP ID: ENSP00000436526
MTITSERSVPADVFQIQATSVYPGAYNAFQIRAGNSQGDFYIRQINNVSAMLVLARPVTGPREYVLDLEMVTMNSL

SEQ ID NO: 26778 - protein, 74 aa, Homo sapiens
  Payload ID: 5282
  Gene Symbol: EFEMP2
  Gene Name: EGF containing fibulin-like extracellular matrix protein 2
  ENSP ID: ENSP00000436536
SIVHRYMTITSERSVPADVFQIQATSVYPGAYNAFQIRAGNSQGDFYIRQINNVSAMLVLARPVTGPREPRGPH

SEQ ID NO: 26779 - protein, 58 aa, Homo sapiens
  Payload ID: 5282
  Gene Symbol: EFEMP2
  Gene Name: EGF containing fibulin-like extracellular matrix protein 2
  ENSP ID: ENSP00000437238
MLPCASCLPGSLLLWALLLLLLGSASPQDSEEPDSYTVGTVRAAGLGQEGCQRVSDHP

SEQ ID NO: 26780 - protein, 443 aa, Homo sapiens
  Payload ID: 5283
  Gene Symbol: EOGT
  Gene Name: EGF domain-specific O-linked N-acetylglucosamine (GlcNAc) transferase
  Uniprot ID: Q5NDL2
  ENSP ID: ENSP00000295571
MLMLFVFGVLLHEVSLSGQNEAPPNTHSIPGEPLYNYASIRLPEEHIPFFLHNNRHIATVCRKDSLCPYKKHLEKLKYCWGYEKSCKPEFRFGYPVCSYVDMGWTDTLESAEDIFWKQADFGYARERLEEMHVLCQPKETSDSSLVCSRYLQYCRATNLYLDLRNIKRNHDRFKEDFFQSGEIGGHCKLDIRTLTSEGQRKSPLQSWFAELQSYTQLNFRPIEDAKCDIVIEKPTYFMKLDAGVNMYHHFCDFINLYITQHVNNSFSTDVYIVMWDTDGKIRVTILARSTEYRKILNQNELVNALKTVSTFEVQIVDYKYRELGFLDQLRITHNTDIFIGMHGAGLTHLLFLPDWAAVFELYNCEDERCYLDLARLRGVHYITWRRQNKVFPQDKGHHPTLGEHPKFTNYSFDVEEFMYLVLQAADHVLQHPKWPFKKKHDEL

SEQ ID NO: 26781 - protein, 527 aa, Homo sapiens
  Payload ID: 5283
  Gene Symbol: EOGT
  Gene Name: EGF domain-specific O-linked N-acetylglucosamine (GlcNAc) transferase
  Uniprot ID: Q5NDL2
  ENSP ID: ENSP00000373206
MLMLFVFGVLLHEVSLSGQNEAPPNTHSIPGEPLYNYASIRLPEEHIPFFLHNNRHIATVCRKDSLCPYKKHLEKLKYCWGYEKSCKPEFRFGYPVCSYVDMGWTDTLESAEDIFWKQADFGYARERLEEMHVLCQPKETSDSSLVCSRYLQYCRATNLYLDLRNIKRNHDRFKEDFFQSGEIGGHCKLDIRTLTSEGQRKSPLQSWFAELQSYTQLNFRPIEDAKCDIVIEKPTYFMKLDAGVNMYHHFCDFINLYITQHVNNSFSTDVYIVMWDTSSYGYGDLFSDTWNAFTDYDVIHLKTYDSKRVCFKEAVFSLLPRMRYGLFYNTPLISGCQNTGLFRAFAQHVLHRLNITQEGPKDGKIRVTILARSTEYRKILNQNELVNALKTVSTFEVQIVDYKYRELGFLDQLRITHNTDIFIGMHGAGLTHLLFLPDWAAVFELYNCEDERCYLDLARLRGVHYITWRRQNKVFPQDKGHHPTLGEHPKFTNYSFDVEEFMYLVLQAADHVLQHPKWPFKKKHDEL

SEQ ID NO: 26782 - protein, 206 aa, Homo sapiens
  Payload ID: 5283
  Gene Symbol: EOGT
  Gene Name: EGF domain-specific O-linked N-acetylglucosamine (GlcNAc) transferase
  ENSP ID: ENSP00000384124
MLMLFVFGVLLHEVSLSGQNEAPPNTHSIPGEPLYNYASIRLPEEHIPFFLHNNRHIATVCRKDSLCPYKKHLEKLKYCWGYEKSCKPEFRFGYPVCSYVDMGWTDTLESAEDIFWKQADFGYARERLEEMHVLCQPKETSDSSLVCSRYLQYCRATNLYLDLRNIKRNHDRFKEDFFQSGEIGGHCKLDIRTLTSEGQRKSPLQS

SEQ ID NO: 26783 - protein, 132 aa, Homo sapiens
  Payload ID: 5283
  Gene Symbol: EOGT
  Gene Name: EGF domain-specific O-linked N-acetylglucosamine (GlcNAc) transferase
  ENSP ID: ENSP00000408090
MLMLFVFGVLLHEVSLSGQNEAPPNTHSIPGEPLYNYASIRLPEEHIPFFLHNNRHIATVCRKDSLCPYKKHLEKLKYCWGYEKSCKPEFRFGYPVCSYVDMGWTDTLESAEDIFWKQADFGYARERLEEMH

SEQ ID NO: 26784 - protein, 123 aa, Homo sapiens
  Payload ID: 5283
  Gene Symbol: EOGT
  Gene Name: EGF domain-specific O-linked N-acetylglucosamine (GlcNAc) transferase
  ENSP ID: ENSP00000411832
MLMLFVFGVLLHEVSLSGQNEAPPNTHSIPGEPLYNYASIRLPEEHIPFFLHNNRHIATVCRKDSLCPYKKHLEKLKYCWGYEKSCKPEFRFGYPVCSYVDMGWTDTLESAEDIFWKQADFGY

SEQ ID NO: 26785 - protein, 527 aa, Homo sapiens; identical to SEQ ID NO: 26781
  Payload ID: 5283
  Gene Symbol: EOGT
  Gene Name: EGF domain-specific O-linked N-acetylglucosamine (GlcNAc) transferase
  Uniprot ID: Q5NDL2
  ENSP ID: ENSP00000443780

SEQ ID NO: 26786 - protein, 443 aa, Homo sapiens; identical to SEQ ID NO: 26780
  Payload ID: 5283
  Gene Symbol: EOGT
  Gene Name: EGF domain-specific O-linked N-acetylglucosamine (GlcNAc) transferase
  Uniprot ID: Q5NDL2
  ENSP ID: ENSP00000444264

SEQ ID NO: 26787 - protein, 135 aa, Homo sapiens
  Payload ID: 5283
  Gene Symbol: EOGT
  Gene Name: EGF domain-specific O-linked N-acetylglucosamine (GlcNAc) transferase
  ENSP ID: ENSP00000480083
MISAHCNLCLLDSSDSCALASQVAGITGVHHHAQLIFVFLIETEFHHVGQAGLELWVQEILPPCLPKCWDYRCEPPRMALNFLFLGIPKFSTFSALEFVNIFVEYHMTVIPECSNLFMIYLGKFTTVLLFAIIWL

SEQ ID NO: 26788 - protein, 480 aa, Homo sapiens
  Payload ID: 5284
  Gene Symbol: EDIL3
  Gene Name: EGF-like repeats and discoidin I-like domains 3
  Uniprot ID: O43854
  ENSP ID: ENSP00000296591
MKRSVAVWLLVGLSLGVPQFGKGDICDPNPCENGGICLPGLADGSFSCECPDGFTDPNCSSVVEVASDEEEPTSAGPCTPNPCHNGGTCEISEAYRGDTFIGYVCKCPRGFNGIHCQHNINECEVEPCKNGGICTDLVANYSCECPGEFMGRNCQYKCSGPLGIEGGIISNQQITASSTHRALFGLQKWYPYYARLNKKGLINAWTAAENDRWPWIQINLQRKMRVTGVITQGAKRIGSPEYIKSYKIAYSNDGKTWAMYKVKGTNEDMVFRGNIDNNTPYANSFTPPIKAQYVRLYPQVCRRHCTLRMELLGCELSGCSEPLGMKSGHIQDYQITASSIFRTLNMDMFTWEPRKARLDKQGKVNAWTSGHNDQSQWLQVDLLVPTKVTGIITQGAKDFGHVQFVGSYKLAYSNDGEHWTVYQDEKQRKDKVFQGNFDNDTHRKNVIDPPIYARHIRILPWSWYGRITLRSELLGCTEEE

SEQ ID NO: 26789 - protein, 470 aa, Homo sapiens
  Payload ID: 5284
  Gene Symbol: EDIL3
  Gene Name: EGF-like repeats and discoidin I-like domains 3
  Uniprot ID: O43854
  ENSP ID: ENSP00000369483
MKRSVAVWLLVGLSLGVPQFGKGDICDPNPCENGGICLPGLADGSFSCECPDGFTDPNCSSVVEVGPCTPNPCHNGGTCEISEAYRGDTFIGYVCKCPRGFNGIHCQHNINECEVEPCKNGGICTDLVANYSCECPGEFMGRNCQYKCSGPLGIEGGIISNQQITASSTHRALFGLQKWYPYYARLNKKGLINAWTAAENDRWPWIQINLQRKMRVTGVITQGAKRIGSPEYIKSYKIAYSNDGKTWAMYKVKGTNEDMVFRGNIDNNTPYANSFTPPIKAQYVRLYPQVCRRHCTLRMELLGCELSGCSEPLGMKSGHIQDYQITASSIFRTLNMDMFTWEPRKARLDKQGKVNAWTSGHNDQSQWLQVDLLVPTKVTGIITQGAKDFGHVQFVGSYKLAYSNDGEHWTVYQDEKQRKDKVFQGNFDNDTHRKNVIDPPIYARHIRILPWSWYGRITLRSELLGCTEEE

SEQ ID NO: 26790 - protein, 1009 aa, Homo sapiens
  Payload ID: 5285
  Gene Symbol: EGFLAM
  Gene Name: EGF-like, fibronectin type III and laminin G domains
  Uniprot ID: Q63HQ2
  ENSP ID: ENSP00000313084
MDLIRGVLLRLLLLASSLGPGAVSLRAAIRKPGKVGPPLDIKLGALNCTAFSIQWKMPRHPGSPILGYTVFYSEVGADKSLQEQLHSVPLSRDIPTTEEVIGDLKPGTEYRVSIAAYSQAGKGRLSSPRHVTTLSQDSCLPPAAPQQPHVIVVSDSEVALSWKPGASEGSAPIQYYSVEFIRPDFDKKWTSIHERIQMDSMVIKGLDPDTNYQFAVRAMNSHGPSPRSWPSDIIRTLCPEEAGSGRYGPRYITDMGAGEDDEGFEDDLDLDISFEEVKPLPATKGGNKKFLVESKKMSISNPKTISRLIPPTSASLPVTTVAPQPIPIQRKGKNGVAIMSRLFDMPCDETLCSADSFCVNDYTWGGSRCQCTLGKGGESCSEDIVIQYPQFFGHSYVTFEPLKNSYQAFQITLEFRAEAEDGLLLYCGENEHGRGDFMSLAIIRRSLQFRFNCGTGVAIIVSETKIKLGGWHTVMLYRDGLNGLLQLNNGTPVTGQSQGQYSKITFRTPLYLGGAPSAYWLVRATGTNRGFQGCVQSLAVNGRRIDMRPWPLGKALSGADVGECSSGICDEASCIHGGTCTAIKADSYICLCPLGFKGRHCEDAFTLTIPQFRESLRSYAATPWPLEPQHYLSFMEFEITFRPDSGDGVLLYSYDTGSKDFLSINLAGGHVEFRFDCGSGTGVLRSEDPLTLGNWHELRVSRTAKNGILQVDKQKIVEGMAEGGFTQIKCNTDIFIGGVPNYDDVKKNSGVLKPFSGSIQKIILNDRTIHVKHDFTSGVNVENAAHPCVRAPCAHGGSCRPRKEGYDCDCPLGFEGLHCQKAIIEAIEIPQFIGRSYLTYDNPDILKRVSGSRSNVFMRFKTTAKDGLLLWRGDSPMRPNSDFISLGLRDGALVFSYNLGSGVASIMVNGSFNDGRWHRVKAVRDGQSGKITVDDYGARTGKSPGMMRQLNINGALYVGGMKEIALHTNRQYMRGLVGCISHFTLSTDYHISLVEDAVDGKNINTCGAK

SEQ ID NO: 26791 - protein, 775 aa, Homo sapiens
  Payload ID: 5285
  Gene Symbol: EGFLAM
  Gene Name: EGF-like, fibronectin type III and laminin G domains
  Uniprot ID: Q63HQ2
  ENSP ID: ENSP00000337607
MHPGPEEAGSGRYGPRYITDMGAGEDDEGFEDDLDLDISFEEVKPLPATKGGNKKFLVESKKMSISNPKTISRLIPPTSASLPVTTVAPQPIPIQRKGKNGVAIMSRLFDMPCDETLCSADSFCVNDYTWGGSRCQCTLGKGGESCSEDIVIQYPQFFGHSYVTFEPLKNSYQAFQITLEFRAEAEDGLLLYCGENEHGRGDFMSLAIIRRSLQFRFNCGTGVAIIVSETKIKLGGWHTVMLYRDGLNGLLQLNNGTPVTGQSQGQYSKITFRTPLYLGGAPSAYWLVRATGTNRGFQGCVQSLAVNGRRIDMRPWPLGKALSGADVGECSSGICDEASCIHGGTCTAIKADSYICLCPLGFKGRHCEDAFTLTIPQFRESLRSYAATPWPLEPQHYLSFMEFEITFRPDSGDGVLLYSYDTGSKDFLSINLAGGHVEFRFDCGSGTGVLRSEDPLTLGNWHELRVSRTAKNGILQVDKQKIVEGMAEGGFTQIKCNTDIFIGGVPNYDDVKKNSGVLKPFSGSIQKIILNDRTIHVKHDFTSGVNVENAAHPCVRAPCAHGGSCRPRKEGYDCDCPLGFEGLHCQKAIIEAIEIPQFIGRSYLTYDNPDILKRVSGSRSNVFMRFKTTAKDGLLLWRGDSPMRPNSDFISLGLRDGALVFSYNLGSGVASIMVNGSFNDGRWHRVKAVRDGQSGKITVDDYGARTGKSPGMMRQLNINGALYVGGMKEIALHTNRQYMRGLVGCISHFTLSTDYHISLVEDAVDGKNINTCGAK

SEQ ID NO: 26792 - protein, 1017 aa, Homo sapiens
  Payload ID: 5285
  Gene Symbol: EGFLAM
  Gene Name: EGF-like, fibronectin type III and laminin G domains
  Uniprot ID: Q63HQ2
  ENSP ID: ENSP00000346964
MDLIRGVLLRLLLLASSLGPGAVSLRAAIRKPGKVGPPLDIKLGALNCTAFSIQWKMPRHPGSPILGYTVFYSEVGADKSLQEQLHSVPLSRDIPTTEEVIGDLKPGTEYRVSIAAYSQAGKGRLSSPRHVTTLSQDSCLPPAAPQQPHVIVVSDSEVALSWKPGASEGSAPIQYYSVEFIRPDFDKKWTSIHERIQMDSMVIKGLDPDTNYQFAVRAMNSHGPSPRSWPSDIIRTLCPEEAGSGRYGPRYITDMGAGEDDEGFEDDLDLDISFEEVKPLPATKGGNKKFLVESKKMSISNPKTISRLIPPTSASLPVTTVAPQPIPIQRKGKNGVAIMSRLFDMPCDETLCSADSFCVNDYTWGGSRCQCTLGKGGESCSEDIVIQYPQFFGHSYVTFEPLKNSYQAFQITLEFRAEAEDGLLLYCGENEHGRGDFMSLAIIRRSLQFRFNCGTGVAIIVSETKIKLGGWHTVMLYRDGLNGLLQLNNGTPVTGQSQGQYSKITFRTPLYLGGAPSAYWLVRATGTNRGFQGCVQSLAVNGRRIDMRPWPLGKALSGADVGECSSGICDEASCIHGGTCTAIKADSYICLCPLGFKGRHCEDAFTLTIPQFRESLRSYAATPWPLEPQHYLSFMEFEITFRPDSGDGVLLYSYDTGSKDFLSINLAGGHVEFRFDCGSGTGVLRSEDPLTLGNWHELRVSRTAKNGILQVDKQKIVEGMAEGGFTQIKCNTDIFIGGVPNYDDVKKNSGVLKPFSGSIQKIILNDRTIHVKHDFTSGVNVENAAHPCVRAPCAHGGSCRPRKEGYDCDCPLGFEGLHCQKECGNYCLNTIIEAIEIPQFIGRSYLTYDNPDILKRVSGSRSNVFMRFKTTAKDGLLLWRGDSPMRPNSDFISLGLRDGALVFSYNLGSGVASIMVNGSFNDGRWHRVKAVRDGQSGKITVDDYGARTGKSPGMMRQLNINGALYVGGMKEIALHTNRQYMRGLVGCISHFTLSTDYHISLVEDAVDGKNINTCGAK

SEQ ID NO: 26793 - protein, 375 aa, Homo sapiens
  Payload ID: 5285
  Gene Symbol: EGFLAM
  Gene Name: EGF-like, fibronectin type III and laminin G domains
  Uniprot ID: Q63HQ2
  ENSP ID: ENSP00000380385
MEFEITFRPDSGDGVLLYSYDTGSKDFLSINLAGGHVEFRFDCGSGTGVLRSEDPLTLGNWHELRVSRTAKNGILQVDKQKIVEGMAEGGFTQIKCNTDIFIGGVPNYDDVKKNSGVLKPFSGSIQKIILNDRTIHVKHDFTSGVNVENAAHPCVRAPCAHGGSCRPRKEGYDCDCPLGFEGLHCQKAIIEAIEIPQFIGRSYLTYDNPDILKRVSGSRSNVFMRFKTTAKDGLLLWRGDSPMRPNSDFISLGLRDGALVFSYNLGSGVASIMVNGSFNDGRWHRVKAVRDGQSGKITVDDYGARTGKSPGMMRQLNINGALYVGGMKEIALHTNRQYMRGLVGCISHFTLSTDYHISLVEDAVDGKNINTCGAK

SEQ ID NO: 26794 - protein, 152 aa, Homo sapiens
  Payload ID: 5285
  Gene Symbol: EGFLAM
  Gene Name: EGF-like, fibronectin type III and laminin G domains
  Uniprot ID: Q63HQ2
  ENSP ID: ENSP00000380393
MRFKTTAKDGLLLWRGDSPMRPNSDFISLGLRDGALVFSYNLGSGVASIMVNGSFNDGRWHRVKAVRDGQSGKITVDDYGARTGKSPGMMRQLNINGALYVGGMKEIALHTNRQYMRGLVGCISHFTLSTDYHISLVEDAVDGKNINTCGAK

SEQ ID NO: 26795 - protein, 152 aa, Homo sapiens; identical to SEQ ID NO: 26794
  Payload ID: 5285
  Gene Symbol: EGFLAM
  Gene Name: EGF-like, fibronectin type III and laminin G domains
  Uniprot ID: Q63HQ2
  ENSP ID: ENSP00000423228

SEQ ID NO: 26796 - protein, 152 aa, Homo sapiens; identical to SEQ ID NO: 26794
  Payload ID: 5285
  Gene Symbol: EGFLAM
  Gene Name: EGF-like, fibronectin type III and laminin G domains
  Uniprot ID: Q63HQ2
  ENSP ID: ENSP00000425579

SEQ ID NO: 26797 - protein, 47 aa, Homo sapiens
  Payload ID: 5285
  Gene Symbol: EGFLAM
  Gene Name: EGF-like, fibronectin type III and laminin G domains
  ENSP ID: ENSP00000426437
MDLIRGVLLRLLLLASSLGPGAVSLRAAIRKPGRCWRMTVTKTWTEP

SEQ ID NO: 26798 - protein, 112 aa, Homo sapiens
  Payload ID: 5285
  Gene Symbol: EGFLAM
  Gene Name: EGF-like, fibronectin type III and laminin G domains
  ENSP ID: ENSP00000427228
MRFKTTAKDGLLLWRGDSPMRPNSDFISLGLRDGALVFSYNLGSGVASIMVNGSFNDGRWHRVKAVRDGQSGKITVDDYGARTGKSPGMMRQLNINGALYVGGMKEIALHTN

SEQ ID NO: 26799 - protein, 553 aa, Homo sapiens
  Payload ID: 5286
  Gene Symbol: EGFL6
  Gene Name: EGF-like-domain, multiple 6
  Uniprot ID: Q8IUX8
  ENSP ID: ENSP00000355126
MPLPWSLALPLLLSWVAGGFGNAASARHHGLLASARQPGVCHYGTKLACCYGWRRNSKGVCEATCEPGCKFGECVGPNKCRCFPGYTGKTCSQDVNECGMKPRPCQHRCVNTHGSYKCFCLSGHMLMPDATCVNSRTCAMINCQYSCEDTEEGPQCLCPSSGLRLAPNGRDCLDIDECASGKVICPYNRRCVNTFGSYYCKCHIGFELQYISGRYDCIDINECTMDSHTCSHHANCFNTQGSFKCKCKQGYKGNGLRCSAIPENSVKEVLRAPGTIKDRIKKLLAHKNSMKKKAKIKNVTPEPTRTPTPKVNLQPFNYEEIVSRGGNSHGGKKGNEEKMKEGLEDEKREEKALKNDIEERSLRGDVFFPKVNEAGEFGLILVQRKALTSKLEHKDLNISVDCSFNHGICDWKQDREDDFDWNPADRDNAIGFYMAVPALAGHKKDIGRLKLLLPDLQPQSNFCLLFDYRLAGDKVGKLRVFVKNSNNALAWEKTTSEDEKWKTGKIQLYQGTDATKSIIFEAERGKGKTGEIAVDGVLLVSGLCPDSLLSVDD

SEQ ID NO: 26800 - protein, 554 aa, Homo sapiens
  Payload ID: 5286
  Gene Symbol: EGFL6
  Gene Name: EGF-like-domain, multiple 6
  Uniprot ID: Q8IUX8
  ENSP ID: ENSP00000369976
MPLPWSLALPLLLSWVAGGFGNAASARHHGLLASARQPGVCHYGTKLACCYGWRRNSKGVCEATCEPGCKFGECVGPNKCRCFPGYTGKTCSQDVNECGMKPRPCQHRCVNTHGSYKCFCLSGHMLMPDATCVNSRTCAMINCQYSCEDTEEGPQCLCPSSGLRLAPNGRDCLDIDECASGKVICPYNRRCVNTFGSYYCKCHIGFELQYISGRYDCIDINECTMDSHTCSHHANCFNTQGSFKCKCKQGYKGNGLRCSAIPENSVKEVLRAPGTIKDRIKKLLAHKNSMKKKAKIKNVTPEPTRTPTPKVNLQPFNYEEIVSRGGNSHGGKKGNEEKMKEGLEDEKREEKALKNDIEERSLRGDVFFPKVNEAGEFGLILVQRKALTSKLEHKADLNISVDCSFNHGICDWKQDREDDFDWNPADRDNAIGFYMAVPALAGHKKDIGRLKLLLPDLQPQSNFCLLFDYRLAGDKVGKLRVFVKNSNNALAWEKTTSEDEKWKTGKIQLYQGTDATKSIIFEAERGKGKTGEIAVDGVLLVSGLCPDSLLSVDD

SEQ ID NO: 26801 - protein, 273 aa, Homo sapiens
  Payload ID: 5287
  Gene Symbol: EGFL7
  Gene Name: EGF-like-domain, multiple 7
  Uniprot ID: Q9UHF1
  ENSP ID: ENSP00000307843
MRGSQEVLLMWLLVLAVGGTEHAYRPGRRVCAVRAHGDPVSESFVQRVYQPFLTTCDGHRACSTYRTIYRTAYRRSPGLAPARPRYACCPGWKRTSGLPGACGAAICQPPCRNGGSCVQPGRCRCPAGWRGDTCQSDVDECSARRGGCPQRCVNTAGSYWCQCWEGHSLSADGTLCVPKGGPPRVAPNPTGVDSAMKEEVQRLQSRVDLLEEKLQLVLAPLHSLASQALEHGLPDPGSLLVHSFQQLGRIDSLSEQISFLEEQLGSCSCKKDS

SEQ ID NO: 26802 - protein, 273 aa, Homo sapiens; identical to SEQ ID NO: 26801
  Payload ID: 5287
  Gene Symbol: EGFL7
  Gene Name: EGF-like-domain, multiple 7
  Uniprot ID: Q9UHF1
  ENSP ID: ENSP00000360763

SEQ ID NO: 26803 - protein, 273 aa, Homo sapiens; identical to SEQ ID NO: 26801
  Payload ID: 5287
  Gene Symbol: EGFL7
  Gene Name: EGF-like-domain, multiple 7
  Uniprot ID: Q9UHF1
  ENSP ID: ENSP00000360764

SEQ ID NO: 26804 - protein, 273 aa, Homo sapiens; identical to SEQ ID NO: 26801
  Payload ID: 5287
  Gene Symbol: EGFL7
  Gene Name: EGF-like-domain, multiple 7
  Uniprot ID: Q9UHF1
  ENSP ID: ENSP00000385639

SEQ ID NO: 26805 - protein, 65 aa, Homo sapiens
  Payload ID: 5287
  Gene Symbol: EGFL7
  Gene Name: EGF-like-domain, multiple 7
  ENSP ID: ENSP00000473338
MRGSQEVLLMWLLVLAVGGTEHAYRPGRRVCAVRAHGDPVSESFVQRVYQPFLTTCDGHRACSTY

SEQ ID NO: 26806 - protein, 293 aa, Homo sapiens
  Payload ID: 5288
  Gene Symbol: EGFL8
  Gene Name: EGF-like-domain, multiple 8
  Uniprot ID: Q99944
  ENSP ID: ENSP00000333380
MGSRAELCTLLGGFSFLLLLIPGEGAKGGSLRESQGVCSKQTLVVPLHYNESYSQPVYKPYLTLCAGRRICSTYRTMYRVMWREVRREVQQTHAVCCQGWKKRHPGALTCEAICAKPCLNGGVCVRPDQCECAPGWGGKHCHVDVDECRTSITLCSHHCFNTAGSFTCGCPHDLVLGVDGRTCMEGSPEPPTSASILSVAVREAEKDERALKQEIHELRGRLERLEQWAGQAGAWVRAVLPVPPEELQPEQVAELWGRGDRIESLSDQVLLLEERLGACSCEDNSLGLGVNHR

SEQ ID NO: 26807 - protein, 293 aa, Homo sapiens; identical to SEQ ID NO: 26806
  Payload ID: 5288
  Gene Symbol: EGFL8
  Gene Name: EGF-like-domain, multiple 8
  Uniprot ID: Q99944
  ENSP ID: ENSP00000378888

SEQ ID NO: 26808 - protein, 293 aa, Homo sapiens [sequence omitted]

SEQ ID NO: 26809 - protein, 258 aa, Homo sapiens
  Payload ID: 5288
  Gene Symbol: EGFL8
  Gene Name: EGF-like-domain, multiple 8
  ENSP ID: ENSP00000387353
MGSRAELCTLLGGFSFLLLLIPGEGAKGGSLRESQGVCSKQTLVVPLHYNESYSQPVYKPYLTLCAGRRICSTYRTMYRVMWREVRREVQQTHAVCCQGWKKRHPGALTCEAICAKPCLNGGVCVRPDQCECAPGWGGKHCHVGSFTCGCPHDLVLGVDGRTCMEGSPEPPTSASILSVAVREAEKDERALKQEIHELRGRLERLEQWAGQAGAWVRAVLPVPPEELQPEQVAELWGRGDRIESLSDQVLLLEERLGA

SEQ ID NO: 26810 - protein, 293 aa, Homo sapiens; identical to SEQ ID NO: 26806
  Payload ID: 5288
  Gene Symbol: EGFL8
  Gene Name: EGF-like-domain, multiple 8
  Uniprot ID: Q99944
  ENSP ID: ENSP00000388000

SEQ ID NO: 26811 - protein, 293 aa, Homo sapiens; identical to SEQ ID NO: 26806
  Payload ID: 5288
  Gene Symbol: EGFL8
  Gene Name: EGF-like-domain, multiple 8
  Uniprot ID: Q99944
  ENSP ID: ENSP00000390866

SEQ ID NO: 26812 - protein, 293 aa, Homo sapiens; identical to SEQ ID NO: 26806
  Payload ID: 5288
  Gene Symbol: EGFL8
  Gene Name: EGF-like-domain, multiple 8
  Uniprot ID: Q99944
  ENSP ID: ENSP00000394193

SEQ ID NO: 26813 - protein, 258 aa, Homo sapiens; identical to SEQ ID NO: 26809
  Payload ID: 5288
  Gene Symbol: EGFL8
  Gene Name: EGF-like-domain, multiple 8
  ENSP ID: ENSP00000394540

SEQ ID NO: 26814 - protein, 293 aa, Homo sapiens; identical to SEQ ID NO: 26806
  Payload ID: 5288
  Gene Symbol: EGFL8
  Gene Name: EGF-like-domain, multiple 8
  Uniprot ID: Q99944
  ENSP ID: ENSP00000397426

SEQ ID NO: 26815 - protein, 293 aa, Homo sapiens; identical to SEQ ID NO: 26806
  Payload ID: 5288
  Gene Symbol: EGFL8
  Gene Name: EGF-like-domain, multiple 8
  Uniprot ID: Q99944
  ENSP ID: ENSP00000398893

SEQ ID NO: 26816 - protein, 258 aa, Homo sapiens; identical to SEQ ID NO: 26809
  Payload ID: 5288
  Gene Symbol: EGFL8
  Gene Name: EGF-like-domain, multiple 8
  ENSP ID: ENSP00000401694

SEQ ID NO: 26817 - protein, 258 aa, Homo sapiens; identical to SEQ ID NO: 26809
  Payload ID: 5288
  Gene Symbol: EGFL8
  Gene Name: EGF-like-domain, multiple 8
  ENSP ID: ENSP00000403075

SEQ ID NO: 26818 - protein, 258 aa, Homo sapiens
  Payload ID: 5288
  Gene Symbol: EGFL8
  Gene Name: EGF-like-domain, multiple 8
  ENSP ID: ENSP00000404259
MGSRAELCTLLGGFSFLLLLIPGEGAKGGSLRESQGVCSKQTLVVPLHYNESYSQPVYKPYLTLCAGRRICSTYRTMYRVMWREVKREVQQTHAVCCQGWKKRHPGALTCEAICAKPCLNGGVCVRPDQCECAPGWGGKHCHVGSFTCGCPHDLVLGVDGRTCMEGSPEPPTSASILSVAVREAEKDERALKQEIHELRGRLERLEQWAGQAGAWVRAVLPVPPEELQPEQVAELWGRGDRIESLSDQVLLLEERLGA

SEQ ID NO: 26819 - protein, 258 aa, Homo sapiens; identical to SEQ ID NO: 26809
  Payload ID: 5288
  Gene Symbol: EGFL8
  Gene Name: EGF-like-domain, multiple 8
  ENSP ID: ENSP00000404308

SEQ ID NO: 26820 - protein, 293 aa, Homo sapiens; identical to SEQ ID NO: 26806
  Payload ID: 5288
  Gene Symbol: EGFL8
  Gene Name: EGF-like-domain, multiple 8
  Uniprot ID: Q99944
  ENSP ID: ENSP00000405502

SEQ ID NO: 26821 - protein, 293 aa, Homo sapiens [sequence omitted]

SEQ ID NO: 26822 - protein, 293 aa, Homo sapiens; identical to SEQ ID NO: 26806
  Payload ID: 5288
  Gene Symbol: EGFL8
  Gene Name: EGF-like-domain, multiple 8
  Uniprot ID: Q99944
  ENSP ID: ENSP00000411023

SEQ ID NO: 26823 - protein, 258 aa, Homo sapiens; identical to SEQ ID NO: 26809
  Payload ID: 5288
  Gene Symbol: EGFL8
  Gene Name: EGF-like-domain, multiple 8
  ENSP ID: ENSP00000413039

SEQ ID NO: 26824 - protein, 293 aa, Homo sapiens; identical to SEQ ID NO: 26806
  Payload ID: 5288
  Gene Symbol: EGFL8
  Gene Name: EGF-like-domain, multiple 8
  Uniprot ID: Q99944
  ENSP ID: ENSP00000414996

SEQ ID NO: 26825 - protein, 293 aa, Homo sapiens; identical to SEQ ID NO: 26806
  Payload ID: 5288
  Gene Symbol: EGFL8
  Gene Name: EGF-like-domain, multiple 8
  Uniprot ID: Q99944
  ENSP ID: ENSP00000415577

SEQ ID NO: 26826 - protein, 293 aa, Homo sapiens; identical to SEQ ID NO: 26806
  Payload ID: 5288
  Gene Symbol: EGFL8
  Gene Name: EGF-like-domain, multiple 8
  Uniprot ID: Q99944
  ENSP ID: ENSP00000416366

SEQ ID NO: 26827 - protein, 426 aa, Homo sapiens
  Payload ID: 5289
  Gene Symbol: EGLN1
  Gene Name: egl-9 family hypoxia-inducible factor 1
  Uniprot ID: Q9GZT9
  ENSP ID: ENSP00000355601
MANDSGGPGGPSPSERDRQYCELCGKMENLLRCSRCRSSFYCCKEHQRQDWKKHKLVCQGSEGALGHGVGPHQHSGPAPPAAVPPPRAGAREPRKAAARRDNASGDAAKGKVKAKPPADPAAAASPCRAAAGGQGSAVAAEAEPGKEEPPARSSLFQEKANLYPPSNTPGDALSPGGGLRPNGQTKPLPALKLALEYIVPCMNKHGICVVDDFLGKETGQQIGDEVRALHDTGKFTDGQLVSQKSDSSKDIRGDKITWIEGKEPGCETIGLLMSSMDDLIRHCNGKLGSYKINGRTKAMVACYPGNGTGYVRHVDNPNGDGRCVTCIYYLNKDWDAKVSGGILRIFPEGKAQFADIEPKFDRLLFFWSDRRNPHEVQPAYATRYAITVWYFDADERARAKVKYLTGEKGVRVELNKPSDSVGKDVF

SEQ ID NO: 26828 - protein, 407 aa, Homo sapiens
  Payload ID: 5290
  Gene Symbol: EGLN2
  Gene Name: egl-9 family hypoxia-inducible factor 2
  Uniprot ID: Q96KS0
  ENSP ID: ENSP00000307080
MDSPCQPQPLSQALPQLPGSSSEPLEPEPGRARMGVESYLPCPLLPSYHCPGVPSEASAGSGTPRATATSTTASPLRDGFGGQDGGELRPLQSEGAAALVTKGCQRLAAQGARPEAPKRKWAEDGGDAPSPSKRPWARQENQEAEREGGMSCSCSSGSGEASAGLMEEALPSAPERLALDYIVPCMRYYGICVKDSFLGAALGGRVLAEVEALKRGGRLRDGQLVSQRAIPPRSIRGDQIAWVEGHEPGCRSIGALMAHVDAVIRHCAGRLGSYVINGRTKAMVACYPGNGLGYVRHVDNPHGDGRCITCIYYLNQNWDVKVHGGLLQIFPEGRPVVANIEPLFDRLLIFWSDRRNPHEVKPAYATRYAITVWYFDAKERAAAKDKYQLASGQKGVQVPVSQPPTPT

SEQ ID NO: 26829 - protein, 407 aa, Homo sapiens; identical to SEQ ID NO: 26828
  Payload ID: 5290
  Gene Symbol: EGLN2
  Gene Name: egl-9 family hypoxia-inducible factor 2
  Uniprot ID: Q96KS0
  ENSP ID: ENSP00000385253

SEQ ID NO: 26830 - protein, 77 aa, Homo sapiens
  Payload ID: 5290
  Gene Symbol: EGLN2
  Gene Name: egl-9 family hypoxia-inducible factor 2
  ENSP ID: ENSP00000469272
MDSPCQPQPLSQALPQLPGSSSEPLEPEPGRARMGVESYLPCPLLPSYHCPGVPSEASAGSGTPRATATSTTASPLR

SEQ ID NO: 26831 - protein, 94 aa, Homo sapiens
  Payload ID: 5290
  Gene Symbol: EGLN2
  Gene Name: egl-9 family hypoxia-inducible factor 2
  ENSP ID: ENSP00000469323
MDSPCQPQPLSQALPQLPGSSSEPLEPEPGRARMGVESYLPCPLLPSYHCPGVPSEASAGSGTPRATATSTTASPLRDGFGGQDGGELRPLQSE

SEQ ID NO: 26832 - protein, 407 aa, Homo sapiens; identical to SEQ ID NO: 26828
  Payload ID: 5290
  Gene Symbol: EGLN2
  Gene Name: egl-9 family hypoxia-inducible factor 2
  Uniprot ID: Q96KS0
  ENSP ID: ENSP00000469686

SEQ ID NO: 26833 - protein, 87 aa, Homo sapiens
  Payload ID: 5290
  Gene Symbol: EGLN2
  Gene Name: egl-9 family hypoxia-inducible factor 2
  ENSP ID: ENSP00000470968
MDSPCQPQPLSQALPQLPGSSSEPLEPEPGRARMGVESYLPCPLLPSYHCPGVPSEASAGSGTPRATATSTTASPLRDGFGGQDGGE

SEQ ID NO: 26834 - protein, 139 aa, Homo sapiens
  Payload ID: 5290
  Gene Symbol: EGLN2
  Gene Name: egl-9 family hypoxia-inducible factor 2
  ENSP ID: ENSP00000471546
MDSPCQPQPLSQALPQLPGSSSEPLEPEPGRARMGVESYLPCPLLPSYHCPGVPSEASAGSGTPRATATSTTASPLRDGFGGQDGGELRPLQSEGAAALVTKGCQRLAAQGARPEAPKRKWAEDGGDAPSPSKRPWARQ

SEQ ID NO: 26835 - protein, 101 aa, Homo sapiens
  Payload ID: 5290
  Gene Symbol: EGLN2
  Gene Name: egl-9 family hypoxia-inducible factor 2
  ENSP ID: ENSP00000471568
MDSPCQPQPLSQALPQLPGSSSEPLEPEPGRARMGVESYLPCPLLPSYHCPGVPSEASAGSGTPRATATSTTASPLRDGFGGQDGGELRPLQSEGAAALVT

SEQ ID NO: 26836 - protein, 51 aa, Homo sapiens
  Payload ID: 5290
  Gene Symbol: EGLN2
  Gene Name: egl-9 family hypoxia-inducible factor 2
  ENSP ID: ENSP00000471740
PHEVKPAYATRYAITVWYFDAKERAAAKDKYQLASGQKGVQVPVSQPPTPT

SEQ ID NO: 26837 - protein, 96 aa, Homo sapiens
  Payload ID: 5290
  Gene Symbol: EGLN2
  Gene Name: egl-9 family hypoxia-inducible factor 2
  ENSP ID: ENSP00000471944
  MOD_RES (1)..(1): Any amino acid
XGGLLQIFPEGRPVVANIEPLFDRLLIFWSDRRNPHEVKPAYATRYAITVWYFDAKERAAAKDKYQLGTCFPPFSPSYSVGPLGPDATPSPSSASC

SEQ ID NO: 26838 - protein, 72 aa, Homo sapiens
  Payload ID: 5290
  Gene Symbol: EGLN2
  Gene Name: egl-9 family hypoxia-inducible factor 2
  ENSP ID: ENSP00000472146
MDSPCQPQPLSQALPQLPGSSSEPLEPEPGRARMGVESYLPCPLLPSYHCPGVPSEASAGSGTPRATATSTT

SEQ ID NO: 26839 - protein, 125 aa, Homo sapiens
  Payload ID: 5290
  Gene Symbol: EGLN2
  Gene Name: egl-9 family hypoxia-inducible factor 2
  ENSP ID: ENSP00000472414
MVACYPGNGLGYVRHVDNPHGDGRCITCIYYLNQNWDVKVHGGLLQIFPEGRPVVANIEPLFDRLLIFWSDRRNPHEVKPAYATRYAITVWYFDAKERAAAKDKYQLASGQKGVQVPVSQPPTPT

SEQ ID NO: 26840 - protein, 67 aa, Homo sapiens
  Payload ID: 5290
  Gene Symbol: EGLN2
  Gene Name: egl-9 family hypoxia-inducible factor 2
  ENSP ID: ENSP00000472870
MDSPCQPQPLSQALPQLPGSSSEPLEPEPGRARMGVESYLPCPLLPSYHCPGVPSEASAGSGTPRAT

SEQ ID NO: 26841 - protein, 128 aa, Homo sapiens
  Payload ID: 5290
  Gene Symbol: EGLN2
  Gene Name: egl-9 family hypoxia-inducible factor 2
  ENSP ID: ENSP00000472991
IAWVEGHEPGCRSIGALMAHVDAVIRHCAGRLGSYVINGRTKVHGGLLQIFPEGRPVVANIEPLFDRLLIFWSDRRNPHEVKPAYATRYAITVWYFDAKERAAAKDKYQLASGQKGVQVPVSQPPTPT

SEQ ID NO: 26842 - protein, 239 aa, Homo sapiens
  Payload ID: 5291
  Gene Symbol: EGLN3
  Gene Name: egl-9 family hypoxia-inducible factor 3
  Uniprot ID: Q9H6Z9
  ENSP ID: ENSP00000250457
MPLGHIMRLDLEKIALEYIVPCLHEVGFCYLDNFLGEVVGDCVLERVKQLHCTGALRDGQLAGPRAGVSKRHLRGDQITWIGGNEEGCEAISFLLSLIDRLVLYCGSRLGKYYVKERSKAMVACYPGNGTGYVRHVDNPNGDGRCITCIYYLNKNWDAKLHGGILRIFPEGKSFIADVEPIFDRLLFFWSDRRNPHEVQPSYATRYAMTVWYFDAEERAEAKKKFRNLTRKTESALTED

SEQ ID NO: 26843 - protein, 148 aa, Homo sapiens
  Payload ID: 5291
  Gene Symbol: EGLN3
  Gene Name: egl-9 family hypoxia-inducible factor 3
  ENSP ID: ENSP00000446572
MPLGHIMRLDLEKIALEYIVPCLHEVGFCYLDNFLGEVVGDCVLERVKQLHCTGALRDGQLAGPRAGVSKRHLRGDQITWIGGNEEGCEAISFLLSLIDRLVLYCGSRLGKYYVKERSKVGRARRPAAAAPAGTGGTRSPLYVDFPGP

SEQ ID NO: 26844 - protein, 145 aa, Homo sapiens
  Payload ID: 5291
  Gene Symbol: EGLN3
  Gene Name: egl-9 family hypoxia-inducible factor 3
  ENSP ID: ENSP00000447470
MPLGHIMRLDLEKIALEYIVPCLHEAMVACYPGNGTGYVRHVDNPNGDGRCITCIYYLNKNWDAKLHGGILRIFPEGKSFIADVEPIFDRLLFFWSDRRNPHEVQPSYATRYAMTVWYFDAEERAEAKKKFRNLTRKTESALTED

SEQ ID NO: 26845 - protein, 79 aa, Homo sapiens
  Payload ID: 5291
  Gene Symbol: EGLN3
  Gene Name: egl-9 family hypoxia-inducible factor 3
  ENSP ID: ENSP00000451316
MAMVACYPGNGTGYVRHVDNPNGDGRCITCIYYLNKNWDAKLHGGILRIFPEGKSFIADVEPIFDRLLFFWSDRRNPHE

SEQ ID NO: 26846 - protein, 1231 aa, Homo sapiens
  Payload ID: 5292
  Gene Symbol: EHBP1
  Gene Name: EH domain binding protein 1
  Uniprot ID: Q8NDI1
  ENSP ID: ENSP00000263991
MASVWKRLQRVGKHASKFQFVASYQELMVECTKKWQPDKLVVVWTRRSRRKSSKAHSWQPGIKNPYRGVVVWPVPENIEITVTLFKDPHAEEFEDKEWTFVIENESPSGRRKALATSSINMKQYASPMPTQTDVKLKFKPLSKKVVSAALQFSLSCIFLREGKATDEDMQSLASLMSMKQADIGNLDDFEEDNEDDDENRVNQEEKAAKITEIVNQLNALSSLDEDQDDCIKQANMRSAKSASSSEELINKLNFLDEAEKDLATVNSNPFDDPDAAELNPFGDPDSEEPITETASPRKTEDSFYNNSYNPFKEVQTPQYLNPFDEPEAFVTIKDSPPQSTKRKNIRPVDMSKYLYADSSKTEEEELDESNPFYEPKSTPPPNNLVNPVQELETERRVKRKAPAPPVLSPKTGVLNENTVSAGKDLSTSPKPSPIPSPVLGRKPNASQSLLVWCKEVTKNYRGVKITNFTTSWRNGLSFCAILHHFRPDLIDYKSLNPQDIKENNKKAYDGFASIGISRLLEPSDMVLLAIPDKLTVMTYLYQIRAHFSGQELNVVQIEENSSKSTYKVGNYETDTNSSVDQEKFYAELSDLKREPELQQPISGAVDFLSQDDSVFVNDSGVGESESEHQTPDDHLSPSTASPYCRRTKSDTEPQKSQQSSGRTSGSDDPGICSNTDSTQAQVLLGKKRLLKAETLELSDLYVSDKKKDMSPPFICEETDEQKLQTLDIGSNLEKEKLENSRSLECRSDPESPIKKTSLSPTSKLGYSYSRDLDLAKKKHASLRQTESDPDADRTTLNHADHSSKIVQHRLLSRQEELKERARVLLEQARRDAALKAGNKHNTNTATPFCNRQLSDQQDEERRRQLRERARQLIAEARSGVKMSELPSYGEMAAEKLKERSKASGDENDNIEIDTNEEIPEGFVVGGGDELTNLENDLDTPEQNSKLVDLKLKKLLEVQPQVANSPSSAAQKAVTESSEQDMKSGTEDLRTERLQKTTERFRNPVVFSKDSTVRKTQLQSFSQYIENRPEMKRQRSIQEDTKKGNEEKAAITETQRKPSEDEVLNKGFKDTSQYVVGELAALENEQKQIDTRAALVEKRLRYLMDTGRNTEEEEAMMQEWFMLVNKKNALIRRMNQLSLLEKEHDLERRYELLNRELRAMLAIEDWQKTEAQKRREQLLLDELVALVNKRDALVRDLDAQEKQAEEEDEHLERTLEQNKGKMAKKEEKCVLQ

SEQ ID NO: 26847 - protein, 1160 aa, Homo sapiens
  Payload ID: 5292
  Gene Symbol: EHBP1
  Gene Name: EH domain binding protein 1
  Uniprot ID: Q8NDI1
  ENSP ID: ENSP00000384143
MASVWKRLQRVGKHASKFQFVASYQELMVECTKKWQPDKLVVVWTRRSRRKSSKAHSWQPGIKNPYRGVVVWPVPENIEITVTLFKDPHAEEFEDKEWTFVIENESPSGRRKALATSSINMKQYASPMPTQTDVKLKFKPLSKKVVSAALQFSLSCIFLREGKATDEDMQSLASLMSMKQADIGNLDDFEEDNEDDDENRVNQEEKAAKITELINKLNFLDEAEKDLATVNSNPFDDPDAAELNPFGDPDSEEPITETASPRKTEDSFYNNSYNPFKEVQTPQYLNPFDEPEAFVTIKDSPPQSTKRKNIRPVDMSKYLYADSSKTEEEELDESNPFYEPKSTPPPNNLVNPVQELETERRVKRKAPAPPVLSPKTGVLNENTVSAGKDLSTSPKPSPIPSPVLGRKPNASQSLLVWCKEVTKNYRGVKITNFTTSWRNGLSFCAILHHFRPDLIDYKSLNPQDIKENNKKAYDGFASIGISRLLEPSDMVLLAIPDKLTVMTYLYQIRAHFSGQELNVVQIEENSSKSTYKVGNYETDTNSSVDQEKFYAELSDLKREPELQQPISGAVDFLSQDDSVFVNDSGVGESESEHQTPDDHLSPSTASPYCRRTKSDTEPQKSQQSSGRTSGSDDPGICSNTDSTQAQVLLGKKRLLKAETLELSDLYVSDKKKDMSPPFICEETDEQKLQTLDIGSNLEKEKLENSRSLECRSDPESPIKKTSLSPTSKLGYSYSRDLDLAKKKHASLRQTESDPDADRTTLNHADHSSKIVQHRLLSRQEELKERARVLLEQARRDAALKAGNKHNTNTATPFCNRQLSDQQDEERRRQLRERARQLIAEARSGVKMSELPSYGEMAAEKLKERSKASGEQNSKLVDLKLKKLLEVQPQVANSPSSAAQKAVTESSEQDMKSGTEDLRTERLQKTTERFRNPVVFSKDSTVRKTQLQSFSQYIENRPEMKRQRSIQEDTKKGNEEKAAITETQRKPSEDEVLNKGFKDTSQYVVGELAALENEQKQIDTRAALVEKRLRYLMDTGRNTEEEEAMMQEWFMLVNKKNALIRRMNQLSLLEKEHDLERRYELLNRELRAMLAIEDWQKTEAQKRREQLLLDELVALVNKRDALVRDLDAQEKQAEEEDEHLERTLEQNKGKMAKKEEKCVLQ

SEQ ID NO: 26848 - protein, 310 aa, Homo sapiens
  Payload ID: 5292
  Gene Symbol: EHBP1
  Gene Name: EH domain binding protein 1
  ENSP ID: ENSP00000384829
MASVWKRLQRVGKHASKFQFVASYQELMVECTKKWQPDKLVVVWTRRSRRKSSKAHSWQPGIKNPYRGVVVWPVPENIEITVTLFKDPHAEEFEDKEWTFVIENESPSGRRKALATSSINMKQYASPMPTQTDVKLKFKPLSKKVVSAALQFSLSCIFLREGKATDEDMQSLASLMSMKQADIGNLDDFEEDNEDDDENRVNQEEKAAKITELINKLNFLDEAEKDLATVNSNPFDDPDAAELNPFGDPDSEEPITETASPRKTEDSFYNNSYNPFKEVQTPQYLNPFDEPEAFVTIKDSPPQSTKRKNI

SEQ ID NO: 26849 - protein, 1196 aa, Homo sapiens
  Payload ID: 5292
  Gene Symbol: EHBP1
  Gene Name: EH domain binding protein 1
  Uniprot ID: Q8NDI1
  ENSP ID: ENSP00000385524
MASVWKRLQRVGKHASKFQFVASYQELMVECTKKWQPDKLVVVWTRRSRRKSSKAHSWQPGIKNPYRGVVVWPVPENIEITVTLFKDPHAEEFEDKEWTFVIENESPSGRRKALATSSINMKQYASPMPTQTDVKLKFKPLSKKVVSAALQFSLSCIFLREGKATDEDMQSLASLMSMKQADIGNLDDFEEDNEDDDENRVNQEEKAAKITELINKLNFLDEAEKDLATVNSNPFDDPDAAELNPFGDPDSEEPITETASPRKTEDSFYNNSYNPFKEVQTPQYLNPFDEPEAFVTIKDSPPQSTKRKNIRPVDMSKYLYADSSKTEEEELDESNPFYEPKSTPPPNNLVNPVQELETERRVKRKAPAPPVLSPKTGVLNENTVSAGKDLSTSPKPSPIPSPVLGRKPNASQSLLVWCKEVTKNYRGVKITNFTTSWRNGLSFCAILHHFRPDLIDYKSLNPQDIKENNKKAYDGFASIGISRLLEPSDMVLLAIPDKLTVMTYLYQIRAHFSGQELNVVQIEENSSKSTYKVGNYETDTNSSVDQEKFYAELSDLKREPELQQPISGAVDFLSQDDSVFVNDSGVGESESEHQTPDDHLSPSTASPYCRRTKSDTEPQKSQQSSGRTSGSDDPGICSNTDSTQAQVLLGKKRLLKAETLELSDLYVSDKKKDMSPPFICEETDEQKLQTLDIGSNLEKEKLENSRSLECRSDPESPIKKTSLSPTSKLGYSYSRDLDLAKKKHASLRQTESDPDADRTTLNHADHSSKIVQHRLLSRQEELKERARVLLEQARRDAALKAGNKHNTNTATPFCNRQLSDQQDEERRRQLRERARQLIAEARSGVKMSELPSYGEMAAEKLKERSKASGDENDNIEIDTNEEIPEGFVVGGGDELTNLENDLDTPEQNSKLVDLKLKKLLEVQPQVANSPSSAAQKAVTESSEQDMKSGTEDLRTERLQKTTERFRNPVVFSKDSTVRKTQLQSFSQYIENRPEMKRQRSIQEDTKKGNEEKAAITETQRKPSEDEVLNKGFKDTSQYVVGELAALENEQKQIDTRAALVEKRLRYLMDTGRNTEEEEAMMQEWFMLVNKKNALIRRMNQLSLLEKEHDLERRYELLNRELRAMLAIEDWQKTEAQKRREQLLLDELVALVNKRDALVRDLDAQEKQAEEEDEHLERTLEQNKGKMAKKEEKCVLQ

SEQ ID NO: 26850 - protein, 223 aa, Homo sapiens
  Payload ID: 5292
  Gene Symbol: EHBP1
  Gene Name: EH domain binding protein 1
  ENSP ID: ENSP00000388442
  MOD_RES (1)..(1): Any amino acid
XNTNTATPFCNRQLSDQDEERRRQLRERARQLIAEARSGVKMSELPSYGEMAAEKLKERSKASGDENDNIEIDTNEEIPEGFVVGGGDELTNLENDLDTPEQNSKLVDLKLKKLLEVQPQVANSPSSAAQKAVTESSEQDMKSGTEDLRTERLQKTTERFRNPVVFSKDSTVRKTQLQSFSQYIENRPEMKRQRSIQEDTKKGNEEKAAITETQRKPSEDEVL

SEQ ID NO: 26851 - protein, 108 aa, Homo sapiens
  Payload ID: 5292
  Gene Symbol: EHBP1
  Gene Name: EH domain binding protein 1
  ENSP ID: ENSP00000392192
MNWQPDKLVVVWTRRSRRKSSKAHSWQPGIKNPYRGVVVWPVPENIEITVTLFKDPHAEEFEDKEWTFVIENESPSGRRKALATSSINMKQYASPMPTQTDVKLKFKP

SEQ ID NO: 26852 - protein, 41 aa, Homo sapiens
  Payload ID: 5292
  Gene Symbol: EHBP1
  Gene Name: EH domain binding protein 1
  ENSP ID: ENSP00000392441
MKQYASPMPTQTDVKLKFKPLSKKVVSAALQFSLSCIFLRE

SEQ ID NO: 26853 - protein, 110 aa, Homo sapiens
  Payload ID: 5292
  Gene Symbol: EHBP1
  Gene Name: EH domain binding protein 1
  ENSP ID: ENSP00000396186
  MOD_RES (1)..(1): Any amino acid
XLEKEKLENSRSLECRSDPESPIKKTSLSPTSKLGYSYSRDLDLAKKKHASLRQTESDPDADRTTLNHADHSSKIVQQQDEERRRQLRERARQLIAEARSGVKMSELPSY

SEQ ID NO: 26854 - protein, 95 aa, Homo sapiens
  Payload ID: 5292
  Gene Symbol: EHBP1
  Gene Name: EH domain binding protein 1
  ENSP ID: ENSP00000399609
MKQYASPMPTQTDVKLKFKPLSKKVVSAALQFSLSCIFLREGKATDEDMQSLASLMSMKQADIGNLDDFEEDNEDDDENRVNQEEKAAKITEIVN

SEQ ID NO: 26855 - protein, 154 aa, Homo sapiens
  Payload ID: 5292
  Gene Symbol: EHBP1
  Gene Name: EH domain binding protein 1
  ENSP ID: ENSP00000399927
  MOD_RES (1)..(1): Any amino acid
XRLLEPSDMTESDPDADRTTLNHADHSSKIVQHRLLSRQEELKERARVLLEQARRDAALKAGNKHNTNTATPFCNRQLSDQQDEERRRQLRERARQLIAEARSGVKMSELPSYGEMAAEKLKERSKASGDENDNIEIDTNEEIPEGFVVGGGDE

SEQ ID NO: 26856 - protein, 1160 aa, Homo sapiens; identical to SEQ ID NO: 26847
  Payload ID: 5292
  Gene Symbol: EHBP1
  Gene Name: EH domain binding protein 1
  Uniprot ID: Q8NDI1
  ENSP ID: ENSP00000403783

SEQ ID NO: 26857 - protein, 77 aa, Homo sapiens
  Payload ID: 5292
  Gene Symbol: EHBP1
  Gene Name: EH domain binding protein 1
  ENSP ID: ENSP00000404617
MASVWKRLQRVGKHASKFQFVASYQELMVECTKKWQPDKLVVVWTRRSRRKSSKAHSWQPGIKNPYRGVVVWPVPEN

SEQ ID NO: 26858 - protein, 1523 aa, Homo sapiens
  Payload ID: 5293
  Gene Symbol: EHBP1L1
  Gene Name: EH domain binding protein 1-like 1
  Uniprot ID: Q8N3D4
  ENSP ID: ENSP00000312671
MTSVWKRLQRVGKRAAKFQFVACYHELVLECTKKWQPDKLVVVWTRRNRRICSKAHSWQPGIQNPYRGTVVWMVPENVDISVTLYRDPHVDQYEAKEWTFIIENESKGQRKVLATAEVDLARHAGPVPVQVPVRLRLKPKSVKVVQAELSLTLSGVLLREGRATDDDMQSLASLMSVKPSDVGNLDDFAESDEDEAHGPGAPEARARVPQPDPSRELKTLCEEEEEGQGRPQQAVASPSNAEDTSPAPVSAPAPPARTSRGQGSERANEAGGQVGPEAPRPPETSPEMRSSRQPAQDTAPTPAPRLRKGSDALRPPVPQGEDEVPKASGAPPAGLGSARETQAQACPQEGTEAHGARLGPSIEDKGSGDPFGRQRLKAEEMDTEDRPEASGVDTEPRSGGREANTKRSGVRAGEAEESSAVCQVDAEQRSKVRHVDTKGPEATGVMPEARCRGTPEAPPRGSQGRLGVRTRDEAPSGLSLPPAEPAGHSGQLGDLEGARAAAGQEREGAEVRGGAPGIEGTGLEQGPSVGAISTRPQVSSWQGALLSTAQGAISRGLGGWEAEAGGSGDLETETEVVGLEVLGTQEKEVEGSGFPETRTLEIEILGALEKEAARSRVLESEVAGTAQCEGLETQETEVGVIETPGTETEVLGTQKTEAGGSGVLQTRTTIAETEVLVTQEISGDLGPLKIEDTIQSEMLGTQETEVEASRVPESEAEGTEAKILGTQEITARDSGVREIEAEIAESDILVAQEIEVGLLGVLGIETGAAEGAILGTQEIASRDSGVPGLEADTTGIQVKEVGGSEVPEIATGTAETEILGTQEIASRSSGVPGLESEVAGAQETEVGGSGISGPEAGMAEARVLMTRKTEIIVPEAEKEEAQTSGVQEAETRVGSALKYEALRAPVTQPRVLGSQEAKAEISGVQGSETQVLRVQEAEAGVWGMSEGKSGAWGAQEAEMKVLESPENKSGTFKAQEAEAGVLGNEKGKEAEGSLTEASLPEAQVASGAGAGAPRASSPEKAEEDRRLPGSQAPPALVSSSQSLLEWCQEVTTGYRGVRITNFTTSWRNGLAFCAILHRFYPDKIDYASLDPLNIKQNNKQAFDGFAALGVSRLLEPADMVLLSVPDKLIVMTYLCQIRAFCTGQELQLVQLEGGGGAGTYRVGSAQPSPPDDLDAGGLAQRLRGHGAEGPQEPKEAADRADGAAPGVASRNAVAGRASKDGGAEAPRESRPAEVPAEGLVNGAGAPGGGGVRLRRPSVNGEPGSVPPPRAHGSFSHVRDADLLKKRRSRLRNSSSFSMDDPDAGAMGAAAAEGQAPDPSPAPGPPTAADSQQPPGGSSPSEEPPPSPGEEAGLQRFQDTSQYVCAELQALEQEQRQIDGRAAEVEMQLRSLMESGANKLQEEVLIQEWFTLVNKKNALIRRQDQLQLLMEEQDLERRFELLSRELRAMLAIEDWQKTSAQQHREQLLLEELVSLVNQRDELVRDLDHKERIALEEDERLERGLEQRRRKLSRQLSRRERCVLS

SEQ ID NO: 26859 - protein, 670 aa, Homo sapiens
  Payload ID: 5293
  Gene Symbol: EHBP1L1
  Gene Name: EH domain binding protein 1-like 1
  ENSP ID: ENSP00000431996
MTSVWKRLQRVGKRAAKFQFVACYHELVLECTKKWQPDKLVVVWTRRNRRICSKAHSWQPGIQNPYRGTVVWMVPENVDISVTLYRDPHVDQYEAKEWTFIIENESKGQRKVLATAEVDLARHAGPVPVQVPVRLRLKPKSVKVVQAELSLTLSGVLLREGRATDDDMQSLASLMSVKPSDVGNLDDFAESDEDEAHGPGAPEARARVPQPDPSRELKTLCEEEEEGQGRPQQAVASPSNAEDTSPAPVSAPAPPARTSRGQGSERANEAGGQVGPEAPRPPETSPEMRSSRQPAQDTAPTPAPRLRKGSDALRPPVPQGEDEVPKASGAPPAGLGSARETQAQACPQEGTEAHGARLGPSIEDKGSGDPFGRQRLKAEEMDTEDRPEASGVDTEPRSGGREANTKRSGVRAGEAEESSAVCQVDAEQRSKVRHVDTKGPEATGVMPEAPPALVSSSQSLLEWCQEVTTGYRGVRITNFTTSWRNGLAFCAILHRFYPDKIDYASLDPLNIKQNNKQAFDGFAALGVSRLLEPADMVLLSVPDKLIVMTYLCQIRAFCTGQELQLVQLEGGGGAGTYRVGSAQPSPPDDLDAGGLAQRLRGHGAEGPQEPKEAADRADGAAPGVASRNAVAGRASKDGGAEAPRESRPAEVPAEGLVNGAGAPGGGGVRL

SEQ ID NO: 26860 - protein, 265 aa, Homo sapiens
  Payload ID: 5293
  Gene Symbol: EHBP1L1
  Gene Name: EH domain binding protein 1-like 1
  ENSP ID: ENSP00000434693
  MOD_RES (1)..(1): Any amino acid
XVRAGEAEESSAVCQVDAEQRSKAQEAEAGVLGNEKGKEAEGSLTEASLPEAQVASGAGAGAPRASSPEKAEEDRRLPGSQAPPALVSSSQSLLEWCQEVTTGYRGVRITNFTTSWRNGLAFCAILHRFYPDKIDYASLDPLNIKQNNKQAFDGFAALGVSRLLEPADMVLLSVPDKLIVMTYLCQIRAFCTGQELQLVQLEGGGGAGTYRVGSAQPSPPDDLDAGGLAQRLRGHGAEGPQEPKEAADRADGAAPGVASRNAVAG

SEQ ID NO: 26861 - protein, 467 aa, Homo sapiens
  Payload ID: 5293
  Gene Symbol: EHBP1L1
  Gene Name: EH domain binding protein 1-like 1
  ENSP ID: ENSP00000489002
MTSVWKRLQRVGKRAAKFQFVACYHELVLECTKKWQPDKLVVVWTRRNRRICSKAHSWQPGIQNPYRGTVVWMVPENVDISVTLYRDPHVDQYEAKEWTFIIENESKGQRKVLATAEVDLARHAGPVPVQVPVRLRLKPKSVKVVQAELSLTLSGVLLREGRATDDDMQSLASLMSVKPSDVGNLDDFAESDEDEAHGPGAPEARARVPQPGRGGALRPGRFPDPSRELKTLCEEEEEGQGRPQQAVASPSNAEDTSPAPAPPALVSSSQSLLEWCQEVTTGYRGVRITNFTTSWRNGLAFCAILHRFYPDKIDYASLDPLNIKQNNKQAFDGFAALGVSRLLEPADMVLLSVPDKLIVMTYLCQIRAFCTGQELQLVQLEGGGGAGTYRVGSAQPSPPDDLDAGGLAQRLRGHGAEGPQEPKEAADRADGAAPGVASRNAVAGRASKDGGAEAPRESRPAEVPAEG

SEQ ID NO: 26862 - protein, 534 aa, Homo sapiens
  Payload ID: 5294
  Gene Symbol: EHD1
  Gene Name: EH-domain containing 1
  Uniprot ID: Q9H4M9
  ENSP ID: ENSP00000320516
MFSWVSKDARRKKEPELFQTVAEGLRQLYAQKLLPLEEHYRFHEFHSPALEDADFDNKPMVLLVGQYSTGKTTFIRHLIEQDFPGMRIGPEPTTDSFIAVMHGPTEGVVPGNALVVDPRRPFRKLNAFGNAFLNRFMCAQLPNPVLDSISIIDTPGILSGEKQRISRGYDFAAVLEWFAERVDRIILLFDAHKLDISDEFSEVIKALKNHEDKIRVVLNKADQIETQQLMRVYGALMWSLGKIINTPEVVRVYIGSFWSHPLLIPDNRKLFEAEEQDLFKDIQSLPRNAALRKLNDLIKRARLAKVHAYIISSLKKEMPNVFGKESKKKELVNNLGEIYQKIEREHQISPGDFPSLRKMQELLQTQDFSKFQALKPKLLDTVDDMLANDIARLMVMVRQEESLMPSQVVKGGAFDGTMNGPFGHGYGEGAGEGIDDVEWVVGKDKPTYDEIFYTLSPVNGKITGANAKKEMVKSKLPNTVLGKIWKLADVDKDGLLDDEEFALANHLIKVKLEGHELPADLPPHLVPPSKRRHE

SEQ ID NO: 26863 - protein, 534 aa, Homo sapiens; identical to SEQ ID NO: 26862
  Payload ID: 5294
  Gene Symbol: EHD1
  Gene Name: EH-domain containing 1
  Uniprot ID: Q9H4M9
  ENSP ID: ENSP00000352354

SEQ ID NO: 26864 - protein, 306 aa, Homo sapiens
  Payload ID: 5294
  Gene Symbol: EHD1
  Gene Name: EH-domain containing 1
  ENSP ID: ENSP00000391429
MCAQLPNPVLDSISIIDTPGILSGEKQRISRGYDFAAVLEWFAERVDRIILLFDAHKLDISDEFSEVIKALKNHEDKIRVVLNKADQIETQQLMRVYGALMWSLGKIINTPEVVRVYIGSFWSHPLLIPDNRKLFEAEEQDLFKDIQSLPRNAALRKLNDLIKRARLAKVHAYIISSLKKEMPNVFGKESKKKELVNNLGEIYQKIEREHQISPGDFPSLRKMQELLQTQDFSKFQALKPKLLDTVDDMLANDIARLMVMVRQEESLMPSQVVKGGAFDGTMNGPFGHGYGEGAGEGIDDVEWVVG

SEQ ID NO: 26865 - protein, 162 aa, Homo sapiens
  Payload ID: 5294
  Gene Symbol: EHD1
  Gene Name: EH-domain containing 1
  ENSP ID: ENSP00000396273
MCAQLPNPVLDSISIIDTPGILSGEKQRISRGYDFAAVLEWFAERVDRIILLFDAHKLDISDEFSEVIKALKNHEDKIRVVLNKADQIETQQLMRVYGALMWSLGKIINTPEVVRVYIGSFWSHPLLIPDNRKLFEAEEQDLFKDIQSLPRNAALRKLNDLI

SEQ ID NO: 26866 - protein, 148 aa, Homo sapiens
  Payload ID: 5294
  Gene Symbol: EHD1
  Gene Name: EH-domain containing 1
  ENSP ID: ENSP00000399022
MFSWVSKDARRKKEPELFQTVAEGLRQLYAQKLLPLEEHYRFHEFHSPALEDADFDNKPMVLLVGQYSTGKTTFIRHLIEQDFPGMRIGPEPTTDSFIAVMHGPTEGVVPGNALVVDPRRPFRKLNAFGNAFLNRFMCAQLPNPVLDS

SEQ ID NO: 26867 - protein, 145 aa, Homo sapiens
  Payload ID: 5294
  Gene Symbol: EHD1
  Gene Name: EH-domain containing 1
  ENSP ID: ENSP00000403830
MFSWVSKDARRKKEPELFQTVAEGLRQLYAQKLLPLEEHYRFHEFHSPALEDADFDNKPMVLLVGQYSTGKTTFIRHLIEQDFPGMRIGPEPTTDSFIAVMHGPTEGVVPGNALVVDPRRPFRKLNAFGNAFLNRFMCAQLPNPV

SEQ ID NO: 26868 - protein, 374 aa, Homo sapiens
  Payload ID: 5294
  Gene Symbol: EHD1
  Gene Name: EH-domain containing 1
  ENSP ID: ENSP00000404944
MEQPGTAASPVSGSMFSWVSKDARRKKEPELFQTVAEGLRQLYAQKLLPLEEHYRFHEFHSPALEDADFDNKPMVLLVGQYSTGKTTFIRHLIEQDFPGMRIGPEPTTDSFIAVMHGPTEGVVPGNALVVDPRRPFRKLNAFGNAFLNRFMCAQLPNPVLDSISIIDTPGILSGEKQRISRGYDFAAVLEWFAERVDRIILLFDAHKLDISDEFSEVIKALKNHEDKIRVVLNKADQIETQQLMRVYGALMWSLGKIINTPEVVRVYIGSFWSHPLLIPDNRKLFEAEEQDLFKDIQSLPRNAALRKLNDLIKRARLAKVHAYIISSLKKEMPNVFGKESKKKELVNNLGEIYQKIEREHQISPGDFPSLRKMQ

SEQ ID NO: 26869 - protein, 548 aa, Homo sapiens
  Payload ID: 5294
  Gene Symbol: EHD1
  Gene Name: EH-domain containing 1
  ENSP ID: ENSP00000479153
MEQPGTAASPVSGSMFSWVSKDARRKKEPELFQTVAEGLRQLYAQKLLPLEEHYRFHEFHSPALEDADFDNKPMVLLVGQYSTGKTTFIRHLIEQDFPGMRIGPEPTTDSFIAVMHGPTEGVVPGNALVVDPRRPFRKLNAFGNAFLNRFMCAQLPNPVLDSISIIDTPGILSGEKQRISRGYDFAAVLEWFAERVDRIILLFDAHKLDISDEFSEVIKALKNHEDKIRVVLNKADQIETQQLMRVYGALMWSLGKIINTPEVVRVYIGSFWSHPLLIPDNRKLFEAEEQDLFKDIQSLPRNAALRKLNDLIKRARLAKVHAYIISSLKKEMPNVFGKESKKKELVNNLGEIYQKIEREHQISPGDFPSLRKMQELLQTQDFSKFQALKPKLLDTVDDMLANDIARLMVMVRQEESLMPSQVVKGGAFDGTMNGPFGHGYGEGAGEGIDDVEWVVGKDKPTYDEIFYTLSPVNGKITGANAKKEMVKSKLPNTVLGKIWKLADVDKDGLLDDEEFALANHLIKVKLEGHELPADLPPHLVPPSKRRHE

SEQ ID NO: 26870 - protein, 543 aa, Homo sapiens
  Payload ID: 5295
  Gene Symbol: EHD2
  Gene Name: EH-domain containing 2
  Uniprot ID: Q9NZN4
  ENSP ID: ENSP00000263277
MFSWLKRGGARGQQPEAIRTVTSALKELYRTKLLPLEEHYRFGAFHSPALEDADFDGKPMVLVAGQYSTGKTSFIQYLLEQEVPGSRVGPEPTTDCFVAVMHGDTEGTVPGNALVVDPDKPFRKLNPFGNTFLNRFMCAQLPNQVLESISIIDTPGILSGAKQRVSRGYDFPAVLRWFAERVDLIILLFDAHKLEISDEFSEAIGALRGHEDKIRVVLNKADMVETQQLMRVYGALMWALGKVVGTPEVLRVYIGSFWSQPLLVPDNRRLFELEEQDLFRDIQGLPRHAALRKLNDLVKRARLVRVHAYIISYLKKEMPSVFGKENKKKQLILKLPVIFAKIQLEHHISPGDFPDCQKMQELLMAHDFTKFHSLKPKLLEALDEMLTHDIAKLMPLLRQEELESTEVGVQGGAFEGTHMGPFVERGPDEAMEDGEEGSDDEAEWVVTKDKSKYDEIFYNLAPADGKLSGSKAKTWMVGTKLPNSVLGRIWKLSDVDRDGMLDDEEFALASHLIEAKLEGHGLPANLPRRLVPPSKRRHKGSAE

SEQ ID NO: 26871 - protein, 407 aa, Homo sapiens
  Payload ID: 5295
  Gene Symbol: EHD2
  Gene Name: EH-domain containing 2
  Uniprot ID: Q9NZN4
  ENSP ID: ENSP00000439036
MCAQLPNQVLESISIIDTPGILSGAKQRVSRGYDFPAVLRWFAERVDLIILLFDAHKLEISDEFSEAIGALRGHEDKIRVVLNKADMVETQQLMRVYGALMWALGKVVGTPEVLRVYIGSFWSQPLLVPDNRRLFELEEQDLFRDIQGLPRHAALRKLNDLVKRARLVRVHAYIISYLKKEMPSVFGKENKKKQLILKLPVIFAKIQLEHHISPGDFPDCQKMQELLMAHDFTKFHSLKPKLLEALDEMLTHDIAKLMPLLRQEELESTEVGVQGGAFEGTHMGPFVERGPDEAMEDGEEGSDDEAEWVVTKDKSKYDEIFYNLAPADGKLSGSKAKTWMVGTKLPNSVLGRIWKLSDVDRDGMLDDEEFALASHLIEAKLEGHGLPANLPRRLVPPSKRRHKGSAE

SEQ ID NO: 26872 - protein, 30 aa, Homo sapiens
  Payload ID: 5295
  Gene Symbol: EHD2
  Gene Name: EH-domain containing 2
  ENSP ID: ENSP00000471766
KRARLVRVSSPEGWARILGGGFLGPLLPVL

SEQ ID NO: 26873 - protein, 535 aa, Homo sapiens
  Payload ID: 5296
  Gene Symbol: EHD3
  Gene Name: EH-domain containing 3
  Uniprot ID: Q9NZN3
  ENSP ID: ENSP00000327116
MFSWLGTDDRRRKDPEVFQTVSEGLKKLYKSKLLPLEEHYRFHEFHSPALEDADFDNKPMVLLVGQYSTGKTTFIRYLLEQDFPGMRIGPEPTTDSFIAVMQGDMEGIIPGNALVVDPKKPFRKLNAFGNAFLNRFVCAQLPNPVLESISVIDTPGILSGEKQRISRGYDFAAVLEWFAERVDRIILLFDAHKLDISDEFSEVIKALKNHEDKMRVVLNKADQIETQQLMRVYGALMWSLGKIVNTPEVIRVYIGSFWSHPLLIPDNRKLFEAEEQDLFRDIQSLPRNAALRKLNDLIKRARLAKVHAYIISSLKKEMPSVFGKDNKKKELVNNLAEIYGRIEREHQISPGDFPNLKRMQDQLQAQDFSKFQPLKSKLLEVVDDMLAHDIAQLMVLVRQEESQRPIQMVKGGAFEGTLHGPFGHGYGEGAGEGIDDAEWVVARDKPMYDEIFYTLSPVDGKITGANAKKEMVRSKLPNSVLGKIWKLADIDKDGMLDDDEFALANHLIKVKLEGHELPNELPAHLLPPSKRKVAE

SEQ ID NO: 26874 - protein, 546 aa, Homo sapiens
  Payload ID: 5296
  Gene Symbol: EHD3
  Gene Name: EH-domain containing 3
  ENSP ID: ENSP00000440685
MFSWLGTDDRRRKDPEVFQTVSEGLKKLYKSKLLPLEEHYRFHEFHSPALEDADFDNKPMVLLVGQYSTGKTTFIRYLLEQDFPGMRIGPEPTTDSFIAVMQGDMEGIIPGNALVVDPKKPFRKLNAFGNAFLNRFVCAQLPNPVLESISVIDTPGILSGEKQRISRGYDFAAVLEWFAERVDRIILLFDAHKLDISDEFSEVIKALKNHEDKMRVVLNKADQIETQQLMRVYGALMWSLGKIVNTPEVIRVYIGSFWSHPLLIPDNRKLFEAEEQDLFRDIQSLPRNAALRKLNDLIKRARLAKVHAYIISSLKKEMPSVFGKDNKKKELVNNLAEIYGRIEREHQISPGDFPNLKRMQDQLQAQDFSKFQPLKSKLLEVVDDMLAHDIAQLMVLVRQEESQRPIQMVKGGAFEGTLHGPFGHGYGEGAGEGIDDAEWVVARDKPMYDEIFYTLSPVDGKITGANAKKEMVRSKLPNSVLGKIWKLADIDKDGMLDDDEFALANHLIKVKLEGHELPNELPAHLLPRPRGKLPSDGVGGHSDGQC

SEQ ID NO: 26875 - protein, 541 aa, Homo sapiens
  Payload ID: 5297
  Gene Symbol: EHD4
  Gene Name: EH-domain containing 4
  Uniprot ID: Q9H223
  ENSP ID: ENSP00000220325
MFSWMGRQAGGRERAGGADAVQTVTGGLRSLYLRKVLPLEEAYRFHEFHSPALEDADFENKPMILLVGQYSTGKTTFIRYLLEQDFPGMRIGPEPTTDSFIAVMYGETEGSTPGNALVVDPKKPFRKLSRFGNAFLNRFMCSQLPNQVLKSISVIDSPGILSGEKQRISRGYDFCQVLQWFAERVDRIILLFDAHKLDISDEFSEAIKAFRGQDDKIRVVLNKADQVDTQQLMRVYGALMWSLGKVINTPEVLRVYIGSFWAQPLQNTDNRRLFEAEAQDLFRDIQSLPQKAAVRKLNDLIKRARLAKVHAYIISYLKKEMPSVFGKENKKRELISRLPEIYIQLQREYQISAGDFPEVKAMQEQLENYDFTKFHSLKPKLIEAVDNMLSNKISPLMNLISQEETSTPTQLVQGGAFDGTTEGPFNQGYGEGAKEGADEEEWVVAKDKPVYDELFYTLSPINGKISGVNAKKEMVTSKLPNSVLGKIWKLADCDCDGMLDEEEFALAKHLIKIKLDGYELPSSLPPHLVPPSHRKSLPKAD

SEQ ID NO: 26876 - protein, 540 aa, Homo sapiens
  Payload ID: 5297
  Gene Symbol: EHD4
  Gene Name: EH-domain containing 4
  ENSP ID: ENSP00000478504
MFSWMGRQAGGRERAGGADAVQTVTGGLRSLYLRKVLPLEEAYRFHEFHSPALEDADFENKPMILLVGQYSTGKTTFIRYLLEQDFPGMRIGPEPTTDSFIAVMYGETEGSTPGNALVVDPKKPFRKLSRFGNAFLNRFMCSQLPNQVLKSISVIDSPGILSGEKQRISRGYDFCQVLQWFAERVDRIILLFDAHKLDISDEFSEAIKAFRGQDDKIRVVLNKADQVDTQQLMRVYGALMWSLGKVINTPEVLRVYIGSFWAQPLQNTDNRRLFEAEAQDLFRDIQSLPQKAAVRKLNDLIKRARLAKVHAYIISYLKKEMPSVFGKENKKRELISRLPEIYIQLQREYQISAGDFPEVKAMQEQLENYDFTKFHSLKPKLIEAVDNMLSNKISPLMNLISQEETSTPTQLVQGGAFDGTPRAPSTRATGRVPRGADEEEWVVAKDKPVYDELFYTLSPINGKISGVNAKKEMVTSKLPNSVLGKIWKLADCDCDGMLDEEEFALAKHLIKIKLDGYELPSSLPPHLVPPSHRKSLPKAD

SEQ ID NO: 26877 - protein, 363 aa, Homo sapiens
  Payload ID: 5298
  Gene Symbol: ELAC1
  Gene Name: elaC ribonuclease Z 1
  Uniprot ID: Q9H777
  ENSP ID: ENSP00000269466
MSMDVTFLGTGAAYPSPTRGASAVVLRCEGECWLFDCGEGTQTQLMKSQLKAGRITKIFITHLHGDHFFGLPGLLCTISLQSGSMVSKQPIEIYGPVGLRDFIWRTMELSHTELVFHYVVHELVPTADQCPAEELKEFAHVNRADSPPKEEQGRTILLDSEENSYLLFDDEQFVVKAFRLFHRIPSFGFSVVEKKRPGKLNAQKLKDLGVPPGPAYGKLKNGISVVLENGVTISPQDVLKKPIVGRKICILGDCSGVVGDGGVKLCFEADLLIHEATLDDAQMDKAKEHGHSTPQMAATFAKLCRAKRLVLTHFSQRYKPVALAREGETDGIAELKKQAESVLDLQEVTLAEDFMVISIPIKK

SEQ ID NO: 26878 - protein, 223 aa, Homo sapiens
  Payload ID: 5298
  Gene Symbol: ELAC1
  Gene Name: elaC ribonuclease Z 1
  ENSP ID: ENSP00000464770
MSMDVTFLGTGAAYPSPTRGASAVVLRCEGECWLFDCGEGTQTQLMKSQLKAGRITKIFITHLHGDHFFGLPGLLCTISLQSGSMVSKQPIEIYGPVGLRDFIWRTMELSHTELVFHYVVHELVPTADQCPAEELKEFAHVNRADSPPKEEQGRTILLDSEENSYLLFDDEQFVVKAFRLFHRIPSFGFSVVEKKRPGKLNAQKLKDLGKCFFVFCFFPPSHQ

SEQ ID NO: 26879 - protein, 88 aa, Homo sapiens
  Payload ID: 5298
  Gene Symbol: ELAC1
  Gene Name: elaC ribonuclease Z 1
  ENSP ID: ENSP00000467389
MSMDVTFLGTGAAYPSPTRGASAVVLRCEGECWLFDCGEGTQTQLMKSQLKAEFPHLGFQSWKRNAQVNSMHRNLKTLVFHQVLPMGS

SEQ ID NO: 26880 - protein, 826 aa, Homo sapiens
  Payload ID: 5299
  Gene Symbol: ELAC2
  Gene Name: elaC ribonuclease Z 2
  Uniprot ID: Q9BQ52
  ENSP ID: ENSP00000337445
MWALCSLLRSAAGRTMSQGRTISQAPARRERPRKDPLRHLRTREKRGPSGCSGGPNTVYLQVVAAGSRDSGAALYVFSEFNRYLFNCGEGVQRLMQEHKLKVARLDNIFLTRMHWSNVGGLSGMILTLKETGLPKCVLSGPPQLEKYLEAIKIFSGPLKGIELAVRPHSAPEYEDETMTVYQIPIHSEQRRGKHQPWQSPERPLSRLSPERSSDSESNENEPHLPHGVSQRRGVRDSSLVVAFICKLHLKRGNFLVLKAKEMGLPVGTAAIAPIIAAVKDGKSITHEGREILAEELCTPPDPGAAFVVVECPDESFIQPICENATFQRYQGKADAPVALVVHMAPASVLVDSRYQQWMERFGPDTQHLVLNENCASVHNLRSHKIQTQLNLIHPDIFPLLTSFRCKKEGPTLSVPMVQGECLLKYQLRPRREWQRDAIITCNPEEFIVEALQLPNFQQSVQEYRRSAQDGPAPAEKRSQYPEIIFLGTGSAIPMKIRNVSATLVNISPDTSLLLDCGEGTFGQLCRHYGDQVDRVLGTLAAVFVSHLHADHHTGLPSILLQRERALASLGKPLHPLLVVAPNQLKAWLQQYHNQCQEVLHHISMIPAKCLQEGAEISSPAVERLISSLLRTCDLEEFQTCLVRHCKHAFGCALVHTSGWKVVYSGDTMPCEALVRMGKDATLLIHEATLEDGLEEEAVEKTHSTTSQAISVGMRMNAEFIMLNHFSQRYAKVPLFSPNFSEKVGVAFDHMKVCFGDFPTMPKLIPPLKALFAGDIEEMEERREKRELRQVRAALLSRELAGGLEDGEPQQKRAHTEEPQAKKVRAQ

SEQ ID NO: 26881 - protein, 807 aa, Homo sapiens
  Payload ID: 5299
  Gene Symbol: ELAC2
  Gene Name: elaC ribonuclease Z 2
  ENSP ID: ENSP00000379291
MWALCSLLRSAAGRTMSQGRTISQAPARRERPRKDPLRHLRTREKRGPSGCSGGPNTVYLQVVAAGSRDSGVQRLMQEHKLKVARLDNIFLTRMHWSNVGGLSGMILTLKETGLPKCVLSGPPQLEKYLEAIKIFSGPLKGIELAVRPHSAPEYEDETMTVYQIPIHSEQRRGKHQPWQSPERPLSRLSPERSSDSESNENEPHLPHGVSQRRGVRDSSLVVAFICKLHLKRGNFLVLKAKEMGLPVGTAAIAPIIAAVKDGKSITHEGREILAEELCTPPDPGAAFVVVECPDESFIQPICENATFQRYQGKADAPVALVVHMAPASVLVDSRYQQWMERFGPDTQHLVLNENCASVHNLRSHKIQTQLNLIHPDIFPLLTSFRCKKEGPTLSVPMVQGECLLKYQLRPRREWQRDAIITCNPEEFIVEALQLPNFQQSVQEYRRSAQDGPAPAEKRSQYPEIIFLGTGSAIPMKIRNVSATLVNISPDTSLLLDCGEGTFGQLCRHYGDQVDRVLGTLAAVFVSHLHADHHTGLPSILLQRERALASLGKPLHPLLVVAPNQLKAWLQQYHNQCQEVLHHISMIPAKCLQEGAEISSPAVERLISSLLRTCDLEEFQTCLVRHCKHAFGCALVHTSGWKVVYSGDTMPCEALVRMGKDATLLIHEATLEDGLEEEAVEKTHSTTSQAISVGMRMNAEFIMLNHFSQRYAKVPLFSPNFSEKVGVAFDHMKVCFGDFPTMPKLIPPLKALFAGDIEEMEERREKRELRQVRAALLSRELAGGLEDGEPQQKRAHTEEPQAKKVRAQ

SEQ ID NO: 26882 - protein, 786 aa, Homo sapiens
  Payload ID: 5299
  Gene Symbol: ELAC2
  Gene Name: elaC ribonuclease Z 2
  Uniprot ID: Q9BQ52
  ENSP ID: ENSP00000405223
MWALCSLLRSAAGRTMSQGRTISQAPARRERPRKDPLRHLRTREKRGPSGCSGGPNTVYLQVVAAGSRDSGAALYVFSEFNRYLFNCGEGVQRLMQEHKLKVARLDNIFLTRMHWSNVGGLSGMILTLKETGLPKCVLSGPPQLEKYLEAIKIFSGPLKGIELAVRPHSAPEYEDETMTVYQIPIHSVSQRRGVRDSSLVVAFICKLHLKRGNFLVLKAKEMGLPVGTAAIAPIIAAVKDGKSITHEGREILAEELCTPPDPGAAFVVVECPDESFIQPICENATFQRYQGKADAPVALVVHMAPASVLVDSRYQQWMERFGPDTQHLVLNENCASVHNLRSHKIQTQLNLIHPDIFPLLTSFRCKKEGPTLSVPMVQGECLLKYQLRPRREWQRDAIITCNPEEFIVEALQLPNFQQSVQEYRRSAQDGPAPAEKRSQYPEIIFLGTGSAIPMKIRNVSATLVNISPDTSLLLDCGEGTFGQLCRHYGDQVDRVLGTLAAVFVSHLHADHHTGLPSILLQRERALASLGKPLHPLLVVAPNQLKAWLQQYHNQCQEVLHHISMIPAKCLQEGAEISSPAVERLISSLLRTCDLEEFQTCLVRHCKHAFGCALVHTSGWKVVYSGDTMPCEALVRMGKDATLLIHEATLEDGLEEEAVEKTHSTTSQAISVGMRMNAEFIMLNHFSQRYAKVPLFSPNFSEKVGVAFDHMKVCFGDFPTMPKLIPPLKALFAGDIEEMEERREKRELRQVRAALLSRELAGGLEDGEPQQKRAHTEEPQAKKVRAQ

SEQ ID NO: 26883 - protein, 286 aa, Homo sapiens
  Payload ID: 5299
  Gene Symbol: ELAC2
  Gene Name: elaC ribonuclease Z 2
  ENSP ID: ENSP00000406192
  MOD_RES (1)..(1): Any amino acid
XPHGVSQRRGVRDSSLVVAFICKLHLKRGNFLVLKAKEMGLPVGTAAIAPIIAAVKDGKSITHEGREVLQILAEELCTPPDPGAAFVVVECPDESFIQPICENATFQRYQGKADAPVALVVHMAPASVLVDSRYQQWMERFGPDTQHLVLNENCASVHNLRSHKIQTQLNLIHPDIFPLLTSFRCKKEGPTLSVPMVQGECLLKYQLRPRREWQRDAIITCNPEEFIVEALQLPNFQQSVQEYRRSAQDGPAPAEKRSQYPEIIFLGTGSAIPMKIRNVSATLVNI

SEQ ID NO: 26884 - protein, 132 aa, Homo sapiens
  Payload ID: 5299
  Gene Symbol: ELAC2
  Gene Name: elaC ribonuclease Z 2
  ENSP ID: ENSP00000463321
MQEHKLKVARLDNIFLTRMHWSNVGGLSGMILTLKETGLPKCVLSGPPQLEKYLEAIKIFSGPLKGIELAVRPHSAPEYEDETMTVYQIPIHSEQRRGKHQPWQSPERPLSRLSPERSSDSESNENEPHLPH

SEQ ID NO: 26885 - protein, 148 aa, Homo sapiens
  Payload ID: 5299
  Gene Symbol: ELAC2
  Gene Name: elaC ribonuclease Z 2
  ENSP ID: ENSP00000463594
MQEHKLKVARLDNIFLTRMHWSNVGGLSGMILTLKETGLPKCVLSGPPQLEKYLEAIKIFSGPLKGIELAVRPHSAPEYEDETMTVYQIPIHSVSQRRGVRDSSLVVAFISSLKERKLLGAQSKGDGPPSWDSCHRSHHCCCQGREKH

SEQ ID NO: 26886 - protein, 626 aa, Homo sapiens
  Payload ID: 5299
  Gene Symbol: ELAC2
  Gene Name: elaC ribonuclease Z 2
  ENSP ID: ENSP00000463740
  MOD_RES (1)..(1): Any amino acid
XTMTVYQIPIHSEQRRGKHQPWQSPERPLSRLSPERSSDSESNENEPHLPHGVSQRRGVRDSSLVVAFICKLHLKRGNFLVLKAKEMGLPVGTAAIAPIIAAVKDGKSITHEGREILAEELCTPPDPGAAFVVVECPDESFIQPICENATFQRYQQWMERFGPDTQHLVLNENCASVHNLRSHKIQTQLNLIHPDIFPLLTSFRCKKEGPTLSVPMVQGECLLKYQLRPRREWQRDAIITCNPEEFIVEALQLPNFQQSVQEYRRSAQDGPAPAEKRSQYPEIIFLGTGSAIPMKIRNVSATLVNISPDTSLLLDCGEGTFGQLCRHYGDQVDRVLGTLAAVFVSHLHADHHTGLPSILLQRERALASLGKPLHPLLVVAPNQLKAWLQQYHNQCQEVLHHISMIPAKCLQEGAEISSPAVERLISSLLRTCDLEEFQTCLVRHCKHAFGCALVHTSGWKVVYSGDTMPCEALVRMGKDATLLIHEATLEDGLEEEAVEKTHSTTSQAISVGMRMNAEFIMLNHFSQRYAKVPLFSPNFSEKVGVAFDHMKVCFGDFPTMPKLIPPLKALFAGDIEEMEERREKRELRQVRAALLSRELAGGLEDGEPQQKRAHTEEPQAKKVRAQ

SEQ ID NO: 26887 - protein, 45 aa, Homo sapiens
  Payload ID: 5299
  Gene Symbol: ELAC2
  Gene Name: elaC ribonuclease Z 2
  ENSP ID: ENSP00000463884
  MOD_RES (1)..(1): Any amino acid
XPVALVVHMAPASVLVDSRYQQWMERYGAQPSGTWGLGLTPSTWS

SEQ ID NO: 26888 - protein, 122 aa, Homo sapiens
  Payload ID: 5299
  Gene Symbol: ELAC2
  Gene Name: elaC ribonuclease Z 2
  ENSP ID: ENSP00000464358
MQEHKLKVARLDNIFLTRMHWSNVGGLSGMILTLKETGLPKCVLSGPPQLEKYLEAIKIFSGPLKGIELAVRPHSAPEYEDETMTVYQIPIHSEQRRGKHQPWQSPERPLSRLSPERSSDSE

SEQ ID NO: 26889 - protein, 242 aa, Homo sapiens
  Payload ID: 5299
  Gene Symbol: ELAC2
  Gene Name: elaC ribonuclease Z 2
  ENSP ID: ENSP00000477044
MQEHKLKVARLDNIFLTRMHWSNVGGLSGMILTLKETGLPKCVLSGPPQLEKYLEAIKIFSGPLKGIELAVRPHSAPEYEDETMTVYQIPIHSEQRRGKHQPWQSPERPLSRLSPERSSDSESNENEPHLPHGVSQRRGVRDSSLVVAFICKLHLKRGNFLVLKAKEMGLPVGTAAIAPIIAAVKDGKSITHEGREILAEELCTPPDPGAAFVVVECPDESFIQPICENATFQRYQGKADAP

SEQ ID NO: 26890 - protein, 124 aa, Homo sapiens
  Payload ID: 5299
  Gene Symbol: ELAC2
  Gene Name: elaC ribonuclease Z 2
  ENSP ID: ENSP00000477093
MQEHKLKVARLDNIFLTRMHWSNVGGLSGMILTLKETGLPKCVLSGPPQLEKYLEAIKIFSGPLKGIELAVRPHSAPEYEDETMTVYQIPIHSEQRRGKHQPWQSPERPLSRLSPERSSDSESN

SEQ ID NO: 26891 - protein, 158 aa, Homo sapiens
  Payload ID: 5299
  Gene Symbol: ELAC2
  Gene Name: elaC ribonuclease Z 2
  ENSP ID: ENSP00000477482
MWALCSLLRSAAGRTMSQGRTISQAPARRERPRKDPLRHLRTREKRGPSGCSGGPNTVYLQVVAAGSRDSGAALYVFSEFNRYLFNCGEGVQRLMQEHKLKVARLDNIFLTRMHWSNVGGLSGMILTLKETGLPKCVLSGPPQLLCGPTLPQNTRMKP

SEQ ID NO: 26892 - protein, 267 aa, Homo sapiens
  Payload ID: 5300
  Gene Symbol: ELANE
  Gene Name: elastase, neutrophil expressed
  Uniprot ID: P08246
  ENSP ID: ENSP00000263621
MTLGRRLACLFLACVLPALLLGGTALASEIVGGRRARPHAWPFMVSLQLRGGHFCGATLIAPNFVMSAAHCVANVNVRAVRVVLGAHNLSRREPTRQVFAVQRIFENGYDPVNLLNDIVILQLNGSATINANVQVAQLPAQGRRLGNGVQCLAMGWGLLGRNRGIASVLQELNVTVVTSLCRRSNVCTLVRGRQAGVCFGDSGSPLVCNGLIHGIASFVRGGCASGLYPDAFAPVAQFVNWIDSIIQRSEDNPCPHPRDPDPASRTH

SEQ ID NO: 26893 - protein, 267 aa, Homo sapiens; identical to SEQ ID NO: 26892
  Payload ID: 5300
  Gene Symbol: ELANE
  Gene Name: elastase, neutrophil expressed
  Uniprot ID: P08246
  ENSP ID: ENSP00000466090

SEQ ID NO: 26894 - protein, 267 aa, Homo sapiens; identical to SEQ ID NO: 26892
  Payload ID: 5300
  Gene Symbol: ELANE
  Gene Name: elastase, neutrophil expressed
  Uniprot ID: P08246
  ENSP ID: ENSP00000480128

SEQ ID NO: 26895 - protein, 267 aa, Homo sapiens; identical to SEQ ID NO: 26892
  Payload ID: 5300
  Gene Symbol: ELANE
  Gene Name: elastase, neutrophil expressed
  Uniprot ID: P08246
  ENSP ID: ENSP00000488075

SEQ ID NO: 26896 - protein, 724 aa, Homo sapiens
  Payload ID: 5301
  Gene Symbol: ELN
  Gene Name: elastin
  Uniprot ID: P15502
  ENSP ID: ENSP00000252034
MAGLTAAAPRPGVLLLLLSILHPSRPGGVPGAIPGGVPGGVFYPGAGLGALGGGALGPGGKPLKPVPGGLAGAGLGAGLGAFPAVTFPGALVPGGVADAAAAYKAAKAGAGLGGVPGVGGLGVSAGAVVPQPGAGVKPGKVPGVGLPGVYPGGVLPGARFPGVGVLPGVPTGAGVKPKAPGVGGAFAGIPGVGPFGGPQPGVPLGYPIKAPKLPGGYGLPYTTGKLPYGYGPGGVAGAAGKAGYPTGTGVGPQAAAAAAAKAAAKFGAGAAGVLPGVGGAGVPGVPGAIPGIGGIAGVGTPAAAAAAAAAAKAAKYGAAAGLVPGGPGFGPGVVGVPGAGVPGVGVPGAGIPVVPGAGIPGAAVPGVVSPEAAAKAAAKAAKYGARPGVGVGGIPTYGVGAGGFPGFGVGVGGIPGVAGVPGVGGVPGVGGVPGVGISPEAQAAAAAKAAKYGVGTPAAAAAKAAAKAAQFGLVPGVGVAPGVGVAPGVGVAPGVGLAPGVGVAPGVGVAPGVGVAPGIGPGGVAAAAKSAAKVAAKAQLRAAAGLGAGIPGLGVGVGVPGLGVGAGVPGLGVGAGVPGFGAVPGALAAAKAAKYGAAVPGVLGGLGALGGVGIPGGVVGAGPAAAAAAAKAAAKAAQFGLVGAAGLGGLGVGGLGVPGVGGLGGIPPAAAAKAAKYGAAGLGGVLGGAGQFPLGGVAARPGFGLSPIFPGGACLGKACGRKRK

SEQ ID NO: 26897 - protein, 757 aa, Homo sapiens
  Payload ID: 5301
  Gene Symbol: ELN
  Gene Name: elastin
  Uniprot ID: P15502
  ENSP ID: ENSP00000313565
MAGLTAAAPRPGVLLLLLSILHPSRPGGVPGAIPGGVPGGVFYPGAGLGALGGGALGPGGKPLKPVPGGLAGAGLGAGLGAFPAVTFPGALVPGGVADAAAAYKAAKAGAGLGGVPGVGGLGVSAGAVVPQPGAGVKPGKVPGVGLPGVYPGGVLPGARFPGVGVLPGVPTGAGVKPKAPGVGGAFAGIPGVGPFGGPQPGVPLGYPIKAPKLPGGYGLPYTTGKLPYGYGPGGVAGAAGKAGYPTGTGVGPQAAAAAAAKAAAKFGAGAAGVLPGVGGAGVPGVPGAIPGIGGIAGVGTPAAAAAAAAAAKAAKYGAAAGLVPGGPGFGPGVVGVPGAGVPGVGVPGAGIPVVPGAGIPGAAVPGVVSPEAAAKAAAKAAKYGARPGVGVGGIPTYGVGAGGFPGFGVGVGGIPGVAGVPGVGGVPGVGGVPGVGISPEAQAAAAAKAAKYGVGTPAAAAAKAAAKAAQFGLVPGVGVAPGVGVAPGVGVAPGVGLAPGVGVAPGVGVAPGVGVAPGIGPGGVAAAAKSAAKVAAKAQLRAAAGLGAGIPGLGVGVGVPGLGVGAGVPGLGVGAGVPGFGAGADEGVRRSLSPELREGDPSSSQHLPSTPSSPRVPGALAAAKAAKYGAAVPGVLGGLGALGGVGIPGGVVGAGPAAAAAAAKAAAKAAQFGLVGAAGLGGLGVGGLGVPGVGGLGGIPPAAAAKAAKYGAAGLGGVLGGAGQFPLGGVAARPGFGLSPIFPGGACLGKACGRKRK

SEQ ID NO: 26898 - protein, 643 aa, Homo sapiens
  Payload ID: 5301
  Gene Symbol: ELN
  Gene Name: elastin
  ENSP ID: ENSP00000315607
MAGLTAAAPRPGVLLLLLSILHPSRPGGVPGAIPGGVPGGVFYPGAGLGALGGGALGPGGKPLKPGLGAFPAVTFPGALVPGGVADAAAAYKAAKAGAGLGGVPGVGGLGVSAGAVVPQPGAGVKPGKVPGVGLPGVYPGGVLPGARFPGVGVLPGVPTGAGVKPKAPGVGPFGGPQPGVPLGYPIKAPKLPGYGPGGVAGAAGKAGYPTGTGVGPQAAAAAAAKAAAKFGAGAAGVLPGVGGAGVPGVPGAIPGIGGIAGVGTPAAAAAAAAAAKAAKYGAAAGLVPGGPGFGPGVVGVPGAGVPGVGVPGAGIPVVPGAGIPGAAVPGVVSPEAAAKAAAKAAKYGARPGVGVGGIPTYGVGAGGFPGFGVGVGAEAQAAAAAKAAKYGLVPGVGVAPGVGVAPGVGVAPGVGLAPGVGVAPGVGVAPGVGVAPGIGPGGVAAAAKSAAKVAAKAQLRAAAGLGAGIPGLGVGVGVPGLGVGAGVPGLGVGAGVPGFGAVPGALAAAKAAKYGAAVPGVLGGLGALGGVGIPGGVVGAGPAAAAAAAKAAAKAAQFGLVGAAGLGGLGVGGLGVPGVGGLGGIPPAAAAKAAKYGAAGLGGVLGGAGQFPLGGVAARPGFGLSPIFPGGACLGKACGRKRK

SEQ ID NO: 26899 - protein, 711 aa, Homo sapiens
  Payload ID: 5301
  Gene Symbol: ELN
  Gene Name: elastin
  Uniprot ID: P15502
  ENSP ID: ENSP00000349540
MAGLTAAAPRPGVLLLLLSILHPSRPGGVPGAIPGGVPGGVFYPGAGLGALGGGALGPGGKPLKPVPGGLAGAGLGAGLGAFPAVTFPGALVPGGVADAAAAYKAAKAGAGLGGVPGVGGLGVSAAPSVPGAVVPQPGAGVKPGKVPGVGLPGVYPGGVLPGARFPGVGVLPGVPTGAGVKPKAPGVGGAFAGIPGVGPFGGPQPGVPLGYPIKAPKLPGGYGLPYTTGKLPYGYGPGGVAGAAGKAGYPTGTGVGPQAAAAAAAKAAAKFGAGAAGVLPGVGGAGVPGVPGAIPGIGGIAGVGTPAAAAAAAAAAKAAKYGAAAGLVPGGPGFGPGVVGVPGAGVPGVGVPGAGIPVVPGAGIPGAAVPGVVSPEAAAKAAAKAAKYGARPGVGVGGIPTYGVGAGGFPGFGVGVGGIPGVAGVPGVGGVPGVGGVPGVGISPEAQAAAAAKAAKYGVGTPAAAAAKAAAKAAQFGLVPGVGVAPGVGVAPGVGVAPGVGLAPGVGVAPGVGVAPGVGVAPGIGPGGVAAAAKSAAKVAAKAQLRAAAGLGAGIPGLGVGVGVPGLGVGAGVPGLGVGAGVPGFGAVPGALAAAKAAKYGAAVPGVLGGLGALGGVGIPGGVVGAGPAAAAAAAKAAAKAAQFGLVGAAGLGGLGVGGLGVPGVGGLGGIPPAAAAKAAKYGVAARPGFGLSPIFPGGACLGKACGRKRK

SEQ ID NO: 26900 - protein, 786 aa, Homo sapiens
  Payload ID: 5301
  Gene Symbol: ELN
  Gene Name: elastin
  ENSP ID: ENSP00000351807
MAGLTAAAPRPGVLLLLLSILHPSRPGGVPGAIPGGVPGGVFYPGAGLGALGGGALGPGGKPLKPVPGGLAGAGLGAGLGAFPAVTFPGALVPGGVADAAAAYKAAKAGAGLGGVPGVGGLGVSAGAVVPQPGAGVKPGKVPGVGLPGVYPGGVLPGARFPGVGVLPGVPTGAGVKPKAPGVGGAFAGIPGVGPFGGPQPGVPLGYPIKAPKLPGGYGLPYTTGKLPYGYGPGGVAGAAGKAGYPTGTGVGPQAAAAAAAKAAAKFGAGAAGVLPGVGGAGVPGVPGAIPGIGGIAGVGTPAAAAAAAAAAKAAKYGAAAGLVPGGPGFGPGVVGVPGAGVPGVGVPGAGIPVVPGAGIPGAAVPGVVSPEAAAKAAAKAAKYGARPGVGVGGIPTYGVGAGGFPGFGVGVGGIPGVAGVPGVGGVPGVGGVPGVGISPEAQAAAAAKAAKYGAAGAGVLGGLVPGAPGAVPGVPGTGGVPGVGTPAAAAAKAAAKAAQFGLVPGVGVAPGVGVAPGVGVAPGVGLAPGVGVAPGVGVAPGVGVAPGIGPGGVAAAAKSAAKVAAKAQLRAAAGLGAGIPGLGVGVGVPGLGVGAGVPGLGVGAGVPGFGAGADEGVRRSLSPELREGDPSSSQHLPSTPSSPRVPGALAAAKAAKYGAAVPGVLGGLGALGGVGIPGGVVGAGPAAAAAAAKAAAKAAQFGLVGAAGLGGLGVGGLGVPGVGGLGGIPPAAAAKAAKYGAAGLGGVLGGAGQFPLGGVAARPGFGLSPIFPGGACLGKACGRKRK

SEQ ID NO: 26901 - protein, 570 aa, Homo sapiens
  Payload ID: 5301
  Gene Symbol: ELN
  Gene Name: elastin
  Uniprot ID: P15502
  ENSP ID: ENSP00000369926
MAGLTAAAPRPGVLLLLLSILHPSRPGGVPGAIPGGVPGGVFYPGAGLGALGGGALGPGGKPLKPVPGGLAGAGLGAGVGGAFAGIPGVGPFGGPQPGVPLGYPIKAPKLPGYGPGGVAGAAGKAGYPTGTGVGPQAAAAAAAKAAAKFGAGAAGVLPGVGGAGVPGVPGAIPGIGGIAGVGTPAAAAAAAAAAKAAKYGAAAGLVPGGPGFGPGVVGVPGAGVPGVGVPGAGIPVVPGAGIPGAAVPGVVSPEAAAKAAAKAAKYGARPGVGVGGIPTYGVGAGGFPGFGVGVGGIPGVAGVPGVGGVPGVGGVPGVGISPEAQAAAAAKAAKYGLVPGVGVAPGVGVAPGVGVAPGVGLAPGVGVAPGVGVAPGVGVAPGIGPGGVAAAAKSAAKVAAKAQLRAAAGLGAGIPGLGVGVGVPGLGVGAGVPGLGVGAGVPGFGAVPGALAAAKAAKYGAAVPGVLGGLGALGGVGIPGGVVGAGPAAAAAAAKAAAKAAQFGLVGAAGLGGLGVGGLGVPGVGGLGGIPPAAAAKAAKYGVAARPGFGLSPIFPGGACLGKACGRKRK

SEQ ID NO: 26902 - protein, 730 aa, Homo sapiens
  Payload ID: 5301
  Gene Symbol: ELN
  Gene Name: elastin
  Uniprot ID: P15502
  ENSP ID: ENSP00000369936
MAGLTAAAPRPGVLLLLLSILHPSRPGGVPGAIPGGVPGGVFYPGAGLGALGGGALGPGGKPLKPVPGGLAGAGLGAGLGAFPAVTFPGALVPGGVADAAAAYKAAKAGAGLGGVPGVGGLGVSAGAVVPQPGAGVKPGKVPGVGLPGVYPGGVLPGARFPGVGVLPGVPTGAGVKPKAPGVGGAFAGIPGVGPFGGPQPGVPLGYPIKAPKLPGGYGLPYTTGKLPYGYGPGGVAGAAGKAGYPTGTGVGPQAAAAAAAKAAAKFGAGAAGVLPGVGGAGVPGVPGAIPGIGGIAGVGTPAAAAAAAAAAKAAKYGAAAGLVPGGPGFGPGVVGVPGAGVPGVGVPGAGIPVVPGAGIPGAAVPGVVSPEAAAKAAAKAAKYGARPGVGVGGIPTYGVGAGGFPGFGVGVGGIPGVAGVPGVGGVPGVGGVPGVGISPEAQAAAAAKAAKYGVGTPAAAAAKAAAKAAQFALLNLAGLVPGVGVAPGVGVAPGVGVAPGVGLAPGVGVAPGVGVAPGVGVAPGIGPGGVAAAAKSAAKVAAKAQLRAAAGLGAGIPGLGVGVGVPGLGVGAGVPGLGVGAGVPGFGAVPGALAAAKAAKYGAAVPGVLGGLGALGGVGIPGGVVGAGPAAAAAAAKAAAKAAQFGLVGAAGLGGLGVGGLGVPGVGGLGGIPPAAAAKAAKYGAAGLGGVLGGAGQFPLGGVAARPGFGLSPIFPGGACLGKACGRKRK

SEQ ID NO: 26903 - protein, 677 aa, Homo sapiens
  Payload ID: 5301
  Gene Symbol: ELN
  Gene Name: elastin
  Uniprot ID: P15502
  ENSP ID: ENSP00000369949
MAGLTAAAPRPGVLLLLLSILHPSRPGGVPGAIPGGVPGGVFYPALGPGGKPLKPVPGGLAGAGLGAGLGAFPAVTFPGALVPGGVADAAAAYKAAKAGAGLGGVPGVGGLGVSAGAVVPQPGAGVKPGKVPGVGLPGVYPGGVLPGARFPGVGVLPGVPTGAGVKPKAPGVGGAFAGIPGVGPFGGPQPGVPLGYPIKAPKLPGGYGLPYTTGKLPYGYGPGGVAGAAGKAGYPTGTGVGPQAAAAAAAKAAAKFGAGAAGVLPGVGGAGVPGVPGAIPGIGGIAGVGTPAAAAAAAAAAKAAKYGAAAGLVPGGPGFGPGVVGVPGAGVPGVGVPGAGIPVVPGAGIPGAAVPGVVSPEAAAKAAAKAAKYGARPGVGVGGIPTYGVGAGGFPGFGVGVGGIPGVAGVPGVGGVPGVGGVPGVGISPEAQAAAAAKAAKYGLVPGVGVAPGVGVAPGVGVAPGVGLAPGVGVAPGVGVAPGVGVAPGIGPGGVAAAAKSAAKVAAKAQLRAAAGLGAGIPGLGVGVGVPGLGVGAGVPGLGVGAGVPGFGAVPGALAAAKAAKYGAAVPGVLGGLGALGGVGIPGGVVGAGPAAAAAAAKAAAKAAQFGLVGAAGLGGLGVGGLGVPGVGGLGGIPPAAAAKAAKYGVAARPGFGLSPIFPGGACLGKACGRKRK

SEQ ID NO: 26904 - protein, 705 aa, Homo sapiens
  Payload ID: 5301
  Gene Symbol: ELN
  Gene Name: elastin
  Uniprot ID: P15502
  ENSP ID: ENSP00000369950
MAGLTAAAPRPGVLLLLLSILHPSRPGGVPGAIPGGVPGGVFYPGAGLGALGGGALGPGGKPLKPVPGGLAGAGLGAGLGAFPAVTFPGALVPGGVADAAAAYKAAKAGAGLGGVPGVGGLGVSAGAVVPQPGAGVKPGKVPGVGLPGVYPGGVLPGARFPGVGVLPGVPTGAGVKPKAPGVGGAFAGIPGVGPFGGPQPGVPLGYPIKAPKLPGGYGLPYTTGKLPYGYGPGGVAGAAGKAGYPTGTGVGPQAAAAAAAKAAAKFGAGAAGVLPGVGGAGVPGVPGAIPGIGGIAGVGTPAAAAAAAAAAKAAKYGAAAGLVPGGPGFGPGVVGVPGAGVPGVGVPGAGIPVVPGAGIPGAAVPGVVSPEAAAKAAAKAAKYGARPGVGVGGIPTYGVGAGGFPGFGVGVGGIPGVAGVPGVGGVPGVGGVPGVGISPEAQAAAAAKAAKYGLVPGVGVAPGVGVAPGVGVAPGVGLAPGVGVAPGVGVAPGVGVAPGIGPGGVAAAAKSAAKVAAKAQLRAAAGLGAGIPGLGVGVGVPGLGVGAGVPGLGVGAGVPGFGAVPGALAAAKAAKYGAAVPGVLGGLGALGGVGIPGGVVGAGPAAAAAAAKAAAKAAQFGLVGAAGLGGLGVGGLGVPGVGGLGGIPPAAAAKAAKYGAAGLGGVLGGAGQFPLGGVAARPGFGLSPIFPGGACLGKACGRKRK

SEQ ID NO: 26905 - protein, 658 aa, Homo sapiens
  Payload ID: 5301
  Gene Symbol: ELN
  Gene Name: elastin
  Uniprot ID: P15502
  ENSP ID: ENSP00000369958
MAGLTAAAPRPGVLLLLLSILHPSRPGGVPGAIPGGVPGGVFYPGAGLGALGGGALGPGGKPLKPVPGGLAGAGLGAGLGAFPAVTFPGALVPGGVADAAAAYKAAKAGAGLGGVPGVGGLGVSAGAVVPQPGAGVKPGKVPGVGLPGVYPGGVLPGARFPGVGVLPGVPTGAGVKPKAPGVGGAFAGIPGVGPFGGPQPGVPLGYPIKAPKLPGYGPGGVAGAAGKAGYPTGTGVGPQAAAAAAAKAAAKFGAGAAGVLPGVGGAGVPGVPGAIPGIGGIAGVGTPAAAAAAAAAAKAAKYGAAAGLVPGGPGFGPGVVGVPGAGVPGVGVPGAGIPVVPGAGIPGAAVPGVVSPEAAAKAAAKAAKYGARPGVGVGGIPTYGVGAGGFPGFGVGVGGIPGVAGVPGVGGVPGVGGVPGVGISPEAQAAAAAKAAKYGLVPGVGVAPGVGVAPGVGVAPGVGLAPGVGVAPGVGVAPGVGVAPGIGPGGVAGAAAGLGAGIPGLGVGVGVPGLGVGAGVPGLGVGAGVPGFGAVPGALAAAKAAKYGAAVPGVLGGLGALGGVGIPGGVVGAGPAAAAAAAKAAAKAAQFGLVGAAGLGGLGVGGLGVPGVGGLGGIPPAAAAKAAKYGVAARPGFGLSPIFPGGACLGKACGRKRK

SEQ ID NO: 26906 - protein, 168 aa, Homo sapiens
  Payload ID: 5301
  Gene Symbol: ELN
  Gene Name: elastin
  ENSP ID: ENSP00000389206
MAGLTAAAPRPGVLLLLLSILHPSRPGGVPGAIPGGVPGGVFYPGAGLGALGGGALGPGGKPLKPGVGPFGGPQPGVPLGYPIKAPKLPGYGPGGVAGAAGKAGYPTGTGVGPQAAAAAAAKAAAKFGAGAAGVLPGVGGAGVPGVPGAIPGIGGIAGVGTPAAAAAA

SEQ ID NO: 26907 - protein, 706 aa, Homo sapiens
  Payload ID: 5301
  Gene Symbol: ELN
  Gene Name: elastin
  ENSP ID: ENSP00000389857
MAGLTAAAPRPGVLLLLLSILHPSRPGGVPGAIPGGVPGGVFYPGAGLGALGGGALGPGGKPLKPVPGGLAGAGLGAGLGAFPAVTFPGALVPGGVADAAAAYKAAKAGAGLGGVPGVGGLGVSAGAVVPQPGAGVKPGKVPGVGLPGVYPGGVLPGARFPGVGVLPGVPTGAGVKPKAPGVGGAFAGIPGVGPFGGPQPGVPLGYPIKAPKLPGGYGLPYTTGKLPYGYGPGGVAGAAGKAGYPTGTGVGPQAAAAAAAKAAAKFGAGAAGVLPGVGGAGVPGVPGAIPGIGGIAGVGTPAAAAAAAAAAKAAKYGAAAGLVPGGPGFGPGVVGVPGAGVPGVGVPGAGIPVVPGAGIPGAAVPGVVSPEAAAKAAAKAAKYGARPGVGVGGIPTYGVGAGGFPGFGVGVGGIPGVAGVPGVGGVPGVGGVPGVGISPEAQAAAAAKAAKYGVGTPAAAAAKAAAKAAQFGLVPGVGVAPGVGVAPGVGVAPGVGLAPGVGVAPGVGVAPGVGVAPGIGPGGVAAAAKSAAKVAAKAQLRAAAGLGAGIPGLGVGVGVPGLGVGAGVPGLGVGAGVPGFGAVPGALAAAKAAKYGAAVPGVLGGLGALGGVGIPGGVVGAGPAAAAAAAKAAAKAAQFGLVGAAGLGGLGVGGLGVPGVGGLGGIPPAAAAKAAKYGVAARPGFGLSPIFPGGACLGKACGRKRK

SEQ ID NO: 26908 - protein, 692 aa, Homo sapiens
  Payload ID: 5301
  Gene Symbol: ELN
  Gene Name: elastin
  Uniprot ID: P15502
  ENSP ID: ENSP00000391129
MAGLTAAAPRPGVLLLLLSILHPSRPGGVPGAIPGGVPGGVFYPGAGLGALGGGALGPGGKPLKPVPGGLAGAGLGAGLGAFPAVTFPGALVPGGVADAAAAYKAAKAGAGLGGVPGVGGLGVSAAPSVPGAVVPQPGAGVKPGKVPGVGLPGVYPGGVLPGARFPGVGVLPGVPTGAGVKPKAPGVGGAFAGIPGVGPFGGPQPGVPLGYPIKAPKLPGGYGLPYTTGKLPYGYGPGGVAGAAGKAGYPTGTGVGPQAAAAAAAKAAAKFGAGAAGVLPGVGGAGVPGVPGAIPGIGGIAGVGTPAAAAAAAAAAKAAKYGAAAGLVPGGPGFGPGVVGVPGAGVPGVGVPGAGIPVVPGAGIPGAAVPGVVSPEAAAKAAAKAAKYGARPGVGVGGIPTYGVGAGGFPGFGVGVGGIPGVAGVPGVGGVPGVGGVPGVGISPEAQAAAAAKAAKYGLVPGVGVAPGVGVAPGVGVAPGVGLAPGVGVAPGVGVAPGVGVAPGIGPGGVAAAAKSAAKVAAKAQLRAAAGLGAGIPGLGVGVGVPGLGVGAGVPGLGVGAGVPGFGAVPGALAAAKAAKYGAAVPGVLGGLGALGGVGIPGGVVGAGPAAAAAAAKAAAKAAQFGLVGAAGLGGLGVGGLGVPGVGGLGGIPPAAAAKAAKYGVAARPGFGLSPIFPGGACLGKACGRKRK

SEQ ID NO: 26909 - protein, 700 aa, Homo sapiens
  Payload ID: 5301
  Gene Symbol: ELN
  Gene Name: elastin
  ENSP ID: ENSP00000392575
MAGLTAAAPRPGVLLLLLSILHPSRPGGVPGAIPGGVPGGVFYPALGPGGKPLKPVPGGLAGAGLGAGLGAFPAVTFPGALVPGGVADAAAAYKAAKAGAGLGGVPGVGGLGVSAAPSVPGAVVPQPGAGVKPGKVPGVGLPGVYPGGVLPGARFPGVGVLPGVPTGAGVKPKAPGVGGAFAGIPGVGPFGGPQPGVPLGYPIKAPKLPGGYGLPYTTGKLPYGYGPGGVAGAAGKAGYPTGTGVGPQAAAAAAAKAAAKFGAGAAGVLPGVGGAGVPGVPGAIPGIGGIAGVGTPAAAAAAAAAAKAAKYGAAAGLVPGGPGFGPGVVGVPGAGVPGVGVPGAGIPVVPGAGIPGAAVPGVVSPEAAAKAAAKAAKYGARPGVGVGGIPTYGVGAGGFPGFGVGVGGIPGVAGVPGVGGVPGVGGVPGVGISPEAQAAAAAKAAKYGLVPGVGVAPGVGVAPGVGVAPGVGLAPGVGVAPGVGVAPGVGVAPGIGPGGVAAAAKSAAKVAAKAQLRAAAGLGAGIPGLGVGVGVPGLGVGAGVPGLGVGAGVPGFGAVPGALAAAKAAKYGAAVPGVLGGLGALGGVGIPGGVVGAGPAAAAAAAKAAAKAAQFGLVGAAGLGGLGVGGLGVPGVGGLGGIPPAAAAKAAKYGAAGLGGVLGGAGQFPLGGVAARPGFGLSPIFPGGACLGKACGRKRK

SEQ ID NO: 26910 - protein, 151 aa, Homo sapiens
  Payload ID: 5301
  Gene Symbol: ELN
  Gene Name: elastin
  ENSP ID: ENSP00000394549
MAGLTAAAPRPGVLLLLLSILHPSRPGGVPGAIPGGVPGGVFYPALGPGGKPLKPGLGAFPAVTFPGALVPGGVADAAAAYKAAKAGAGLGGVPGVGGLGVSAGAVVPQPGAGVKPGKVPGVGLPGVYPGGVLPGARFPGVGVLPGVPTGA

SEQ ID NO: 26911 - protein, 166 aa, Homo sapiens
  Payload ID: 5301
  Gene Symbol: ELN
  Gene Name: elastin
  ENSP ID: ENSP00000399499
MAGLTAAAPRPGVLLLLLSILHPSRPGGVPGAIPGGVPGGVFYPGAGLGALGGGALGPGGKPLKPVPGGLAGAGLGAGLGAFPAVTFPGALVPGGVADAAAAYKAAKAGVGPFGGPQPGVPLGYPIKAPKLPGGYGLPYTTGKLPYGYGPGGVAGAAGKAGYPTGT

SEQ ID NO: 26912 - protein, 714 aa, Homo sapiens
  Payload ID: 5301
  Gene Symbol: ELN
  Gene Name: elastin
  ENSP ID: ENSP00000403162
MAGLTAAAPRPGVLLLLLSILHPSRPGGVPGAIPGGVPGGVFYPALGPGGKPLKPVPGGLAGAGLGAGLGAFPAVTFPGALVPGGVADAAAAYKAAKAGAGLGGVPGVGGLGVSAGAVVPQPGAGVKPGKVPGVGLPGVYPGGVLPGARFPGVGVLPGVPTGAGVKPKAPGVGGAFAGIPGVGPFGGPQPGVPLGYPIKAPKLPGGYGLPYTTGKLPYGYGPGGVAGAAGKAGYPTGTGVGPQAAAAAAAKAAAKFGAGAAGVLPGVGGAGVPGVPGAIPGIGGIAGVGTPAAAAAAAAAAKAAKYGAAAGLVPGGPGFGPGVVGVPGAGVPGVGVPGAGIPVVPGAGIPGAAVPGVVSPEAAAKAAAKAAKYGARPGVGVGGIPTYGVGAGGFPGFGVGVGGIPGVAGVPGVGGVPGVGGVPGVGISPEAQAAAAAKAAKYGVGTPAAAAAKAAAKAAQFGLVPGVGVAPGVGVAPGVGVAPGVGLAPGVGVAPGVGVAPGVGVAPGIGPGGVAAAAKSAAKVAAKAQLRAAAGLGAGIPGLGVGVGVPGLGVGAGVPGLGVGAGVPGFGAVPGALAAAKAAKYGAAVPGVLGGLGALGGVGIPGGVVGAGPAAAAAAAKAAAKAAQFGLVGAAGLGGLGVGGLGVPGVGGLGGIPPAAAAKAAKYGAAGLGGVLGGAGQFPLGGVAARPGFGLSPIFPGGACLGKACGRKRK

SEQ ID NO: 26913 - protein, 176 aa, Homo sapiens
  Payload ID: 5301
  Gene Symbol: ELN
  Gene Name: elastin
  ENSP ID: ENSP00000403961
MAGLTAAAPRPGVLLLLLSILHPSRPGGVPGAIPGGVPGGVFYPGAGLGALGGGALGPGGKPLKPVPGGLAGAGLGAGLGAFPAVTFPGALVPGGVADAAAAYKAAKAGAGLGGVPGVGGLGVSAGAVVPQPGAGVKPGKVPGVGGAFAGIPGVGPFGGPQPGVPLGYPIKAPKLP

SEQ ID NO: 26914 - protein, 68 aa, Homo sapiens
  Payload ID: 5301
  Gene Symbol: ELN
  Gene Name: elastin
  ENSP ID: ENSP00000404138
MAGLTAAAPRPGVLLLLLSILHPSRPGGVPGAIPGGVPGGVFYPGNVHETSTHPGHADDADVHNRCTF

SEQ ID NO: 26915 - protein, 294 aa, Homo sapiens
  Payload ID: 5301
  Gene Symbol: ELN
  Gene Name: elastin
  ENSP ID: ENSP00000406949
MAGLTAAAPRPGVLLLLLSILHPSRPGGVPGAIPGGVPGGVFYPGAGLGALGGGALGPGGKPLKPGLGAFPAVTFPGALVPGGVADAAAAYKAAKAGAGLGGVPGVGGLGVSAGAVVPQPGAGVKPGKVPGVGLPGVYPGGVLPGARFPGVGVLPGVPTGAGVKPKAPGVGPFGGPQPGVPLGYPIKAPKLPGGYGLPYTTGKLPYGYGPGGVAGAAGKAGYPTGTGVGPQAAAAAAAKAAAKFGAGAAGVLPGVGGAGVPGVPGAIPGIGGIAGVGTPAAAAAAAAAAKAAKY

SEQ ID NO: 26916 - protein, 214 aa, Homo sapiens
  Payload ID: 5301
  Gene Symbol: ELN
  Gene Name: elastin
  ENSP ID: ENSP00000411092
MAGLTAAAPRPGVLLLLLSILHPSRPGGVPGAIPGGVPGGVFYPGAGLGALGGGALGPGGKPLKPVPGGLAGAGLGAGLGAFPAVTFPGALVPGGVADAAAAYKAAKAGAGLGGVPGVGGLGVSAGAVVPQPGAGVKPGKVPGVGLPGVYPGGVLPGVGPFGGPQPGVPLGYPIKAPKLPGGYGLPYTTGKLPYGYGPGGVAGAAGKAGYPTGT

SEQ ID NO: 26917 - protein, 60 aa, Homo sapiens
  Payload ID: 5301
  Gene Symbol: ELN
  Gene Name: elastin
  ENSP ID: ENSP00000412262
VTFPGALVPGGVADAAAAYKAAKAGAGLGGVPGVGGLGVSAGAVVPQPGAGVKPGKVPAL

SEQ ID NO: 26918 - protein, 617 aa, Homo sapiens
  Payload ID: 5301
  Gene Symbol: ELN
  Gene Name: elastin
  ENSP ID: ENSP00000480955
MAGLTAAAPRPGVLLLLLSILHPSRPGGVPGAIPGGVPGGVFYPALGPGGKPLKPVPGGLAGAGLGAGLGAFPAVTFPGALVPGGVADAAAAYKAAKAGAGLGGVPGVGGLGVSAGAVVPQPGAGVKPGKVPGVGLPGVYPGGVLPGVGPFGGPQPGVPLGYPIKAPKLPGGYGLPYTTGKLPYGYGPGGVAGAAGKAGYPTGTGVGPQAAAAAAAKAAAKFGAGAAGVLPGVGGAGVPGVPGAIPGIGGIAGVGTPAAAAAAAAAAKAAKYGAAAGLVPGGPGFGPGVVGVPGAGVPGVGVPGAGIPVVPGAGIPGAAVPGVVSPEAAAKAAAKAAKYGARPGVGVGGIPTYGVGAGGFPGFGVGVGAEAQAAAAAKAAKYGLVPGVGVAPGVGVAPGVGVAPGVGLAPGVGVAPGVGVAPGVGVAPGIGPGGVAAAAKSAAKVAAKAQLRAAAGLGAGIPGLGVGVGVPGLGVGAGVPGLGVGAGVPGFGAVPGALAAAKAAKYGAAVPGVLGGLGALGGVGIPGGVVGAGPAAAAAAAKAAAKAAQFGLVGAAGLGGLGVGGLGVPGVGGLGGIPPAAAAKAAKYGVAARPGFGLSPIFPGGACLGKACGRKRK

SEQ ID NO: 26919 - protein, 1016 aa, Homo sapiens
  Payload ID: 5302
  Gene Symbol: EMILIN1
  Gene Name: elastin microfibril interfacer 1
  ENSP ID: ENSP00000369677
MAPRTLWSCYLCCLLTAAAGAASYPPRGFSLYTGSSGALSPGGPQAQIAPRPASRHRNWCAYVVTRTVSCVLEDGVETYVKYQPCAWGQPQCPQSIMYRRFLRPRYRVAYKTVTDMEWRCCQGYGGDDCAESPAPALGPASSTPRPLARPARPNLSGSSAGSPLSGLGGEGPGESEKVQQLEEQVQSLTKELQGLRGVLQGLSGRLAEDVQRAVETAFNGRQQPADAAARPGVHETLNEIQHQLQLLDTRVSTHDQELGHLNNHHGGSSSSGGSRAPAPASAPPGPSEELLRQLEQRLQESCSVCLAGLDGFRRQQQEDRERLRAMEKLLASVEERQRHLAGLAVGRRPPQECCSPELGRRLAELERRLDVVAGSVTVLSGRRGTELGGAAGQGGHPPGYTSLASRLSRLEDRFNSTLGPSEEQEESWPGAPGGLSHWLPAARGRLEQLGGLLANVSGELGGRLDLLEEQVAGAMQACGQLCSGAPGEQDSQVSEILSALERRVLDSEGQLRLVGSGLHTVEAAGEARQATLEGLQEVVGRLQDRVDAQDETAAEFTLRLNLTAARLGQLEGLLQAHGDEGCGACGGVQEELGRLRDGVERCSCPLLPPRGPGAGPGVGGPSRGPLDGFSVFGGSSGSALQALQGELSEVILSFSSLNDSLNELQTTVEGQGADLADLGATKDRIISEINRLQQEATEHATESEERFRGLEEGQAQAGQCPSLEGRLGRLEGVCERLDTVAGGLQGLREGLSRHVAGLWAGLRETNTTSQMQAALLEKLVGGQAGLGRRLGALNSSLQLLEDRLHQLSLKDLTGPAGEAGPPGPPGLQGPPGPAGPPGSPGKDGQEGPIGPPGPQGEQGVEGAPAAPVPQVAFSAALSLPRSEPGTVPFDRVLLNDGGYYDPETGVFTAPLAGRYLLSAVLTGHRHEKVEAVLSRSNQGVARVDSGGYEPEGLENKPVAESQPSPGTLGVFSLILPLQAGDTVCVDLVMGQLAHSEEPLTIFSGALLYGDPELEHA

SEQ ID NO: 26920 - protein, 347 aa, Homo sapiens
  Payload ID: 5302
  Gene Symbol: EMILIN1
  Gene Name: elastin microfibril interfacer 1
  ENSP ID: ENSP00000411201
  MOD_RES (1)..(1): Any amino acid
XADLGATKDRIISEINRLQQEATEHATESEERFRGLEEGQAQAGQCPSLEGRLGRLEGVCERLDTVAGGLQGLREGLSRHVAGLWAGLRETNTTSQMQAALLEKLVGGQAGLGRRLGALNSSLQLLEDRLHQLSLKDLTGEGTKGPAGEAGPPGPPGLQGPPGPAGPPGSPGKDGQEGPIGPPGPQGEQGVEGAPAAPVPQVAFSAALSLPRSEPGTVPFDRVLLNDGGYYDPETGVFTAPLAGRYLLSAVLTGHRHEKVEAVLSRSNQGVARVDSGGYEPEGLENKPVAESQPSPGTLGVFSLILPLQAGDTVCVDLVMGQLAHSEEPLTIFSGALLYGDPELEHA

SEQ ID NO: 26921 - protein, 1053 aa, Homo sapiens
  Payload ID: 5303
  Gene Symbol: EMILIN2
  Gene Name: elastin microfibril interfacer 2
  Uniprot ID: Q9BXX0
  ENSP ID: ENSP00000254528
MWQPRRPWPRVPWRWALALLALVGAGLCHAGPQPGYPARPSARNKNWCAYIVNKNVSCSVLEGSESFIQAQYNCAWNQMPCPSALVYRVNFRPRYVTRYKTVTQLEWRCCPGFRGGDCQEGPKDPVKTLRPTPARPRNSLKKATDNEPSQFSEPRKTLSPTGTAQPSWGVDPKEGPQELQEKKIQVLEEKVLRLTRTVLDLQSSLAGVSENLKHATQDDASRTRAPGLSSQHPKPDTTVSGDTETGQSPGVFNTKESGMKDIKSELAEVKDTLKNKSDKLEELDGKVKGYEGQLRQLQEAAQGPTVTMTTNELYQAYVDSKIDALREELMEGMDRKLADLKNSCEYKLTGLQQQCDDYGSSYLGVIELIGEKETSLRKEINNLRARLQEPSAQANCCDSEKNGDIGQQIKTLDQKIERVAEATRMLNGRLDNEFDRLIVPEPDVDFDAKWNELDARINVTEKNAEEHCFYIEETLRGAINGEVGDLKQLVDQKIQSLEDRLGSVLLQMTNNTGAELSPPGAAALPGVSGSGDERVMMELNHLKDKVQVVEDICLLNIQGKPHGMEGALPNREDRAVRDSLHLLKSLNDTMHRKFQETEQTIQKLQQDFSFLYSQLNHTENDVTHLQKEMSNCRAGENAGMGRFTKVGEQERTVDTLPSPQHPVAHCCSQLEERWQRLQSQVISELDACKECTQGVQREVSMVEGRVSHMEKTCSKLDSISGNLQRIKEGLNKHVSSLWNCVRQMNGTLRSHSRDISGLKNSVQQFYSHVFQISTDLQDLVKFQPSAKAPSPPPPAEAPKEPLQPEPAPPRPSGPATAEDPGRRPVLPQRPPEERPPQPPGSTGVIAETGQAGPPAGAGVSGRGLPRGVDGQTGSGTVPGAEGFAGAPGYPKSPPVASPGAPVPSLVSFSAGLTQKPFPSDGGVVLFNKVLVNDGDVYNPSTGVFTAPYDGRYLITATLTPERDAYVEAVLSVSNASVAQLHTAGYRREFLEYHRPPGALHTCGGPGAFHLIVHLKAGDAVNVVVTGGKLAHTDFDEMYSTFSGVFLYPFLSHL

SEQ ID NO: 26922 - protein, 766 aa, Homo sapiens
  Payload ID: 5304
  Gene Symbol: EMILIN3
  Gene Name: elastin microfibril interfacer 3
  Uniprot ID: Q9NT22
  ENSP ID: ENSP00000332806
MGRRRLLVWLCAVAALLSGAQARGTPLLARPAPPGASRYSLYTTGWRPRLRPGPHKALCAYVVHRNVTCILQEGAESYVKAEYRQCRWGPKCPGTVTYRTVLRPKYKVGYKTVTDLAWRCCPGFTGKRCPEHLTDHGAASPQLEPEPQIPSGQLDPGPRPPSYSRAAPSPHGRKGPGLFGERLERLEGDVQRLAQTYGTLSGLVASHEDPNRMTGGPRAPAVPVGFGVIPEGLVGPGDRARGPLTPPLDEILSKVTEVSNTLQTKVQLLDKVHGLALGHEAHLQRLREAPPSPLTSLALLEEYVDRRLHRLWGSLLDGFEQKLQGVQSECDLRVQEVRRQCEEGQAASRRLHQSLDGRELALRQELSQLGSQLQGLSVSGRGSCCGQLALINARMDGLERALQAVTETQRGPGAPAGDELTRLSAAMLEGGVDGLLEGLETLNGTEGGARGCCLRLDMGGWGVGGFGTMLEERVQSLEERLATLAGELSHDSASPGRSARPLVQTELAVLEQRLVSLETSCTPSTTSAILDSLVAEVKAWQSRSEALLRQVASHAALLQQLNGTVAEVQGQLAEGTGSSLQGEITLLKVNLNSVSKSLTGLSDSVSQYSDAFLAANTSLDERERKVEAEVQAIQEQVSSQGSRLQAGHRQVLNLRGELEQLKAGVAKVASGLSRCQDTAQKLQHTVGHFDQRVAQVEGACRRLGLLAAGLDSLPTEPLRPREGLWSHVDQLNRTLAQHTQDIARLRDDLLDCQAQLAEQVRPGQAN

SEQ ID NO: 26923 - protein, 346 aa, Homo sapiens
  Payload ID: 5305
  Gene Symbol: ELAVL2
  Gene Name: ELAV like neuron-specific RNA binding protein 2
  Uniprot ID: Q12926
  ENSP ID: ENSP00000223951
METQLSNGPTCNNTANGPTTINNNCSSPVDSGNTEDSKTNLIVNYLPQNMTQEELKSLFGSIGEIESCKLVRDKITGQSLGYGFVNYIDPKDAEKAINTLNGLRLQTKTIKVSYARPSSASIRDANLYVSGLPKTMTQKELEQLFSQYGRIITSRILVDQVTGISRGVGFIRFDKRIEAEEAIKGLNGQKPPGATEPITVKFANNPSQKTNQAILSQLYQSPNRRYPGPLAQQAQRFRFSPMTIDGMTSLAGINIPGHPGTGWCIFVYNLAPDADESILWQMFGPFGAVTNVKVIRDFNTNKCKGFGFVTMTNYDEAAMAIASLNGYRLGDRVLQVSFKTNKTHKA

SEQ ID NO: 26924 - protein, 389 aa, Homo sapiens
  Payload ID: 5305
  Gene Symbol: ELAVL2
  Gene Name: ELAV like neuron-specific RNA binding protein 2
  ENSP ID: ENSP00000369453
MAVRLCDVASLLRSGSWAAEPWTGQVIAAMETQLSNGPTCNNTANGPTTINNNCSSPVDSGNTEDSKTNLIVNYLPQNMTQEELKSLFGSIGEIESCKLVRDKITGQSLGYGFVNYIDPKDAEKAINTLNGLRLQTKTIKVSYARPSSASIRDANLYVSGLPKTMTQKELEQLFSQYGRIITSRILVDQVTGISRGVGFIRFDKRIEAEEAIKGLNGQKPPGATEPITVKFANNPSQKTNQAILSQLYQSPNRRYPGPLAQQAQRFRLDNLLNMAYGVKSRFSPMTIDGMTSLAGINIPGHPGTGWCIFVYNLAPDADESILWQMFGPFGAVTNVKVIRDFNTNKCKGFGFVTMTNYDEAAMAIASLNGYRLGDRVLQVSFKTNKTHKA

SEQ ID NO: 26925 - protein, 359 aa, Homo sapiens
  Payload ID: 5305
  Gene Symbol: ELAVL2
  Gene Name: ELAV like neuron-specific RNA binding protein 2
  Uniprot ID: Q12926
  ENSP ID: ENSP00000369460
METQLSNGPTCNNTANGPTTINNNCSSPVDSGNTEDSKTNLIVNYLPQNMTQEELKSLFGSIGEIESCKLVRDKITGQSLGYGFVNYIDPKDAEKAINTLNGLRLQTKTIKVSYARPSSASIRDANLYVSGLPKTMTQKELEQLFSQYGRIITSRILVDQVTGISRGVGFIRFDKRIEAEEAIKGLNGQKPPGATEPITVKFANNPSQKTNQAILSQLYQSPNRRYPGPLAQQAQRFRLDNLLNMAYGVKRFSPMTIDGMTSLAGINIPGHPGTGWCIFVYNLAPDADESILWQMFGPFGAVTNVKVIRDFNTNKCKGFGFVTMTNYDEAAMAIASLNGYRLGDRVLQVSFKTNKTHKA

SEQ ID NO: 26926 - protein, 359 aa, Homo sapiens; identical to SEQ ID NO: 26925
  Payload ID: 5305
  Gene Symbol: ELAVL2
  Gene Name: ELAV like neuron-specific RNA binding protein 2
  Uniprot ID: Q12926
  ENSP ID: ENSP00000380479

SEQ ID NO: 26927 - protein, 90 aa, Homo sapiens
  Payload ID: 5305
  Gene Symbol: ELAVL2
  Gene Name: ELAV like neuron-specific RNA binding protein 2
  ENSP ID: ENSP00000391757
MTQKELEQLFSQYGRIITSRILVDQVTGISRGVGFIRFDKRIEAEEAIKGLNGQKPPGATEPITVKFANNPSQKTNQAILSQLYQSPNRR

SEQ ID NO: 26928 - protein, 189 aa, Homo sapiens
  Payload ID: 5305
  Gene Symbol: ELAVL2
  Gene Name: ELAV like neuron-specific RNA binding protein 2
  ENSP ID: ENSP00000412602
METQLSNGPTCNNTANGPTTINNNCSSPVDSGNTEDSKTNLIVNYLPQNMTQEELKSLFGSIGEIESCKLVRDKITGQSLGYGFVNYIDPKDAEKAINTLNGLRLQTKTIKVSYARPSSASIRDANLYVSGLPKTMTQKELEQLFSQYGRIITSRILVDQVTGISRGVGFIRFDKRIEAEEAIKGLNGQ

SEQ ID NO: 26929 - protein, 359 aa, Homo sapiens; identical to SEQ ID NO: 26925
  Payload ID: 5305
  Gene Symbol: ELAVL2
  Gene Name: ELAV like neuron-specific RNA binding protein 2
  Uniprot ID: Q12926
  ENSP ID: ENSP00000440998

SEQ ID NO: 26930 - protein, 367 aa, Homo sapiens
  Payload ID: 5306
  Gene Symbol: ELAVL3
  Gene Name: ELAV like neuron-specific RNA binding protein 3
  Uniprot ID: Q14576
  ENSP ID: ENSP00000352162
MVTQILGAMESQVGGGPAGPALPNGPLLGTNGATDDSKTNLIVNYLPQNMTQDEFKSLFGSIGDIESCKLVRDKITGQSLGYGFVNYSDPNDADKAINTLNGLKLQTKTIKVSYARPSSASIRDANLYVSGLPKTMSQKEMEQLFSQYGRIITSRILVDQVTGVSRGVGFIRFDKRIEAEEAIKGLNGQKPLGAAEPITVKFANNPSQKTGQALLTHLYQSSARRYAGPLHHQTQRFRLDNLLNMAYGVKSPLSLIARFSPIAIDGMSGLAGVGLSGGAAGAGWCIFVYNLSPEADESVLWQLFGPFGAVTNVKVIRDFTTNKCKGFGFVTMTNYDEAAMAIASLNGYRLGERVLQVSFKTSKQHKA

SEQ ID NO: 26931 - protein, 360 aa, Homo sapiens
  Payload ID: 5306
  Gene Symbol: ELAVL3
  Gene Name: ELAV like neuron-specific RNA binding protein 3
  Uniprot ID: Q14576
  ENSP ID: ENSP00000390878
MVTQILGAMESQVGGGPAGPALPNGPLLGTNGATDDSKTNLIVNYLPQNMTQDEFKSLFGSIGDIESCKLVRDKITGQSLGYGFVNYSDPNDADKAINTLNGLKLQTKTIKVSYARPSSASIRDANLYVSGLPKTMSQKEMEQLFSQYGRIITSRILVDQVTGVSRGVGFIRFDKRIEAEEAIKGLNGQKPLGAAEPITVKFANNPSQKTGQALLTHLYQSSARRYAGPLHHQTQRFRLDNLLNMAYGVKRFSPIAIDGMSGLAGVGLSGGAAGAGWCIFVYNLSPEADESVLWQLFGPFGAVTNVKVIRDFTTNKCKGFGFVTMTNYDEAAMAIASLNGYRLGERVLQVSFKTSKQHKA

SEQ ID NO: 26932 - protein, 92 aa, Homo sapiens
  Payload ID: 5306
  Gene Symbol: ELAVL3
  Gene Name: ELAV like neuron-specific RNA binding protein 3
  ENSP ID: ENSP00000467314
MVTQILGAMESQVGGGPAGPALPNGPLLGTNGATDDSKTNLIVNYLPQNMTQDEFKSLFGSIGDIESCKLVRDKITDKAINTLNGLKLQTKT

SEQ ID NO: 26933 - protein, 402 aa, Homo sapiens
  Payload ID: 5307
  Gene Symbol: ELAVL4
  Gene Name: ELAV like neuron-specific RNA binding protein 4
  ENSP ID: ENSP00000349594
MLRYLQPLGCVHGGKGLTDMRLLLLREIVINESRNCSFMIISTMEPQVSNGPTSNTSNGPSSNNRNCPSPMQTGATTDDSKTNLIVNYLPQNMTQEEFRSLFGSIGEIESCKLVRDKITGQSLGYGFVNYIDPKDAEKAINTLNGLRLQTKTIKVSYARPSSASIRDANLYVSGLPKTMTQKELEQLFSQYGRIITSRILVDQVTGVSRGVGFIRFDKRIEAEEAIKGLNGQKPSGATEPITVKFANNPSQKSSQALLSQLYQSPNRRYPGPLHHQAQRFRLDNLLNMAYGVKRFSPITIDGMTSLVGMNIPGHTGTGWCIFVYNLSPDSDESVLWQLFGPFGAVNNVKVIRDFNTNKCKGFGFVTMTNYDEAAMAIASLNGYRLGDRVLQVSFKTNKAHKS

SEQ ID NO: 26934 - protein, 371 aa, Homo sapiens
  Payload ID: 5307
  Gene Symbol: ELAVL4
  Gene Name: ELAV like neuron-specific RNA binding protein 4
  ENSP ID: ENSP00000360884
MEWNGLKMIISTMEPQVSNGPTSNTSNGPSSNNRNCPSPMQTGATTDDSKTNLIVNYLPQNMTQEEFRSLFGSIGEIESCKLVRDKITGQSLGYGFVNYIDPKDAEKAINTLNGLRLQTKTIKVSYARPSSASIRDANLYVSGLPKTMTQKELEQLFSQYGRIITSRILVDQVTGVSRGVGFIRFDKRIEAEEAIKGLNGQKPSGATEPITVKFANNPSQKSSQALLSQLYQSPNRRYPGPLHHQAQRFRLDNLLNMAYGVKRFSPITIDGMTSLVGMNIPGHTGTGWCIFVYNLSPDSDESVLWQLFGPFGAVNNVKVIRDFNTNKCKGFGFVTMTNYDEAAMAIASLNGYRLGDRVLQVSFKTNKAHKS

SEQ ID NO: 26935 - protein, 385 aa, Homo sapiens
  Payload ID: 5307
  Gene Symbol: ELAVL4
  Gene Name: ELAV like neuron-specific RNA binding protein 4
  ENSP ID: ENSP00000360886
MEWNGLKMIISTMEPQVSNGPTSNTSNGPSSNNRNCPSPMQTGATTDDSKTNLIVNYLPQNMTQEEFRSLFGSIGEIESCKLVRDKITGQSLGYGFVNYIDPKDAEKAINTLNGLRLQTKTIKVSYARPSSASIRDANLYVSGLPKTMTQKELEQLFSQYGRIITSRILVDQVTGVSRGVGFIRFDKRIEAEEAIKGLNGQKPSGATEPITVKFANNPSQKSSQALLSQLYQSPNRRYPGPLHHQAQRFRLDNLLNMAYGVKRLMSGPVPPSACPPRFSPITIDGMTSLVGMNIPGHTGTGWCIFVYNLSPDSDESVLWQLFGPFGAVNNVKVIRDFNTNKCKGFGFVTMTNYDEAAMAIASLNGYRLGDRVLQVSFKTNKAHKS

SEQ ID NO: 26936 - protein, 380 aa, Homo sapiens
  Payload ID: 5307
  Gene Symbol: ELAVL4
  Gene Name: ELAV like neuron-specific RNA binding protein 4
  Uniprot ID: P26378
  ENSP ID: ENSP00000360888
MVMIISTMEPQVSNGPTSNTSNGPSSNNRNCPSPMQTGATTDDSKTNLIVNYLPQNMTQEEFRSLFGSIGEIESCKLVRDKITGQSLGYGFVNYIDPKDAEKAINTLNGLRLQTKTIKVSYARPSSASIRDANLYVSGLPKTMTQKELEQLFSQYGRIITSRILVDQVTGVSRGVGFIRFDKRIEAEEAIKGLNGQKPSGATEPITVKFANNPSQKSSQALLSQLYQSPNRRYPGPLHHQAQRFRLDNLLNMAYGVKRLMSGPVPPSACPPRFSPITIDGMTSLVGMNIPGHTGTGWCIFVYNLSPDSDESVLWQLFGPFGAVNNVKVIRDFNTNKCKGFGFVTMTNYDEAAMAIASLNGYRLGDRVLQVSFKTNKAHKS

SEQ ID NO: 26937 - protein, 366 aa, Homo sapiens
  Payload ID: 5307
  Gene Symbol: ELAVL4
  Gene Name: ELAV like neuron-specific RNA binding protein 4
  Uniprot ID: P26378
  ENSP ID: ENSP00000360889
MVMIISTMEPQVSNGPTSNTSNGPSSNNRNCPSPMQTGATTDDSKTNLIVNYLPQNMTQEEFRSLFGSIGEIESCKLVRDKITGQSLGYGFVNYIDPKDAEKAINTLNGLRLQTKTIKVSYARPSSASIRDANLYVSGLPKTMTQKELEQLFSQYGRIITSRILVDQVTGVSRGVGFIRFDKRIEAEEAIKGLNGQKPSGATEPITVKFANNPSQKSSQALLSQLYQSPNRRYPGPLHHQAQRFRLDNLLNMAYGVKRFSPITIDGMTSLVGMNIPGHTGTGWCIFVYNLSPDSDESVLWQLFGPFGAVNNVKVIRDFNTNKCKGFGFVTMTNYDEAAMAIASLNGYRLGDRVLQVSFKTNKAHKS

SEQ ID NO: 26938 - protein, 366 aa, Homo sapiens
  Payload ID: 5307
  Gene Symbol: ELAVL4
  Gene Name: ELAV like neuron-specific RNA binding protein 4
  Uniprot ID: P26378
  ENSP ID: ENSP00000360892
MEQIISTMEPQVSNGPTSNTSNGPSSNNRNCPSPMQTGATTDDSKTNLIVNYLPQNMTQEEFRSLFGSIGEIESCKLVRDKITGQSLGYGFVNYIDPKDAEKAINTLNGLRLQTKTIKVSYARPSSASIRDANLYVSGLPKTMTQKELEQLFSQYGRIITSRILVDQVTGVSRGVGFIRFDKRIEAEEAIKGLNGQKPSGATEPITVKFANNPSQKSSQALLSQLYQSPNRRYPGPLHHQAQRFRLDNLLNMAYGVKRFSPITIDGMTSLVGMNIPGHTGTGWCIFVYNLSPDSDESVLWQLFGPFGAVNNVKVIRDFNTNKCKGFGFVTMTNYDEAAMAIASLNGYRLGDRVLQVSFKTNKAHKS

SEQ ID NO: 26939 - protein, 369 aa, Homo sapiens
  Payload ID: 5307
  Gene Symbol: ELAVL4
  Gene Name: ELAV like neuron-specific RNA binding protein 4
  Uniprot ID: P26378
  ENSP ID: ENSP00000399939
MRLKNQIISTMEPQVSNGPTSNTSNGPSSNNRNCPSPMQTGATTDDSKTNLIVNYLPQNMTQEEFRSLFGSIGEIESCKLVRDKITGQSLGYGFVNYIDPKDAEKAINTLNGLRLQTKTIKVSYARPSSASIRDANLYVSGLPKTMTQKELEQLFSQYGRIITSRILVDQVTGVSRGVGFIRFDKRIEAEEAIKGLNGQKPSGATEPITVKFANNPSQKSSQALLSQLYQSPNRRYPGPLHHQAQRFRLDNLLNMAYGVKRFSPITIDGMTSLVGMNIPGHTGTGWCIFVYNLSPDSDESVLWQLFGPFGAVNNVKVIRDFNTNKCKGFGFVTMTNYDEAAMAIASLNGYRLGDRVLQVSFKTNKAHKS

SEQ ID NO: 26940 - protein, 326 aa, Homo sapiens
  Payload ID: 5308
  Gene Symbol: ELAVL1
  Gene Name: ELAV like RNA binding protein 1
  Uniprot ID: Q15717
  ENSP ID: ENSP00000264073
MSNGYEDHMAEDCRGDIGRTNLIVNYLPQNMTQDELRSLFSSIGEVESAKLIRDKVAGHSLGYGFVNYVTAKDAERAINTLNGLRLQSKTIKVSYARPSSEVIKDANLYISGLPRTMTQKDVEDMFSRFGRIINSRVLVDQTTGLSRGVAFIRFDKRSEAEEAITSFNGHKPPGSSEPITVKFAANPNQNKNVALLSQLYHSPARRFGGPVHHQAQRFRFSPMGVDHMSGLSGVNVPGNASSGWCIFIYNLGQDADEGILWQMFGPFGAVTNVKVIRDFNTNKCKGFGFVTMTNYEEAAMAIASLNGYRLGDKILQVSFKTNKSHK

SEQ ID NO: 26941 - protein, 326 aa, Homo sapiens; identical to SEQ ID NO: 26940
  Payload ID: 5308
  Gene Symbol: ELAVL1
  Gene Name: ELAV like RNA binding protein 1
  Uniprot ID: Q15717
  ENSP ID: ENSP00000385269

SEQ ID NO: 26942 - protein, 153 aa, Homo sapiens
  Payload ID: 5308
  Gene Symbol: ELAVL1
  Gene Name: ELAV like RNA binding protein 1
  ENSP ID: ENSP00000470727
MSNGYEDHMAEDCRGDIGRTNLIVNYLPQNMTQDELRSLFSSIGEVESAKLIRDKVAGHSLGYGFVNYVTAKDAERAINTLNGLRLQSKTIKVSYARPSSEVIKDANLYISGLPRTMTQKDVEDMFSRFGRIINSRVLVDQTTVIPQTRTAPK

SEQ ID NO: 26943 - protein, 133 aa, Homo sapiens
  Payload ID: 5308
  Gene Symbol: ELAVL1
  Gene Name: ELAV like RNA binding protein 1
  ENSP ID: ENSP00000471011
GLRLQSKTIKVSYARPSSEVIKDANLYISGLPRTMTQKDVEDMFSRFGRIINSRVLVDQTTESQILRKSQNRGPLPGFDTKEGPCSVAREQSASWDQNAFLEKEAFQVSLGQHLLMEGGSQHPSDGRWEPTPF

SEQ ID NO: 26944 - protein, 326 aa, Homo sapiens; identical to SEQ ID NO: 26940
  Payload ID: 5308
  Gene Symbol: ELAVL1
  Gene Name: ELAV like RNA binding protein 1
  Uniprot ID: Q15717
  ENSP ID: ENSP00000472197

SEQ ID NO: 26945 - protein, 64 aa, Homo sapiens
  Payload ID: 5309
  Gene Symbol: ETFA
  Gene Name: electron-transfer-flavoprotein, alpha polypeptide
  ENSP ID: ENSP00000267950
MFRAAAPGQLRRAASLLRFQSTLVIAEHANDSLAPITLNTITAATRLGGEVSCLVAGTKCDKRN

SEQ ID NO: 26946 - protein, 284 aa, Homo sapiens
  Payload ID: 5309
  Gene Symbol: ETFA
  Gene Name: electron-transfer-flavoprotein, alpha polypeptide
  Uniprot ID: P13804
  ENSP ID: ENSP00000399273
MFRAAAPGQLRRAVAQDLCKVAGIAKVLVAQHDVYKGLLPEELTPLILATQKQFNYTHICAGASAFGKNLLPRVAAKLEVAPISDIIAIKSPDTFVRTIYAGNALCTVKCDEKVKVFSVRGTSFDAAATSGGSASSEKASSTSPVEISEWLDQKLTKSDRPELTGAKVVVSGGRGLKSGENFKLLYDLADQLHAAVGASRAAVDAGFVPNDMQVGQTGKIVAPELYIAVGISGAIQHLAGMKDSKTIVAINKDPEAPIFQVADYGIVADLFKVVPEMTEILKKK

SEQ ID NO: 26947 - protein, 229 aa, Homo sapiens
  Payload ID: 5309
  Gene Symbol: ETFA
  Gene Name: electron-transfer-flavoprotein, alpha polypeptide
  ENSP ID: ENSP00000452659
MFRAAAPGQLRRANLLPRVAAKLEVAPISDIIAIKSPDTFVRTIYAGNALCTVKCDEKVKVFSVRGTSFDAAATSGGSASSEKASSTSPVEISEWLDQKLTKSDRPELTGAKVVVSGGRGLKSGENFKLLYDLADQLHAAVGASRAAVDAGFVPNDMQVGQTGKIVAPELYIAVGISGAIQHLAGMKDSKTIVAINKDPEAPIFQVADYGIVADLFKVVPEMTEILKKK

SEQ ID NO: 26948 - protein, 333 aa, Homo sapiens
  Payload ID: 5309
  Gene Symbol: ETFA
  Gene Name: electron-transfer-flavoprotein, alpha polypeptide
  Uniprot ID: P13804
  ENSP ID: ENSP00000452762
MFRAAAPGQLRRAASLLRFQSTLVIAEHANDSLAPITLNTITAATRLGGEVSCLVAGTKCDKVAQDLCKVAGIAKVLVAQHDVYKGLLPEELTPLILATQKQFNYTHICAGASAFGKNLLPRVAAKLEVAPISDIIAIKSPDTFVRTIYAGNALCTVKCDEKVKVFSVRGTSFDAAATSGGSASSEKASSTSPVEISEWLDQKLTKSDRPELTGAKVVVSGGRGLKSGENFKLLYDLADQLHAAVGASRAAVDAGFVPNDMQVGQTGKIVAPELYIAVGISGAIQHLAGMKDSKTIVAINKDPEAPIFQVADYGIVADLFKVVPEMTEILKKK

SEQ ID NO: 26949 - protein, 289 aa, Homo sapiens
  Payload ID: 5309
  Gene Symbol: ETFA
  Gene Name: electron-transfer-flavoprotein, alpha polypeptide
  ENSP ID: ENSP00000452777
MFRAAAPGQLRRAASLLRFQSTLVIAEHANDSLAPITLNTITAATRLGGEVSCLVAGTKCDKVAQDLCKVAGIAKVLVAQHDVYKGLLPEELTPLILATQKQFNYTHICAGASAFGKNLLPRVAAKLEVAPISDIIAIKSPDTFVRTIYAGNALCTVKCDEKVKVFSVRGTSFDAAATSGGSASSEKASSTSPVEISEWLDQKLTKSDRPELTGAKVVVSGDGVSLLLPRLECNGTISAHRHLHLPGSSDSPASASRVAGITGRGLKSGENFKLLYDLADQLHAAVGAS

SEQ ID NO: 26950 - protein, 45 aa, Homo sapiens
  Payload ID: 5309
  Gene Symbol: ETFA
  Gene Name: electron-transfer-flavoprotein, alpha polypeptide
  ENSP ID: ENSP00000452942
MFRAAAPGQLRRARRGFPMLPRLVSNSCPQVIHLPRPPKVLELQA

SEQ ID NO: 26951 - protein, 239 aa, Homo sapiens
  Payload ID: 5309
  Gene Symbol: ETFA
  Gene Name: electron-transfer-flavoprotein, alpha polypeptide
  ENSP ID: ENSP00000453017
  MOD_RES (1)..(1): Any amino acid
XAQDLCKVAGIAKVLVAQHDVYKGLLPEELTPLILATQKQFNYTHICAGASAFGKNLLPRVAAKLEVAPISDIIAIKSPDTFVRTIYAGNALCTVKCDEKVKVFSVRGTSFDAAATSGGSASSEKASSTSPVEISEWLDQKLTKSDRPELTGAKVVVSGVETEVLHVGQAGLEILTSGDPPTSASQSVGITGRGLKSGENFKLLYDLADQLHAAVGASRAAVDAGFVPNDMQVGQTGKI

SEQ ID NO: 26952 - protein, 73 aa, Homo sapiens
  Payload ID: 5309
  Gene Symbol: ETFA
  Gene Name: electron-transfer-flavoprotein, alpha polypeptide
  ENSP ID: ENSP00000453098
MQVGQTGKIVAPELYIAVGISGAIQHLAGMKDSKTIVAINKDPEAPIFQVADYGIVADLFKVVPEMTEILKKK

SEQ ID NO: 26953 - protein, 303 aa, Homo sapiens
  Payload ID: 5309
  Gene Symbol: ETFA
  Gene Name: electron-transfer-flavoprotein, alpha polypeptide
  ENSP ID: ENSP00000453345
MFRAAAPGQLRRAASLLRFQSTLVIAEHANDSLAPITLNTITAATRLGGEVSCLVAGTKCDKVAQDLCKVAGIAKVLVAQHDVYKGLLPEELTPLILATQKQFNYTHICAGASAFGKNLLPRVAAKLEVAPISDIIAIKSPDTFVRTIYAGNALCTVKCDEKVKVFSVRGTSFDAAATSGGSASSEKASSTSPVEISEWLDQKLTKSDRPELTGAKVVVSGVGASRAAVDAGFVPNDMQVGQTGKIVAPELYIAVGISGAIQHLAGMKDSKTIVAINKDPEAPIFQVADYGIVADLFKVVPEM

SEQ ID NO: 26954 - protein, 39 aa, Homo sapiens
  Payload ID: 5309
  Gene Symbol: ETFA
  Gene Name: electron-transfer-flavoprotein, alpha polypeptide
  ENSP ID: ENSP00000453422
MQVGQTGKIVAPELYIAVGISGAIQHLAGMKDSKHVSLD

SEQ ID NO: 26955 - protein, 45 aa, Homo sapiens; identical to SEQ ID NO: 26950
  Payload ID: 5309
  Gene Symbol: ETFA
  Gene Name: electron-transfer-flavoprotein, alpha polypeptide
  ENSP ID: ENSP00000453753

SEQ ID NO: 26956 - protein, 254 aa, Homo sapiens
  Payload ID: 5309
  Gene Symbol: ETFA
  Gene Name: electron-transfer-flavoprotein, alpha polypeptide
  ENSP ID: ENSP00000454194
  MOD_RES (1)..(1): Any amino acid
XATQKQFNYTHICAGASAFGKNLLPRVAAKLEVAPISDIIAIKSPDTFVRTIYAGNALCTVKCDEKVKVFSVRGTSFDAAATSGGSASSEKASSTSPVEISEWLDQKLTKSDRPELTGAKVVVSGGRGLKSGENFKLLYDLADQLHAAVGASRAAVDAGFVPNDMQVGQTGKIVAPELYIAVGISGAIQHLAGMKDSKTIVAINKDPEAPIFQVADYGIVADLFKPPWTALLCPSSHKAALHWKLQLQPLHCHD

SEQ ID NO: 26957 - protein, 46 aa, Homo sapiens
  Payload ID: 5309
  Gene Symbol: ETFA
  Gene Name: electron-transfer-flavoprotein, alpha polypeptide
  ENSP ID: ENSP00000458001
ELYIAVGISGAIQHLAGMKDSKLPGLYHVPILDILASSAHLSEEPL

SEQ ID NO: 26958 - protein, 255 aa, Homo sapiens
  Payload ID: 5310
  Gene Symbol: ETFB
  Gene Name: electron-transfer-flavoprotein, beta polypeptide
  Uniprot ID: P38117
  ENSP ID: ENSP00000311930
MAELRVLVAVKRVIDYAVKIRVKPDRTGVVTDGVKHSMNPFCEIAVEEAVRLKEKKLVKEVIAVSCGPAQCQETIRTALAMGADRGIHVEVPPAEAERLGPLQVARVLAKLAEKEKVDLVLLGKQAIDDDCNQTGQMTAGFLDWPQGTFASQVTLEGDKLKVEREIDGGLETLRLKLPAVVTADLRLNEPRYATLPNIMKAKKKKIEVIKPGDLGVDLTSKLSVISVEDPPQRTAGVKVETTEDLVAKLKEIGRI

SEQ ID NO: 26959 - protein, 346 aa, Homo sapiens
  Payload ID: 5310
  Gene Symbol: ETFB
  Gene Name: electron-transfer-flavoprotein, beta polypeptide
  Uniprot ID: P38117
  ENSP ID: ENSP00000346173
MYLSLWVTINTVNLRNTLSGLRGAVTTVGMIKSDVPGTQEWLDERRRQGDLPLPTNSNPVLSLELCDPGQGPAPFQAVVVLIQPGRGLALRPPPSCLFPPDPTPSPPAGQIRVKPDRTGVVTDGVKHSMNPFCEIAVEEAVRLKEKKLVKEVIAVSCGPAQCQETIRTALAMGADRGIHVEVPPAEAERLGPLQVARVLAKLAEKEKVDLVLLGKQAIDDDCNQTGQMTAGFLDWPQGTFASQVTLEGDKLKVEREIDGGLETLRLKLPAVVTADLRLNEPRYATLPNIMKAKKKKIEVIKPGDLGVDLTSKLSVISVEDPPQRTAGVKVETTEDLVAKLKEIGRI

SEQ ID NO: 26960 - protein, 178 aa, Homo sapiens
  Payload ID: 5310
  Gene Symbol: ETFB
  Gene Name: electron-transfer-flavoprotein, beta polypeptide
  ENSP ID: ENSP00000469628
MAELRVLVAVKRVIDYAVKIRVKPDRTGVVTDGVKHSMNPFCEIAVEEAVRLKEKKLVKEVIAVSCGPAQCQAIDDDCNQTGQMTAGFLDWPQGTFASQVTLEGDKLKVEREIDGGLETLRLKLPAVVTADLRLNEPRYATLPNIMKAKKKKIEVIKPGDLGVDLTSKLSVISVEDPP

SEQ ID NO: 26961 - protein, 570 aa, Homo sapiens
  Payload ID: 5311
  Gene Symbol: ETFDH
  Gene Name: electron-transferring-flavoprotein dehydrogenase
  Uniprot ID: Q16134
  ENSP ID: ENSP00000303552
MLVPLAKLSCLGVNMERFAEEADVVIVGAGPAGLSAAVRLKQLAVAHEKDIRVCLVEKAAQIGAHTLSGACLDPGAFKELFPDWKEKGAPLNTPVTEDRFGILTEKYRIPVPILPGLPMNNHGNYIVRLGHLVSWMGEQAEALGVEVYPGYAAAEVLFHDDGSVKGIATNDVGIQKDGAPKATFERGLELHAKVTIFAEGCHGHLAKQLYKKFDLRANCEPQTYGIGLKELWVIDEKNWKPGRVDHTVGWPLDRHTYGGSFLYHLNEGEPLVALGLVVGLDYQNPYLSPFREFQRWKHHPSIRPTLEGGKRIAYGARALNEGGFQSIPKLTFPGGLLIGCSPGFMNVPKIKGTHTAMKSGILAAESIFNQLTSENLQSKTIGLHVTEYEDNLKNSWVWKELYSVRNIRPSCHGVLGVYGGMIYTGIFYWILRGMEPWTLKHKGSDFERLKPAKDCTPIEYPKPDGQISFDLLSSVALSGTNHEHDQPAHLTLRDDSIPVNRNLSIYDGPEQRFCPAGVYEFVPVEQGDGFRLQINAQNCVHCKTCDIKDPSQNINWVVPEGGGGPAYNGM

SEQ ID NO: 26962 - protein, 164 aa, Homo sapiens
  Payload ID: 5311
  Gene Symbol: ETFDH
  Gene Name: electron-transferring-flavoprotein dehydrogenase
  ENSP ID: ENSP00000422735
MNNHGNYIVRLGHLVSWMGEQAEALGVEVYPGYAAAEVLFHDDGSVKGIATNDVGIQKDGAPKATFERGLELHAKVTIFAEGCHGHLAKQLYKKFDLRANCEPQTYGIGLKELWVIDEKNWKPGRVDHTVGWPLDRHTYGGSFLYHLNEGEPLVALGLVVGLDY

SEQ ID NO: 26963 - protein, 38 aa, Homo sapiens
  Payload ID: 5311
  Gene Symbol: ETFDH
  Gene Name: electron-transferring-flavoprotein dehydrogenase
  ENSP ID: ENSP00000425661
MLVPLAKLSCLDGLQLLLCLELLPIILFIPGIRTRDGK

SEQ ID NO: 26964 - protein, 617 aa, Homo sapiens
  Payload ID: 5311
  Gene Symbol: ETFDH
  Gene Name: electron-transferring-flavoprotein dehydrogenase
  Uniprot ID: Q16134
  ENSP ID: ENSP00000426638
MLVPLAKLSCLAYQCFHALKIKKNYLPLCATRWSSTSTVPRITTHYTIYPRDKDKRWEGVNMERFAEEADVVIVGAGPAGLSAAVRLKQLAVAHEKDIRVCLVEKAAQIGAHTLSGACLDPGAFKELFPDWKEKGAPLNTPVTEDRFGILTEKYRIPVPILPGLPMNNHGNYIVRLGHLVSWMGEQAEALGVEVYPGYAAAEVLFHDDGSVKGIATNDVGIQKDGAPKATFERGLELHAKVTIFAEGCHGHLAKQLYKKFDLRANCEPQTYGIGLKELWVIDEKNWKPGRVDHTVGWPLDRHTYGGSFLYHLNEGEPLVALGLVVGLDYQNPYLSPFREFQRWKHHPSIRPTLEGGKRIAYGARALNEGGFQSIPKLTFPGGLLIGCSPGFMNVPKIKGTHTAMKSGILAAESIFNQLTSENLQSKTIGLHVTEYEDNLKNSWVWKELYSVRNIRPSCHGVLGVYGGMIYTGIFYWILRGMEPWTLKHKGSDFERLKPAKDCTPIEYPKPDGQISFDLLSSVALSGTNHEHDQPAHLTLRDDSIPVNRNLSIYDGPEQRFCPAGVYEFVPVEQGDGFRLQINAQNCVHCKTCDIKDPSQNINWVVPEGGGGPAYNGM

SEQ ID NO: 26965 - protein, 83 aa, Homo sapiens
  Payload ID: 5312
  Gene Symbol: ELOF1
  Gene Name: ELF1 homolog, elongation factor 1
  Uniprot ID: P60002
  ENSP ID: ENSP00000252445
MGRRKSKRKPPPKKKMTGTLETQFTCPFCNHEKSCDVKMDRARNTGVISCTVCLEEFQTPITYLSEPVDVYSDWIDACEAANQ

SEQ ID NO: 26966 - protein, 104 aa, Homo sapiens
  Payload ID: 5312
  Gene Symbol: ELOF1
  Gene Name: ELF1 homolog, elongation factor 1
  ENSP ID: ENSP00000465765
MVRSRLTAVSASWVQAHPPADMGRRKSKRKPPPKKKMTGTLETQFTCPFCNHEKSCDVKMDRARNTGVISCTVCLEEFQTPITYLSEPVDVYSDWIDACEAANQ

SEQ ID NO: 26967 - protein, 14 aa, Homo sapiens
  Payload ID: 5312
  Gene Symbol: ELOF1
  Gene Name: ELF1 homolog, elongation factor 1
  ENSP ID: ENSP00000465973
MVRSRLTAVSASWV

SEQ ID NO: 26968 - protein, 120 aa, Homo sapiens
  Payload ID: 5312
  Gene Symbol: ELOF1
  Gene Name: ELF1 homolog, elongation factor 1
  ENSP ID: ENSP00000466665
MGRRKSKRKPPPKKKMTGTLETQFTCPFCNHEKSCDVKMDRARNTGVISCTVCLEEFQTPITCILGNLGFFQRVGRGLESGPCSSGPLCALVQGQSRPEEQVPPSDFCGVRRCRAGFQCQ

SEQ ID NO: 26969 - protein, 76 aa, Homo sapiens
  Payload ID: 5312
  Gene Symbol: ELOF1
  Gene Name: ELF1 homolog, elongation factor 1
  ENSP ID: ENSP00000466732
MGRRKSKRKPPPKKKMTGTLETQFTCPFCNHEKSCDVKMDRARNTGVISCTVCLEEFQTPITSQICQNPWMCTVIG

SEQ ID NO: 26970 - protein, 83 aa, Homo sapiens; identical to SEQ ID NO: 26965
  Payload ID: 5312
  Gene Symbol: ELOF1
  Gene Name: ELF1 homolog, elongation factor 1
  Uniprot ID: P60002
  ENSP ID: ENSP00000467264

SEQ ID NO: 26971 - protein, 90 aa, Homo sapiens
  Payload ID: 5312
  Gene Symbol: ELOF1
  Gene Name: ELF1 homolog, elongation factor 1
  ENSP ID: ENSP00000467330
MAHPPADMGRRKSKRKPPPKKKMTGTLETQFTCPFCNHEKSCDVKMDRARNTGVISCTVCLEEFQTPITYLSEPVDVYSDWIDACEAANQ

SEQ ID NO: 26972 - protein, 114 aa, Homo sapiens
  Payload ID: 5312
  Gene Symbol: ELOF1
  Gene Name: ELF1 homolog, elongation factor 1
  ENSP ID: ENSP00000467664
MGRRKSKRKPPPKKKMTGTLETQFTCPFCNHEKSCDVKMDRARNTGVISCTVCLEEFQTPITSSAHPLLSVMSWVLRLPGHQKKERGPEALTFGRWPGGPCDQPFKPPSVLFSQ

SEQ ID NO: 26973 - protein, 83 aa, Homo sapiens; identical to SEQ ID NO: 26965
  Payload ID: 5312
  Gene Symbol: ELOF1
  Gene Name: ELF1 homolog, elongation factor 1
  Uniprot ID: P60002
  ENSP ID: ENSP00000467914

SEQ ID NO: 26974 - protein, 428 aa, Homo sapiens
  Payload ID: 5313
  Gene Symbol: ELK1
  Gene Name: ELK1, member of ETS oncogene family
  Uniprot ID: P19419
  ENSP ID: ENSP00000247161
MDPSVTLWQFLLQLLREQGNGHIISWTSRDGGEFKLVDAEEVARLWGLRKNKTNMNYDKLSRALRYYYDKNIIRKVSGQKFVYKFVSYPEVAGCSTEDCPPQPEVSVTSTMPNVAPAAIHAAPGDTVSGKPGTPKGAGMAGPGGLARSSRNEYMRSGLYSTFTIQSLQPQPPPHPRPAVVLPSAAPAGAAAPPSGSRSTSPSPLEACLEAEEAGLPLQVILTPPEAPNLKSEELNVEPGLGRALPPEVKVEGPKEELEVAGERGFVPETTKAEPEVPPQEGVPARLPAVVMDTAGQAGGHAASSPEISQPQKGRKPRDLELPLSPSLLGGPGPERTPGSGSGSGLQAPGPALTPSLLPTHTLTPVLLTPSSLPPSIHFWSTLSPIAPRSPAKLSFQFPSSGSAQVHIPSISVDGLSTPVVLSPGPQKP

SEQ ID NO: 26975 - protein, 95 aa, Homo sapiens
  Payload ID: 5313
  Gene Symbol: ELK1
  Gene Name: ELK1, member of ETS oncogene family
  Uniprot ID: P19419
  ENSP ID: ENSP00000345585
MDPSVTLWQFLLQLLREQGNGHIISWTSRDGGEFKLVDAEEVARLWGLRKNKTNMNYDKLSRALRYYYDKNIIRKVSGQKFVYKFVSYPESHCAP

SEQ ID NO: 26976 - protein, 428 aa, Homo sapiens; identical to SEQ ID NO: 26974
  Payload ID: 5313
  Gene Symbol: ELK1
  Gene Name: ELK1, member of ETS oncogene family
  Uniprot ID: P19419
  ENSP ID: ENSP00000366182

SEQ ID NO: 26977 - protein, 407 aa, Homo sapiens
  Payload ID: 5314
  Gene Symbol: ELK3
  Gene Name: ELK3, ETS-domain protein (SRF accessory protein 2)
  Uniprot ID: P41970
  ENSP ID: ENSP00000228741
MESAITLWQFLLQLLLDQKHEHLICWTSNDGEFKLLKAEEVAKLWGLRKNKTNMNYDKLSRALRYYYDKNIIKKVIGQKFVYKFVSFPEILKMDPHAVEISRESLLLQDSDCKASPEGREAHKHGLAALRSTSRNEYIHSGLYSSFTINSLQNPPDAFKAIKTEKLEEPPEDSPPVEEVRTVIRFVTNKTDKHVTRPVVSLPSTSEAAAASAFLASSVSAKISSLMLPNAASISSASPFSSRSPSLSPNSPLPSEHRSLFLEAACHDSDSLEPLNLSSGSKTKSPSLPPKAKKPKGLEISAPPLVLSGTDIGSIALNSPALPSGSLTPAFFTAQTPNGLLLTPSPLLSSIHFWSSLSPVAPLSPARLQGPSTLFQFPTLLNGHMPVPIPSLDRAASPVLLSSNSQKS

SEQ ID NO: 26978 - protein, 38 aa, Homo sapiens
  Payload ID: 5314
  Gene Symbol: ELK3
  Gene Name: ELK3, ETS-domain protein (SRF accessory protein 2)
  ENSP ID: ENSP00000446806
MESAITLWQFLLQLLLDQKHEHLICWTSNDGEFKLLKA

SEQ ID NO: 26979 - protein, 159 aa, Homo sapiens
  Payload ID: 5314
  Gene Symbol: ELK3
  Gene Name: ELK3, ETS-domain protein (SRF accessory protein 2)
  ENSP ID: ENSP00000447857
MESAITLWQFLLQLLLDQKHEHLICWTSNDGEFKLLKAEEVAKLWGLRKNKTNMNYDKLSRALRYYYDKNIIKKVIGQKFVYKFVSFPEILKMDPHAVEISRESLLLQDSDCKASPEGREAHKHGLAALRSTSRNEYIHSGLYSSFTINSLQNPPDAFK

SEQ ID NO: 26980 - protein, 102 aa, Homo sapiens
  Payload ID: 5314
  Gene Symbol: ELK3
  Gene Name: ELK3, ETS-domain protein (SRF accessory protein 2)
  ENSP ID: ENSP00000449420
  MOD_RES (1)..(1): Any amino acid
XRNEYIHSGLYSSFTINSLQNPPDAFKAIKTEKLEEPPEDSPPVEEVRTVIRPKNPKAWKSQRPRWCSPAPTSAPSPSTAQPSPRDPSPQPSSPHRHQMDCF

SEQ ID NO: 26981 - protein, 142 aa, Homo sapiens
  Payload ID: 5314
  Gene Symbol: ELK3
  Gene Name: ELK3, ETS-domain protein (SRF accessory protein 2)
  ENSP ID: ENSP00000449430
MESAITLWQFLLQLLLDQKHEHLICWTSNDGEFKLLKAEEVAKLWGLRKNKTNMNYDKLSRALRYYYDKTPNGLLLTPSPLLSSIHFWSSLSPVAPLSPARLQGPSTLFQFPTLLNGHMPVPIPSLDRAASPVLLSSNSQKS

SEQ ID NO: 26982 - protein, 405 aa, Homo sapiens
  Payload ID: 5315
  Gene Symbol: ELK4
  Gene Name: ELK4, ETS-domain protein (SRF accessory protein 1)
  Uniprot ID: P28324
  ENSP ID: ENSP00000289703
MDSAITLWQFLLQLLQKPQNKHMICWTSNDGQFKLLQAEEVARLWGIRKNKPNMNYDKLSRALRYYYVKNIIKKVNGQKFVYKFVSYPEILNMDPMTVGRIEGDCESLNFSEVSSSSKDVENGGKDKPPQPGAKTSSRNDYIHSGLYSSFTLNSLNSSNVKLFKLIKTENPAEKLAEKKSPQEPTPSVIKFVTTPSKKPPVEPVAATISIGPSISPSSEETIQALETLVSPKLPSLEAPTSASNVMTAFATTPPISSIPPLQEPPRTPSPPLSSHPDIDTDIDSVASQPMELPENLSLEPKDQDSVLLEKDKVNNSSRSKKPKGLELAPTLVITSSDPSPLGILSPSLPTASLTPAFFSQVACSLFMVSPLLSFICPFKQIQNLYTQVCFLLLRFVLERLCVTVM

SEQ ID NO: 26983 - protein, 431 aa, Homo sapiens
  Payload ID: 5315
  Gene Symbol: ELK4
  Gene Name: ELK4, ETS-domain protein (SRF accessory protein 1)
  Uniprot ID: P28324
  ENSP ID: ENSP00000350681
MDSAITLWQFLLQLLQKPQNKHMICWTSNDGQFKLLQAEEVARLWGIRKNKPNMNYDKLSRALRYYYVKNIIKKVNGQKFVYKFVSYPEILNMDPMTVGRIEGDCESLNFSEVSSSSKDVENGGKDKPPQPGAKTSSRNDYIHSGLYSSFTLNSLNSSNVKLFKLIKTENPAEKLAEKKSPQEPTPSVIKFVTTPSKKPPVEPVAATISIGPSISPSSEETIQALETLVSPKLPSLEAPTSASNVMTAFATTPPISSIPPLQEPPRTPSPPLSSHPDIDTDIDSVASQPMELPENLSLEPKDQDSVLLEKDKVNNSSRSKKPKGLELAPTLVITSSDPSPLGILSPSLPTASLTPAFFSQTPIILTPSPLLSSIHFWSTLSPVAPLSPARLQGANTLFQFPSVLNSHGPFTLSGLDGPSTPGPFSPDLQKT

SEQ ID NO: 26984 - protein, 431 aa, Homo sapiens; identical to SEQ ID NO: 26983
  Payload ID: 5315
  Gene Symbol: ELK4
  Gene Name: ELK4, ETS-domain protein (SRF accessory protein 1)
  Uniprot ID: P28324
  ENSP ID: ENSP00000483628

SEQ ID NO: 26985 - protein, 144 aa, Homo sapiens
  Payload ID: 5315
  Gene Symbol: ELK4
  Gene Name: ELK4, ETS-domain protein (SRF accessory protein 1)
  ENSP ID: ENSP00000484946
MDSAITLWQFLLQLLQKPQNKHMICWTSNDGQFKLLQAEEVARLWGIRKNKPNMNYDKLSRALRYYYVKNIIKKVNGQKFVYKFVSYPEILNMDPMTVGRIEGDCESLNFSEVSSSSKDVENGGKDKPPQPGAKTSSRNDYIHS

SEQ ID NO: 26986 - protein, 948 aa, Homo sapiens
  Payload ID: 5316
  Gene Symbol: ERC1
  Gene Name: ELKS/RAB6-interacting/CAST family member 1
  Uniprot ID: Q8IUD2
  ENSP ID: ENSP00000340054
MYGSARSVGKVEPSSQSPGRSPRLPRSPRLGHRRTNSTGGSSGSSVGGGSGKTLSMENIQSLNAAYATSGPMYLSDHENVGSETPKSTMTLGRSGGRLPYGVRMTAMGSSPNIASSGVASDTIAFGEHHLPPVSMASTVPHSLRQARDNTIMDLQTQLKEVLRENDLLRKDVEVKESKLSSSMNSIKTFWSPELKKERALRKDEASKITIWKEQYRVVQEENQHMQMTIQALQDELRIQRDLNQLFQQDSSSRTGEPCVAELTEENFQRLHAEHERQAKELFLLRKTLEEMELRIETQKQTLNARDESIKKLLEMLQSKGLSAKATEEDHERTRRLAEAEMHVHHLESLLEQKEKENSMLREEMHRRFENAPDSAKTKALQTVIEMKDSKISSMERGLRDLEEEIQMLKSNGALSTEEREEEMKQMEVYRSHSKFMKNKIGQVKQELSRKDTELLALQTKLETLTNQFSDSKQHIEVLKESLTAKEQRAAILQTEVDALRLRLEEKETMLNKKTKQIQDMAEEKGTQAGEIHDLKDMLDVKERKVNVLQKKIENLQEQLRDKEKQMSSLKERVKSLQADTTNTDTALTTLEEALAEKERTIERLKEQRDRDEREKQEEIDNYKKDLKDLKEKVSLLQGDLSEKEASLLDLKEHASSLASSGLKKDSRLKTLEIALEQKKEECLKMESQLKKAHEAALEARASPEMSDRIQHLEREITRYKDESSKAQAEVDRLLEILKEVENEKNDKDKKIAELESLTSRQVKDQNKKVANLKHKEQVEKKKSAQMLEEARRREDNLNDSSQQLQVEELLMAMEKVKQELESMKAKLSSTQQSLAEKETHLTNLRAERRKHLEEVLEMKQEALLAAISEKDANIALLELSSSKKKTQEEVAALKREKDRLVQQLKQQTQNRMKLMADNYEDDHFKSSHSNQTNHKPSPDQDEEEGIWA

SEQ ID NO: 26987 - protein, 1086 aa, Homo sapiens
  Payload ID: 5316
  Gene Symbol: ERC1
  Gene Name: ELKS/RAB6-interacting/CAST family member 1
  ENSP ID: ENSP00000347621
MYGSARSVGKVEPSSQSPGRSPRLPRSPRLGHRRTNSTGGSSGSSVGGGSGKTLSMENIQSLNAAYATSGPMYLSDHENVGSETPKSTMTLGRSGGRLPYGVRMTAMGSSPNIASSGVASDTIAFGEHHLPPVSMASTVPHSLRQARDNTIMDLQTQLKEVLRENDLLRKDVEVKESKLSSSMNSIKTFWSPELKKERALRKDEASKITIWKEQYRVVQEENQHMQMTIQALQDELRIQRDLNQLFQQDSSSRTGEPCVAELTEENFQRLHAEHERQAKELFLLRKTLEEMELRIETQKQTLNARDESIKKLLEMLQSKGLSAKATEEDHERTRRLAEAEMHVHHLESLLEQKEKENSMLREEMHRRFENAPDSAKTKALQTVIEMKDSKISSMERGLRDLEEEIQMLKSNGALSTEEREEEMKQMEVYRSHSKFMKNKVEQLKEELSSKEAQWEELKKKAAGLQAEIGQVKQELSRKDTELLALQTKLETLTNQFSDSKQHIEVLKESLTAKEQRAAILQTEVDALRLRLEEKETMLNKKTKQIQDMAEEKGTQAGEIHDLKDMLDVKERKVNVLQKKIENLQEQLRDKEKQMSSLKERVKSLQADTTNTDTALTTLEEALAEKERTIERLKEQRDRDEREKQEEIDNYKKDLKDLKEKVSLLQGDLSEKEASLLDLKEHASSLASSGLKKDSRLKTLEIALEQKKEECLKMESQLKKAHEAALEARASPEMSDRIQHLEREITRYKDESSKAQAEVDRLLEILKEVENEKNDKDKKIAELERQVKDQNKKVANLKHKEQVEKKKSAQMLEEARRREDNLNDSSQQLQDSLRKKDDRIEELEEALRESVQITAEREMVLAQEESARTNAEKQVEELLMAMEKVKQELESMKAKLSSTQQSLAEKETHLTNLRAERRKHLEEVLEMKQEALLAAISEKDANIALLELSSSKKKTQEEVAALKREKDRLVQQLKQQTQNRMKLMADNYEDDHFKSSHSNQTNHKPSPDQIIQPLLELDQNRSKLKLYIGHLTTLCHDRDPLILRGLTPPASYNLDDDQAAWENELQKMTRGQNPLHPKAMEKLPFFM

SEQ ID NO: 26988 - protein, 1116 aa, Homo sapiens
  Payload ID: 5316
  Gene Symbol: ERC1
  Gene Name: ELKS/RAB6-interacting/CAST family member 1
  Uniprot ID: Q8IUD2
  ENSP ID: ENSP00000354158
MYGSARSVGKVEPSSQSPGRSPRLPRSPRLGHRRTNSTGGSSGSSVGGGSGKTLSMENIQSLNAAYATSGPMYLSDHENVGSETPKSTMTLGRSGGRLPYGVRMTAMGSSPNIASSGVASDTIAFGEHHLPPVSMASTVPHSLRQARDNTIMDLQTQLKEVLRENDLLRKDVEVKESKLSSSMNSIKTFWSPELKKERALRKDEASKITIWKEQYRVVQEENQHMQMTIQALQDELRIQRDLNQLFQQDSSSRTGEPCVAELTEENFQRLHAEHERQAKELFLLRKTLEEMELRIETQKQTLNARDESIKKLLEMLQSKGLSAKATEEDHERTRRLAEAEMHVHHLESLLEQKEKENSMLREEMHRRFENAPDSAKTKALQTVIEMKDSKISSMERGLRDLEEEIQMLKSNGALSTEEREEEMKQMEVYRSHSKFMKNKVEQLKEELSSKEAQWEELKKKAAGLQAEIGQVKQELSRKDTELLALQTKLETLTNQFSDSKQHIEVLKESLTAKEQRAAILQTEVDALRLRLEEKETMLNKKTKQIQDMAEEKGTQAGEIHDLKDMLDVKERKVNVLQKKIENLQEQLRDKEKQMSSLKERVKSLQADTTNTDTALTTLEEALAEKERTIERLKEQRDRDEREKQEEIDNYKKDLKDLKEKVSLLQGDLSEKEASLLDLKEHASSLASSGLKKDSRLKTLEIALEQKKEECLKMESQLKKAHEAALEARASPEMSDRIQHLEREITRYKDESSKAQAEVDRLLEILKEVENEKNDKDKKIAELERQVKDQNKKVANLKHKEQVEKKKSAQMLEEARRREDNLNDSSQQLQDSLRKKDDRIEELEEALRESVQITAEREMVLAQEESARTNAEKQVEELLMAMEKVKQELESMKAKLSSTQQSLAEKETHLTNLRAERRKHLEEVLEMKQEALLAAISEKDANIALLELSSSKKKTQEEVAALKREKDRLVQQLKQQTQNRMKLMADNYEDDHFKSSHSNQTNHKPSPDQIIQPLLELDQNRSKLKLYIGHLTTLCHDRDPLILRGLTPPASYNLDDDQAAWENELQKMTRGQLQDELEKGERDNAELQEFANAILQQIADHCPDILEQVVNALEESS

SEQ ID NO: 26989 - protein, 1088 aa, Homo sapiens
  Payload ID: 5316
  Gene Symbol: ERC1
  Gene Name: ELKS/RAB6-interacting/CAST family member 1
  Uniprot ID: Q8IUD2
  ENSP ID: ENSP00000380386
MYGSARSVGKVEPSSQSPGRSPRLPRSPRLGHRRTNSTGGSSGSSVGGGSGKTLSMENIQSLNAAYATSGPMYLSDHENVGSETPKSTMTLGRSGGRLPYGVRMTAMGSSPNIASSGVASDTIAFGEHHLPPVSMASTVPHSLRQARDNTIMDLQTQLKEVLRENDLLRKDVEVKESKLSSSMNSIKTFWSPELKKERALRKDEASKITIWKEQYRVVQEENQHMQMTIQALQDELRIQRDLNQLFQQDSSSRTGEPCVAELTEENFQRLHAEHERQAKELFLLRKTLEEMELRIETQKQTLNARDESIKKLLEMLQSKGLSAKATEEDHERTRRLAEAEMHVHHLESLLEQKEKENSMLREEMHRRFENAPDSAKTKALQTVIEMKDSKISSMERGLRDLEEEIQMLKSNGALSTEEREEEMKQMEVYRSHSKFMKNKIGQVKQELSRKDTELLALQTKLETLTNQFSDSKQHIEVLKESLTAKEQRAAILQTEVDALRLRLEEKETMLNKKTKQIQDMAEEKGTQAGEIHDLKDMLDVKERKVNVLQKKIENLQEQLRDKEKQMSSLKERVKSLQADTTNTDTALTTLEEALAEKERTIERLKEQRDRDEREKQEEIDNYKKDLKDLKEKVSLLQGDLSEKEASLLDLKEHASSLASSGLKKDSRLKTLEIALEQKKEECLKMESQLKKAHEAALEARASPEMSDRIQHLEREITRYKDESSKAQAEVDRLLEILKEVENEKNDKDKKIAELERQVKDQNKKVANLKHKEQVEKKKSAQMLEEARRREDNLNDSSQQLQDSLRKKDDRIEELEEALRESVQITAEREMVLAQEESARTNAEKQVEELLMAMEKVKQELESMKAKLSSTQQSLAEKETHLTNLRAERRKHLEEVLEMKQEALLAAISEKDANIALLELSSSKKKTQEEVAALKREKDRLVQQLKQQTQNRMKLMADNYEDDHFKSSHSNQTNHKPSPDQIIQPLLELDQNRSKLKLYIGHLTTLCHDRDPLILRGLTPPASYNLDDDQAAWENELQKMTRGQLQDELEKGERDNAELQEFANAILQQIADHCPDILEQVVNALEESS

SEQ ID NO: 26990 - protein, 992 aa, Homo sapiens
  Payload ID: 5316
  Gene Symbol: ERC1
  Gene Name: ELKS/RAB6-interacting/CAST family member 1
  Uniprot ID: Q8IUD2
  ENSP ID: ENSP00000410064
MYGSARSVGKVEPSSQSPGRSPRLPRSPRLGHRRTNSTGGSSGSSVGGGSGKTLSMENIQSLNAAYATSGPMYLSDHENVGSETPKSTMTLGRSGGRLPYGVRMTAMGSSPNIASSGVASDTIAFGEHHLPPVSMASTVPHSLRQARDNTIMDLQTQLKEVLRENDLLRKDVEVKESKLSSSMNSIKTFWSPELKKERALRKDEASKITIWKEQYRVVQEENQHMQMTIQALQDELRIQRDLNQLFQQDSSSRTGEPCVAELTEENFQRLHAEHERQAKELFLLRKTLEEMELRIETQKQTLNARDESIKKLLEMLQSKGLSAKATEEDHERTRRLAEAEMHVHHLESLLEQKEKENSMLREEMHRRFENAPDSAKTKALQTVIEMKDSKISSMERGLRDLEEEIQMLKSNGALSTEEREEEMKQMEVYRSHSKFMKNKIGQVKQELSRKDTELLALQTKLETLTNQFSDSKQHIEVLKESLTAKEQRAAILQTEVDALRLRLEEKETMLNKKTKQIQDMAEEKGTQAGEIHDLKDMLDVKERKVNVLQKKIENLQEQLRDKEKQMSSLKERVKSLQADTTNTDTALTTLEEALAEKERTIERLKEQRDRDEREKQEEIDNYKKDLKDLKEKVSLLQGDLSEKEASLLDLKEHASSLASSGLKKDSRLKTLEIALEQKKEECLKMESQLKKAHEAALEARASPEMSDRIQHLEREITRYKDESSKAQAEVDRLLEILKEVENEKNDKDKKIAELESLTSRQVKDQNKKVANLKHKEQVEKKKSAQMLEEARRREDNLNDSSQQLQDSLRKKDDRIEELEEALRESVQITAEREMVLAQEESARTNAEKQVEELLMAMEKVKQELESMKAKLSSTQQSLAEKETHLTNLRAERRKHLEEVLEMKQEALLAAISEKDANIALLELSSSKKKTQEEVAALKREKDRLVQQLKQQTQNRMKLMADNYEDDHFKSSHSNQTNHKPSPDQDEEEGIWA

SEQ ID NO: 26991 - protein, 1088 aa, Homo sapiens; identical to SEQ ID NO: 26989
  Payload ID: 5316
  Gene Symbol: ERC1
  Gene Name: ELKS/RAB6-interacting/CAST family member 1
  Uniprot ID: Q8IUD2
  ENSP ID: ENSP00000438546

SEQ ID NO: 26992 - protein, 1120 aa, Homo sapiens
  Payload ID: 5316
  Gene Symbol: ERC1
  Gene Name: ELKS/RAB6-interacting/CAST family member 1
  ENSP ID: ENSP00000442739
MYGSARSVGKVEPSSQSPGRSPRLPRSPRLGHRRTNSTGGSSGSSVGGGSGKTLSMENIQSLNAAYATSGPMYLSDHENVGSETPKSTMTLGRSGGRLPYGVRMTAMGSSPNIASSGVASDTIAFGEHHLPPVSMASTVPHSLRQARDNTIMDLQTQLKEVLRENDLLRKDVEVKESKLSSSMNSIKTFWSPELKKERALRKDEASKITIWKEQYRVVQEENQHMQMTIQALQDELRIQRDLNQLFQQDSSSRTGEPCVAELTEENFQRLHAEHERQAKELFLLRKTLEEMELRIETQKQTLNARDESIKKLLEMLQSKGLSAKATEEDHERTRRLAEAEMHVHHLESLLEQKEKENSMLREEMHRRFENAPDSAKTKALQTVIEMKDSKISSMERGLRDLEEEIQMLKSNGALSTEEREEEMKQMEVYRSHSKFMKNKVEQLKEELSSKEAQWEELKKKAAGLQAEIGQVKQELSRKDTELLALQTKLETLTNQFSDSKQHIEVLKESLTAKEQRAAILQTEVDALRLRLEEKETMLNKKTKQIQDMAEEKGTQAGEIHDLKDMLDVKERKVNVLQKKIENLQEQLRDKEKQMSSLKERVKSLQADTTNTDTALTTLEEALAEKERTIERLKEQRDRDEREKQEEIDNYKKDLKDLKEKVSLLQGDLSEKEASLLDLKEHASSLASSGLKKDSRLKTLEIALEQKKEECLKMESQLKKAHEAALEARASPEMSDRIQHLEREITRYKDESSKAQAEVDRLLEILKEVENEKNDKDKKIAELESLTSRQVKDQNKKVANLKHKEQVEKKKSAQMLEEARRREDNLNDSSQQLQDSLRKKDDRIEELEEALRESVQITAEREMVLAQEESARTNAEKQVEELLMAMEKVKQELESMKAKLSSTQQSLAEKETHLTNLRAERRKHLEEVLEMKQEALLAAISEKDANIALLELSSSKKKTQEEVAALKREKDRLVQQLKQQTQNRMKLMADNYEDDHFKSSHSNQTNHKPSPDQIIQPLLELDQNRSKLKLYIGHLTTLCHDRDPLILRGLTPPASYNLDDDQAAWENELQKMTRGQLQDELEKGERDNAELQEFANAILQQIADHCPDILEQVVNALEESS

SEQ ID NO: 26993 - protein, 720 aa, Homo sapiens
  Payload ID: 5316
  Gene Symbol: ERC1
  Gene Name: ELKS/RAB6-interacting/CAST family member 1
  Uniprot ID: Q8IUD2
  ENSP ID: ENSP00000442976
MYGSARSVGKVEPSSQSPGRSPRLPRSPRLGHRRTNSTGGSSGSSVGGGSGKTLSMENIQSLNAAYATSGPMYLSDHENVGSETPKSTMTLGRSGGRLPYGVRMTAMGSSPNIASSGVASDTIAFGEHHLPPVSMASTVPHSLRQARDNTIMDLQTQLKEVLRENDLLRKDVEVKESKLSSSMNSIKTFWSPELKKERALRKDEASKITIWKEQYRVVQEENQVDALRLRLEEKETMLNKKTKQIQDMAEEKGTQAGEIHDLKDMLDVKERKVNVLQKKIENLQEQLRDKEKQMSSLKERVKSLQADTTNTDTALTTLEEALAEKERTIERLKEQRDRDEREKQEEIDNYKKDLKDLKEKVSLLQGDLSEKEASLLDLKEHASSLASSGLKKDSRLKTLEIALEQKKEECLKMESQLKKAHEAALEARASPEMSDRIQHLEREITRYKDESSKAQAEVDRLLEILKEVENEKNDKDKKIAELESLTSRQVKDQNKKVANLKHKEQVEKKKSAQMLEEARRREDNLNDSSQQLQDSLRKKDDRIEELEEALRESVQITAEREMVLAQEESARTNAEKQVEELLMAMEKVKQELESMKAKLSSTQQSLAEKETHLTNLRAERRKHLEEVLEMKQEALLAAISEKDANIALLELSSSKKKTQEEVAALKREKDRLVQQLKQQTQNRMKLMADNYEDDHFKSSHSNQTNHKPSPDQDEEEGIWA

SEQ ID NO: 26994 - protein, 976 aa, Homo sapiens
  Payload ID: 5316
  Gene Symbol: ERC1
  Gene Name: ELKS/RAB6-interacting/CAST family member 1
  ENSP ID: ENSP00000445336
MYGSARSVGKVEPSSQSPGRSPRLPRSPRLGHRRTNSTGGSSGSSVGGGSGKTLSMENIQSLNAAYATSGPMYLSDHENVGSETPKSTMTLGRSGGRLPYGVRMTAMGSSPNIASSGVASDTIAFGEHHLPPVSMASTVPHSLRQARDNTIMDLQTQLKEVLRENDLLRKDVEVKESKLSSSMNSIKTFWSPELKKERALRKDEASKITIWKEQYRVVQEENQHMQMTIQALQDELRIQRDLNQLFQQDSSSRTGEPCVAELTEENFQRLHAEHERQAKELFLLRKTLEEMELRIETQKQTLNARDESIKKLLEMLQSKGLSAKATEEDHERTRRLAEAEMHVHHLESLLEQKEKENSMLREEMHRRFENAPDSAKTKALQTVIEMKDSKISSMERGLRDLEEEIQMLKSNGALSTEEREEEMKQMEVYRSHSKFMKNKVEQLKEELSSKEAQWEELKKKAAGLQAEIGQVKQELSRKDTELLALQTKLETLTNQFSDSKQHIEVLKESLTAKEQRAAILQTEVDALRLRLEEKETMLNKKTKQIQDMAEEKGTQAGEIHDLKDMLDVKERKVNVLQKKIENLQEQLRDKEKQMSSLKERVKSLQADTTNTDTALTTLEEALAEKERTIERLKEQRDRDEREKQEEIDNYKKDLKDLKEKVSLLQGDLSEKEASLLDLKEHASSLASSGLKKDSRLKTLEIALEQKKEECLKMESQLKKAHEAALEARASPEMSDRIQHLEREITRYKDESSKAQAEVDRLLEILKEVENEKNDKDKKIAELESLTSRQVKDQNKKVANLKHKEQVEKKKSAQMLEEARRREDNLNDSSQQLQVEELLMAMEKVKQELESMKAKLSSTQQSLAEKETHLTNLRAERRKHLEEVLEMKQEALLAAISEKDANIALLELSSSKKKTQEEVAALKREKDRLVQQLKQQTQNRMKLMADNYEDDHFKSSHSNQTNHKPSPDQDEEEGIWA

SEQ ID NO: 26995 - protein, 145 aa, Homo sapiens
  Payload ID: 5316
  Gene Symbol: ERC1
  Gene Name: ELKS/RAB6-interacting/CAST family member 1
  ENSP ID: ENSP00000464959
MYGSARSVGKVEPSSQSPGRSPRLPRSPRLGHRRTNSTGGSSGSSVGGGSGKTLSMENIQSLNAAYATSGPMYLSDHENVGSETPKSTMTLGRSGGRLPYGVRMTAMGSSPNIASSGVASDTIAFGEHHLPPVSMASTVPHSLRQ

SEQ ID NO: 26996 - protein, 89 aa, Homo sapiens
  Payload ID: 5316
  Gene Symbol: ERC1
  Gene Name: ELKS/RAB6-interacting/CAST family member 1
  ENSP ID: ENSP00000465628
MYGSARSVGKVEPSSQSPGRSPRLPRSPRLGHRRTNSTGGSSGSSVGGGSGKTLSMENIQSLNAAYATSGPMYLSDHENVGSETPKSTM

SEQ ID NO: 26997 - protein, 89 aa, Homo sapiens
  Payload ID: 5316
  Gene Symbol: ERC1
  Gene Name: ELKS/RAB6-interacting/CAST family member 1
  ENSP ID: ENSP00000467196
  MOD_RES (1)..(1): Any amino acid
XHFKSSHSNQTNHKPSPDQIIQPLLELDQNRSKLKLYIGHLTTLCHDRDPLILRGLTPPASYNLDDDQAAWENELQKMTRGQVSLSLKL

SEQ ID NO: 26998 - protein, 285 aa, Homo sapiens
  Payload ID: 5316
  Gene Symbol: ERC1
  Gene Name: ELKS/RAB6-interacting/CAST family member 1
  ENSP ID: ENSP00000467339
  MOD_RES (1)..(1): Any amino acid
XMSDRIQHLEREITRYKDESSKAQAEVDRLLEILKEVENEKNDKDKKIAELERQVKDQNKKVANLKHKEQVEKKKSAQMLEEARRREDNLNDSSQQLQDSLRKKDDRIEELEEALRESVQITAEREMVLAQEESARTNAEKQVEELLMAMEKVKQELESMKAKLSSTQQSLAEKETHLTNLRAERRKHLEEVLEMKQEALLAAISEKDANIALLELSSSKKKTQEEVAALKREKDRLVQQLKQQTQNRMKLMADNYEDDHFKSSHSNQTNHKPSPDQDEEEGIWA

SEQ ID NO: 26999 - protein, 344 aa, Homo sapiens
  Payload ID: 5316
  Gene Symbol: ERC1
  Gene Name: ELKS/RAB6-interacting/CAST family member 1
  ENSP ID: ENSP00000467476
MDLQTQLKEVLRENDLLRKDVEVKESKLSSSMNSIKTFWSPELKKERALRKDEASKITIWKEQYRVVQEENQHMQMTIQALQDELRIQRDLNQLFQQDSSSRTGEPCVAELTEENFQRLHAEHERQAKELFLLRKTLEEMELRIETQKQTLNARDESIKKLLEMLQSKGLSAKATEEDHERTRRLAEAEMHVHHLESLLEQKEKENSMLREEMHRRFENAPDSAKTKALQTVIEMKDSKISSMERGLRDLEEEIQMLKSNGALSTEEREEEMKQMEVYRSHSKFMKNKIGQVKQELSRKDTELLALQTKLETLTNQFSDSKQHIEVLKESLTAKEQRAAILQTE

SEQ ID NO: 27000 - protein, 1116 aa, Homo sapiens; identical to SEQ ID NO: 26988
  Payload ID: 5316
  Gene Symbol: ERC1
  Gene Name: ELKS/RAB6-interacting/CAST family member 1
  Uniprot ID: Q8IUD2
  ENSP ID: ENSP00000468263

SEQ ID NO: 27001 - protein, 720 aa, Homo sapiens; identical to SEQ ID NO: 26993
  Payload ID: 5316
  Gene Symbol: ERC1
  Gene Name: ELKS/RAB6-interacting/CAST family member 1
  Uniprot ID: Q8IUD2
  ENSP ID: ENSP00000479523

SEQ ID NO: 27002 - protein, 957 aa, Homo sapiens
  Payload ID: 5317
  Gene Symbol: ERC2
  Gene Name: ELKS/RAB6-interacting/CAST family member 2
  Uniprot ID: O15083
  ENSP ID: ENSP00000288221
MYGSARTITNLEGSPSRSPRLPRSPRLGHRRTSSGGGGGTGKTLSMENIQSLNAAYATSGPMYLSDHEGVASTTYPKGTMTLGRATNRAVYGGRVTAMGSSPNIASAGLSHTDVLSYTDQHGGLTGSSHHHHHQVPSMLRQVRDSTMLDLQAQLKELQRENDLLRKELDIKDSKLGSSMNSIKTFWSPELKKERVLRKEEAARMSVLKEQMRVSHEENQHLQLTIQALQDELRTQRDLNHLLQQESGNRGAEHFTIELTEENFRRLQAEHDRQAKELFLLRKTLEEMELRIETQKQTLNARDESIKKLLEMLQSKGLPSKSLEDDNERTRRMAEAESQVSHLEVILDQKEKENIHLREELHRRSQLQPEPAKTKALQTVIEMKDTKIASLERNIRDLEDEIQMLKANGVLNTEDREEEIKQIEVYKSHSKFMKTKIDQLKQELSKKESELLALQTKLETLSNQNSDCKQHIEVLKESLTAKEQRAAILQTEVDALRLRLEEKESFLNKKTKQLQDLTEEKGTLAGEIRDMKDMLEVKERKINVLQKKIENLQEQLRDKDKQLTNLKDRVKSLQTDSSNTDTALATLEEALSEKERIIERLKEQRERDDRERLEEIESFRKENKDLKEKVNALQAELTEKESSLIDLKEHASSLASAGLKRDSKLKSLEIAIEQKKEECSKLEAQLKKAHNIEDDSRMNPEFADQIKQLDKEASYYRDECGKAQAEVDRLLEILKEVENEKNDKDKKIAELESLTLRHMKDQNKKVANLKHNQQLEKKKNAQLLEEVRRREDSMADNSQHLQIEELMNALEKTRQELDATKARLASTQQSLAEKEAHLANLRIERRKQLEEILEMKQEALLAAISEKDANIALLELSASKKKKTQEEVMALKREKDRLVHQLKQQTQNRMKLMADNYDDDHHHYHHHHHHHHHRSPGRSQHSNHRPSPDQDDEEGIWA

SEQ ID NO: 27003 - protein, 528 aa, Homo sapiens
  Payload ID: 5317
  Gene Symbol: ERC2
  Gene Name: ELKS/RAB6-interacting/CAST family member 2
  ENSP ID: ENSP00000417280
  MOD_RES (1)..(1): Any amino acid
XRSQLQPEPAKTKALQTVIEMKDTKIASLERNIRDLEDEIQMLKANGVLNTEDREEEIKQIEVYKSHSKFMKTKIDQLKQELSKKESELLALQTKLETLSNQNSDCKQHIEVLKESLTAKEQRAAILQTEVDALRLRLEEKESFLNKKTKQLQDLTEEKGTLAGEIRDMKDMLEVKERKINVLQKKIENLQEQLRDKDKQLTNLKDRVKSLQTDSSNTDTALATLEEALSEKERIIERLKEQRERDDRERLEEIESFRKENKDLKEKVNALQAELTEKESSLIDLKEHASSLASAGLKRDSKLKSLEIAIEQKKEECSKLEAQLKKQAEQLFNQMYNPAHNIEDDSRMNPEFADQIKQLDKEASYYRDECGKAQAEVDRLLEILKEVENEKNDKDKKIAELERHMKDQNKKVANLKHNQQLEKKKNAQLLEEVRRREDSMADNSQHLQIEELMNALEKTRQELDATKARLASTQQSLAEKEAHLANLRIERRKQLEEILEMKQEALLAAISEKDANIALLELSASKKK

SEQ ID NO: 27004 - protein, 957 aa, Homo sapiens; identical to SEQ ID NO: 27002
  Payload ID: 5317
  Gene Symbol: ERC2
  Gene Name: ELKS/RAB6-interacting/CAST family member 2
  Uniprot ID: O15083
  ENSP ID: ENSP00000417445

SEQ ID NO: 27005 - protein, 957 aa, Homo sapiens; identical to SEQ ID NO: 27002
  Payload ID: 5317
  Gene Symbol: ERC2
  Gene Name: ELKS/RAB6-interacting/CAST family member 2
  Uniprot ID: O15083
  ENSP ID: ENSP00000483127

SEQ ID NO: 27006 - protein, 268 aa, Homo sapiens
  Payload ID: 5318
  Gene Symbol: EAF1
  Gene Name: ELL associated factor 1
  Uniprot ID: Q96JC9
  ENSP ID: ENSP00000380054
MNGTANPLLDREEHCLRLGESFEKRPRASFHTIRYDFKPASIDTSCEGELQVGKGDEVTITLPHIPGSTPPMTVFKGNKRPYQKDCVLIINHDTGEYVLEKLSSSIQVKKTRAEGSSKIQARMEQQPTRPPQTSQPPPPPPPMPFRAPTKPPVGPKTSPLKDNPSPEPQLDDIKRELRAEVDIIEQMSSSSGSSSSDSESSSGSDDDSSSSGGEDNGPASPPQPSHQQPYNSRPAVANGTSRPQGSNQLMNTLRNDLQLSESGSDSDD

SEQ ID NO: 27007 - protein, 67 aa, Homo sapiens
  Payload ID: 5318
  Gene Symbol: EAF1
  Gene Name: ELL associated factor 1
  ENSP ID: ENSP00000399636
MNGTANPLLDREEHCLRLGESFEKRPRASFHTIRYDFKPASIDTSCEGELQVGKGDEVTITLPHIPS

SEQ ID NO: 27008 - protein, 260 aa, Homo sapiens
  Payload ID: 5319
  Gene Symbol: EAF2
  Gene Name: ELL associated factor 2
  Uniprot ID: Q96CJ1
  ENSP ID: ENSP00000273668
MNSAAGFSHLDRRERVLKLGESFEKQPRCAFHTVRYDFKPASIDTSSEGYLEVGEGEQVTITLPNIEGSTPPVTVFKGSKKPYLKECILIINHDTGECRLEKLSSNITVKKTRVEGSSKIQYRKEQQQQQMWNSARTPNLVKHSPSEDKMSPASPIDDIERELKAEASLMDQMSSCDSSSDSKSSSSSSSEDSSSDSEDEDCKSSTSDTGNCVSGHPTMTQYRIPDIDASHNRFRDNSGLLMNTLRNDLQLSESGSDSDD

SEQ ID NO: 27009 - protein, 263 aa, Homo sapiens
  Payload ID: 5319
  Gene Symbol: EAF2
  Gene Name: ELL associated factor 2
  ENSP ID: ENSP00000410708
MNSAAGFSHLDRRERVLKLGESFEKQPRCAFHTVRYDFKPASIDTSSEGYLEVGEGEQVTITLPNIEGSTPPVTVFKGSKKPYLKECILIINHDTGECRLEKLSSNITVKKTRVEGSSKIQYRKEQQQQQMWNSARTPNLVKHSPSEDKMSPASPIDDIERELKAEASLMDQMSSCDSSSDSKSSSSSSSEDSSSDSEDEDCKSSTSDTGNCVSGHPTMTQYRIPDIDASHNRFRDNSGLLMNTLNNLSSHSFSSLYDPLLSH

SEQ ID NO: 27010 - protein, 68 aa, Homo sapiens
  Payload ID: 5319
  Gene Symbol: EAF2
  Gene Name: ELL associated factor 2
  ENSP ID: ENSP00000418374
MNSAAGFSHLDRRERVLKLGESFEKQPRCAFHTVRYDFKPASIDTSSEGYLEVGEGEQVTITLPNIES

SEQ ID NO: 27011 - protein, 35 aa, Homo sapiens
  Payload ID: 5319
  Gene Symbol: EAF2
  Gene Name: ELL associated factor 2
  ENSP ID: ENSP00000419552
MNSAAGFSHLDRRERVLKLGESFEKQPRCAFHTVR

SEQ ID NO: 27012 - protein, 992 aa, Homo sapiens
  Payload ID: 5320
  Gene Symbol: EVC
  Gene Name: Ellis van Creveld protein
  Uniprot ID: P57679
  ENSP ID: ENSP00000264956
MARGGAACKSDARLLLGRDALRPAPALLAPAVLLGAALGLGLGLWLGCRAGRQRTRHQKDDTQNLLKNLESNAQTPSETGSPSRRRKREVQMSKDKEAVDECEPPSNSNITAFALKAKVIYPINQKFRPLADGSSNPSLHENLKQAVLPHQPVEASPSSSLGSLSQGEKDDCSSSSSVHSATSDDRFLSRTFLRVNAFPEVLACESVDVDLCIYSLHLKDLLHLDTALRQEKHMMFIQIFKMCLLDLLPKKKSDDELYQKILSKQEKDLEELEKGLQVKLSNTEMSGAGDSEYITLADVEKKEREYSEQLIDNMEAFWKQMANIQHFLVDQFKCSSSKARQLMMTLTERMIAAEGLLCDSQELQALDALERTMGRAHMAKVIEFLKLQVQEETRCRLAAISHGLELLAGEGKLSGRQKEELLTQQHKAFWQEAERFSREFVQRGKDLVTASLAHQVEGTAKLTLAQEEEQRSFLAEAQPTADPEKFLEAFHEVLERQRLMQCDLEEEENVRATEAVVALCQELYFSTVDTFQKFVDALFLQTLPGMTGLPPEECDYLRQEVQENAAWQLGKSNRFRRQQWKLFQELLEQDQQVWMEECALSSVLQTHLREDHEGTIRGVLGRLGGLTEESTRCVLQGHDLLLRSALRRLALRGNALATLTQMRLSGKKHLLQELREQRALEQGSSQCLDEHQWQLLRALEARVLEEASRLEEEAQQTRLQLQQRLLAEAQEVGQLLQQHMECAIGQALLVHARNAATKSRAKDRDDFKRTLMEAAVESVYVTSAGVSRLVQAYYQQIGRIMEDHEERKLQHLKTLQGERMENYKLRKKQELSNPSSGSRTAGGAHETSQAVHQRMLSQQKRFLAQFPVHQQMRLHAQQQQAGVMDLLEAQLETQLQEAEQNFISELAALARVPLAESKLLPAKRGLLEKPLRTKRKKPLPQERGDLGVPNNEDLASGDQTSGSLSSKRLSQQESEAGDSGNSKKMLKRRSNL

SEQ ID NO: 27013 - protein, 535 aa, Homo sapiens
  Payload ID: 5320
  Gene Symbol: EVC
  Gene Name: Ellis van Creveld protein
  ENSP ID: ENSP00000426774
MARGGAACKSDARLLLGRDALRPAPALLAPAVLLGAALGLGLGLWLGCRAGRQRTRHQKDDTQNLLKNLESNAQTPSETGSPSRRRKREVQMSKDKEAVDECEPPSNSNITAFALKAKVIYPINQKFRPLADGSSNPSLHENLKQAVLPHQPVEASPSSSLGSLSQGEKDDCSSSSSVHSATSDDRFLSRTFLRVNAFPEVLACESVDVDLCIYSLHLKDLLHLDTALRQEKHMMFIQIFKMCLLDLLPKKKSDDELYQKILSKQEKDLEELEKGLQVKLSNTEMSGAGDSEYITLADVEKKEREYSEQLIDNMEAFWKQMANIQHFLVDQFKCSSSKARQLMMTLTERMIAAEGLLCDSQELQALDALERTMGRAHMAKVIEFLKLQVQEETRCRLAAISHGLELLAGEGKLSGRQKEELLTQQHKAFWQEAERFSREFVQRGKDLVTASLAHQVEGTAKLTLAQEEEQRSFLAEAQPTADPEKFLEAFHEVLERQRLMQCDLEEEENVRATEAVVALCQKAMRRHRDTGKEAV

SEQ ID NO: 27014 - protein, 1228 aa, Homo sapiens
  Payload ID: 5321
  Gene Symbol: EVC2
  Gene Name: Ellis van Creveld syndrome 2
  Uniprot ID: Q86UK5
  ENSP ID: ENSP00000311683
MIWPKVECCHFKTAVEAPLGMKLDKKMEVFIPLSTSAASSGPWAHSLFAFIPSWPKKNLFKRESPITHRLYGDISREVQGTSENGVIFQKCALVSGSSEAQTARIWLLVNNTKTTSSANLSELLLLDSIAGLTIWDSVGNRTSEGFQAFSKKFLQVGDAFAVSYAATLQAGDLGNGESLKLPAQLTFQSSSRNRTQLKVLFSITAEENVTVLPHHGLHAAGFFIAFLLSLVLTWAALFLMVRYQCLKGNMLTRHRVWQYESKLEPLPFTSADGVNEDLSLNDQMIDILSSEDPGSMLQALEELEIATLNRADADLEACRTQISKDIIALLLKNLTSSGHLSPQVERKMSAVFKKQFLLLENEIQEEYDRKMVALTAECDLETRKKMENQYQREMMAMEEAEELLKRAGERSAVECSNLLRTLHGLEQEHLRKSLALQQEEDFAKAHRQLAVFQRNELHSIFFTQIKSAIFKGELKPEAAKMLLQNYSKIQENVEELMDFFQASKRYHLSKRFGHREYLVQNLQSSETRVQGLLSTAAAQLTHLIQKHERAGYLDEDQMEMLLERAQTEVFSIKQKLDNDLKQEKKKLHQKLITKRRRELLQKHREQRREQASVGEAFRTVEDAGQYLHQKRSLMEEHGATLEELQERLDQAALDDLRTLTLSLFEKATDELRRLQNSAMTQELLKRGVPWLFLQQILEEHGKEMAARAEQLEGEERDRDQEGVQSVRQRLKDDAPEAVTEEQAELRRWEHLIFMKLCSSVFSLSEEELLRMRQEVHGCFAQMDRSLALPKIRARVLLQQFQTAWREAEFVKLDQAVAAPELQQQSKVRKSRSKSKSKGELLKKCIEDKIHLCEEQASEDLVEKVRGELLRERVQRMEAQEGGFAQSLVALQFQKASRVTETLSAYTALLSIQDLLLEELSASEMLTKSACTQILESHSRELQELERKLEDQLVQQEAAQQQQALASWQQWVADGPGILNEPGEVDSERQVSTVLHQALSKSQTLLEQHQQCLREEQQNSVVLEDLLENMEADTFATLCSQELRLASYLARMAMVPGATLRRLLSVVLPTASQPQLLALLDSATERHVDHAAESDGGAEQADVGRRRKHQSWWQALDGKLRGDLISRGLEKMLWARKRKQSILKKTCLPLRERMIFSGKGSWPHLSLEPIGELAPVPIVGAETIDLLNTGEKLFIFRNPKEPEISLHVPPRKKKNFLNAKKAMRALGMD

SEQ ID NO: 27015 - protein, 1308 aa, Homo sapiens
  Payload ID: 5321
  Gene Symbol: EVC2
  Gene Name: Ellis van Creveld syndrome 2
  Uniprot ID: Q86UK5
  ENSP ID: ENSP00000342144
MDPSGSRGRPTWVLAGGLLAVALALGGRGCLGASSRPRWRPLGAQPPRDPQVAPRSGPGLRIPPGRSGAGPESSTQDLPCMIWPKVECCHFKTAVEAPLGMKLDKKMEVFIPLSTSAASSGPWAHSLFAFIPSWPKKNLFKRESPITHRLYGDISREVQGTSENGVIFQKCALVSGSSEAQTARIWLLVNNTKTTSSANLSELLLLDSIAGLTIWDSVGNRTSEGFQAFSKKFLQVGDAFAVSYAATLQAGDLGNGESLKLPAQLTFQSSSRNRTQLKVLFSITAEENVTVLPHHGLHAAGFFIAFLLSLVLTWAALFLMVRYQCLKGNMLTRHRVWQYESKLEPLPFTSADGVNEDLSLNDQMIDILSSEDPGSMLQALEELEIATLNRADADLEACRTQISKDIIALLLKNLTSSGHLSPQVERKMSAVFKKQFLLLENEIQEEYDRKMVALTAECDLETRKKMENQYQREMMAMEEAEELLKRAGERSAVECSNLLRTLHGLEQEHLRKSLALQQEEDFAKAHRQLAVFQRNELHSIFFTQIKSAIFKGELKPEAAKMLLQNYSKIQENVEELMDFFQASKRYHLSKRFGHREYLVQNLQSSETRVQGLLSTAAAQLTHLIQKHERAGYLDEDQMEMLLERAQTEVFSIKQKLDNDLKQEKKKLHQKLITKRRRELLQKHREQRREQASVGEAFRTVEDAGQYLHQKRSLMEEHGATLEELQERLDQAALDDLRTLTLSLFEKATDELRRLQNSAMTQELLKRGVPWLFLQQILEEHGKEMAARAEQLEGEERDRDQEGVQSVRQRLKDDAPEAVTEEQAELRRWEHLIFMKLCSSVFSLSEEELLRMRQEVHGCFAQMDRSLALPKIRARVLLQQFQTAWREAEFVKLDQAVAAPELQQQSKVRKSRSKSKSKGELLKKCIEDKIHLCEEQASEDLVEKVRGELLRERVQRMEAQEGGFAQSLVALQFQKASRVTETLSAYTALLSIQDLLLEELSASEMLTKSACTQILESHSRELQELERKLEDQLVQQEAAQQQQALASWQQWVADGPGILNEPGEVDSERQVSTVLHQALSKSQTLLEQHQQCLREEQQNSVVLEDLLENMEADTFATLCSQELRLASYLARMAMVPGATLRRLLSVVLPTASQPQLLALLDSATERHVDHAAESDGGAEQADVGRRRKHQSWWQALDGKLRGDLISRGLEKMLWARKRKQSILKKTCLPLRERMIFSGKGSWPHLSLEPIGELAPVPIVGAETIDLLNTGEKLFIFRNPKEPEISLHVPPRKKKNFLNAKKAMRALGMD

SEQ ID NO: 27016 - protein, 452 aa, Homo sapiens
  Payload ID: 5321
  Gene Symbol: EVC2
  Gene Name: Ellis van Creveld syndrome 2
  ENSP ID: ENSP00000423876
MIWPKVECCHFKTAVEAPLGMKLDKKMEVFIPLSTSAASSGPWAHSLFAFIPSWPKKNLFKRESPITHRLYGDISREVQGTSENGVIFQKCALVSGSSEAQTARIWLLVNNTKTTSSANLSELLLLDSIAGLTIWDSVGNRTSEGFQAFSKKFLQVGDAFAVSYAATLQAGDLGNGESLKLPAQLTFQSSSRNRTQLKVLFSITAEENVTVLPHHGLHAAGFFIAFLLSLVLTWAALFLMVRYQCLKGNMLTRHRVWQYESKLEPLPFTSADGVNEDLSLNDQMIDILSSEDPGSMLQALEELEIATLNRADADLEACRTQISKDIIALLLKNLTSSGHLSPQVERKMSAVFKKQFLLLENEIQEEYDRKMVALTAECDLETRKKMENQYQREMMAMEEAEELLKRAVCCRVQQPSADPPWPGTGALEEVSRFATRRRLCQSSQTAGCFPEK

SEQ ID NO: 27017 - protein, 1166 aa, Homo sapiens
  Payload ID: 5321
  Gene Symbol: EVC2
  Gene Name: Ellis van Creveld syndrome 2
  ENSP ID: ENSP00000431981
MIWPKVECCHFKTAVEAPLGMKLDKKMEVFIPLSTSAASSGPWAHSLFAFIPSWPKKNLFKRESPITHRLYGDISREVQGTSENGVIFQKCALVSGSSEAQTARIWLLVNNTKTTSSANLSELLLLDSIAGLTIWDSVGNRTSEGFQAFSKKFLQVGDAFAVSYAATLQAGDLGNGESLKLPAQLTFQSSSRNRTQLKVLFSITAEENVTVLPHHGLHAAGFFIAFLLSLVLTWAALFLMVRYQCLKGNMLTRHRVWQYESKLEPLPFTSADGVNEDLSLNDQMIDILSSEDPGSMLQALEELEIATLNRADADLEACRTQISKDIIALLLKNLTSSGHLSPQVERKMSAVFKKQFLLLENEIQEEYDRKMVALTAECDLETRKKMENQYQREMMAMEEAEELLKRAGERSAVECSNLLRTLHGLEQEHLRKSLALQQEEDFAKAHRQLAVFQRNELHSIFFTQIKSAIFKGELKPEAAKMLLQNYSKIQENVEELMDFFQASKRYHLSKRFGHREYLVQNLQSSETRVQGLLSTAAAQLTHLIQKHERAGYLDEDQMEMLLERAQTEVFSIKQKLDNDLKQEKKKLHQKLITKRRRELLQKHREQRREQASVGEAFRTVEDAGQYLHQKRSLMEEHGATLEELQERLDQAALDDLRTLTLSLFEKATDELRRLQNSAMTQELLKRGVPWLFLQQILEEHGKEMAARAEQLEGEERDRDQEGVQSVRQRLKDDAPEAVTEEQAELRRWEHLIFMKLCSSVFSLSEEELLRMRQEVHGCFAQMDRSLALPKIRARVLLQQFQTAWREAEFVKLDQAVAAPELQQQSKVRKSRSKSKSKGELLKKCIEDKIHLCEEQASEDLVEKVRGELLRERVQRMEAQEGGFAQSLVALQFQKASRVTETLSAYTALLSIQDLLLEELSASEMLTKSACTQILESHSRELQELERKLEDQLVQQEAAQQQQALASWQQWVADGPGILNEPGEVDSERQVSTVLHQALSKSQTLLEQHQQCLREEQQNSVVLEDLLENMEADTFATLCSQELRLASYLARMAMVPGATLRRLLSVVLPTASQPQLLALLDSATERHVDHAAESDGGAEQADVGRRRKHQSWWQALDGKLRGDLISRGLEKMLWARKRKQRSGNQESFWQYLVGTPEIGLIEWMSEK

SEQ ID NO: 27018 - protein, 1045 aa, Homo sapiens
  Payload ID: 5322
  Gene Symbol: ELMSAN1
  Gene Name: ELM2 and Myb/SANT-like domain containing 1
  Uniprot ID: Q6PJG2
  ENSP ID: ENSP00000286523
MNLQAQPKAQNKRKRCLFGGQEPAPKEQPPPLQPPQQSIRVKEEQYLGHEGPGGAVSTSQPVELPPPSSLALLNSVVYGPERTSAAMLSQQVASVKWPNSVMAPGRGPERGGGGGVSDSSWQQQPGQPPPHSTWNCHSLSLYSATKGSPHPGVGVPTYYNHPEALKREKAGGPQLDRYVRPMMPQKVQLEVGRPQAPLNSFHAAKKPPNQSLPLQPFQLAFGHQVNRQVFRQGPPPPNPVAAFPPQKQQQQQQPQQQQQQQQAALPQMPLFENFYSMPQQPSQQPQDFGLQPAGPLGQSHLAHHSMAPYPFPPNPDMNPELRKALLQDSAPQPALPQVQIPFPRRSRRLSKEGILPPSALDGAGTQPGQEATGNLFLHHWPLQQPPPGSLGQPHPEALGFPLELRESQLLPDGERLAPNGREREAPAMGSEEGMRAVSTGDCGQVLRGGVIQSTRRRRRASQEANLLTLAQKAVELASLQNAKDGSGSEEKRKSVLASTTKCGVEFSEPSLATKRAREDSGMVPLIIPVSVPVRTVDPTEAAQAGGLDEDGKGPEQNPAEHKPSVIVTRRRSTRIPGTDAQAQAEDMNVKLEGEPSVRKPKQRPRPEPLIIPTKAGTFIAPPVYSNITPYQSHLRSPVRLADHPSERSFELPPYTPPPILSPVREGSGLYFNAIISTSTIPAPPPITPKSAHRTLLRTNSAEVTPPVLSVMGEATPVSIEPRINVGSRFQAEIPLMRDRALAAADPHKADLVWQPWEDLESSREKQRQVEDLLTAACSSIFPGAGTNQELALHCLHESRGDILETLNKLLLKKPLRPHNHPLATYHYTGSDQWKMAERKLFNKGIAIYKKDFFLVQKLIQTKTVAQCVEFYYTYKKQVKIGRNGTLTFGDVDTSDEKSAQEEVEVDIKTSQKFPRVPLPRRESPSEERLEPKREVKEPRKEGEEEVPEIQEKEEQEEGRERSRRAAAVKATQTLQANESASDILILRSHESNAPGSAGGQASEKPREGTGKSRRALPFSEKKKKTETFSKTQNQENTFPCKKCGR

SEQ ID NO: 27019 - protein, 1045 aa, Homo sapiens; identical to SEQ ID NO: 27018
  Payload ID: 5322
  Gene Symbol: ELMSAN1
  Gene Name: ELM2 and Myb/SANT-like domain containing 1
  Uniprot ID: Q6PJG2
  ENSP ID: ENSP00000377634

SEQ ID NO: 27020 - protein, 445 aa, Homo sapiens
  Payload ID: 5322
  Gene Symbol: ELMSAN1
  Gene Name: ELM2 and Myb/SANT-like domain containing 1
  ENSP ID: ENSP00000400871
VRPMMPQKVQLEVGRPQAPLNSFHAAKKPPNQSLPLQPFQLAFGHQVNRQVFRQGPPPPNPVAAFPPQKQQQQQQPQQQQQQQQAALPQMPLFENFYSMPQQPSQQPQDFGLQPAGPLGQSHLAHHSMAPYPFPPNPDMNPELRKALLQDSAPQPALPQVQIPFPRRSRRLSKEGILPPSALDGAGTQPGQEATGNLFLHHWPLQQPPPGSLGQPHPEALGFPLELRESQLLPDGERLAPNGREREAPAMGSEEGMRAVSTGDCGQVLRGGVIQSTRRRRRASQEANLLTLAQKAVELASLQNAKDGSGSEEKRKSVLASTTKCGVEFSEPSLATKRAREDSGMVPLIIPVSVPVRTVDPTEAAQAGGLDEDGKGPEQNPAEHKPSVIVTRRRSTRIPGTDAQAQKKFADFCPRGDDKKGFWTCSFFQACLGGCGRQTKFQRQRT

SEQ ID NO: 27021 - protein, 65 aa, Homo sapiens
  Payload ID: 5322
  Gene Symbol: ELMSAN1
  Gene Name: ELM2 and Myb/SANT-like domain containing 1
  ENSP ID: ENSP00000401344
MNLQAQPKAQNKRKRCLFGGQEPAPKEQPPPLQPPQQSIRVKEEQYLGHEGPGGAVSTSQPVELP

SEQ ID NO: 27022 - protein, 1018 aa, Homo sapiens
  Payload ID: 5322
  Gene Symbol: ELMSAN1
  Gene Name: ELM2 and Myb/SANT-like domain containing 1
  ENSP ID: ENSP00000402380
MNLQAQPKAQNKRKRCLFGGQEPAPKEQPPPLQPPQQSIRVKEEQYLGHEGPGGAVSTSQPVELPPPSSLALLNSVVYGPERTSAAMLSQQVASVKWPNSVMAPGRGPERGGGGGVSDSSWQQQPGQPPPHSTWNCHSLSLYSATKGSPHPGVGVPTYYNHPEALKREKAGGPQLDRYVRPMMPQKVQLEVGRPQAPLNSFHAAKKPPNQSLPLQPFQLAFGHQVNRQVFRQGPPPPNPVAAFPPQKQQQQQQPQQQQQQQQAALPQMPLFENFYSMPQQPSQQPQDFGLQPAGPLGQSHLAHHSMAPYPFPPNPDMNPELRKALLQDSAPQPALPQVQIPFPRRSRRLSKEGILPPSALDGAGTQPGQEATGNLFLHHWPLQQPPPGSLGQPHPEALGFPLELRESQLLPDGERLAPNGREREAPAMGSEEGMRAVSTGDCGQVLRGGVIQSTRRRRRASQEANLLTLAQKAVELASLQNAKDGSGSEEKRKSVLASTTKCGVEFSEPSLATKRAREDSGMVPLIIPVSVPVRTVDPTEAAQAGGLDEDGKGPEQNPAEHKPSVIVTRRRSTRIPGTDAQAQAEDMNVKLEGEPSVRKPKQRPRPEPLIIPTKAGTFIAPPVYSNITPYQSHLRSPVRLADHPSERSFELPPYTPPPILSPVREGSGLYFNAIISTSTIPAPPPITPKSAHRTLLRTNSAEVTPPVLSVMGEATPVSIEPRINVGSRFQAEIPLMRDRALAAADPHKADLVWQPWEDLESSREKQRQVEDLLTAACSSIFPGAGTNQELALHCLHESRGDILETLNKLLLKKPLRPHNHPLATYHYTGSDQWKMAERKLFNKGIAIYKKDFFLVQKLIQTKTVAQCVEFYYTYKKQVKIGRNGTLTFGDVDTSDEKSAQEEVEVDIKTSQKFPRVPLPRRESPSEERLEPKREVKEPRKEGEEEVPEIQEKEEQEEGRERSRRAAAVKATQTLQANESASDILILRSHESNAPGSAGGQASEKPREGTGKSRRALPF

SEQ ID NO: 27023 - protein, 1045 aa, Homo sapiens; identical to SEQ ID NO: 27018
  Payload ID: 5322
  Gene Symbol: ELMSAN1
  Gene Name: ELM2 and Myb/SANT-like domain containing 1
  Uniprot ID: Q6PJG2
  ENSP ID: ENSP00000407767

SEQ ID NO: 27024 - protein, 334 aa, Homo sapiens
  Payload ID: 5323
  Gene Symbol: ELMOD1
  Gene Name: ELMO/CED-12 domain containing 1
  Uniprot ID: Q8N336
  ENSP ID: ENSP00000265840
MKHFLRMLIQVCLYFYCKFLWRCLKFVMRKLTGRCELQRICYNTKPGASRTMKIETSLRDSKSKLLQTSVSVHPDAIEKTIEDIMELKKINPDVNPQLGISLQACLLQIVGYRNLIADVEKLRREAYDSDNPQHEEMLLKLWKFLKPNTPLESRISKQWCEIGFQGDDPKTDFRGMGLLGLYNLQYFAERDATAAQQVLSDSLHPKCRDITKEEISKFSKAEWEKKRMDKAIGYSFAIVGINITDLAYNLLVSGALKTHFYNIAPEAPTLSHFQQTFCYLMHEFHKFWIEEDPMDIMEFNRVREKFRKRIIKQLQNPDMALCPHFAASEGLINM

SEQ ID NO: 27025 - protein, 326 aa, Homo sapiens
  Payload ID: 5323
  Gene Symbol: ELMOD1
  Gene Name: ELMO/CED-12 domain containing 1
  Uniprot ID: Q8N336
  ENSP ID: ENSP00000412257
MKHFLRMLIQVCLYFYCKFLWRCLKFVMRKLTGRCELQRICYNTKPGASRTMKIETSLRDSKSKLLQTSVSVHPDAIEKTIEDIMELKKINPDVNPQLGISLQACLLQIVGYRNLIADVEKLRREAYDSDNPQHEEMLLKLWKFLKPNTPLESRISKQWCEIGFQGDDPKTDFRGMGLLGLYNLQYFAERDATAAQQVLSDSLHPKCSKFSKAEWEKKRMDKAIGYSFAIVGINITDLAYNLLVSGALKTHFYNIAPEAPTLSHFQQTFCYLMHEFHKFWIEEDPMDIMEFNRVREKFRKRIIKQLQNPDMALCPHFAASEGLINM

SEQ ID NO: 27026 - protein, 328 aa, Homo sapiens
  Payload ID: 5323
  Gene Symbol: ELMOD1
  Gene Name: ELMO/CED-12 domain containing 1
  ENSP ID: ENSP00000433232
MLIQVCLYFYCKFLWRCLKFVMRKLTGRCELQRICYNTKPGASRTMKIETSLRDSKSKLLQTSVSVHPDAIEKTIEDIMELKKINPDVNPQLGISLQACLLQIVGYRNLIADVEKLRREAYDSDNPQHEEMLLKLWKFLKPNTPLESRISKQWCEIGFQGDDPKTDFRGMGLLGLYNLQYFAERDATAAQQVLSDSLHPKCRDITKEEISKFSKAEWEKKRMDKAIGYSFAIVGINITDLAYNLLVSGALKTHFYNIAPEAPTLSHFQQTFCYLMHEFHKFWIEEDPMDIMEFNRVREKFRKRIIKQLQNPDMALCPHFAASEGLINM

SEQ ID NO: 27027 - protein, 293 aa, Homo sapiens
  Payload ID: 5324
  Gene Symbol: ELMOD2
  Gene Name: ELMO/CED-12 domain containing 2
  Uniprot ID: Q8IZ81
  ENSP ID: ENSP00000326342
MFISLWEFFYGHFFRFWMKWLLRQMTGKCELQRIFDTYVGAQRTHRIENSLTYSKNKVLQKATHVVQSEVDKYVDDIMKEKNINPEKDASFKICMKMCLLQITGYKQLYLDVESVRKRPYDSDNLQHEELLMKLWNLLMPTKKLNARISKQWAEIGFQGDDPKTDFRGMGILGLINLVYFSENYTSEAHQILSRSNHPKLGYSYAIVGINLTEMAYSLLKSEALKFHLYNLVPGIPTMEHFHQFYCYLVYEFDKFWFEEEPESIMYFNLYREKFHEKIKGLLLDCNVALTLKV

SEQ ID NO: 27028 - protein, 167 aa, Homo sapiens
  Payload ID: 5324
  Gene Symbol: ELMOD2
  Gene Name: ELMO/CED-12 domain containing 2
  ENSP ID: ENSP00000422582
MFISLWEFFYGHFFRFWMKWLLRQMTGKCELQRIFDTYVGAQRTHRIENSLTYSKNKVLQKATHVVQSEVDKYVDDIMKEKNINPEKDASFKICMKMCLLQITGYKQLYLDVESVRKRPYDSDNLQHEELLMKLWNLLMPTKKLNARISKQWAEIGFQGDDPKTDFR

SEQ ID NO: 27029 - protein, 35 aa, Homo sapiens
  Payload ID: 5324
  Gene Symbol: ELMOD2
  Gene Name: ELMO/CED-12 domain containing 2
  ENSP ID: ENSP00000427265
MFISLWEFFYGHFFRFWMKWLLRQMTGKCELQRIF

SEQ ID NO: 27030 - protein, 96 aa, Homo sapiens
  Payload ID: 5324
  Gene Symbol: ELMOD2
  Gene Name: ELMO/CED-12 domain containing 2
  ENSP ID: ENSP00000427592
MKEKNINPEKDASFKICMKMCLLQITGYKQLYLDVESVRKRPYDSDNLQHEELLMKLWNLLMPTKKLNARISKQWAEIGFQGDDPKTDFRGMGILG

SEQ ID NO: 27031 - protein, 59 aa, Homo sapiens
  Payload ID: 5324
  Gene Symbol: ELMOD2
  Gene Name: ELMO/CED-12 domain containing 2
  ENSP ID: ENSP00000476419
MFISLWEFFYGHFFRFWMKWLLRQMTGKCELQRIFDTYVGAQRTHRIENSLTYSKNKVG

SEQ ID NO: 27032 - protein, 391 aa, Homo sapiens
  Payload ID: 5325
  Gene Symbol: ELMOD3
  Gene Name: ELMO/CED-12 domain containing 3
  Uniprot ID: Q96FG2
  ENSP ID: ENSP00000318264
MNEKSCSFHSKEELRDGQGERLSAGYSPSYDKDKSVLAFRGIPISELKNHGILQALTTEAYEWEPRVVSTEVVRAQEEWEAVDTIQPETGSQASSEQPGQLISFSEALQHFQTVDLSPFKKRIQPTIRRTGLAALRHYLFGPPKLHQRLREERDLVLTIAQCGLDSQDPVHGRVLQTIYKKLTGSKFDCALHGNHWEDLGFQGANPATDLRGAGFLALLHLLYLVMDSKTLPMAQEIFRLSRHHIQQFPFCLMSVNITHIAIQALREECLSRECNRQQKVIPVVNSFYAATFLHLAHVWRTQRKTISDSGFVLKGVLFLLGRPRLNAQCPRSREPKVVARLVLAAVLPHPHFLKFQLTKISITHPLESASSPFSALTVALFWSYTYDKHIF

SEQ ID NO: 27033 - protein, 381 aa, Homo sapiens
  Payload ID: 5325
  Gene Symbol: ELMOD3
  Gene Name: ELMO/CED-12 domain containing 3
  Uniprot ID: Q96FG2
  ENSP ID: ENSP00000377434
MNEKSCSFHSKEELRDGQGERLSAGYSPSYDKDKSVLAFRGIPISELKNHGILQALTTEAYEWEPRVVSTEVVRAQEEWEAVDTIQPETGSQASSEQPGQLISFSEALQHFQTVDLSPFKKRIQPTIRRTGLAALRHYLFGPPKLHQRLREERDLVLTIAQCGLDSQDPVHGRVLQTIYKKLTGSKFDCALHGNHWEDLGFQGANPATDLRGAGFLALLHLLYLVMDSKTLPMAQEIFRLSRHHIQQFPFCLMSVNITHIAIQALREECLSRECNRQQKVIPVVNSFYAATFLHLAHVWRTQRKTISDSGFVLKELEVLAKKSPRRLLKTLELYLARVSKGQASLLGAQKCYGPEAPPFKDLTFTGESDLQSHSSEGVWLI

SEQ ID NO: 27034 - protein, 381 aa, Homo sapiens; identical to SEQ ID NO: 27033
  Payload ID: 5325
  Gene Symbol: ELMOD3
  Gene Name: ELMO/CED-12 domain containing 3
  Uniprot ID: Q96FG2
  ENSP ID: ENSP00000386248

SEQ ID NO: 27035 - protein, 202 aa, Homo sapiens
  Payload ID: 5325
  Gene Symbol: ELMOD3
  Gene Name: ELMO/CED-12 domain containing 3
  ENSP ID: ENSP00000386257
MNEKSCSFHSKEELRDGQGERLSAGYSPSYDKDKSVLAFRGIPISELKNHGILQALTTEAYEWEPRVVSTEVVRAQEEWEAVDTIQPETGSQASSEQPGQLISFSEALQHFQTVDLSPFKKRIQPTIRRTGLAALRHYLFGPPKLHQRLREERDLVLTIAQCGLDSQDPVHGRVLQTIYKKLTGSKFDCALHGNHWEDLGFQ

SEQ ID NO: 27036 - protein, 381 aa, Homo sapiens; identical to SEQ ID NO: 27033
  Payload ID: 5325
  Gene Symbol: ELMOD3
  Gene Name: ELMO/CED-12 domain containing 3
  Uniprot ID: Q96FG2
  ENSP ID: ENSP00000386304

SEQ ID NO: 27037 - protein, 185 aa, Homo sapiens
  Payload ID: 5325
  Gene Symbol: ELMOD3
  Gene Name: ELMO/CED-12 domain containing 3
  Uniprot ID: Q96FG2
  ENSP ID: ENSP00000387134
MNEKSCSFHSKEELRDGQGERLSAGYSPSYDKDKSVLAFRGIPISELKNHGILQALTTEAYEWEPRVVSTEVVRAQEEWEAVDTIQPETGSQASSEQPGQLISFSEALQHFQTVDLSPFKKRIQPTIRRTGLAALRHYLFGPPKLHQRLREERDLVLTIAQCECNASPQGSCCICGWARPCVLTL

SEQ ID NO: 27038 - protein, 381 aa, Homo sapiens; identical to SEQ ID NO: 27033
  Payload ID: 5325
  Gene Symbol: ELMOD3
  Gene Name: ELMO/CED-12 domain containing 3
  Uniprot ID: Q96FG2
  ENSP ID: ENSP00000387139

SEQ ID NO: 27039 - protein, 120 aa, Homo sapiens
  Payload ID: 5325
  Gene Symbol: ELMOD3
  Gene Name: ELMO/CED-12 domain containing 3
  ENSP ID: ENSP00000393443
MNEKSCSFHSKEELRDGQGERLSAGYSPSYDKDKSVLAFRGIPISELKNHGILQALTTEAYEWEPRVVSTEVVRAQEEWEAVDTIQPETGSQASSEQPGQLISFSEALQHFQTVDLSPFK

SEQ ID NO: 27040 - protein, 161 aa, Homo sapiens
  Payload ID: 5325
  Gene Symbol: ELMOD3
  Gene Name: ELMO/CED-12 domain containing 3
  Uniprot ID: Q96FG2
  ENSP ID: ENSP00000394774
MNEKSCSFHSKEELRDGQGERLSAGYSPSYDKDKSVLAFRGIPISELKNHGILQALTTEAYEWEPRVVSTEVVRAQEEWEAVDTIQPETGSQASSEQPGQLISFSEALQHFQTVDLSPFKKRIQPTIRRTGLAALRHYLFGPPKLHQRLREERDLVLTIAQ

SEQ ID NO: 27041 - protein, 44 aa, Homo sapiens
  Payload ID: 5325
  Gene Symbol: ELMOD3
  Gene Name: ELMO/CED-12 domain containing 3
  ENSP ID: ENSP00000398264
MNEKSCSFHSKEELRDGQGERLSAGYSPSYDKDKSVLAFRGIPL

SEQ ID NO: 27042 - protein, 254 aa, Homo sapiens
  Payload ID: 5325
  Gene Symbol: ELMOD3
  Gene Name: ELMO/CED-12 domain containing 3
  Uniprot ID: Q96FG2
  ENSP ID: ENSP00000401984
MNEKSCSFHSKEELRDGQGERLSAGYSPSYDKDKSVLAFRGIPISELKNHGILQALTTEAYEWEPRVVSTEVVRAQEEWEAVDTIQPETGSQASSEQPGQLISFSEALQHFQTVDLSPFKKRIQPTIRRTGLAALRHYLFGPPKLHQRLREERDLVLTIAQCGLDSQDPVHGRVLQTIYKKLTGSKFDCALHGNHWEDLGFQGANPATDLRGAGFLALLHLLYLVMDSKTLPMAQEIFRLSRHHIQIERNQGKG

SEQ ID NO: 27043 - protein, 254 aa, Homo sapiens; identical to SEQ ID NO: 27042
  Payload ID: 5325
  Gene Symbol: ELMOD3
  Gene Name: ELMO/CED-12 domain containing 3
  Uniprot ID: Q96FG2
  ENSP ID: ENSP00000407599

SEQ ID NO: 27044 - protein, 84 aa, Homo sapiens
  Payload ID: 5325
  Gene Symbol: ELMOD3
  Gene Name: ELMO/CED-12 domain containing 3
  ENSP ID: ENSP00000408329
MNEKSCSFHSKEELRDGQGERLSAGYSPSYDKDKSVLAFRGIPKRIQPTIRRTGLAALRHYLFGPPKLHQRLREERDLVLTIAQ

SEQ ID NO: 27045 - protein, 162 aa, Homo sapiens
  Payload ID: 5325
  Gene Symbol: ELMOD3
  Gene Name: ELMO/CED-12 domain containing 3
  ENSP ID: ENSP00000408745
MNEKSCSFHSKEELRDGQGERLSAGYSPSYDKDKSVLAFRGIPISELKNHGILQALTTEAYEWEPRVVSTEVVRAQEEWEAVDTIQPETGSQASSEQPGQLISFSEALQHFQTVDLSPFKKRIQPTIRRTGLAALRHYLFGPPKLHQRLREERDLVLTIAQY

SEQ ID NO: 27046 - protein, 126 aa, Homo sapiens
  Payload ID: 5325
  Gene Symbol: ELMOD3
  Gene Name: ELMO/CED-12 domain containing 3
  ENSP ID: ENSP00000436715
MNEKSCSFHSKEELRDGQGERLSAGYSPSYDKDKSVLAFRGIPISELKNHGILQALTTEAYEWEPRVVSTEVVRAQEEWEAVDTIQPETGSQASSEQPGQLISFSEALQHFQTVDLSPFKKRIQPT

SEQ ID NO: 27047 - protein, 621 aa, Homo sapiens
  Payload ID: 5326
  Gene Symbol: ELL
  Gene Name: elongation factor RNA polymerase II
  Uniprot ID: P55199
  ENSP ID: ENSP00000262809
MAALKEDRSYGLSCGRVSDGSKVSVFHVKLTDSALRAFESYRARQDSVSLRPSIRFQGSQGHISIPQPDCPAEARTFSFYLSNIGRDNPQGSFDCIQQYVSSHGEVHLDCLGSIQDKITVCATDDSYQKARQSMAQAEEETRSRSAIVIKAGGRYLGKKVQFRKPAPGATDAVPSRKRATPINLASAIRKSGASAVSGGSGVSQRPFRDRVLHLLALRPYRKAELLLRLQKDGLTQADKDALDGLLQQVANMSAKDGTCTLQDCMYKDVQKDWPGYSEGDQQLLKRVLVRKLCQPQSTGSLLGDPAASSPPGERGRSASPPQKRLQPPDFIDPLANKKPRISHFTQRAQPAVNGKLGVPNGREALLPTPGPPASTDTLSSSTHLPPRLEPPRAHDPLADVSNDLGHSGRDCEHGEAAAPAPTVRLGLPLLTDCAQPSRPHGSPSRSKPKKKSKKHKDKERAAEDKPRAQLPDCAPATHATPGAPADTPGLNGTCSVSSVPTSTSETPDYLLKYAAISSSEQRQSYKNDFNAEYSEYRDLHARIERITRRFTQLDAQLRQLSQGSEEYETTRGQILQEYRKIKKTNTNYSQEKHRCEYLHSKLAHIKRLIAEYDQRQLQAWP

SEQ ID NO: 27048 - protein, 488 aa, Homo sapiens
  Payload ID: 5326
  Gene Symbol: ELL
  Gene Name: elongation factor RNA polymerase II
  ENSP ID: ENSP00000475648
MAQAEEETRSRSAIVIKAGGRYLGKKVQFRKPAPGATDAVPSRKRATPINLASAIRKSGASAVSGGSGVSQRPFRDRVLHLLALRPYRKAELLLRLQKDGLTQADKDALDGLLQQVANMSAKDGTCTLQDCMYKDVQKDWPGYSEGDQQLLKRVLVRKLCQPQSTGSLLGDPAASSPPGERGRSASPPQKRLQPPDFIDPLANKKPRISHFTQRAQPAVNGKLGVPNGREALLPTPGPPASTDTLSSSTHLPPRLEPPRAHDPLADVSNDLGHSGRDCEHGEAAAPAPTVRLGLPLLTDCAQPSRPHGSPSRSKPKKKSKKHKDKERAAEDKPRAQLPDCAPATHATPGAPADTPGLNGTCSVSSVPTSTSETPDYLLKYAAISSSEQRQSYKNDFNAEYSEYRDLHARIERITRRFTQLDAQLRQLSQGSEEYETTRGQILQEYRKIKKTNTNYSQEKHRCEYLHSKLAHIKRLIAEYDQRQLQAWP

SEQ ID NO: 27049 - protein, 74 aa, Homo sapiens
  Payload ID: 5326
  Gene Symbol: ELL
  Gene Name: elongation factor RNA polymerase II
  ENSP ID: ENSP00000475681
MAALKEDRSYGLSCGRVSDGSKVSVFHVKLTDSALRAFESYRARQDSVSLRPSIRFQGSQGPESSAQLDVGIWT

SEQ ID NO: 27050 - protein, 397 aa, Homo sapiens
  Payload ID: 5327
  Gene Symbol: ELL3
  Gene Name: elongation factor RNA polymerase II-like 3
  Uniprot ID: Q9HB65
  ENSP ID: ENSP00000320346
MEELQEPLRGQLRLCFTQAARTSLLLLRLNDAALRALQECQRQQVRPVIAFQGHRGYLRLPGPGWSCLFSFIVSQCCQEGAGGSLDLVCQRFLRSGPNSLHCLGSLRERLIIWAAMDSIPAPSSVQGHNLTEDARHPESWQNTGGYSEGDAVSQPQMALEEVSVSDPLASNQGQSLPGSSREHMAQWEVRSQTHVPNREPVQALPSSASRKRLDKKRSVPVATVELEEKRFRTLPLVPSPLQGLTNQDLQEGEDWEQEDEDMDPRLEHSSSVQEDSESPSPEDIPDYLLQYRAIHSAEQQHAYEQDFETDYAEYRILHARVGTASQRFIELGAEIKRVRRGTPEYKVLEDKIIQEYKKFRKQYPSYREEKRRCEYLHQKLSHIKGLILEFEEKNRGS

SEQ ID NO: 27051 - protein, 206 aa, Homo sapiens
  Payload ID: 5327
  Gene Symbol: ELL3
  Gene Name: elongation factor RNA polymerase II-like 3
  ENSP ID: ENSP00000404209
MRILEESAERRWRWWPSPVAPVLLALELVAMEELQEPLRGQLRLCFTQAARTSLLLLRLNDAALRALQECQRQQVRPVIAFQGHRGYLRLPGPGWSCLFSFIVSQCCQEGAGGSLDLVCQRFLRSGPNSLHCLGSLRERLIIWAAMDSIPAPSSVQGHNLTEDARHPESWQNTGGYSEGDAVSQPQMALEEVSVSDPLASNQGQSL

SEQ ID NO: 27052 - protein, 1120 aa, Homo sapiens
  Payload ID: 5328
  Gene Symbol: EFTUD1
  Gene Name: elongation factor Tu GTP binding domain containing 1
  Uniprot ID: Q7Z2Z2
  ENSP ID: ENSP00000268206
MVLNSLDKMIQLQKNTANIRNICVLAHVDHGKTTLADCLISSNGIISSRLAGKLRYMDSREDEQIRGITMKSSAISLHYATGNEEYLINLIDSPGHVDFSSEVSTAVRICDGCIIVVDAVEGVCPQTQAVLRQAWLENIRPVLVINKIDRLIVELKFTPQEAYSHLKNILEQINALTGTLFTSKVLEERAERETESQVNPNSEQGEQVYDWSTGLEDTDDSHLYFSPEQGNVVFTSAIDGWGFGIEHFARIYSQKIGIKKEVLMKTLWGDYYINMKAKKIMKGDQAKGKKPLFVQLILENIWSLYDAVLKKDKDKIDKIVTSLGLKIGAREARHSDPKVQINAICSQWLPISHAVLAMVCQKLPSPLDITAERVERLMCTGSQTFDSFPPETQALKAAFMKCGSEDTAPVIIFVSKMFAVDAKALPQNKPRPLTQEEIAQRRERARQRHAEKLAAAQGQAPLEPTQDGSAIETCPKGEEPRGDEQQVESMTPKPVLQEENNQESFIAFARVFSGVARRGKKIFVLGPKYSPLEFLRRVPLGFSAPPDGLPQVPHMAYCALENLYLLMGRELEYLEEVPPGNVLGIGGLQDFVLKSATLCSLPSCPPFIPLNFEATPIVRVAVEPKHPSEMPQLVKGMKLLNQADPCVQILIQETGEHVLVTAGEVHLQRCLDDLKERFAKIHISVSEPIIPFRETITKPPKVDMVNEEIGKQQKVAVIHQMKEDQSKIPEGIQVDSDGLITITTPNKLATLSVRAMPLPEEVTQILEENSDLIRSMEQLTSSLNEGENTHMIHQKTQEKIWEFKGKLEQHLTGRRWRNIVDQIWSFGPRKCGPNILVNKSEDFQNSVWTGPADKASKEASRYRDLGNSIVSGFQLATLSGPMCEEPLMGVCFVLEKWDLSKFEEQGASDLAKEGQEENETCSGGNENQELQDGCSEAFEKRTSQKGESPLTDCYGPFSGQLIATMKEACRYALQVKPQRLMAAMYTCDIMATGDVLGRVYAVLSKREGRVLQEEMKEGTDMFIIKAVLPVAESFGFADEIRKRTSGLASPQLVFSHWEIIPSDPFWVPTTEEEYLHFGEKADSENQARKYMNAVRKRKGLYVEEKIVEHAEKQRTLSKNK

SEQ ID NO: 27053 - protein, 1069 aa, Homo sapiens
  Payload ID: 5328
  Gene Symbol: EFTUD1
  Gene Name: elongation factor Tu GTP binding domain containing 1
  Uniprot ID: Q7Z2Z2
  ENSP ID: ENSP00000352418
MVLNSLDKMIQLQKNTANIRNICVLAHVDHGNEEYLINLIDSPGHVDFSSEVSTAVRICDGCIIVVDAVEGVCPQTQAVLRQAWLENIRPVLVINKIDRLIVELKFTPQEAYSHLKNILEQINALTGTLFTSKVLEERAERETESQVNPNSEQGEQVYDWSTGLEDTDDSHLYFSPEQGNVVFTSAIDGWGFGIEHFARIYSQKIGIKKEVLMKTLWGDYYINMKAKKIMKGDQAKGKKPLFVQLILENIWSLYDAVLKKDKDKIDKIVTSLGLKIGAREARHSDPKVQINAICSQWLPISHAVLAMVCQKLPSPLDITAERVERLMCTGSQTFDSFPPETQALKAAFMKCGSEDTAPVIIFVSKMFAVDAKALPQNKPRPLTQEEIAQRRERARQRHAEKLAAAQGQAPLEPTQDGSAIETCPKGEEPRGDEQQVESMTPKPVLQEENNQESFIAFARVFSGVARRGKKIFVLGPKYSPLEFLRRVPLGFSAPPDGLPQVPHMAYCALENLYLLMGRELEYLEEVPPGNVLGIGGLQDFVLKSATLCSLPSCPPFIPLNFEATPIVRVAVEPKHPSEMPQLVKGMKLLNQADPCVQILIQETGEHVLVTAGEVHLQRCLDDLKERFAKIHISVSEPIIPFRETITKPPKVDMVNEEIGKQQKVAVIHQMKEDQSKIPEGIQVDSDGLITITTPNKLATLSVRAMPLPEEVTQILEENSDLIRSMEQLTSSLNEGENTHMIHQKTQEKIWEFKGKLEQHLTGRRWRNIVDQIWSFGPRKCGPNILVNKSEDFQNSVWTGPADKASKEASRYRDLGNSIVSGFQLATLSGPMCEEPLMGVCFVLEKWDLSKFEEQGASDLAKEGQEENETCSGGNENQELQDGCSEAFEKRTSQKGESPLTDCYGPFSGQLIATMKEACRYALQVKPQRLMAAMYTCDIMATGDVLGRVYAVLSKREGRVLQEEMKEGTDMFIIKAVLPVAESFGFADEIRKRTSGLASPQLVFSHWEIIPSDPFWVPTTEEEYLHFGEKADSENQARKYMNAVRKRKGLYVEEKIVEHAEKQRTLSKNK

SEQ ID NO: 27054 - protein, 58 aa, Homo sapiens
  Payload ID: 5328
  Gene Symbol: EFTUD1
  Gene Name: elongation factor Tu GTP binding domain containing 1
  ENSP ID: ENSP00000452687
MVLNSLDKMIQLQKNTANIRNICVLAHVDHGKTTLADCLISSNGIISSRLAGKVMRST

SEQ ID NO: 27055 - protein, 139 aa, Homo sapiens
  Payload ID: 5328
  Gene Symbol: EFTUD1
  Gene Name: elongation factor Tu GTP binding domain containing 1
  ENSP ID: ENSP00000452825
  MOD_RES (1)..(1): Any amino acid
XREDEQIRGITMKSSAISLHYATGNEEYLINLIDSPGHVDFSSEVSTAVRICDGCIIVVDAVEGVCPQINALTGTLFTSKVLEERAERETESQVNPNSEQGEQVYDWSTGLEDTDDSHLYFSPEQGNVVFTSAIDGWGF

SEQ ID NO: 27056 - protein, 16 aa, Homo sapiens
  Payload ID: 5328
  Gene Symbol: EFTUD1
  Gene Name: elongation factor Tu GTP binding domain containing 1
  ENSP ID: ENSP00000452990
MVLNSLDKMIQLQKNT

SEQ ID NO: 27057 - protein, 30 aa, Homo sapiens
  Payload ID: 5328
  Gene Symbol: EFTUD1
  Gene Name: elongation factor Tu GTP binding domain containing 1
  ENSP ID: ENSP00000454186
MVLNSLDKMIQLQKNTANIRNICVLAHVDH

SEQ ID NO: 27058 - protein, 937 aa, Homo sapiens
  Payload ID: 5329
  Gene Symbol: EFTUD2
  Gene Name: elongation factor Tu GTP binding domain containing 2
  Uniprot ID: Q15029
  ENSP ID: ENSP00000385873
MDDDDDDDDVGDHDDDHPGMEVVLHEDKKYYPTAEEVYGPEVETIVQEEDTQPLTEPIIKPVKTKKFTLMEQTLPVTVYEMDFLADLMDNSELIRNVTLCGHLHHGKTCFVDCLIEQTHPEIRKRYDQDLCYTDILFTEQERGVGIKSTPVTVVLPDTKGKSYLFNIMDTPGHVNFSDEVTAGLRISDGVVLFIDAAEGVMLNTERLIKHAVQERLAVTVCINKIDRLILELKLPPTDAYYKLRHIVDEVNGLISMYSTDENLILSPLLGNVCFSSSQYSICFTLGSFAKIYADTFGDINYQEFAKRLWGDIYFNPKTRKFTKKAPTSSSQRSFVEFILEPLYKILAQVVGDVDTSLPRTLDELGIHLTKEELKLNIRPLLRLVCKKFFGEFTGFVDMCVQHIPSPKVGAKPKIEHTYTGGVDSDLGEAMSDCDPDGPLMCHTTKMYSTDDGVQFHAFGRVLSGTIHAGQPVKVLGENYTLEDEEDSQICTVGRLWISVARYHIEVNRVPAGNWVLIEGVDQPIVKTATITEPRGNEEAQIFRPLKFNTTSVIKIAVEPVNPSELPKMLDGLRKVNKSYPSLTTKVEESGEHVILGTGELYLDCVMHDLRKMYSEIDIKVADPVVTFCETVVETSSLKCFAETPNKKNKITMIAEPLEKGLAEDIENEVVQITWNRKKLGEFFQTKYDWDLLAARSIWAFGPDATGPNILVDDTLPSEVDKALLGSVKDSIVQGFQWGTREGPLCDELIRNVKFKILDAVVAQEPLHRGGGQIIPTARRVVYSAFLMATPRLMEPYYFVEVQAPADCVSAVYTVLARRRGHVTQDAPIPGSPLYTIKAFIPAIDSFGFETDLRTHTQGQAFSLSVFHHWQIVPGDPLDKSIVIRPLEPQPAPHLAREFMIKTRRRKGLSEDVSISKFFDDPMLLELAKQDVVLNYPM

SEQ ID NO: 27059 - protein, 972 aa, Homo sapiens
  Payload ID: 5329
  Gene Symbol: EFTUD2
  Gene Name: elongation factor Tu GTP binding domain containing 2
  Uniprot ID: Q15029
  ENSP ID: ENSP00000392094
MDTDLYDEFGNYIGPELDSDEDDDELGRETKDLDEMDDDDDDDDVGDHDDDHPGMEVVLHEDKKYYPTAEEVYGPEVETIVQEEDTQPLTEPIIKPVKTKKFTLMEQTLPVTVYEMDFLADLMDNSELIRNVTLCGHLHHGKTCFVDCLIEQTHPEIRKRYDQDLCYTDILFTEQERGVGIKSTPVTVVLPDTKGKSYLFNIMDTPGHVNFSDEVTAGLRISDGVVLFIDAAEGVMLNTERLIKHAVQERLAVTVCINKIDRLILELKLPPTDAYYKLRHIVDEVNGLISMYSTDENLILSPLLGNVCFSSSQYSICFTLGSFAKIYADTFGDINYQEFAKRLWGDIYFNPKTRKFTKKAPTSSSQRSFVEFILEPLYKILAQVVGDVDTSLPRTLDELGIHLTKEELKLNIRPLLRLVCKKFFGEFTGFVDMCVQHIPSPKVGAKPKIEHTYTGGVDSDLGEAMSDCDPDGPLMCHTTKMYSTDDGVQFHAFGRVLSGTIHAGQPVKVLGENYTLEDEEDSQICTVGRLWISVARYHIEVNRVPAGNWVLIEGVDQPIVKTATITEPRGNEEAQIFRPLKFNTTSVIKIAVEPVNPSELPKMLDGLRKVNKSYPSLTTKVEESGEHVILGTGELYLDCVMHDLRKMYSEIDIKVADPVVTFCETVVETSSLKCFAETPNKKNKITMIAEPLEKGLAEDIENEVVQITWNRKKLGEFFQTKYDWDLLAARSIWAFGPDATGPNILVDDTLPSEVDKALLGSVKDSIVQGFQWGTREGPLCDELIRNVKFKILDAVVAQEPLHRGGGQIIPTARRVVYSAFLMATPRLMEPYYFVEVQAPADCVSAVYTVLARRRGHVTQDAPIPGSPLYTIKAFIPAIDSFGFETDLRTHTQGQAFSLSVFHHWQIVPGDPLDKSIVIRPLEPQPAPHLAREFMIKTRRRKGLSEDVSISKFFDDPMLLELAKQDVVLNYPM

SEQ ID NO: 27060 - protein, 148 aa, Homo sapiens
  Payload ID: 5329
  Gene Symbol: EFTUD2
  Gene Name: elongation factor Tu GTP binding domain containing 2
  ENSP ID: ENSP00000464882
MDTDLYDEFGNYIGPELDSDEDDDELGRETKDLDEMDDDDDDDDVGDHDDDHPGMEVVLHEDKKYYPTAEEVYGPEVETIVQEEDTQPLTEPIIKPVKTKKFTLMEQTLPVTVYEMDFLADLMDNSELIRNVTLCGHLHHGKTCFVDC

SEQ ID NO: 27061 - protein, 106 aa, Homo sapiens
  Payload ID: 5329
  Gene Symbol: EFTUD2
  Gene Name: elongation factor Tu GTP binding domain containing 2
  ENSP ID: ENSP00000464908
MDTDLYDEFGNYIGPELDSDEDDDELGRETKDLDEMDDDDDDDDVGDHDDDHPGMEVVLHEDKKYYPTAEEVYGPEVETIVQEEDTQPLTEPIIKPVKTKKFTLME

SEQ ID NO: 27062 - protein, 134 aa, Homo sapiens
  Payload ID: 5329
  Gene Symbol: EFTUD2
  Gene Name: elongation factor Tu GTP binding domain containing 2
  ENSP ID: ENSP00000465051
  MOD_RES (1)..(1): Any amino acid
XQTKYDWDLLAARSIWAFGPDATGPNILVDDTLPSEVDKALLGSVKDSIVQGFQWGTREGPLCDELIRNVKFKILDAVVAQEPLHRGGGQIIPTARRVVYSAFLMGARDSGCTHPRLPSVHHQSFYPGHRLFWL

SEQ ID NO: 27063 - protein, 962 aa, Homo sapiens
  Payload ID: 5329
  Gene Symbol: EFTUD2
  Gene Name: elongation factor Tu GTP binding domain containing 2
  Uniprot ID: Q15029
  ENSP ID: ENSP00000465058
MDTDLYDEFGNYIGPELDSDEDDDELGRETKDLDEMDDDDDDDDVGDHDDDHPGMEVVLHEDKKYYPTAEEVYGPEVETIVQEEDTQPLTEPIIKPVKTKKFTLMEQTLPVTVYEMDFLADLMDNSELIRNVTLCGHLHHGKTHPEIRKRYDQDLCYTDILFTEQERGVGIKSTPVTVVLPDTKGKSYLFNIMDTPGHVNFSDEVTAGLRISDGVVLFIDAAEGVMLNTERLIKHAVQERLAVTVCINKIDRLILELKLPPTDAYYKLRHIVDEVNGLISMYSTDENLILSPLLGNVCFSSSQYSICFTLGSFAKIYADTFGDINYQEFAKRLWGDIYFNPKTRKFTKKAPTSSSQRSFVEFILEPLYKILAQVVGDVDTSLPRTLDELGIHLTKEELKLNIRPLLRLVCKKFFGEFTGFVDMCVQHIPSPKVGAKPKIEHTYTGGVDSDLGEAMSDCDPDGPLMCHTTKMYSTDDGVQFHAFGRVLSGTIHAGQPVKVLGENYTLEDEEDSQICTVGRLWISVARYHIEVNRVPAGNWVLIEGVDQPIVKTATITEPRGNEEAQIFRPLKFNTTSVIKIAVEPVNPSELPKMLDGLRKVNKSYPSLTTKVEESGEHVILGTGELYLDCVMHDLRKMYSEIDIKVADPVVTFCETVVETSSLKCFAETPNKKNKITMIAEPLEKGLAEDIENEVVQITWNRKKLGEFFQTKYDWDLLAARSIWAFGPDATGPNILVDDTLPSEVDKALLGSVKDSIVQGFQWGTREGPLCDELIRNVKFKILDAVVAQEPLHRGGGQIIPTARRVVYSAFLMATPRLMEPYYFVEVQAPADCVSAVYTVLARRRGHVTQDAPIPGSPLYTIKAFIPAIDSFGFETDLRTHTQGQAFSLSVFHHWQIVPGDPLDKSIVIRPLEPQPAPHLAREFMIKTRRRKGLSEDVSISKFFDDPMLLELAKQDVVLNYPM

SEQ ID NO: 27064 - protein, 223 aa, Homo sapiens
  Payload ID: 5329
  Gene Symbol: EFTUD2
  Gene Name: elongation factor Tu GTP binding domain containing 2
  ENSP ID: ENSP00000467249
VETSSLKCFAETPNKKNKITMIAEPLEKGLAEDIENEVVQITWNRKKLGEFFQTKYDWDLLAARSIWAFGPDATGPNILVDDTLPSEVDKALLGSVKDSIVQGFQWGTREGPLCDELIRNVKFKILDAVVAQEPLHRGGGQIIPTARRVVYSAFLMIVPGDPLDKSIVIRPLEPQPAPHLAREFMIKTRRRKGLSEDVSISKFFDDPMLLELAKQDVVLNYPM

SEQ ID NO: 27065 - protein, 33 aa, Homo sapiens
  Payload ID: 5329
  Gene Symbol: EFTUD2
  Gene Name: elongation factor Tu GTP binding domain containing 2
  ENSP ID: ENSP00000467639
FGNYIGPELDSDEDDDELGRETKDLDENPLLSQ

SEQ ID NO: 27066 - protein, 972 aa, Homo sapiens; identical to SEQ ID NO: 27059
  Payload ID: 5329
  Gene Symbol: EFTUD2
  Gene Name: elongation factor Tu GTP binding domain containing 2
  Uniprot ID: Q15029
  ENSP ID: ENSP00000467805

SEQ ID NO: 27067 - protein, 38 aa, Homo sapiens
  Payload ID: 5329
  Gene Symbol: EFTUD2
  Gene Name: elongation factor Tu GTP binding domain containing 2
  ENSP ID: ENSP00000468284
VTSASPAPSTASASRWAPLPRSMPTPLKELPGPWKGKC

SEQ ID NO: 27068 - protein, 640 aa, Homo sapiens
  Payload ID: 5330
  Gene Symbol: ELL2
  Gene Name: elongation factor, RNA polymerase II, 2
  Uniprot ID: O00472
  ENSP ID: ENSP00000237853
MAAGGTGGLREEQRYGLSCGRLGQDNITVLHVKLTETAIRALETYQSHKNLIPFRPSIQFQGLHGLVKIPKNDPLNEVHNFNFYLSNVGKDNPQGSFDCIQQTFSSSGASQLNCLGFIQDKITVCATNDSYQMTRERMTQAEEESRNRSTKVIKPGGPYVGKRVQIRKAPQAVSDTVPERKRSTPMNPANTIRKTHSSSTISQRPYRDRVIHLLALKAYKKPELLARLQKDGVNQKDKNSLGAILQQVANLNSKDLSYTLKDYVFKELQRDWPGYSEIDRRSLESVLSRKLNPSQNAAGTSRSESPVCSSRDAVSSPQKRLLDSEFIDPLMNKKARISHLTNRVPPTLNGHLNPTSEKSAAGLPLPPAAAAIPTPPPLPSTYLPISHPPQIVNSNSNSPSTPEGRGTQDLPVDSFSQNDSIYEDQQDKYTSRTSLETLPPGSVLLKCPKPMEENHSMSHKKSKKKSKKHKEKDQIKKHDIETIEEKEEDLKREEEIAKLNNSSPNSSGGVKEDCTASMEPSAIELPDYLIKYIAIVSYEQRQNYKDDFNAEYDEYRALHARMETVARRFIKLDAQRKRLSPGSKEYQNVHEEVLQEYQKIKQSSPNYHEEKYRCEYLHNKLAHIKRLIGEFDQQQAESWS

SEQ ID NO: 27069 - protein, 137 aa, Homo sapiens
  Payload ID: 5330
  Gene Symbol: ELL2
  Gene Name: elongation factor, RNA polymerase II, 2
  ENSP ID: ENSP00000420894
  MOD_RES (1)..(1): Any amino acid
XEEKEEDLKREEEIAKLNNSSPNSSGGVKEDCTASMEPSAIELPDYLIKYIAIVSYEQRQNYKDDFNAEYDEYRALHARMETVARRFIKLDAQRKRLSPGSKEYQVNGFVTRWADFHILPSFFPCPAQPQPSQWPLE

SEQ ID NO: 27070 - protein, 151 aa, Homo sapiens
  Payload ID: 5330
  Gene Symbol: ELL2
  Gene Name: elongation factor, RNA polymerase II, 2
  ENSP ID: ENSP00000423915
MAAGGTGGLREEQRYGLSCGRLGQDNITVLHVKLTETAIRALETYQSHKNLIPFRPSIQFQGLHGVANLNSKDLSYTLKDYVFKELQRDWPGYSEIDRRSLESVLSRKLNPSQNAAGTSRSESPVCSSRDAVSSPQKRLLDSEFIDPLMNK

SEQ ID NO: 27071 - protein, 65 aa, Homo sapiens
  Payload ID: 5330
  Gene Symbol: ELL2
  Gene Name: elongation factor, RNA polymerase II, 2
  ENSP ID: ENSP00000489270
  MOD_RES (1)..(1): Any amino acid
XLSCGRLGQDNITVLHVKLTETAIRALETYQSHKNLIPFRPSIQFQGLHGMPVFFKRTLQTSHKA

SEQ ID NO: 27072 - protein, 800 aa, Homo sapiens
  Payload ID: 5331
  Gene Symbol: ELP2
  Gene Name: elongator acetyltransferase complex subunit 2
  Uniprot ID: Q6IA86
  ENSP ID: ENSP00000257191
MVAPVLETSHVFCCPNRVRGVLNWSSGPRGLLAFGTSCSVVLYDPLKRVVVTNLNGHTARVNCIQWICKQDGSPSTELVSGGSDNQVIHWEIEDNQLLKAVHLQGHEGPVYAVHAVYQRRTSDPALCTLIVSAAADSAVRLWSKKGPEVPILACGNDDCRIHIFAQQNDQFQKVLSLCGHEDWIRGVEWAAFGRDLFLASCSQDCLIRIWKLYIKSTSLETQDDDNIRLKENTFTIENESVKIAFAVTLETVLAGHENWVNAVHWQPVFYKDGVLQQPVRLLSASMDKTMILWAPDEESGVWLEQVRVGEVGGNTLGFYDCQFNEDGSMIIAHAFHGALHLWKQNTVNPREWTPEIVISGHFDGVQDLVWDPEGEFIITVGTDQTTRLFAPWKRKDQSQVTWHEIARPQIHGYDLKCLAMINRFQFVSGADEKVLRVFSAPRNFVENFCAITGQSLNHVLCNQDSDLPEGATVPALGLSNKAVFQGDIASQPSDEEELLTSTGFEYQQVAFQPSILTEPPTEDHLLQNTLWPEVQKLYGHGYEIFCVTCNSSKTLLASACKAAKKEHAAIILWNTTSWKQVQNLVFHSLTVTQMAFSPNEKFLLAVSRDRTWSLWKKQDTISPEFEPVFSLFAFTNKITSVHSRIIWSCDWSPDSKYFFTGSRDKKVVVWGECDSTDDCIEHNIGPCSSVLDVGGAVTAVSVCPVLHPSQRYVVAVGLECGKICLYTWKKTDQVPEINDWTHCVETSQSQSHTLAIRKLCWKNCSGKTEQKEAEGAEWLHFASCGEDHTVKIHRVNKCAL

SEQ ID NO: 27073 - protein, 821 aa, Homo sapiens
  Payload ID: 5331
  Gene Symbol: ELP2
  Gene Name: elongator acetyltransferase complex subunit 2
  Uniprot ID: Q6IA86
  ENSP ID: ENSP00000316051
MVAPVLETSHVFCCPNRVRGVLNWSSGPRGLLAFGTSCSVVLYDPLKRVVVTNLNGHTARVNCIQWICKQDGSPSTELVSGGSDNQVIHWEIEDNQLLKAVHLQGHEGPVYAVHAVYQRRTSDPALCTLIVSAAADSAVRLWSKKGPEVTWKTGQVERGRAWKPPASLALCSRSCDSMVSCYASILCKALWKEKLHTFWHHNRISFLPSAFRPIPILACGNDDCRIHIFAQQNDQFQKVLSLCGHEDWIRGVEWAAFGRDLFLASCSQDCLIRIWKLYIKSTSLETQDDDNIRLKENTFTIENESVKIAFAVTLETVLAGHENWVNAVHWQPVFYKDGVLQQPVRLLSASMDKTMILWAPDEESGVWLEQREWTPEIVISGHFDGVQDLVWDPEGEFIITVGTDQTTRLFAPWKRKDQSQVTWHEIARPQIHGYDLKCLAMINRFQFVSGADEKVLRVFSAPRNFVENFCAITGQSLNHVLCNQDSDLPEGATVPALGLSNKAVFQGDIASQPSDEEELLTSTGFEYQQVAFQPSILTEPPTEDHLLQNTLWPEVQKLYGHGYEIFCVTCNSSKTLLASACKAAKKEHAAIILWNTTSWKQVQNLVFHSLTVTQMAFSPNEKFLLAVSRDRTWSLWKKQDTISPEFEPVFSLFAFTNKITSVHSRIIWSCDWSPDSKYFFTGSRDKKVVVWGECDSTDDCIEHNIGPCSSVLDVGGAVTAVSVCPVLHPSQRYVVAVGLECGKICLYTWKKTDQVPEINDWTHCVETSQSQSHTLAIRKLCWKNCSGKTEQKEAEGAEWLHFASCGEDHTVKIHRVNKCAL

SEQ ID NO: 27074 - protein, 826 aa, Homo sapiens
  Payload ID: 5331
  Gene Symbol: ELP2
  Gene Name: elongator acetyltransferase complex subunit 2
  Uniprot ID: Q6IA86
  ENSP ID: ENSP00000350967
MVAPVLETSHVFCCPNRVRGVLNWSSGPRGLLAFGTSCSVVLYDPLKRVVVTNLNGHTARVNCIQWICKQDGSPSTELVSGGSDNQVIHWEIEDNQLLKAVHLQGHEGPVYAVHAVYQRRTSDPALCTLIVSAAADSAVRLWSKKGPEVMCLQTLNFGNGFALALCLSFLPNTDVPILACGNDDCRIHIFAQQNDQFQKVLSLCGHEDWIRGVEWAAFGRDLFLASCSQDCLIRIWKLYIKSTSLETQDDDNIRLKENTFTIENESVKIAFAVTLETVLAGHENWVNAVHWQPVFYKDGVLQQPVRLLSASMDKTMILWAPDEESGVWLEQVRVGEVGGNTLGFYDCQFNEDGSMIIAHAFHGALHLWKQNTVNPREWTPEIVISGHFDGVQDLVWDPEGEFIITVGTDQTTRLFAPWKRKDQSQVTWHEIARPQIHGYDLKCLAMINRFQFVSGADEKVLRVFSAPRNFVENFCAITGQSLNHVLCNQDSDLPEGATVPALGLSNKAVFQGDIASQPSDEEELLTSTGFEYQQVAFQPSILTEPPTEDHLLQNTLWPEVQKLYGHGYEIFCVTCNSSKTLLASACKAAKKEHAAIILWNTTSWKQVQNLVFHSLTVTQMAFSPNEKFLLAVSRDRTWSLWKKQDTISPEFEPVFSLFAFTNKITSVHSRIIWSCDWSPDSKYFFTGSRDKKVVVWGECDSTDDCIEHNIGPCSSVLDVGGAVTAVSVCPVLHPSQRYVVAVGLECGKICLYTWKKTDQVPEINDWTHCVETSQSQSHTLAIRKLCWKNCSGKTEQKEAEGAEWLHFASCGEDHTVKIHRVNKCAL

SEQ ID NO: 27075 - protein, 756 aa, Homo sapiens
  Payload ID: 5331
  Gene Symbol: ELP2
  Gene Name: elongator acetyltransferase complex subunit 2
  Uniprot ID: Q6IA86
  ENSP ID: ENSP00000391202
MVAPVLETSHVFCCPNRVRGVLNWSSGPRGLLAFGTSCSVVLYDPLKRVVVTNLNGHTARVNCIQWICKQDGSPSTELVSGGSDNQVIHWEIEDNQLLKAVHLQGHEGPVYAVHAVYQRRTSDPALCTLIVSAAADSAVRLWSKKGPEGRDLFLASCSQDCLIRIWKLYIKSTSLETQDDDNIRLKENTFTIENESVKIAFAVTLETVLAGHENWVNAVHWQPVFYKDGVLQQPVRLLSASMDKTMILWAPDEESGVWLEQVRVGEVGGNTLGFYDCQFNEDGSMIIAHAFHGALHLWKQNTVNPREWTPEIVISGHFDGVQDLVWDPEGEFIITVGTDQTTRLFAPWKRKDQSQVTWHEIARPQIHGYDLKCLAMINRFQFVSGADEKVLRVFSAPRNFVENFCAITGQSLNHVLCNQDSDLPEGATVPALGLSNKAVFQGDIASQPSDEEELLTSTGFEYQQVAFQPSILTEPPTEDHLLQNTLWPEVQKLYGHGYEIFCVTCNSSKTLLASACKAAKKEHAAIILWNTTSWKQVQNLVFHSLTVTQMAFSPNEKFLLAVSRDRTWSLWKKQDTISPEFEPVFSLFAFTNKITSVHSRIIWSCDWSPDSKYFFTGSRDKKVVVWGECDSTDDCIEHNIGPCSSVLDVGGAVTAVSVCPVLHPSQRYVVAVGLECGKICLYTWKKTDQVPEINDWTHCVETSQSQSHTLAIRKLCWKNCSGKTEQKEAEGAEWLHFASCGEDHTVKIHRVNKCAL

SEQ ID NO: 27076 - protein, 891 aa, Homo sapiens
  Payload ID: 5331
  Gene Symbol: ELP2
  Gene Name: elongator acetyltransferase complex subunit 2
  Uniprot ID: Q6IA86
  ENSP ID: ENSP00000414851
MVAPVLETSHVFCCPNRVRGVLNWSSGPRGLLAFGTSCSVVLYDPLKRVVVTNLNGHTARVNCIQWICKQDGSPSTELVSGGSDNQVIHWEIEDNQLLKAVHLQGHEGPVYAVHAVYQRRTSDPALCTLIVSAAADSAVRLWSKKGPEVMCLQTLNFGNGFALALCLSFLPNTDVTWKTGQVERGRAWKPPASLALCSRSCDSMVSCYASILCKALWKEKLHTFWHHNRISFLPSAFRPIPILACGNDDCRIHIFAQQNDQFQKVLSLCGHEDWIRGVEWAAFGRDLFLASCSQDCLIRIWKLYIKSTSLETQDDDNIRLKENTFTIENESVKIAFAVTLETVLAGHENWVNAVHWQPVFYKDGVLQQPVRLLSASMDKTMILWAPDEESGVWLEQVRVGEVGGNTLGFYDCQFNEDGSMIIAHAFHGALHLWKQNTVNPREWTPEIVISGHFDGVQDLVWDPEGEFIITVGTDQTTRLFAPWKRKDQSQVTWHEIARPQIHGYDLKCLAMINRFQFVSGADEKVLRVFSAPRNFVENFCAITGQSLNHVLCNQDSDLPEGATVPALGLSNKAVFQGDIASQPSDEEELLTSTGFEYQQVAFQPSILTEPPTEDHLLQNTLWPEVQKLYGHGYEIFCVTCNSSKTLLASACKAAKKEHAAIILWNTTSWKQVQNLVFHSLTVTQMAFSPNEKFLLAVSRDRTWSLWKKQDTISPEFEPVFSLFAFTNKITSVHSRIIWSCDWSPDSKYFFTGSRDKKVVVWGECDSTDDCIEHNIGPCSSVLDVGGAVTAVSVCPVLHPSQRYVVAVGLECGKICLYTWKKTDQVPEINDWTHCVETSQSQSHTLAIRKLCWKNCSGKTEQKEAEGAEWLHFASCGEDHTVKIHRVNKCAL

SEQ ID NO: 27077 - protein, 51 aa, Homo sapiens
  Payload ID: 5331
  Gene Symbol: ELP2
  Gene Name: elongator acetyltransferase complex subunit 2
  ENSP ID: ENSP00000438533
MVAPVLETSHVFCCPNRVRGVLNWSSGPRGLLAFGTSCSVVLYDPLPLLLN

SEQ ID NO: 27078 - protein, 57 aa, Homo sapiens
  Payload ID: 5331
  Gene Symbol: ELP2
  Gene Name: elongator acetyltransferase complex subunit 2
  ENSP ID: ENSP00000440426
MCLQTLNFGNGFALALCLSFLPNTDVPILACGNDDCRIHIFAQQNDQFQKVLSLCGH

SEQ ID NO: 27079 - protein, 51 aa, Homo sapiens; identical to SEQ ID NO: 27077
  Payload ID: 5331
  Gene Symbol: ELP2
  Gene Name: elongator acetyltransferase complex subunit 2
  ENSP ID: ENSP00000440516

SEQ ID NO: 27080 - protein, 47 aa, Homo sapiens
  Payload ID: 5331
  Gene Symbol: ELP2
  Gene Name: elongator acetyltransferase complex subunit 2
  ENSP ID: ENSP00000440651
DEEELLTSTGFEYQQVAFQPSILTEPPTEDHLLQNTLWPEVQKLASF

SEQ ID NO: 27081 - protein, 120 aa, Homo sapiens
  Payload ID: 5331
  Gene Symbol: ELP2
  Gene Name: elongator acetyltransferase complex subunit 2
  ENSP ID: ENSP00000440774
MVAPVLETSHVFCCPNRVRGVLNWSSGPRGLLAFGTSCSVVLYDPLKRVVVTNLNGHTARVNCIQWICKQDGSPSTELVSGGSDNQVIHWEIEDNQAMKDLFMRCMLFTRGGHQILHYVH

SEQ ID NO: 27082 - protein, 705 aa, Homo sapiens
  Payload ID: 5331
  Gene Symbol: ELP2
  Gene Name: elongator acetyltransferase complex subunit 2
  Uniprot ID: Q6IA86
  ENSP ID: ENSP00000443555
MVAPVLETSHVFCCPNRVRGVLNWSSGPRGLLAFGTSCSVVLYDPLKRVVVTNLNGHTARVNCIQWICKQDGSPSTELVSGGSDNQVIHWEIEDNQLLKAVHLQGHEGPVYAVHAVYQRRTSDPALCTLIVSAAADSAVRLWSKKGPEVMCLQTLNFGNGFALALCLSFLPNTDVPILACGNDDCRIHIFAQQNDQFQKVLSLCGHEDWIRGVEWAAFGRDLFLASCSQDCLIRIWKLYIKSTSLETQDDDNIRLKENTFTIENESVKIAFAVTLETVLAGHENWVNAVHWQPVFYKDGVLQQPVRLLSASMDKTMILWAPDEESGVWLEQVRVGEVGGNTLGFYDCQFNEDGSMIIAHAFHGALHLWKQNTVNPREWTPEIVISGHFDGVQDLVWDPEGEFIITVGTDQTTRLFAPWKRKDQSQVTWHEIARPQIHGYDLKCLAMINRFQFVSGADEKVLRVFSAPRNFVENFCAITGQSLNHVLCNQDSDLPEGATVPALGLSNKAVFQGDIASQPSDEEELLTSTGFEYQQVAFQPSILTEPPTEDHLLQNTLWPEVQKLYGHGYEIFCVTCNSSKTLLASACKAAKKEHAAIILWNTTSWKQVQNLVFHSLTVTQMAFSPNEKFLLAVSRDRTWSLWKKQDTISPEFVELFGLVIGVLTASISSLGVETKRWLSGVSATPLMTVLSTTLAPAPQSWTWVGL

SEQ ID NO: 27083 - protein, 756 aa, Homo sapiens
  Payload ID: 5331
  Gene Symbol: ELP2
  Gene Name: elongator acetyltransferase complex subunit 2
  Uniprot ID: Q6IA86
  ENSP ID: ENSP00000443800
MVAPVLETSHVFCCPNRVRGVLNWSSGPRGLLAFGTSCSVVLYDPLKRVVVTNLNGHTARVNCIQWICKQDGSPSTELVSGGSDNQVIHWEIEDNQLLKAVHLQGHEGPVYAVHAVYQRRTSDPALCTLIVSAAADSAVRLWSKKGPEVPILACGNDDCRIHIFAQQNDQFQKVLSLCGHEDWIRGVEWAAFGRDLFLASCSQDCLIRIWKLYIKSTSLETQDDDNIRLKENTFTIENESVKIAFAVTLETVLAGHENWVNAVHWQPVFYKDGVLQQPVRLLSASMDKTMILWAPDEESGVWLEQREWTPEIVISGHFDGVQDLVWDPEGEFIITVGTDQTTRLFAPWKRKDQSQVTWHEIARPQIHGYDLKCLAMINRFQFVSGADEKVLRVFSAPRNFVENFCAITGQSLNHVLCNQDSDLPEGATVPALGLSNKAVFQGDIASQPSDEEELLTSTGFEYQQVAFQPSILTEPPTEDHLLQNTLWPEVQKLYGHGYEIFCVTCNSSKTLLASACKAAKKEHAAIILWNTTSWKQVQNLVFHSLTVTQMAFSPNEKFLLAVSRDRTWSLWKKQDTISPEFEPVFSLFAFTNKITSVHSRIIWSCDWSPDSKYFFTGSRDKKVVVWGECDSTDDCIEHNIGPCSSVLDVGGAVTAVSVCPVLHPSQRYVVAVGLECGKICLYTWKKTDQVPEINDWTHCVETSQSQSHTLAIRKLCWKNCSGKTEQKEAEGAEWLHFASCGEDHTVKIHRVNKCAL

SEQ ID NO: 27084 - protein, 101 aa, Homo sapiens
  Payload ID: 5331
  Gene Symbol: ELP2
  Gene Name: elongator acetyltransferase complex subunit 2
  ENSP ID: ENSP00000468091
MVAPVLETSHVFCCPNRVRGVLNWSSGPRGLLAFGTSCSVVLYDPLKRVVVTNLNGHTARVNCIQWICKQDGSPSTELVSGGSDNQVIHWEIEDNQIWARL

SEQ ID NO: 27085 - protein, 547 aa, Homo sapiens
  Payload ID: 5332
  Gene Symbol: ELP3
  Gene Name: elongator acetyltransferase complex subunit 3
  Uniprot ID: Q9H9T3
  ENSP ID: ENSP00000256398
MRQKRKGDLSPAELMMLTIGDVIKQLIEAHEQGKDIDLNKVKTKTAAKYGLSAQPRLVDIIAAVPPQYRKVLMPKLKAKPIRTASGIAVVAVMCKPHRCPHISFTGNICVYCPGGPDSDFEYSTQSYTGYEPTSMRAIRARYDPFLQTRHRIEQLKQLGHSVDKVEFIVMGGTFMALPEEYRDYFIRNLHDALSGHTSNNIYEAVKYSERSLTKCIGITIETRPDYCMKRHLSDMLTYGCTRLEIGVQSVYEDVARDTNRGHTVKAVCESFHLAKDSGFKVVAHMMPDLPNVGLERDIEQFTEFFENPAFRPDGLKLYPTLVIRGTGLYELWKSGRYKSYSPSDLVELVARILALVPPWTRVYRVQRDIPMPLVSSGVEHGNLRELALARMKDLGIQCRDVRTREVGIQEIHHKVRPYQVELVRRDYVANGGWETFLSYEDPDQDILIGLLRLRKCSEETFRFELGGGVSIVRELHVYGSVVPVSSRDPTKFQHQGFGMLLMEEAERIAREEHGSGKIAVISGVGTRNYYRKIGYRLQGPYMVKMLK

SEQ ID NO: 27086 - protein, 455 aa, Homo sapiens
  Payload ID: 5332
  Gene Symbol: ELP3
  Gene Name: elongator acetyltransferase complex subunit 3
  Uniprot ID: Q9H9T3
  ENSP ID: ENSP00000369711
MCKPHRCPHISFTGNICVYCPGGPDSDFEYSTQSYTGYEPTSMRAIRARYDPFLQTRHRIEQLKQLGHSVDKVEFIVMGGTFMALPEEYRDYFIRNLHDALSGHTSNNIYEAVKYSERSLTKCIGITIETRPDYCMKRHLSDMLTYGCTRLEIGVQSVYEDVARDTNRGHTVKAVCESFHLAKDSGFKVVAHMMPDLPNVGLERDIEQFTEFFENPAFRPDGLKLYPTLVIRGTGLYELWKSGRYKSYSPSDLVELVARILALVPPWTRVYRVQRDIPMPLVSSGVEHGNLRELALARMKDLGIQCRDVRTREVGIQEIHHKVRPYQVELVRRDYVANGGWETFLSYEDPDQDILIGLLRLRKCSEETFRFELGGGVSIVRELHVYGSVVPVSSRDPTKFQHQGFGMLLMEEAERIAREEHGSGKIAVISGVGTRNYYRKIGYRLQGPYMVKMLK

SEQ ID NO: 27087 - protein, 140 aa, Homo sapiens
  Payload ID: 5332
  Gene Symbol: ELP3
  Gene Name: elongator acetyltransferase complex subunit 3
  ENSP ID: ENSP00000427833
RTREVGIQEIHHKVRPYQVELVRRDYVANGGWETFLSYEDPDQDILIGLLRLRKCSEETFRFELGGGVSIVRELHVYGSVVPVSSRDPTKFQHQGFGMLLMEEAERIAREEHGSGKIAVISGVDVLGQRQRGGHHRSCSL

SEQ ID NO: 27088 - protein, 41 aa, Homo sapiens
  Payload ID: 5332
  Gene Symbol: ELP3
  Gene Name: elongator acetyltransferase complex subunit 3
  ENSP ID: ENSP00000428357
MPKLKAKPIRTASGIAVVAVMCKPHRCPHISFTGNICVQPP

SEQ ID NO: 27089 - protein, 533 aa, Homo sapiens
  Payload ID: 5332
  Gene Symbol: ELP3
  Gene Name: elongator acetyltransferase complex subunit 3
  Uniprot ID: Q9H9T3
  ENSP ID: ENSP00000428449
MMLTIGDVIKQLIEAHEQGKDIDLNKVKTKTAAKYGLSAQPRLVDIIAAVPPQYRKVLMPKLKAKPIRTASGIAVVAVMCKPHRCPHISFTGNICVYCPGGPDSDFEYSTQSYTGYEPTSMRAIRARYDPFLQTRHRIEQLKQLGHSVDKVEFIVMGGTFMALPEEYRDYFIRNLHDALSGHTSNNIYEAVKYSERSLTKCIGITIETRPDYCMKRHLSDMLTYGCTRLEIGVQSVYEDVARDTNRGHTVKAVCESFHLAKDSGFKVVAHMMPDLPNVGLERDIEQFTEFFENPAFRPDGLKLYPTLVIRGTGLYELWKSGRYKSYSPSDLVELVARILALVPPWTRVYRVQRDIPMPLVSSGVEHGNLRELALARMKDLGIQCRDVRTREVGIQEIHHKVRPYQVELVRRDYVANGGWETFLSYEDPDQDILIGLLRLRKCSEETFRFELGGGVSIVRELHVYGSVVPVSSRDPTKFQHQGFGMLLMEEAERIAREEHGSGKIAVISGVGTRNYYRKIGYRLQGPYMVKMLK

SEQ ID NO: 27090 - protein, 191 aa, Homo sapiens
  Payload ID: 5332
  Gene Symbol: ELP3
  Gene Name: elongator acetyltransferase complex subunit 3
  ENSP ID: ENSP00000428532
MMLTIGDVIKQLIEAHEQGKDIDLNKVKTKTAAKYGLSAQPRLVDIIAAVPPQYRKVLMPKLKAKPIRTASGIAVVAVMCKPHRCPHISFTGNICVYCPGGPDSDFEYSTQSYTGYEPTSMRAIRARYDPFLQTRHRIEQLKQLGHSVDKVEFIVMGGTFMALPEEYRDYFIRNLHDALSGHTSNNIYEAV

SEQ ID NO: 27091 - protein, 475 aa, Homo sapiens
  Payload ID: 5332
  Gene Symbol: ELP3
  Gene Name: elongator acetyltransferase complex subunit 3
  ENSP ID: ENSP00000429180
MPKLKAKPIRTASGIAVVAVMCKPHRCPHISFTGNICVYCPGGPDSDFEYSTQSYTGYEPTSMRAIRARYDPFLQTRHRIEQLKQLGHSVDKVEFIVMGGTFMALPEEYRDYFIRNLHDALSGHTSNNIYEAVKYSERSLTKCIGITIETRPDYCMKRHLSDMLTYGCTRLEIGVQSVYEDVARDTNRGHTVKAVCESFHLAKDSGFKVVAHMMPDLPNVGLERDIEQFTEFFENPAFRPDGLKLYPTLVIRGTGLYELWKSGRYKSYSPSDLVELVARILALVPPWTRVYRVQRDIPMPLVSSGVEHGNLRELALARMKDLGIQCRDVRTREVGIQEIHHKVRPYQVELVRRDYVANGGWETFLSYEDPDQDILIGLLRLRKCSEETFRFELGGGVSIVRELHVYGSVVPVSSRDPTKFQHQGFGMLLMEEAERIAREEHGSGKIAVISGVGTRNYYRKIGYRLQGPYMVKMLK

SEQ ID NO: 27092 - protein, 134 aa, Homo sapiens
  Payload ID: 5332
  Gene Symbol: ELP3
  Gene Name: elongator acetyltransferase complex subunit 3
  ENSP ID: ENSP00000429248
MMLTIGDVIKQLIEAHEQGKDIDLNKVKTKTAAKYGLSAQPRLVDIIAAVPPQYRKVLMPKLKAKPIRTASGIAVVAVMCKPHRCPHISFTGNICVYCPGGPDSDFEYSTQSYTGYEPTSMRAIRARYDPFLQT

SEQ ID NO: 27093 - protein, 113 aa, Homo sapiens
  Payload ID: 5332
  Gene Symbol: ELP3
  Gene Name: elongator acetyltransferase complex subunit 3
  ENSP ID: ENSP00000429446
MMLTIGDVIKQLIEAHEQGKDIDLNKVKTKTAAKYGLSAQPRLVDIIAAVPPQYRKVLMPKLKAKPIRTASGIAVVAVMCKPHRCPHISFTGNICVYCPGGPDSDFEYSTQSY

SEQ ID NO: 27094 - protein, 45 aa, Homo sapiens
  Payload ID: 5332
  Gene Symbol: ELP3
  Gene Name: elongator acetyltransferase complex subunit 3
  ENSP ID: ENSP00000429465
MRQKRKGDLSPAELMMLTIGDVIKQLIEAHEQGKDIDLNKLLSWL

SEQ ID NO: 27095 - protein, 106 aa, Homo sapiens
  Payload ID: 5332
  Gene Symbol: ELP3
  Gene Name: elongator acetyltransferase complex subunit 3
  ENSP ID: ENSP00000429573
MMLTIGDVIKQLIEAHEQGKDIDLNKVKTKTAAKYGLSAQPRLVDIIAAVPPQYRKVLMPKLKAKPIRTASGIAVVAVMCKPHRCPHISFTGNICVYCPGGPDSDF

SEQ ID NO: 27096 - protein, 45 aa, Homo sapiens; identical to SEQ ID NO: 27094
  Payload ID: 5332
  Gene Symbol: ELP3
  Gene Name: elongator acetyltransferase complex subunit 3
  ENSP ID: ENSP00000430253

SEQ ID NO: 27097 - protein, 66 aa, Homo sapiens
  Payload ID: 5332
  Gene Symbol: ELP3
  Gene Name: elongator acetyltransferase complex subunit 3
  ENSP ID: ENSP00000430942
IQEIHHKVRPYQVELVRRDYVANGGWETFLSYEDPDQDILIGLLRLRKCSEETFRFELGGGSRKNS

SEQ ID NO: 27098 - protein, 428 aa, Homo sapiens
  Payload ID: 5332
  Gene Symbol: ELP3
  Gene Name: elongator acetyltransferase complex subunit 3
  Uniprot ID: Q9H9T3
  ENSP ID: ENSP00000445558
MSTHQFYRKYMCPTSMRAIRARYDPFLQTRHRIEQLKQLGHSVDKVEFIVMGGTFMALPEEYRDYFIRNLHDALSGHTSNNIYEAVKYSERSLTKCIGITIETRPDYCMKRHLSDMLTYGCTRLEIGVQSVYEDVARDTNRGHTVKAVCESFHLAKDSGFKVVAHMMPDLPNVGLERDIEQFTEFFENPAFRPDGLKLYPTLVIRGTGLYELWKSGRYKSYSPSDLVELVARILALVPPWTRVYRVQRDIPMPLVSSGVEHGNLRELALARMKDLGIQCRDVRTREVGIQEIHHKVRPYQVELVRRDYVANGGWETFLSYEDPDQDILIGLLRLRKCSEETFRFELGGGVSIVRELHVYGSVVPVSSRDPTKFQHQGFGMLLMEEAERIAREEHGSGKIAVISGVGTRNYYRKIGYRLQGPYMVKMLK

SEQ ID NO: 27099 - protein, 424 aa, Homo sapiens
  Payload ID: 5333
  Gene Symbol: ELP4
  Gene Name: elongator acetyltransferase complex subunit 4
  Uniprot ID: Q96EB1
  ENSP ID: ENSP00000298937
MAAVATCGSVAASTGSAVATASKSNVTSFQRRGPRASVTNDSGPRLVSIAGTRPSVRNGQLLVSTGLPALDQLLGGGLAVGTVLLIEEDKYNIYSPLLFKYFLAEGIVNGHTLLVASAKEDPANILQELPAPLLDDKCKKEFDEDVYNHKTPESNIKMKIAWRYQLLPKMEIGPVSSSRFGHYYDASKRMPQELIEASNWHGFFLPEKISSTLKVEPCSLTPGYTKLLQFIQNIIYEEGFDGSNPQKKQRNILRIGIQNLGSPLWGDDICCAENGGNSHSLTKFLYVLRGLLRTSLSACIITMPTHLIQNKAIIARVTTLSDVVVGLESFIGSERETNPLYKDYHGLIHIRQIPRLNNLICDESDVKDLAFKLKRKLFTIERLHLPPDLSDTVSRSSKMDLAESAKRLGPGCGMMAGGKKHLDF

SEQ ID NO: 27100 - protein, 476 aa, Homo sapiens
  Payload ID: 5333
  Gene Symbol: ELP4
  Gene Name: elongator acetyltransferase complex subunit 4
  Uniprot ID: Q96EB1
  ENSP ID: ENSP00000368461
MAAVATCGSVAASTGSAVATASKSNVTSFQRRGPRASVTNDSGPRLVSIAGTRPSVRNGQLLVSTGLPALDQLLGGGLAVGTVLLIEEDKYNIYSPLLFKYFLAEGIVNGHTLLVASAKEDPANILQELPAPLLDDKCKKEFDEDVYNHKTPESNIKMKIAWRYQLLPKMEQIGPVSSSRFGHYYDASKRMPQELIEASNWHGFFLPEKISSTLKVEPCSLTPGYTKLLQFIQNIIYEEGFDGSNPQKKQRNILRIGIQNLGSPLWGDDICCAENGGNSHSLTKFLYVLRGLLRTSLSACIITMPTHLIQNKAIIARVTTLSDVVVGLESFIGSERETNPLYKDYHGLIHIRQIPRLNNLICDESDVKDLAFKLKRKLFTIEWVQDNYLRQERNIYPPGFSYLLKQKDSAWGEGSLQHSTFLMSFLAKATAFASRLVRHSEPLKQNGSGRIRQAAGPRLWHDGRRQEAPGLLGIPP

SEQ ID NO: 27101 - protein, 535 aa, Homo sapiens
  Payload ID: 5333
  Gene Symbol: ELP4
  Gene Name: elongator acetyltransferase complex subunit 4
  ENSP ID: ENSP00000379267
MAAVATCGSVAASTGSAVATASKSNVTSFQRRGPRASVTNDSGPRLVSIAGTRPSVRNGQLLVSTGLPALDQLLGGGLAVGTVLLIEEDKYNIYSPLLFKYFLAEGIVNGHTLLVASAKEDPANILQELPAPLLDDKCKKEFDEDVYNHKTPESNIKMKIAWRYQLLPKMEIGPVSSSRFGHYYDASKRMPQELIEASNWHGFFLPEKISSTLKVEPCSLTPGYTKLLQFIQNIIYEEGFDGSNPQKKQRNILRIGIQNLGSPLWGDDICCAENGGNSHSLTKFLYVLRGLLRTSLSACIITMPTHLIQNKAIIARVTTLSDVVVGLESFIGSERETNPLYKDYHGLIHIRQIPRLNNLICDESDVKDLAFKLKRKLFTIEAGVQWHDLGSRQPRLLGSSNSPASASLVAGITGAHHHTQLIFVFLVEMGFHHVGQAGLELLTSGDSSASASQSAGITGMSYRARPRALYFKENKSKVGARQLLETREEHLSSRLLILTQAERLCMGRRFFTAFHIFNELPCKGDCICLQTCQTQ

SEQ ID NO: 27102 - protein, 185 aa, Homo sapiens
  Payload ID: 5333
  Gene Symbol: ELP4
  Gene Name: elongator acetyltransferase complex subunit 4
  ENSP ID: ENSP00000432642
MAAVATCGSVAASTGSAVATASKSNVTSFQRRGPRASVTNDSGPRLVSIAGTRPSVRNGQLLVSTGLPALDQLLGGGLAVGTVLLIEEDKYNIYSPLLFKYFLAEGIVNGHTLLVASAKEDPANILQELPAPLLDDKCKKEFDEDVYNHKTPESNIKMKIAWRYQLLPKMEANWTSIIFKIWSLL

SEQ ID NO: 27103 - protein, 316 aa, Homo sapiens
  Payload ID: 5334
  Gene Symbol: ELP5
  Gene Name: elongator acetyltransferase complex subunit 5
  Uniprot ID: Q8TE02
  ENSP ID: ENSP00000346412
MTPSEGARAGTGRELEMLDSLLALGGLVLLRDSVEWEGRSLLKALVKKSALCGEQVHILGCEVSEEEFREGFDSDINNRLVYHDFFRDPLNWSKTEEAFPGGPLGALRAMCKRTDPVPVTIALDSLSWLLLRLPCTTLCQVLHAVSHQDSCPGDSSSVGKVSVLGLLHEELHGPGPVGALSSLAQTEVTLGGTMGQASAHILCRRPRQRPTDQTQWFSILPDFSLDLQEGPSVESQPYSDPHIPPVDPTTHLTFNLHLSKKEREARDSLILPFQFSSEKQQALLRPRPGQATSHIFYEPDAYDDLDQEDPDDDLDI

SEQ ID NO: 27104 - protein, 279 aa, Homo sapiens
  Payload ID: 5334
  Gene Symbol: ELP5
  Gene Name: elongator acetyltransferase complex subunit 5
  Uniprot ID: Q8TE02
  ENSP ID: ENSP00000349111
MTPSEGARAGTGRELEMLDSLLALGGLVLLRDSVEWEGRSLLKALVKKSALCGEQVHILGCEVSEEEFREGFDSDINNRLVYHDFFRDPLNWSKTEEAFPGGPLGALRAMCKRTDPVPVTIALDSLSWLLLRLPCTTLCQVLHAVSHQDSCPGDSSSVGKVSVLGLLHEELHGPGPVGALSSLAQTEVTLGGTMGQASAHILCRRPRQRPTDQTQWFSILPDFSLDLQEGPSVESQPYSDPHIPPVSKNAKARTRKCSLVSGHGRENKSCRGWGWGQGF

SEQ ID NO: 27105 - protein, 316 aa, Homo sapiens; identical to SEQ ID NO: 27103
  Payload ID: 5334
  Gene Symbol: ELP5
  Gene Name: elongator acetyltransferase complex subunit 5
  Uniprot ID: Q8TE02
  ENSP ID: ENSP00000379868

SEQ ID NO: 27106 - protein, 316 aa, Homo sapiens; identical to SEQ ID NO: 27103
  Payload ID: 5334
  Gene Symbol: ELP5
  Gene Name: elongator acetyltransferase complex subunit 5
  Uniprot ID: Q8TE02
  ENSP ID: ENSP00000379869

SEQ ID NO: 27107 - protein, 95 aa, Homo sapiens
  Payload ID: 5334
  Gene Symbol: ELP5
  Gene Name: elongator acetyltransferase complex subunit 5
  ENSP ID: ENSP00000458691
MTPSEGARAGTGRELEMLDSLLALGGLVLLRDSVEWEGRSLLKALVKKSALCGEQVHILGCEVSEEEFREGFDSDINNRLVYHDFFRDPLNWSKT

SEQ ID NO: 27108 - protein, 262 aa, Homo sapiens
  Payload ID: 5334
  Gene Symbol: ELP5
  Gene Name: elongator acetyltransferase complex subunit 5
  ENSP ID: ENSP00000459010
  MOD_RES (1)..(1): Any amino acid
XDSLLALGGLVLLRDSVEWEGRSLLKALVKKSALCGEQVHILGCEVSEEEFREGFDSDINNRLVYHDFFRDPLNWSKTEEAFPGGPLGALRAMCKRTDPVPVTIALDSLSWLLLRLPCTTLCQVLHAVSHQDSCPGDSSSVGKVSVLGLLHEELHGPGPVGALSSLAQTEVTLGGTMGQASAHILCRRPRQRPTDQTQWFSILPDFSLDLQEGPSVESQPYSDPHIPPVDPTTHLTFNLHLSKKEREARDSLILPFQFSSEK

SEQ ID NO: 27109 - protein, 108 aa, Homo sapiens
  Payload ID: 5334
  Gene Symbol: ELP5
  Gene Name: elongator acetyltransferase complex subunit 5
  ENSP ID: ENSP00000459248
  MOD_RES (1)..(1): Any amino acid
XLVYHDFFRDPLNWSKTEEAFPGGPLGALRAMCKRTDPVPVTIALDSLSWLLLRLPCTTLCQVLHAVSHQDSCPDSVVLHPSGLQPGSPRGALCRVPALLRSSYTPGI

SEQ ID NO: 27110 - protein, 117 aa, Homo sapiens
  Payload ID: 5334
  Gene Symbol: ELP5
  Gene Name: elongator acetyltransferase complex subunit 5
  ENSP ID: ENSP00000459535
DSVEWEGRSLLKALVKKSALCGEQVHILGCEVSEEEFREGFDSDINNRLVYHDFFRDPLNWSKTEEAFPGGPLGALRAMCKRTDPVPVTIALDSLSWLLLRLPCTTLCQVTAPQWGK

SEQ ID NO: 27111 - protein, 179 aa, Homo sapiens
  Payload ID: 5334
  Gene Symbol: ELP5
  Gene Name: elongator acetyltransferase complex subunit 5
  Uniprot ID: Q8TE02
  ENSP ID: ENSP00000459633
MTPSEGARAGTGRELEMLDSLLALGGLVLLRDSVEWEGRSLLKALVKKSALCGEQVHILGCEVSEEEFREGFDSDINNRLVYHDFFRDPLNWSKTEEAFPGGPLGALRAMCKRTDPVPVTIALDSLSWLLLRLPCTTLCQVLHAVSHQDSCPGETPPSLFPLIHLPLPRSVPLFLSTLE

SEQ ID NO: 27112 - protein, 279 aa, Homo sapiens; identical to SEQ ID NO: 27104
  Payload ID: 5334
  Gene Symbol: ELP5
  Gene Name: elongator acetyltransferase complex subunit 5
  Uniprot ID: Q8TE02
  ENSP ID: ENSP00000459835

SEQ ID NO: 27113 - protein, 209 aa, Homo sapiens
  Payload ID: 5334
  Gene Symbol: ELP5
  Gene Name: elongator acetyltransferase complex subunit 5
  ENSP ID: ENSP00000459897
MTPSEGARAGTGRELEMLDSLLALGGLVLLRDSVEWEGRSLLKALVKKSALCGEQVHILGCEVSEEEFREGFDSDINNRLVYHDFFRDPLNWSKTEEAFPGGPLGALRAMCKRTDPVPVTIALDSLSWLLLRLPCTTLCQVLHAVSHQDSCPGDSSSVGKVSVLGLLHEELHGPGPVGALSSLAQTEVTLGGTMGQASAHILCRRPRQR

SEQ ID NO: 27114 - protein, 230 aa, Homo sapiens
  Payload ID: 5334
  Gene Symbol: ELP5
  Gene Name: elongator acetyltransferase complex subunit 5
  ENSP ID: ENSP00000460596
MTPSEGARAGTGRELEMLDSLLALGGLVLLRDSVEWEGRSLLKALVKKSALCGEQVHILGCEVSEEEFREGFDSDINNRLVYHDFFRDPLNWSKTEEAFPGGPLGALRAMCKRTDPVPVTIALDSLSWLLLRLPCTTLCQVLHAVSHQDSCPGDSSSVGKVSVLGLLHEELHGPGPVGALSSLAQTEVTLGGTMGQASAHILCRRPRQRPTDQTQWFSILPDFSLDLQEG

SEQ ID NO: 27115 - protein, 245 aa, Homo sapiens
  Payload ID: 5334
  Gene Symbol: ELP5
  Gene Name: elongator acetyltransferase complex subunit 5
  ENSP ID: ENSP00000460947
  MOD_RES (1)..(1): Any amino acid
XAGTGRELEMLDSLLALGGLVLLRDSVEWEGRSLLKALVKKSALCGEQVHILGCEVSEEEFREGFDSDINNRLVYHDFFRDPLNWSKTEEAFPGGPLGALRAMCKRTDPVPVTIALDSLSWLLLRLPCTTLCQVLHAVSHQDSCPGDSSSVGKVSVLGLLHEELHGPGPVGALSSLAQTEVTLGGTMGQASAHILCRRPRQRPTDQTQWFSILPDFSLDLQEGPSVESQPYSDPHIPPTAGSPAA

SEQ ID NO: 27116 - protein, 179 aa, Homo sapiens; identical to SEQ ID NO: 27111
  Payload ID: 5334
  Gene Symbol: ELP5
  Gene Name: elongator acetyltransferase complex subunit 5
  Uniprot ID: Q8TE02
  ENSP ID: ENSP00000461489

SEQ ID NO: 27117 - protein, 43 aa, Homo sapiens
  Payload ID: 5334
  Gene Symbol: ELP5
  Gene Name: elongator acetyltransferase complex subunit 5
  ENSP ID: ENSP00000461890
MCKRTDPVPVTIALDSLSWLLLRLPCTTLCQVLHAVSHQDSCP

SEQ ID NO: 27118 - protein, 266 aa, Homo sapiens
  Payload ID: 5335
  Gene Symbol: ELP6
  Gene Name: elongator acetyltransferase complex subunit 6
  Uniprot ID: Q0PNE2
  ENSP ID: ENSP00000296149
MFVELNNLLNTTPDRAEQGKLTLLCDAKTDGSFLVHHFLSFYLKANCKVCFVALIQSFSHYSIVGQKLGVSLTMARERGQLVFLEGLKSAVDVVFQAQKEPHPLQFLREANAGNLKPLFEFVREALKPVDSGEARWTYPVLLVDDLSVLLSLGMGAVAVLDFIHYCRATVCWELKGNMVVLVHDSGDAEDEENDILLNGLSHQSHLILRAEGLATGFCRDVHGQLRILWRRPSQPAVHRDQSFTYQYKIQDKSVSFFAKGMSPAVL

SEQ ID NO: 27119 - protein, 60 aa, Homo sapiens
  Payload ID: 5335
  Gene Symbol: ELP6
  Gene Name: elongator acetyltransferase complex subunit 6
  ENSP ID: ENSP00000390437
MFVELNNLLNTTPDRAEQGKLTLLCDAKTDGSFLVHHFLSFYLKGCQPDHGAGAWAACVP

SEQ ID NO: 27120 - protein, 68 aa, Homo sapiens
  Payload ID: 5335
  Gene Symbol: ELP6
  Gene Name: elongator acetyltransferase complex subunit 6
  ENSP ID: ENSP00000394673
MARERGQLVFLEGLKSAVDVVFQAQKEPHPLQFLRHLRKNFSPGLVFNITGLRLVFLLFLLSEHWPQT

SEQ ID NO: 27121 - protein, 113 aa, Homo sapiens
  Payload ID: 5335
  Gene Symbol: ELP6
  Gene Name: elongator acetyltransferase complex subunit 6
  ENSP ID: ENSP00000400643
MARERGQLVFLEGLKSAVDVVFQAQKEPHPLQFLREANAGNLKPLFEFVREALKPVDSGEARWTYPVLLVDDLSVLLSLGMGAVAVLDFIHYCRATVCWELKVLMELPSLRPP

SEQ ID NO: 27122 - protein, 193 aa, Homo sapiens
  Payload ID: 5335
  Gene Symbol: ELP6
  Gene Name: elongator acetyltransferase complex subunit 6
  ENSP ID: ENSP00000402399
MARERGQLVFLEGLKSAVDVVFQAQKEPHPLQFLREANAGNLKPLFEFVREALKPVDSGEARWTYPVLLVDDLSVLLSLGMGAVAVLDFIHYCRATVCWELKGNMVVLVHDSGDAEDEENDILLNGLSHQSHLILRAEGLATGFCRDVHGQLRILWRRPSQPAVHRDQSFTYQYKIQDKSVSFFAKGMSPAVL

SEQ ID NO: 27123 - protein, 80 aa, Homo sapiens
  Payload ID: 5335
  Gene Symbol: ELP6
  Gene Name: elongator acetyltransferase complex subunit 6
  ENSP ID: ENSP00000402445
MARERGQLVFLEGLKSAVDVVFQAQKEPHPLQFLREANAGNLKPLFEFVREALKPVDSGEARWTYPVLLVDDLSVLLSLG

SEQ ID NO: 27124 - protein, 151 aa, Homo sapiens
  Payload ID: 5335
  Gene Symbol: ELP6
  Gene Name: elongator acetyltransferase complex subunit 6
  ENSP ID: ENSP00000406130
MARERGQLVFLEGLKSAVDVVFQAQKEPHPLQFLREANAGNLKPLFEFVREALKPVDSGEARWTYPVLLVDDLSVLLSLGMGAVAVLDFIHYCRATVCWELKGNMVVLVHDSGDAEDEENDILLNGLSHQSHLILRAEGLATGFCRDVHGQ

SEQ ID NO: 27125 - protein, 99 aa, Homo sapiens
  Payload ID: 5335
  Gene Symbol: ELP6
  Gene Name: elongator acetyltransferase complex subunit 6
  ENSP ID: ENSP00000410790
MARERGQLVFLEGLKSAVDVVFQAQKEPHPLQFLREANAGNLKPLFEFVREALKPVDSGEARWTYPVLLVDDLSVLLSLGMGAVAVLDFIHYCRATVCW

SEQ ID NO: 27126 - protein, 193 aa, Homo sapiens; identical to SEQ ID NO: 27122
  Payload ID: 5335
  Gene Symbol: ELP6
  Gene Name: elongator acetyltransferase complex subunit 6
  ENSP ID: ENSP00000412593

SEQ ID NO: 27127 - protein, 157 aa, Homo sapiens
  Payload ID: 5335
  Gene Symbol: ELP6
  Gene Name: elongator acetyltransferase complex subunit 6
  ENSP ID: ENSP00000415301
MARERGQLVFLEGLKSAVDVVFQAQKEPHPLQFLREANAGNLKPLFEFVREALKPVDSGEARWTYPVLLVDDLSVLLSLGMGAVAVLDFIHYCRATVCWELKGNMVVLVHDSGDAEDEENDILLNGLSHQSHLILRAEGLATGFCRDVHGQVCRGLL

SEQ ID NO: 27128 - protein, 279 aa, Homo sapiens
  Payload ID: 5336
  Gene Symbol: ELOVL1
  Gene Name: ELOVL fatty acid elongase 1
  Uniprot ID: Q9BW60
  ENSP ID: ENSP00000361536
MEAVVNLYQEVMKHADPRIQGYPLMGSPLLMTSILLTYVYFVLSLGPRIMANRKPFQLRGFMIVYNFSLVALSLYIVYEFLMSGWLSTYTWRCDPVDYSNSPEALRMVRVAWLFLFSKFIELMDTVIFILRKKDGQVTFLHVFHHSVLPWSWWWGVKIAPGGMGSFHAMINSSVHVIMYLYYGLSAFGPVAQPYLWWKKHMTAIQLIQFVLVSLHISQYYFMSSCNYQYPVIIHLIWMYGTIFFMLFSNFWYHSYTKGKRLPRALQQNGAPGIAKVKAN

SEQ ID NO: 27129 - protein, 252 aa, Homo sapiens
  Payload ID: 5336
  Gene Symbol: ELOVL1
  Gene Name: ELOVL fatty acid elongase 1
  Uniprot ID: Q9BW60
  ENSP ID: ENSP00000416024
MEAVVNLYQEVMKHADPRIQGYPLMGSPLLMTSILLTYVYFVLSLGPRIMANRKPFQLRGFMIVYNFSLVALSLYIVYEMVRVAWLFLFSKFIELMDTVIFILRKKDGQVTFLHVFHHSVLPWSWWWGVKIAPGGMGSFHAMINSSVHVIMYLYYGLSAFGPVAQPYLWWKKHMTAIQLIQFVLVSLHISQYYFMSSCNYQYPVIIHLIWMYGTIFFMLFSNFWYHSYTKGKRLPRALQQNGAPGIAKVKAN

SEQ ID NO: 27130 - protein, 279 aa, Homo sapiens; identical to SEQ ID NO: 27128
  Payload ID: 5336
  Gene Symbol: ELOVL1
  Gene Name: ELOVL fatty acid elongase 1
  Uniprot ID: Q9BW60
  ENSP ID: ENSP00000477602

SEQ ID NO: 27131 - protein, 296 aa, Homo sapiens
  Payload ID: 5337
  Gene Symbol: ELOVL2
  Gene Name: ELOVL fatty acid elongase 2
  Uniprot ID: Q9NXB9
  ENSP ID: ENSP00000346693
MEHLKAFDDEINAFLDNMFGPRDSRVRGWFMLDSYLPTFFLTVMYLLSIWLGNKYMKNRPALSLRGILTLYNLGITLLSAYMLAELILSTWEGGYNLQCQDLTSAGEADIRVAKVLWWYYFSKSVEFLDTIFFVLRKKTSQITFLHVYHHASMFNIWWCVLNWIPCGQSFFGPTLNSFIHILMYSYYGLSVFPSMHKYLWWKKYLTQAQLVQFVLTITHTMSAVVKPCGFPFGCLIFQSSYMLTLVILFLNFYVQTYRKKPMKKDMQEPPAGKEVKNGFSKAYFTAANGVMNKKAQ

SEQ ID NO: 27132 - protein, 270 aa, Homo sapiens
  Payload ID: 5338
  Gene Symbol: ELOVL3
  Gene Name: ELOVL fatty acid elongase 3
  Uniprot ID: Q9HB03
  ENSP ID: ENSP00000359022
MVTAMNVSHEVNQLFQPYNFELSKDMRPFFEEYWATSFPIALIYLVLIAVGQNYMKERKGFNLQGPLILWSFCLAIFSILGAVRMWGIMGTVLLTGGLKQTVCFINFIDNSTVKFWSWVFLLSKVIELGDTAFIILRKRPLIFIHWYHHSTVLVYTSFGYKNKVPAGGWFVTMNFGVHAIMYTYYTLKAANVKPPKMLPMLITSLQILQMFVGAIVSILTYIWRQDQGCHTTMEHLFWSFILYMTYFILFAHFFCQTYIRPKVKAKTKSQ

SEQ ID NO: 27133 - protein, 314 aa, Homo sapiens
  Payload ID: 5339
  Gene Symbol: ELOVL4
  Gene Name: ELOVL fatty acid elongase 4
  Uniprot ID: Q9GZR5
  ENSP ID: ENSP00000358831
MGLLDSEPGSVLNVVSTALNDTVEFYRWTWSIADKRVENWPLMQSPWPTLSISTLYLLFVWLGPKWMKDREPFQMRLVLIIYNFGMVLLNLFIFRELFMGSYNAGYSYICQSVDYSNNVHEVRIAAALWWYFVSKGVEYLDTVFFILRKKNNQVSFLHVYHHCTMFTLWWIGIKWVAGGQAFFGAQLNSFIHVIMYSYYGLTAFGPWIQKYLWWKRYLTMLQLIQFHVTIGHTALSLYTDCPFPKWMHWALIAYAISFIFLFLNFYIRTYKEPKKPKAGKTAMNGISANGVSKSEKQLMIENGKKQKNGKAKGD

SEQ ID NO: 27134 - protein, 299 aa, Homo sapiens
  Payload ID: 5340
  Gene Symbol: ELOVL5
  Gene Name: ELOVL fatty acid elongase 5
  Uniprot ID: Q9NYP7
  ENSP ID: ENSP00000306640
MEHFDASLSTYFKALLGPRDTRVKGWFLLDNYIPTFICSVIYLLIVWLGPKYMRNKQPFSCRGILVVYNLGLTLLSLYMFCELVTGVWEGKYNFFCQGTRTAGESDMKIIRVLWWYYFSKLIEFMDTFFFILRKNNHQITVLHVYHHASMLNIWWFVMNWVPCGHSYFGATLNSFIHVLMYSYYGLSSVPSMRPYLWWKKYITQGQLLQFVLTIIQTSCGVIWPCTFPLGWLYFQIGYMISLIALFTNFYIQTYNKKGASRRKDHLKDHQNGSMAAVNGHTNSFSPLENNVKPRKLRKD

SEQ ID NO: 27135 - protein, 88 aa, Homo sapiens
  Payload ID: 5340
  Gene Symbol: ELOVL5
  Gene Name: ELOVL fatty acid elongase 5
  Uniprot ID: Q9NYP7
  ENSP ID: ENSP00000359951
MEHFDASLSTYFKALLGPRGISSSVLRMGPPLHTVVGWLQQLQAAHSEEEEKMFHLCGFKHKEVVSQSSLPAVIPQNSLATIASHAPA

SEQ ID NO: 27136 - protein, 326 aa, Homo sapiens
  Payload ID: 5340
  Gene Symbol: ELOVL5
  Gene Name: ELOVL fatty acid elongase 5
  Uniprot ID: Q9NYP7
  ENSP ID: ENSP00000359956
MEHFDASLSTYFKALLGPRDTRVKGWFLLDNYIPTFICSVIYLLIVWLGPKYMRNKQPFSCRGILVVYNLGLTLLSLYMFCESKREQPRRSACASRTDPSTQQQLPENRLVTGVWEGKYNFFCQGTRTAGESDMKIIRVLWWYYFSKLIEFMDTFFFILRKNNHQITVLHVYHHASMLNIWWFVMNWVPCGHSYFGATLNSFIHVLMYSYYGLSSVPSMRPYLWWKKYITQGQLLQFVLTIIQTSCGVIWPCTFPLGWLYFQIGYMISLIALFTNFYIQTYNKKGASRRKDHLKDHQNGSMAAVNGHTNSFSPLENNVKPRKLRKD

SEQ ID NO: 27137 - protein, 262 aa, Homo sapiens
  Payload ID: 5340
  Gene Symbol: ELOVL5
  Gene Name: ELOVL fatty acid elongase 5
  ENSP ID: ENSP00000440728
MEHFDASLSTYFKALLGPRDTRVKGWFLLDNYIPTFICSVIYLLIVWLGPKYMRNKQPFSCRGILVVYNLGLTLLSLYMFCELVTGVWEGKYNFFCQGTRTAGESDMKIIRVLWWYYFSKLIEFMDTFFFILRKNNHQITVLHVYHHASMLNIWWFVMNWVPCGHSSVCADNHPDQLRGHLAVHIPSWLVVFPDWIHDFPDCSLHKLLHSDLQQERGLPKERPPEGPPEWVHGCCEWTHQQLFTPGKQCEAKEAAEGLKSKN

SEQ ID NO: 27138 - protein, 265 aa, Homo sapiens
  Payload ID: 5341
  Gene Symbol: ELOVL6
  Gene Name: ELOVL fatty acid elongase 6
  Uniprot ID: Q9H5J4
  ENSP ID: ENSP00000304736
MNMSVLTLQEYEFEKQFNENEAIQWMQENWKKSFLFSALYAAFIFGGRHLMNKRAKFELRKPLVLWSLTLAVFSIFGALRTGAYMVYILMTKGLKQSVCDQGFYNGPVSKFWAYAFVLSKAPELGDTIFIILRKQKLIFLHWYHHITVLLYSWYSYKDMVAGGGWFMTMNYGVHAVMYSYYALRAAGFRVSRKFAMFITLSQITQMLMGCVVNYLVFCWMQHDQCHSHFQNIFWSSLMYLSYLVLFCHFFFEAYIGKMRKTTKAE

SEQ ID NO: 27139 - protein, 265 aa, Homo sapiens; identical to SEQ ID NO: 27138
  Payload ID: 5341
  Gene Symbol: ELOVL6
  Gene Name: ELOVL fatty acid elongase 6
  Uniprot ID: Q9H5J4
  ENSP ID: ENSP00000378105

SEQ ID NO: 27140 - protein, 98 aa, Homo sapiens
  Payload ID: 5341
  Gene Symbol: ELOVL6
  Gene Name: ELOVL fatty acid elongase 6
  ENSP ID: ENSP00000424023
MNMSVLTLQEYEFEKQFNENEAIQWMQENWKKSFLFSALYAAFIFGGRHLMNKRAKFELRKPLVLWSLTLAVFRCYNNLKQLTLYSVLFELVLIWCTF

SEQ ID NO: 27141 - protein, 136 aa, Homo sapiens
  Payload ID: 5341
  Gene Symbol: ELOVL6
  Gene Name: ELOVL fatty acid elongase 6
  ENSP ID: ENSP00000425488
MNMSVLTLQEYEFEKQFNENEAIQWMQENWKKSFLFSALYAAFIFGGRHLMNKRAKFELRKPLVLWSLTLAVFSIFGALRTGAYMVYILMTKGLKQSVCDQGFYNGPVSKFWAYAFVLSKAPELGDTIFIILRKQK

SEQ ID NO: 27142 - protein, 108 aa, Homo sapiens
  Payload ID: 5341
  Gene Symbol: ELOVL6
  Gene Name: ELOVL fatty acid elongase 6
  ENSP ID: ENSP00000426086
MNMSVLTLQEYEFEKQFNENEAIQWMQENWKKSFLFSALYAAFIFGGRHLMNKRAKFELRKPLVLWSLTLAVFSIFGALRTGAYMVYILMTKGLKQSVCDQGFYNGPV

SEQ ID NO: 27143 - protein, 281 aa, Homo sapiens
  Payload ID: 5342
  Gene Symbol: ELOVL7
  Gene Name: ELOVL fatty acid elongase 7
  Uniprot ID: A1L3X0
  ENSP ID: ENSP00000402634
MAFSDLTSRTVHLYDNWIKDADPRVEDWLLMSSPLPQTILLGFYVYFVTSLGPKLMENRKPFELKKAMITYNFFIVLFSVYMCYEFVMSGWGIGYSFRCDIVDYSRSPTALRMARTCWLYYFSKFIELLDTIFFVLRKKNSQVTFLHVFHHTIMPWTWWFGVKFAAGGLGTFHALLNTAVHVVMYSYYGLSALGPAYQKYLWWKKYLTSLQLVQFVIVAIHISQFFFMEDCKYQFPVFACIIMSYSFMFLLLFLHFWYRAYTKGQRLPKTVKNGTCKNKDN

SEQ ID NO: 27144 - protein, 268 aa, Homo sapiens
  Payload ID: 5342
  Gene Symbol: ELOVL7
  Gene Name: ELOVL fatty acid elongase 7
  ENSP ID: ENSP00000421043
MEKPINILYPRVEDWLLMSSPLPQTILLGFYVYFVTSLGPKLMENRKPFELKKAMITYNFFIVLFSVYMCYEFVMSGWGIGYSFRCDIVDYSRSPTALRMARTCWLYYFSKFIELLDTIFFVLRKKNSQVTFLHVFHHTIMPWTWWFGVKFAAGGLGTFHALLNTAVHVVMYSYYGLSALGPAYQKYLWWKKYLTSLQLVQFVIVAIHISQFFFMEDCKYQFPVFACIIMSYSFMFLLLFLHFWYRAYTKGQRLPKTVKNGTCKNKDN

SEQ ID NO: 27145 - protein, 88 aa, Homo sapiens
  Payload ID: 5342
  Gene Symbol: ELOVL7
  Gene Name: ELOVL fatty acid elongase 7
  ENSP ID: ENSP00000422602
MAFSDLTSRTVHLYDNWIKDADPRVEDWLLMSSPLPQTILLGFYVYFVTSLGPKLMENRKPFELKKAMITYNFFIVLFSVYMCYEILF

SEQ ID NO: 27146 - protein, 165 aa, Homo sapiens
  Payload ID: 5342
  Gene Symbol: ELOVL7
  Gene Name: ELOVL fatty acid elongase 7
  ENSP ID: ENSP00000424081
MAFSDLTSRTVHLYDNWIKDADPRVEDWLLMSSPLPQTILLGFYVYFVTSLGPKLMENRKPFELKKAMITYNFFIVLFSVYMCYEFVMSGWGIGYSFRCDIVDYSRSPTALRMARTCWLYYFSKFIELLDTIFFVLRKKNSQVTFLHVFHHTIMPWTWWFGVKFA

SEQ ID NO: 27147 - protein, 281 aa, Homo sapiens; identical to SEQ ID NO: 27143
  Payload ID: 5342
  Gene Symbol: ELOVL7
  Gene Name: ELOVL fatty acid elongase 7
  Uniprot ID: A1L3X0
  ENSP ID: ENSP00000424123

SEQ ID NO: 27148 - protein, 71 aa, Homo sapiens
  Payload ID: 5342
  Gene Symbol: ELOVL7
  Gene Name: ELOVL fatty acid elongase 7
  ENSP ID: ENSP00000425127
MAFSDLTSRTVHLYDNWIKDADPRVEDWLLMSSPLPQTILLGFYVYFVTSLGPKLMENRKPFELKKAMITL

SEQ ID NO: 27149 - protein, 165 aa, Homo sapiens; identical to SEQ ID NO: 27146
  Payload ID: 5342
  Gene Symbol: ELOVL7
  Gene Name: ELOVL fatty acid elongase 7
  ENSP ID: ENSP00000426400

SEQ ID NO: 27150 - protein, 327 aa, Homo sapiens
  Payload ID: 5343
  Gene Symbol: EMB
  Gene Name: embigin
  Uniprot ID: Q6PCB8
  ENSP ID: ENSP00000302289
MRALPGLLEARARTPRLLLLQCLLAAARPSSADGSAPDSPFTSPPLREEIMANNFSLESHNISLTEHSSMPVEKNITLERPSNVNLTCQFTTSGDLNAVNVTWKKDGEQLENNYLVSATGSTLYTQYRFTIINSKQMGSYSCFFREEKEQRGTFNFKVPELHGKNKPLISYVGDSTVLTCKCQNCFPLNWTWYSSNGSVKVPVGVQMNKYVINGTYANETKLKITQLLEEDGESYWCRALFQLGESEEHIELVVLSYLVPLKPFLVIVAEVILLVATILLCEKYTQKKKKHSDEGKEFEQIEQLKSDDSNGIENNVPRHRKNESLGQ

SEQ ID NO: 27151 - protein, 273 aa, Homo sapiens
  Payload ID: 5343
  Gene Symbol: EMB
  Gene Name: embigin
  ENSP ID: ENSP00000425215
MRALPGLLEARARTPRLLLLQCLLAAARPSSADGSAPDSPFTSPPLREEIMANNFSLESHNISLTGSTLYTQYRFTIINSKQMGSYSCFFREEKEQRGTFNFKVPELHGKNKPLISYVGDSTVLTCKCQNCFPLNWTWYSSNGSVKVPVGVQMNKYVINGTYANETKLKITQLLEEDGESYWCRALFQLGESEEHIELVVLSYLVPLKPFLVIVAEVILLVATILLCEKYTQKKKKHSDEGKEFEQIEQLKSDDSNGIENNVPRHRKNESLGQ

SEQ ID NO: 27152 - protein, 277 aa, Homo sapiens
  Payload ID: 5343
  Gene Symbol: EMB
  Gene Name: embigin
  Uniprot ID: Q6PCB8
  ENSP ID: ENSP00000426404
MANNFSLESHNISLTEHSSMPVEKNITLERPSNVNLTCQFTTSGDLNAVNVTWKKDGEQLENNYLVSATGSTLYTQYRFTIINSKQMGSYSCFFREEKEQRGTFNFKVPELHGKNKPLISYVGDSTVLTCKCQNCFPLNWTWYSSNGSVKVPVGVQMNKYVINGTYANETKLKITQLLEEDGESYWCRALFQLGESEEHIELVVLSYLVPLKPFLVIVAEVILLVATILLCEKYTQKKKKHSDEGKEFEQIEQLKSDDSNGIENNVPRHRKNESLGQ

SEQ ID NO: 27153 - protein, 561 aa, Homo sapiens
  Payload ID: 5344
  Gene Symbol: EFS
  Gene Name: embryonal Fyn-associated substrate
  Uniprot ID: O43281
  ENSP ID: ENSP00000216733
MAIATSTQLARALYDNTAESPQELSFRRGDVLRVLQREGAGGLDGWCLCSLHGQQGIVPANRVKLLPAGPAPKPSLSPASPAQPGSPYPAPDHSNEDQEVYVVPPPARPCPTSGPPAGPCPPSPDLIYKIPRASGTQLAAPRDALEVYDVPPTALRVPSSGPYDCPASFSHPLTRVAPQPPGEDDAPYDVPLTPKPPAELEPDLEWEGGREPGPPIYAAPSNLKRASALLNLYEAPEELLADGEGGGTDEGIYDVPLLGPEAPPSPEPPGALASHDQDTLAQLLARSPPPPHRPRLPSAESLSRRPLPALPVPEAPSPSPVPSPAPGRKGSIQDRPLPPPPPRLPGYGGPKVEGDPEGREMEDDPAGHHNEYEGIPMAEEYDYVHLKGMDKAQGSRPPDQACTGDPELPERGMPAPQEALSPGEPLVVSTGDLQLLYFYAGQCQSHYSALQAAVAALMSSTQANQPPRLFVPHSKRVVVAAHRLVFVGDTLGRLAASAPLRAQVRAAGTALGQALRATVLAVKGAALGYPSSPAIQEMVQCVTELAGQALQFTTLLTSLAP

SEQ ID NO: 27154 - protein, 468 aa, Homo sapiens
  Payload ID: 5344
  Gene Symbol: EFS
  Gene Name: embryonal Fyn-associated substrate
  Uniprot ID: O43281
  ENSP ID: ENSP00000340607
MAIATSVYVVPPPARPCPTSGPPAGPCPPSPDLIYKIPRASGTQLAAPRDALEVYDVPPTALRVPSSGPYDCPASFSHPLTRVAPQPPGEDDAPYDVPLTPKPPAELEPDLEWEGGREPGPPIYAAPSNLKRASALLNLYEAPEELLADGEGGGTDEGIYDVPLLGPEAPPSPEPPGALASHDQDTLAQLLARSPPPPHRPRLPSAESLSRRPLPALPVPEAPSPSPVPSPAPGRKGSIQDRPLPPPPPRLPGYGGPKVEGDPEGREMEDDPAGHHNEYEGIPMAEEYDYVHLKGMDKAQGSRPPDQACTGDPELPERGMPAPQEALSPGEPLVVSTGDLQLLYFYAGQCQSHYSALQAAVAALMSSTQANQPPRLFVPHSKRVVVAAHRLVFVGDTLGRLAASAPLRAQVRAAGTALGQALRATVLAVKGAALGYPSSPAIQEMVQCVTELAGQALQFTTLLTSLAP

SEQ ID NO: 27155 - protein, 392 aa, Homo sapiens
  Payload ID: 5344
  Gene Symbol: EFS
  Gene Name: embryonal Fyn-associated substrate
  Uniprot ID: O43281
  ENSP ID: ENSP00000416684
MAIATSVYVVPPPARPCPTSGPPAGPCPPSPDLIYKIPRASGTQLAAPRDALEVYDVPPTALRVPSSGPYDCPASFSHPLTRVAPQPPGEDDAPPSPEPPGALASHDQDTLAQLLARSPPPPHRPRLPSAESLSRRPLPALPVPEAPSPSPVPSPAPGRKGSIQDRPLPPPPPRLPGYGGPKVEGDPEGREMEDDPAGHHNEYEGIPMAEEYDYVHLKGMDKAQGSRPPDQACTGDPELPERGMPAPQEALSPGEPLVVSTGDLQLLYFYAGQCQSHYSALQAAVAALMSSTQANQPPRLFVPHSKRVVVAAHRLVFVGDTLGRLAASAPLRAQVRAAGTALGQALRATVLAVKGAALGYPSSPAIQEMVQCVTELAGQALQFTTLLTSLAP

SEQ ID NO: 27156 - protein, 441 aa, Homo sapiens
  Payload ID: 5345
  Gene Symbol: EED
  Gene Name: embryonic ectoderm development
  Uniprot ID: O75530
  ENSP ID: ENSP00000263360
MSEREVSTAPAGTDMPAAKKQKLSSDENSNPDLSGDENDDAVSIESGTNTERPDTPTNTPNAPGRKSWGKGKWKSKKCKYSFKCVNSLKEDHNQPLFGVQFNWHSKEGDPLVFATVGSNRVTLYECHSQGEIRLLQSYVDADADENFYTCAWTYDSNTSHPLLAVAGSRGIIRIINPITMQCIKHYVGHGNAINELKFHPRDPNLLLSVSKDHALRLWNIQTDTLVAIFGGVEGHRDEVLSADYDLLGEKIMSCGMDHSLKLWRINSKRMMNAIKESYDYNPNKTNRPFISQKIHFPDFSTRDIHRNYVDCVRWLGDLILSKSCENAIVCWKPGKMEDDIDKIKPSESNVTILGRFDYSQCDIWYMRFSMDFWQKMLALGNQVGKLYVWDLEVEDPHKAKCTTLTHHKCGAAIRQTSFSRDSSILIAVCDDASIWRWDRLR

SEQ ID NO: 27157 - protein, 400 aa, Homo sapiens
  Payload ID: 5345
  Gene Symbol: EED
  Gene Name: embryonic ectoderm development
  Uniprot ID: O75530
  ENSP ID: ENSP00000315587
MSEREVSTAPAGTDMPAAKKQKLSSDENSNPDLSGDENDDAVSIESGTNTERPDTPTNTPNAPGRKSWGKGKWKSKKCKYSFKCVNSLKEDHNQPLFGVQFNWHSKEGDPLVFATVGSNRVTLYECHSQGEIRLLQSYVDADADENFYTCAWTYDSNTSHPLLAVAGSRGIIRIINPITMQCIKHYVGHGNAINELKFHPRDPNLLLSVSKDHALRLWNIQTDTLVAIFGGVEGHRDEVLSADYDLLGEKIMSCGMDHSLKLWRINSKRMMNAIKESYDYNPNKTNRPFISQKIHFPDFSTRDIHRNYVDCVRWLGDLILSKSCENAIVCWKPGKMEDDIDKIKPSESNVTILGRFDYSQCDIWYMRFSMDFWQKMLALGNQVGKLYVWDLEVEDPHKAK

SEQ ID NO: 27158 - protein, 466 aa, Homo sapiens
  Payload ID: 5345
  Gene Symbol: EED
  Gene Name: embryonic ectoderm development
  Uniprot ID: O75530
  ENSP ID: ENSP00000338186
MSEREVSTAPAGTDMPAAKKQKLSSDENSNPDLSGDENDDAVSIESGTNTERPDTPTNTPNAPGRKSWGKGKWKSKKCKYSFKCVNSLKEDHNQPLFGVQFNWHSKEGDPLVFATVGSNRVTLYECHSQGEIRLLQSYVDADADENFYTCAWTYDSNTSHPLLAVAGSRGIIRIINPITMQCIKHYVGHGNAINELKFHPRDPNLLLSVSKDHALRLWNIQTDTLVAIFGGVEGHRDEVLSADYDLLGEKIMSCGMDHSLKLWRINSKRMMNAIKESYDYNPNKTNRPFISQKIHFPDFSTRDIHRNYVDCVRWLGDLILSKSGRAILHSHQQCMRDPVSPNLRQHLSCENAIVCWKPGKMEDDIDKIKPSESNVTILGRFDYSQCDIWYMRFSMDFWQKMLALGNQVGKLYVWDLEVEDPHKAKCTTLTHHKCGAAIRQTSFSRDSSILIAVCDDASIWRWDRLR

SEQ ID NO: 27159 - protein, 361 aa, Homo sapiens
  Payload ID: 5345
  Gene Symbol: EED
  Gene Name: embryonic ectoderm development
  ENSP ID: ENSP00000431778
MSEREVSTAPAGTDMPAAKKQKLSSDENSNPDLSGDENDDAVSIESGTNTERPDTPTNTPNAPGRKSWGKGKWKSKKCKYSFKCVNSLKEDHNQPLFGVQFNWHSKEGDPLVFATVGSNRVTLYECHSQGEIRLLQSYVDADADENFYTCAWTYDSNTSHPLLAVAGSRGIIRIINPITMQCIKHYVGHGNAINELKFHPRDPNLLLSVSKDHALRLWNIQTDTLVAIFGGVEGHRDEVLSASCENAIVCWKPGKMEDDIDKIKPSESNVTILGRFDYSQCDIWYMRFSMDFWQKMLALGNQVGKLYVWDLEVEDPHKAKCTTLTHHKCGAAIRQTSFSRDSSILIAVCDDASIWRWDRLR

SEQ ID NO: 27160 - protein, 115 aa, Homo sapiens
  Payload ID: 5345
  Gene Symbol: EED
  Gene Name: embryonic ectoderm development
  ENSP ID: ENSP00000436084
  MOD_RES (1)..(1): Any amino acid
XEREVSTAPAGTDMPAAKKQKLSSDENSNPDLSGDENSCENAIVCWKPGKMEDDIDKIKPSESNVTILGRFDYSQCDIWYMRFSMDFWQKMLALGNQVGKLYVWDLEVEDPHKAK

SEQ ID NO: 27161 - protein, 106 aa, Homo sapiens
  Payload ID: 5345
  Gene Symbol: EED
  Gene Name: embryonic ectoderm development
  ENSP ID: ENSP00000437318
MEDDIDKIKPSESNVTILGRFDYSQCDIWYMRFSMDFWQKMLALGNQVGKLYVWDLEVEDPHKAKCTTLTHHKCGAAIRQTSFSRDSSILIAVCDDASIWRWDRLR

SEQ ID NO: 27162 - protein, 219 aa, Homo sapiens
  Payload ID: 5346
  Gene Symbol: EMD
  Gene Name: emerin
  ENSP ID: ENSP00000358850
MDNYADLSDTELTTLLRRYNIPHGPVVDLNSTRGDADMYDLPKKEDALLYQSKGYNDDYYEESYFTTRTYGEPESAGPSRAVRQSVTSFPDADAFHHQVHDDDLLSSSEEECKDRERPMYGRDSAYQSITHYRPVSASRSSLDLSYYPTSSSTSFMSSSSSSSSWLTRRAIRPENRAPGAGLGQDRQVPLWGQLLLFLVFVIVLFFIYHFMQAEEGNPF

SEQ ID NO: 27163 - protein, 254 aa, Homo sapiens
  Payload ID: 5346
  Gene Symbol: EMD
  Gene Name: emerin
  Uniprot ID: P50402
  ENSP ID: ENSP00000358857
MDNYADLSDTELTTLLRRYNIPHGPVVGSTRRLYEKKIFEYETQRRRLSPPSSSAASSYSFSDLNSTRGDADMYDLPKKEDALLYQSKGYNDDYYEESYFTTRTYGEPESAGPSRAVRQSVTSFPDADAFHHQVHDDDLLSSSEEECKDRERPMYGRDSAYQSITHYRPVSASRSSLDLSYYPTSSSTSFMSSSSSSSSWLTRRAIRPENRAPGAGLGQDRQVPLWGQLLLFLVFVIVLFFIYHFMQAEEGNPF

SEQ ID NO: 27164 - protein, 21 aa, Homo sapiens
  Payload ID: 5346
  Gene Symbol: EMD
  Gene Name: emerin
  ENSP ID: ENSP00000401081
MDNYADLSDTELTTLLRRINS

SEQ ID NO: 27165 - protein, 244 aa, Homo sapiens
  Payload ID: 5347
  Gene Symbol: EMG1
  Gene Name: EMG1 N1-specific pseudouridine methyltransferase
  Uniprot ID: Q92979
  ENSP ID: ENSP00000470560
MAAPSDGFKPRERSGGEQAQDWDALPPKRPRLGAGNKIGGRRLIVVLEGASLETVKVGKTYELLNCDKHKSILLKNGRDPGEARPDITHQSLLMLMDSPLNRAGLLQVYIHTQKNVLIEVNPQTRIPRTFDRFCGLMVQLLHKLSVRAADGPQKLLKVIKNPVSDHFPVGCMKVGTSFSIPVVSDVRELVPSSDPIVFVVGAFAHGKVSVEYTEKMVSISNYPLSAALTCAKLTTAFEEVWGVI

SEQ ID NO: 27166 - protein, 149 aa, Homo sapiens
  Payload ID: 5347
  Gene Symbol: EMG1
  Gene Name: EMG1 N1-specific pseudouridine methyltransferase
  ENSP ID: ENSP00000479546
  MOD_RES (1)..(1): Any amino acid
XLEGASLETVKVGKTYELLNCDKHKSILLKNGRDPGEARPDITHQSLLMLMDSPLNRAGLLQVYIHTQKNVLIEVNPQTRIPRTFDRFCGLMVQLLHKLSVRAADGPQKLLKVSVEYTEKMVSISNYPLSAALTCAKLTTAFEEVWGVI

SEQ ID NO: 27167 - protein, 443 aa, Homo sapiens
  Payload ID: 5348
  Gene Symbol: EMID1
  Gene Name: EMI domain containing 1
  Uniprot ID: Q96A84
  ENSP ID: ENSP00000335481
MGGPRAWALLCLGLLLPGGGAAWSIGAAPFSGRRNWCSYVVTRTISCHVQNGTYLQRVLQNCPWPMSCPGSSYRTVVRPTYKVMYKIVTAREWRCCPGHSGVSCEEVAASSASLEPMWSGSTMRRMALRPTAFSGCLNCSKVSELTERLKVLEAKMTMLTVIEQPVPPTPATPEDPAPLWGPPPAQGSPGDGGLQDQVGAWGLPGPTGPKGDAGSRGPMGMRGPPGPQGPPGSPGRAGAVGTPGERGPPGPPGPPGPPGPPAPVGPPHARISQHGDPLLSNTFTETNNHWPQGPTGPPGPPGPMGPPGPPGPTGVPGSPGHIGPPGPTGPKGISGHPGEKGERGLRGEPGPQGSAGQRGEPGPKGDPGEKSHWGEGLHQLREALKILAERVLILETMIGLYEPELGSGAGPAGTGTPSLLRGKRGGHATNYRIVAPRSRDERG

SEQ ID NO: 27168 - protein, 445 aa, Homo sapiens
  Payload ID: 5348
  Gene Symbol: EMID1
  Gene Name: EMI domain containing 1
  ENSP ID: ENSP00000384452
MGGPRAWALLCLGLLLPGGGAAWSIGAAPFSGRRNWCSYVVTRTISCHVQNGTYLQRVLQNCPWPMSCPGSSYRTVVRPTYKVMYKIVTAREWRCCPGHSGVSCEEVAASSASLEPMWSGSTMRRMALRPTAFSGCLNCSKVSELTERLKVLEAKMTMLTVIEQPVPPTPATPEDPAPLWGPPPAQGSPGDGGLQDQVGAWGLPGPTGPKGDAGSRGPMGMRGPPGPQGPPGSPGRAGAVGTPGERGPPGPPGPPGPPGPPAPVGPPHARISQHGDPLLSNTFTETNNHWPQGPTGPPGPPGPMGPPGPPGPTGVPGSPGHIGPPGPTGPKGISGHPGEKGERGLRGEPGPQGSAGQRGEPGPKGDPGEKSHWAPSLQSFLQQQAQLELLARRVTLLEAIIWPEPELGSGAGPAGTGTPSLLRGKRGGHATNYRIVAPRSRDERG

SEQ ID NO: 27169 - protein, 422 aa, Homo sapiens
  Payload ID: 5348
  Gene Symbol: EMID1
  Gene Name: EMI domain containing 1
  ENSP ID: ENSP00000385414
MGGPRAWALLCLGLLLPGGGAAWSIGAAPFSGRRNWCSYVVTRTISCHVQNGTYLQRVLQNCPWPMSCPGSSYRTVVRPTYKVMYKIVTAREWRCCPGHSGVSCEEVAASSASLEPMWSGSTMRRMALRPTAFSGCLNCSKVSELTERLKVLEAKMTMLTVIEQPVPPTPATPEDPAPLWGPPPAQGSPGDGGLQDQVGAWGLPGPTGPKGDAGSRGPMGMRGPPGPQGPPGSPGRAGAVGTPGERGPPGPPGPPGPPGPPAPVGPPHARISQHGDPLLSNTFTETNNHWPQGPTGPPGPPGPMGPPGPPGPTGVPGSPGHIGLRGEPGPQGSAGQRGEPGPKGDPGEKSHWGEGLHQLREALKILAERVLILETMIGLYEPELGSGAGPAGTGTPSLLRGKRGGHATNYRIVAPRSRDERG

SEQ ID NO: 27170 - protein, 175 aa, Homo sapiens
  Payload ID: 5348
  Gene Symbol: EMID1
  Gene Name: EMI domain containing 1
  ENSP ID: ENSP00000399760
MGGPRAWALLCLGLLLPGGGAAWSIGAAPFSGRRNWCSYVVTRTISCHVQNGTYLQRVLQNCPWPMSCPGSSYRTVVRPTYKVMYKIVTAREWRCCPGHSGVSCEEGCLNCSKVSELTERLKVLEAKMTMLTVIEQPVPPTPATPEDPAPLWGPPPAQGSPGDGGLQDQVGAWGL

SEQ ID NO: 27171 - protein, 34 aa, Homo sapiens
  Payload ID: 5348
  Gene Symbol: EMID1
  Gene Name: EMI domain containing 1
  ENSP ID: ENSP00000402621
MGGPRAWALLCLGLLLPGGGAAWSIGAAPFSGRR

SEQ ID NO: 27172 - protein, 212 aa, Homo sapiens
  Payload ID: 5348
  Gene Symbol: EMID1
  Gene Name: EMI domain containing 1
  ENSP ID: ENSP00000403816
MGGPRAWALLCLGLLLPGGGAAWSIGAAPFSGRRNWCSYVVTRTISCHVQNGTYLQRVLQNCPWPMSCPGSSYRTVVRPTYKVMYKIVTAREWRCCPGHSGVSCEEVAASSASLEPMWSGSTMRRMALRPTAFSGCLNCSKVSELTERLKVLEAKMTMLTVIEQPVPPTPATPEDPAPLWGPPPAQGSPGDGGLQGDPLLSNTFTETNNHWP

SEQ ID NO: 27173 - protein, 236 aa, Homo sapiens
  Payload ID: 5348
  Gene Symbol: EMID1
  Gene Name: EMI domain containing 1
  ENSP ID: ENSP00000408339
  MOD_RES (1)..(1): Any amino acid
XMTMLTVIEQPVPPTPATPEDPAPLWGPPPAQGSPGDGGLQGLPGAIESVRVPLLPRNDQVGAWGLPGPTGPKGDAGSRGPMGMRGPPGPQGPPGSPGRAGAVGTPGERGPPGPPGPPGPPGPPAPVGPPHARISQHGDPLLSNTFTETNNHWPQGPTGPPGPPGPMGPPGPPGPTGVPGSPGHIGPPGPTGPKGISGHPGEKGERGLRGEPGPQGSAGQRGEPGPKGDPGEKSHW

SEQ ID NO: 27174 - protein, 160 aa, Homo sapiens
  Payload ID: 5349
  Gene Symbol: EBP
  Gene Name: emopamil binding protein (sterol isomerase)
  ENSP ID: ENSP00000390031
MTTNAGPLHPYWPQHLRLDNFVPNDRPTWHILAGLFSVTGVLVVTTWLLSGRAAVVPLGTWRRLSLCWFAVCGFIHLVIEGWFVLYYEDLLGDQAFLSQLWKEYAKGDSRYILGDNFTVCMETITACLWGPLSLWVVIAFLRQHPLRFILQLVVSVGQIY

SEQ ID NO: 27175 - protein, 145 aa, Homo sapiens
  Payload ID: 5349
  Gene Symbol: EBP
  Gene Name: emopamil binding protein (sterol isomerase)
  ENSP ID: ENSP00000405832
MTTNAGPLHPYWPQHLRLDNFVPNDRPTWHILAGLFSVTGVLVVTTWLLSGRAAVVPLGTWRRLSLCWFAVCGFIHLVIEGWFVLYYEDLLGDQAFLSQLWKEYAKGDSRYILGDNFTVCMETITACLWGPLSLWVVIAFLRQHP

SEQ ID NO: 27176 - protein, 230 aa, Homo sapiens [sequence omitted]

SEQ ID NO: 27177 - protein, 206 aa, Homo sapiens
  Payload ID: 5350
  Gene Symbol: EBPL
  Gene Name: emopamil binding protein-like
  Uniprot ID: Q9BY08
  ENSP ID: ENSP00000242827
MGAEWELGAEAGGSLLLCAALLAAGCALGLRLGRGQGAADRGALIWLCYDALVHFALEGPFVYLSLVGNVANSDGLIASLWKEYGKADARWVYFDPTIVSVEILTVALDGSLALFLIYAIVKEKYYRHFLQITLCVCELYGCWMTFLPEWLTRSPNLNTSNWLYCWLYLFFFNGVWVLIPGLLLWQSWLELKKMHQKETSSVKKFQ

SEQ ID NO: 27178 - protein, 152 aa, Homo sapiens
  Payload ID: 5350
  Gene Symbol: EBPL
  Gene Name: emopamil binding protein-like
  Uniprot ID: Q9BY08
  ENSP ID: ENSP00000367516
MGAEWELGAEAGGSLLLCAALLAAGCALGLRLGRGQGAADRGALIWLCYDALVHFALEGPFVYLSLVGNVANSDGLIASLCESRSVPQAGAQWHHLGSLQAPPPRFTPFSCLSLPSSWDYRRPPPRLANFFVFLVETGFHHVSQDGLDLLTS

SEQ ID NO: 27179 - protein, 102 aa, Homo sapiens
  Payload ID: 5350
  Gene Symbol: EBPL
  Gene Name: emopamil binding protein-like
  Uniprot ID: Q9BY08
  ENSP ID: ENSP00000367519
MGAEWELGAEAGGSLLLCAALLAAGCALGLRLGRGQGAADRGALIWLCYDALVHFALAFPADHPVRVRAVWLLDDLPPRVAHQKPQPQHQQLAVLLALPVFF

SEQ ID NO: 27180 - protein, 97 aa, Homo sapiens
  Payload ID: 5350
  Gene Symbol: EBPL
  Gene Name: emopamil binding protein-like
  Uniprot ID: Q9BY08
  ENSP ID: ENSP00000367521
MGAEWELGAEAGGSLLLCAALLAAGCALGLRLGRGQGAADRGALIWLCYDALVHFALEGPFVYLSLVGNVANSDGLIASLCISCRSPCACASCMAAG

SEQ ID NO: 27181 - protein, 134 aa, Homo sapiens
  Payload ID: 5350
  Gene Symbol: EBPL
  Gene Name: emopamil binding protein-like
  ENSP ID: ENSP00000367533
MGAEWELGAEAGGSLLLCAALLAAGCALGLRLGRGQGAADRGALIWLCYDALVHFALEGPFVYLSLVGNVANSDGLIASLWKEYGKADARWVYFDPTIVSVEILTVALDGSLALFLIYAIVKEKYYRDRVAWGE

SEQ ID NO: 27182 - protein, 290 aa, Homo sapiens
  Payload ID: 5351
  Gene Symbol: EMX1
  Gene Name: empty spiracles homeobox 1
  Uniprot ID: Q04741
  ENSP ID: ENSP00000258106
MCLAGCTPRKAAAPGRGALPRARLPRTAPAAATMFQPAAKRGFTIESLVAKDGGTGGGTGGGGAGSHLLAAAASEEPLRPTALNYPHPSAAEAAFVSGFPAAAAAGAGRSLYGGPELVFPEAMNHPALTVHPAHQLGASPLQPPHSFFGAQHRDPLHFYPWVLRNRFFGHRFQASDVPQDGLLLHGPFARKPKRIRTAFSPSQLLRLERAFEKNHYVVGAERKQLAGSLSLSETQVKVWFQNRRTKYKRQKLEEEGPESEQKKKGSHHINRWRIATKQANGEDIDVTSND

SEQ ID NO: 27183 - protein, 147 aa, Homo sapiens
  Payload ID: 5351
  Gene Symbol: EMX1
  Gene Name: empty spiracles homeobox 1
  ENSP ID: ENSP00000446992
MNHPALTVHPAHQLGASPLQPPHSFFGAQHRDPLHFYPWVLRNRFFGHRFQASDVPQDGLLLHGPFARKPKRIRTAFSPSQLLRLERAFEKNHYVVGAERKQLAGSLSLSETQVRRVGVGLSDPQPSCCPGGGFQSLRAGRLPELRE

SEQ ID NO: 27184 - protein, 209 aa, Homo sapiens
  Payload ID: 5351
  Gene Symbol: EMX1
  Gene Name: empty spiracles homeobox 1
  ENSP ID: ENSP00000482619
MGSGYLASFNLSHSVSEALTWSGPPTLEPPEPQRRRGGGSPSAEARRPGPSRSRHRVWALELLPAPRTAGGWQWDRSGGFSRAVPRLAPCEGSERPLSRAVPRDIQKTRNLRNKVAASDRGPGGRCQRRAPGRAASARPLRTQAQADPHGLLALAAAAAGARLREEPLRGGRRAEAAGRQSQPLRDAGEGVVPEPEDKVQTAEAGGGRA

SEQ ID NO: 27185 - protein, 252 aa, Homo sapiens
  Payload ID: 5352
  Gene Symbol: EMX2
  Gene Name: empty spiracles homeobox 2
  Uniprot ID: Q04743
  ENSP ID: ENSP00000450962
MFQPAPKRCFTIESLVAKDSPLPASRSEDPIRPAALSYANSSPINPFLNGFHSAAAAAAGRGVYSNPDLVFAEAVSHPPNPAVPVHPVPPPHALAAHPLPSSHSPHPLFASQQRDPSTFYPWLIHRYRYLGHRFQGNDTSPESFLLHNALARKPKRIRTAFSPSQLLRLEHAFEKNHYVVGAERKQLAHSLSLTETQVKVWFQNRRTKFKRQKLEEEGSDSQQKKKGTHHINRWRIATKQASPEEIDVTSDD

SEQ ID NO: 27186 - protein, 169 aa, Homo sapiens
  Payload ID: 5352
  Gene Symbol: EMX2
  Gene Name: empty spiracles homeobox 2
  Uniprot ID: Q04743
  ENSP ID: ENSP00000474874
MFQPAPKRCFTIESLVAKDSPLPASRSEDPIRPAALSYANSSPINPFLNGFHSAAAAAAGRGVYSNPDLVFAEAVSHPPNPAVPVHPVPPPHALAAHPLPSSHSPHPLFASQQRDPSTFYPWLIHRYRYLGHRFQGKSMVSEPKNKVQKAEAGGRRLRFATKEKRDAPY

SEQ ID NO: 27187 - protein, 69 aa, Homo sapiens
  Payload ID: 5352
  Gene Symbol: EMX2
  Gene Name: empty spiracles homeobox 2
  ENSP ID: ENSP00000480271
SSHSPHPLFASQQRDPSTFYPWLIHRYRYLGHRFQGKSMVSEPKNKVQKAEAGGRRLRFATKEKRDAPY

SEQ ID NO: 27188 - protein, 213 aa, Homo sapiens
  Payload ID: 5353
  Gene Symbol: ENAH
  Gene Name: enabled homolog (Drosophila)
  ENSP ID: ENSP00000284563
MSEQSICQARAAVMVYDDANKKWVPAGGSTGFSRVHIYHHTGNNTFRVVGRKIQDHQVVINCAIPKGLKYNQATQTFHQWRDARQVYGLNFGSKEDANVFASAMMHALEVLNSQETAQSKVTATQDSTNLRCIFCGPTLPRQNSQLPAQVQNGPSQEELEIQRRQLQEQQRQKELERERLERERMERERLERERLERERLERERLEQEQLERE

SEQ ID NO: 27189 - protein, 570 aa, Homo sapiens
  Payload ID: 5353
  Gene Symbol: ENAH
  Gene Name: enabled homolog (Drosophila)
  Uniprot ID: Q8N8S7
  ENSP ID: ENSP00000355808
MSEQSICQARAAVMVYDDANKKWVPAGGSTGFSRVHIYHHTGNNTFRVVGRKIQDHQVVINCAIPKGLKYNQATQTFHQWRDARQVYGLNFGSKEDANVFASAMMHALEVLNSQETGPTLPRQNSQLPAQVQNGPSQEELEIQRRQLQEQQRQKELERERLERERMERERLERERLERERLERERLEQEQLERERQERERQERLERQERLERQERLERQERLDRERQERQERERLERLERERQERERQEQLEREQLEWERERRISSAAAPASVETPLNSVLGDSSASEPGLQAASQPAETPSQQGIVLGPLAPPPPPPLPPGPAQASVALPPPPGPPPPPPLPSTGPPPPPPPPPLPNQVPPPPPPPPAPPLPASGFFLASMSEDNRPLTGLAAAIAGAKLRKVSRMEDTSFPSGGNAIGVNSASSKTDTGRGNGPLPLGGSGLMEEMSALLARRRRIAEKGSTIETEQKEDKGEDSEPVTSKASSTSTPEPTRKPWERTNTMNGSKSPVISRPKSTPLSQPSANGVQTEGLDYDRLKQDILDEMRKELTKLKEELIDAIRQELSKSNTA

SEQ ID NO: 27190 - protein, 591 aa, Homo sapiens
  Payload ID: 5353
  Gene Symbol: ENAH
  Gene Name: enabled homolog (Drosophila)
  Uniprot ID: Q8N8S7
  ENSP ID: ENSP00000355809
MSEQSICQARAAVMVYDDANKKWVPAGGSTGFSRVHIYHHTGNNTFRVVGRKIQDHQVVINCAIPKGLKYNQATQTFHQWRDARQVYGLNFGSKEDANVFASAMMHALEVLNSQETGPTLPRQNSQLPAQVQNGPSQEELEIQRRQLQEQQRQKELERERLERERMERERLERERLERERLERERLEQEQLERERQERERQERLERQERLERQERLERQERLDRERQERQERERLERLERERQERERQEQLEREQLEWERERRISSAAAPASVETPLNSVLGDSSASEPGLQAASQPAETPSQQGIVLGPLAPPPPPPLPPGPAQASVALPPPPGPPPPPPLPSTGPPPPPPPPPLPNQVPPPPPPPPAPPLPASGFFLASMSEDNRPLTGLAAAIAGAKLRKVSRMEDTSFPSGGNAIGVNSASSKTDTGRGNGPLPLGGSGLMEEMSALLARRRRIAEKGSTIETEQKEDKGEDSEPVTSKASSTSTPEPTRKPWERTNTMNGSKSPVISRRDSPRKNQIVFDNRSYDSLHRPKSTPLSQPSANGVQTEGLDYDRLKQDILDEMRKELTKLKEELIDAIRQELSKSNTA

SEQ ID NO: 27191 - protein, 242 aa, Homo sapiens
  Payload ID: 5353
  Gene Symbol: ENAH
  Gene Name: enabled homolog (Drosophila)
  ENSP ID: ENSP00000489106
  MOD_RES (1)..(1): Any amino acid
XRKIQDHQVVINCAIPKGLKYNQATQTFHQWRDARQVYGLNFGSKEDANVFASAMMHALEVLNSQETGPTLPRQNSQLPAQVQNGPSQEELEIQRRQLQEQQRQKELERERLERERMERERLERERLERERLERERLEQEQLERERQERERQERLERQERLERQERLERQERLDRERQERQERERLERLERERQERERQEQLEREQLEWERERRISSAGKKFTNSSVFLYLSLDDVSCAVMC

SEQ ID NO: 27192 - protein, 802 aa, Homo sapiens
  Payload ID: 5353
  Gene Symbol: ENAH
  Gene Name: enabled homolog (Drosophila)
  ENSP ID: ENSP00000489607
MSEQSICQARAAVMVYDDANKKWVPAGGSTGFSRVHIYHHTGNNTFRVVGRKIQDHQVVINCAIPKGLKYNQATQTFHQWRDARQVYGLNFGSKEDANVFASAMMHALEVLNSQETVFYLGPTLPRQNSQLPAQVQNGPSQEELEIQRRQLQEQQRQKELERERLERERMERERLERERLERERLERERLEQEQLERERQERERQERLERQERLERQERLERQERLDRERQERQERERLERLERERQERERQEQLEREQLEWERERRISSAAPSSDSSLYNAPLPEYSSCQPPSAPPPSYAKVISAPVSDATPDYAVVTALPPTSTPPTPPLRHSATRFATSLGSAFHPVLPHYATVPRPLNKNSRPSSPVNTPSSQPPATKPCAWSTSNFSPLPPSPPIMISSPPGKATGPRPVLPVCVSSPVPQMPPSPTAPNGLVDSVTYPVSPPPTSGPAAPPPPPPLPSLASLSHCGSQASPPPSTPIASTPSSKPSVLPSPSAAAPASVETPLNSVLGDSSASEPGLQAASQPAETPSQQGIVLGPLAPPPPPPLPPGPAQASVALPPPPGPPPPPPLPSTGPPPPPPPPPLPNQVPPPPPPPPAPPLPASGFFLASMSEDNRPLTGLAAAIAGAKLRKVSRMEDTSFPSGGNAIGVNSASSKTDTGRGNGPLPLGGSGLMEEMSALLARRRRIAEKGSTIETEQKEDKGEDSEPVTSKASSTSTPEPTRKPWERTNTMNGSKSPVISRPKSTPLSQPSANGVQTEGLDYDRLKQDILDEMRKELTKLKEELIDAIRQELSKSNTA

SEQ ID NO: 27193 - protein, 418 aa, Homo sapiens
  Payload ID: 5354
  Gene Symbol: EVL
  Gene Name: Enah/Vasp-like
  Uniprot ID: Q9UI08
  ENSP ID: ENSP00000376652
MATSEQSICQARASVMVYDDTSKKWVPIKPGQQGFSRINIYHNTASNTFRVVGVKLQDQQVVINYSIVKGLKYNQATPTFHQWRDARQVYGLNFASKEEATTFSNAMLFALNIMNSQEGGPSSQRQVQNGPSPDEMDIQRRQVMEQHQQQRQESLERRTSATGPILPPGHPSSAASAPVSCSGPPPPPPPPVPPPPTGATPPPPPPLPAGGAQGSSHDESSMSGLAAAIAGAKLRRVQRPEDASGGSSPSGTSKSDANRASSGGGGGGLMEEMNKLLAKRRKAASQSDKPAEKKEDESQMEDPSTSPSPGTRAASQPPNSSEAGRKPWERSNSVEKPVSSILSRTPSVAKSPEAKSPLQSQPHSRMKPAGSVNDMALDAFDLDRMKQEILEEVVRELHKVKEEIIDAIRQELSGISTT

SEQ ID NO: 27194 - protein, 416 aa, Homo sapiens
  Payload ID: 5354
  Gene Symbol: EVL
  Gene Name: Enah/Vasp-like
  Uniprot ID: Q9UI08
  ENSP ID: ENSP00000384720
MSEQSICQARASVMVYDDTSKKWVPIKPGQQGFSRINIYHNTASNTFRVVGVKLQDQQVVINYSIVKGLKYNQATPTFHQWRDARQVYGLNFASKEEATTFSNAMLFALNIMNSQEGGPSSQRQVQNGPSPDEMDIQRRQVMEQHQQQRQESLERRTSATGPILPPGHPSSAASAPVSCSGPPPPPPPPVPPPPTGATPPPPPPLPAGGAQGSSHDESSMSGLAAAIAGAKLRRVQRPEDASGGSSPSGTSKSDANRASSGGGGGGLMEEMNKLLAKRRKAASQSDKPAEKKEDESQMEDPSTSPSPGTRAASQPPNSSEAGRKPWERSNSVEKPVSSILSRTPSVAKSPEAKSPLQSQPHSRMKPAGSVNDMALDAFDLDRMKQEILEEVVRELHKVKEEIIDAIRQELSGISTT

SEQ ID NO: 27195 - protein, 390 aa, Homo sapiens
  Payload ID: 5354
  Gene Symbol: EVL
  Gene Name: Enah/Vasp-like
  Uniprot ID: Q9UI08
  ENSP ID: ENSP00000437904
MFAFEEFSEQSICQARASVMVYDDTSKKWVPIKPGQQGFSRINIYHNTASNTFRVVGVKLQDQQVVINYSIVKGLKYNQATPTFHQWRDARQVYGLNFASKEEATTFSNAMLFALNIMNSQEGGPSSQRQVQNGPSPDEMDIQRRQVMEQHQQQRQESLERRTSATGPILPPGHPSSAASAPVSCSGPPPPPPPPVPPPPTGATPPPPPPLPAGGAQGSSHDESSMSGLAAAIAGAKLRRVQRPEDASGGSSPSGTSKSDANRASSGGGGGGLMEEMNKLLAKRRKAASQSDKPAEKKEDESQMEDPSTSPSPGTRAASQPPNSSEAGRKPWERSNSVEKPVSSILSRTPSVAKSPEAKSPLQSQPHSRYRTTLLLTCPPGFGAPLSPVP

SEQ ID NO: 27196 - protein, 115 aa, Homo sapiens
  Payload ID: 5354
  Gene Symbol: EVL
  Gene Name: Enah/Vasp-like
  ENSP ID: ENSP00000450723
MVYDDTSKKWVPIKPGQQGFSRINIYHNTASNTFRVVGVKLQDQQVVINYSIVKGLKYNQATPTFHQWRDARQVYGLNFASKEEATTFSNAMLFALNIMNSQEGGPSSQRQVQNG

SEQ ID NO: 27197 - protein, 215 aa, Homo sapiens
  Payload ID: 5354
  Gene Symbol: EVL
  Gene Name: Enah/Vasp-like
  ENSP ID: ENSP00000450979
MLFALNIMNSQEGGPSSQRQVQNGPSPDEMDIQRRQVMEQHQQQRQESLERRTSATGPILPPGHPSSAASAPVSCSGPPPPPPPPVPPPPTGATPPPPPPLPAGGAQGSSHDESSMSGLAAAIAGAKLRRVQRPEDASGGSSPSGTSKSDANRASSGGGGGGLMEEMNKLLAKRRKAASQSDKPAEKKEDESQMEDPSTSPSPGTRAASQPPNSS

SEQ ID NO: 27198 - protein, 121 aa, Homo sapiens
  Payload ID: 5354
  Gene Symbol: EVL
  Gene Name: Enah/Vasp-like
  ENSP ID: ENSP00000451226
MATSEQSICQARASVMVYDDTSKKWVPIKPGQQGFSRINIYHNTASNTFRVVGVKLQDQQVVINYSIVKGLKYNQATPTFHQWRDARQVYGLNFASKEEATTFSNAMLFALNIMNSQEGDK

SEQ ID NO: 27199 - protein, 104 aa, Homo sapiens
  Payload ID: 5354
  Gene Symbol: EVL
  Gene Name: Enah/Vasp-like
  ENSP ID: ENSP00000451761
  MOD_RES (1)..(1): Any amino acid
XGATPPPPPPLPAGGAQGSSHDESSMSGLAAAIAGAKLRRVQRPEDASGGSSPSGTSKSDANRASSGGGGGGLMEEMNKLLAKRRKAASQSDKPAEKKEDESQM

SEQ ID NO: 27200 - protein, 212 aa, Homo sapiens
  Payload ID: 5354
  Gene Symbol: EVL
  Gene Name: Enah/Vasp-like
  ENSP ID: ENSP00000451821
PPPPPPVPPPPTGATPPPPPPLPAGGAQGSSHDESSMSGLAAAIAGAKLRRVQRPEDASGGSSPSGTSKSDANRASSGGGGGGLMEEMNKLLAKRRKAASQSDKPAEKKEDESQMEDPSTSPSPGTRAASQPPNSSEAGRKPWERSNSVEKPVSSILSRMKPAGSVNDMALDAFDLDRMKQEILEEVVRELHKVKEEIIDAIRQELSGISTT

SEQ ID NO: 27201 - protein, 124 aa, Homo sapiens
  Payload ID: 5354
  Gene Symbol: EVL
  Gene Name: Enah/Vasp-like
  ENSP ID: ENSP00000452156
MATSEQSICQARASVMVYDDTSKKWVPIKPGQQGFSRINIYHNTASNTFRVVGVKLQDQQVVINYSIVKGLKYNQATPTFHQWRDARQVYGLNFASKEEATTFSNAMLFALNIMNSQEGGACIL

SEQ ID NO: 27202 - protein, 168 aa, Homo sapiens
  Payload ID: 5354
  Gene Symbol: EVL
  Gene Name: Enah/Vasp-like
  ENSP ID: ENSP00000452327
MVYDDTSKKWVPIKPGQQGFSRINIYHNTASNTFRVVGVKLQDQQVVINYSIVKGLKYNQATPTFHQWRDARQVYGLNFASKEEATTFSNAMLFALNIMNSQEGGPSSQRQVQNGPSPDEMDIQRRQVMEQHQQQRQESLERRTSATGPILPPGHPSSAASAPVSCSG

SEQ ID NO: 27203 - protein, 283 aa, Homo sapiens
  Payload ID: 5354
  Gene Symbol: EVL
  Gene Name: Enah/Vasp-like
  ENSP ID: ENSP00000481825
MATSEQSICQARASVMVYDDTSKKWVPIKPGQQGFSRINIYHNTASNTFRVVGVKLQDQQVVINYSIVKGLKYNQATPTFHQWRDARQVYGLNFASKEEATTFSNAMLFALNIMNSQEGARKTEPQREEVCTWPKPLPDMTQSGREARMRTCSSSPPVPGSVVGAAWSSRKSACPGAGLRWVCVTLSKSPPPSAGGMTPQARGSSHDTKMPGAWYVAFRAVPHAAPLFVPTSSSFPLNHCRSSQNLLESSCHRLPLLQESRALVALEARPQADGTRPHSGSEF

SEQ ID NO: 27204 - protein, 1142 aa, Homo sapiens
  Payload ID: 5355
  Gene Symbol: ENAM
  Gene Name: enamelin
  Uniprot ID: Q9NRM1
  ENSP ID: ENSP00000379383
MLVLRCRLGTSFPKLDNLVPKGKMKILLVFLGLLGNSVAMPMHMPRMPGFSSKSEEMMRYNQFNFMNGPHMAHLGPFFGNGLPQQFPQYQMPMWPQPPPNTWHPRKSSAPKRHNKTDQTQETQKPNQTQSKKPPQKRPLKQPSHNQPQPEEEAQPPQAFPPFGNGLFPYQQPPWQIPQRLPPPGYGRPPISNEEGGNPYFGYFGYHGFGGRPPYYSEEMFEQDFEKPKEEDPPKAESPGTEPTANSTVTETNSTQPNPKGSQGGNDTSPTGNSTPGLNTGNNPPAQNGIGPLPAVNASGQGGPGSQIPWRPSQPNIRENHPYPNIRNFPSGRQWYFTGTVMGHRQNRPFYRNQQVQRGPRWNFFAWERKQVARPGNPVYHKAYPPTSRGNYPNYAGNPANLRRKPQGPNKHPVGTTVAPLGPKPGPVVRNEKIQNPKEKPLGPKEQIIVPTKNPTSPWRNSQQYEVNKSNYKLPHSEGYMPVPNFNSVDQHENSYYPRGDSRKVPNSDGQTQSQNLPKGIVLGSRRMPYESETNQSELKHSSYQPAVYPEEIPSPAKEHFPAGRNTWDHQEISPPFKEDPGRQEEHLPHPSHGSRGSVFYPEYNPYDPRENSPYLRGNTWDERDDSPNTMGQKESPLYPINTPDQKEIVPYNEEDPVDPTGDEVFPGQNRWGEELSFKGGPTVRHYEGEQYTSNQPKEYLPYSLDNPSKPREDFYYSEFYPWSPDENFPSYNTASTMPPPIESRGYYVNNAAGPEESTLFPSRNSWDHRIQAQGQRERRPYFNRNIWDQATHLQKAPARPPDQKGNQPYYSNTPAGLQKNPIWHEGENLNYGMQITRMNSPEREHSSFPNFIPPSYPSGQKEAHLFHLSQRGSCCAGSSTGPKDNPLALQDYTPSYGLAPGENQDTSPLYTDGSHTKQTRDIISPTSILPGQRNSSEKRESQNPFRDDVSTLRRNTPCSIKNQLGQKEIMPFPEASSLQSKNTPCLKNDLGGDGNNILEQVFEDNQLNERTVDLTPEQLVIGTPDEGSNPEGIQSQVQENESERQQQRPSNILHLPCFGSKLAKHHSSTTGTPSSDGRQSPFDGDSITPTENPNTLVELATEEQFKSINVDPLDADEHSPFEFLQRGTNVQDQVQDCLLLQA

SEQ ID NO: 27205 - protein, 368 aa, Homo sapiens
  Payload ID: 5356
  Gene Symbol: EXOG
  Gene Name: endo/exonuclease (5'-3'), endonuclease G-like
  Uniprot ID: Q9Y2C4
  ENSP ID: ENSP00000287675
MAIKSIASRLRGSRRFLSGFVAGAVVGAAGAGLAALQFFRSQGAEGALTGKQPDGSAEKAVLEQFGFPLTGTEARCYTNHALSYDQAKRVPRWVLEHISKSKIMGDADRKHCKFKPDPNIPPTFSAFNEDYVGSGWSRGHMAPAGNNKFSSKAMAETFYLSNIVPQDFDNNSGYWNRIEMYCRELTERFEDVWVVSGPLTLPQTRGDGKKIVSYQVIGEDNVAVPSHLYKVILARRSSVSTEPLALGAFVVPNEAIGFQPQLTEFQVSLQDLEKLSGLVFFPHLDRTSDIRNICSVDTCKLLDFQEFTLYLSTRKIEGARSVLRLEKIMENLKNAEIEPDDYFMSRYEKKLEELKAKEQSGTQIRKPS

SEQ ID NO: 27206 - protein, 107 aa, Homo sapiens
  Payload ID: 5356
  Gene Symbol: EXOG
  Gene Name: endo/exonuclease (5'-3'), endonuclease G-like
  ENSP ID: ENSP00000394977
MAIKSIASRLRGSRRFLSGFVAGAVVGAAGAGLAALQFFRSQGAEGALTGKQPDGSAEKAVLEQFGFPLTGTEARCYTNHALSYDQAKRVPRWVLEHISKSKIMGWS

SEQ ID NO: 27207 - protein, 187 aa, Homo sapiens
  Payload ID: 5356
  Gene Symbol: EXOG
  Gene Name: endo/exonuclease (5'-3'), endonuclease G-like
  ENSP ID: ENSP00000397124
  MOD_RES (1)..(1): Any amino acid
XFRSQGAEGALTGKQPDGSAEKAVLEQFGFPLTGTEARCYTNHALSYDQAKRVPRWVLEHISKSKIMGDADRKHCKFKPDPNIPPTFSAFNEDYVGSGWSRGHMAPAGNNKFSSKAMAETFYLSNIVPQDFDNNSGYWNRIEMYCRELTERFEDVWVVSGPLTLPQTRGDGKKIVSYQSWEYPSLQF

SEQ ID NO: 27208 - protein, 56 aa, Homo sapiens
  Payload ID: 5356
  Gene Symbol: EXOG
  Gene Name: endo/exonuclease (5'-3'), endonuclease G-like
  ENSP ID: ENSP00000400239
MAIKSIASRLRGSRRFLSGFVAGAVVGAAGAGLAALQFFRSQGAEGALTGKQPDDC

SEQ ID NO: 27209 - protein, 143 aa, Homo sapiens
  Payload ID: 5356
  Gene Symbol: EXOG
  Gene Name: endo/exonuclease (5'-3'), endonuclease G-like
  ENSP ID: ENSP00000402164
MAIKSIASRLRGSRRFLSGFVAGAVVGAAGAGLAALQFFRSQGAEGALTGKQPDGSAEKAVLEQFGFPLTGTEARCYTNHALSYDQAKRVPRWVLEHISKSKIMGRFFKFTLLASLFLLSLNLHLWLVLNFWVQVTLLPQPPE

SEQ ID NO: 27210 - protein, 318 aa, Homo sapiens
  Payload ID: 5356
  Gene Symbol: EXOG
  Gene Name: endo/exonuclease (5'-3'), endonuclease G-like
  Uniprot ID: Q9Y2C4
  ENSP ID: ENSP00000404305
MAIKSIASRLRGSRRFLSGFVAGAVVGAAGAGLAALQFFRSQGAEGALTGKQPDGDADRKHCKFKPDPNIPPTFSAFNEDYVGSGWSRGHMAPAGNNKFSSKAMAETFYLSNIVPQDFDNNSGYWNRIEMYCRELTERFEDVWVVSGPLTLPQTRGDGKKIVSYQVIGEDNVAVPSHLYKVILARRSSVSTEPLALGAFVVPNEAIGFQPQLTEFQVSLQDLEKLSGLVFFPHLDRTSDIRNICSVDTCKLLDFQEFTLYLSTRKIEGARSVLRLEKIMENLKNAEIEPDDYFMSRYEKKLEELKAKEQSGTQIRKPS

SEQ ID NO: 27211 - protein, 56 aa, Homo sapiens; identical to SEQ ID NO: 27208
  Payload ID: 5356
  Gene Symbol: EXOG
  Gene Name: endo/exonuclease (5'-3'), endonuclease G-like
  ENSP ID: ENSP00000406101

SEQ ID NO: 27212 - protein, 56 aa, Homo sapiens; identical to SEQ ID NO: 27208
  Payload ID: 5356
  Gene Symbol: EXOG
  Gene Name: endo/exonuclease (5'-3'), endonuclease G-like
  ENSP ID: ENSP00000407641

SEQ ID NO: 27213 - protein, 146 aa, Homo sapiens
  Payload ID: 5356
  Gene Symbol: EXOG
  Gene Name: endo/exonuclease (5'-3'), endonuclease G-like
  ENSP ID: ENSP00000412756
MAIKSIASRLRGSRRFLSGFVAGAVVGAAGAGLAALQFFRSQGAEGALTGKQPDGSAEKAVLEQFGFPLTGTEVMQTESIVNLSLIPISLQPSVPSMKIMLEVGGHEDTWLQQEITNFQVKPWLKPFTFLTLCLRILIIILDIGTE

SEQ ID NO: 27214 - protein, 56 aa, Homo sapiens; identical to SEQ ID NO: 27208
  Payload ID: 5356
  Gene Symbol: EXOG
  Gene Name: endo/exonuclease (5'-3'), endonuclease G-like
  ENSP ID: ENSP00000412841

SEQ ID NO: 27215 - protein, 81 aa, Homo sapiens
  Payload ID: 5356
  Gene Symbol: EXOG
  Gene Name: endo/exonuclease (5'-3'), endonuclease G-like
  ENSP ID: ENSP00000413176
MAIKSIASRLRGSRRFLSGFVAGAVVGAAGAGLAALQFFRSQGAEGALTGKQPDGSAEKAVLEQFGFPLTGTEVDSSSLHS

SEQ ID NO: 27216 - protein, 107 aa, Homo sapiens
  Payload ID: 5356
  Gene Symbol: EXOG
  Gene Name: endo/exonuclease (5'-3'), endonuclease G-like
  ENSP ID: ENSP00000415568
RSQGAEGALTGKQPDGSAEKAVLEQFGFPLTGTEVMQTESIVNLSLIPISLQPSVPSMKIMLEVGGHEDTWLQQEITNFQVKPWLKPFTFLTLCLRILIIILDIGTE

SEQ ID NO: 27217 - protein, 15 aa, Homo sapiens
  Payload ID: 5356
  Gene Symbol: EXOG
  Gene Name: endo/exonuclease (5'-3'), endonuclease G-like
  ENSP ID: ENSP00000421649
  MOD_RES (1)..(1): Any amino acid
XGAEGALTGKQPDDC

SEQ ID NO: 27218 - protein, 56 aa, Homo sapiens; identical to SEQ ID NO: 27208
  Payload ID: 5356
  Gene Symbol: EXOG
  Gene Name: endo/exonuclease (5'-3'), endonuclease G-like
  ENSP ID: ENSP00000487559

SEQ ID NO: 27219 - protein, 183 aa, Homo sapiens
  Payload ID: 5357
  Gene Symbol: ENGASE
  Gene Name: endo-beta-N-acetylglucosaminidase
  ENSP ID: ENSP00000300682
  MOD_RES (1)..(1): Any amino acid
XQFFRFDGWLINIENSLSLAAVGNMPPFLRYLTTQLHRQVPGGLVLWYDSVVQSGQLKWQDELNQHNRVFFDSCDGFFTNYNWREEHLERMLGQAGERRADVYVGVDVFARGNVVGGRFDTDKVGGGFRPRASGPVPPLGPHFLMDLPFPSAPQRNDSSCSSQSGDPVALRNRCPAPAKLCPH

SEQ ID NO: 27220 - protein, 365 aa, Homo sapiens
  Payload ID: 5357
  Gene Symbol: ENGASE
  Gene Name: endo-beta-N-acetylglucosaminidase
  ENSP ID: ENSP00000308158
  MOD_RES (1)..(1): Any amino acid
XRRRPGRSIKDEEEETVFREVVSFSPDPLPVRYYDKDTTKPISFYLSSLEELLAWKPRLEDGFNVALEPLACRQPPLSSQRPRTLLCHDMMGGYLDDRFIQGSVVQTPYAFYHWQCIDVFVYFSHHTVTIPPVGWTNTAHRHGVCVLGTFITEWNEGGRLCEAFLAGDERSYQAVADRLVQITQFFRFDGWLINIENSLSLAAVGNMPPFLRYLTTQLHRQVPGGLVLWYDSVVQSGQLKWQDELNQHNRVFFDSCDGFFTNYNWREEHLERMLGQAGERRADVYVGVDVFARGNVVGGRFDTDKVGGGFRPRASGPVPPLGPHFLMDLPFPSAPQRNDSSCSSQSGDPVALRNRCPAPAKLCPH

SEQ ID NO: 27221 - protein, 743 aa, Homo sapiens
  Payload ID: 5357
  Gene Symbol: ENGASE
  Gene Name: endo-beta-N-acetylglucosaminidase
  Uniprot ID: Q8NFI3
  ENSP ID: ENSP00000462333
MEAAAVTVTRSATRRRRRQLQGLAAPEAGTQEEQEDQEPRPRRRRPGRSIKDEEEETVFREVVSFSPDPLPVRYYDKDTTKPISFYLSSLEELLAWKPRLEDGFNVALEPLACRQPPLSSQRPRTLLCHDMMGGYLDDRFIQGSVVQTPYAFYHWQCIDVFVYFSHHTVTIPPVGWTNTAHRHGVCVLGTFITEWNEGGRLCEAFLAGDERSYQAVADRLVQITQFFRFDGWLINIENSLSLAAVGNMPPFLRYLTTQLHRQVPGGLVLWYDSVVQSGQLKWQDELNQHNRVFFDSCDGFFTNYNWREEHLERMLGQAGERRADVYVGVDVFARGNVVGGRFDTDKSLELIRKHGFSVALFAPGWVYECLEKKDFFQNQDKFWGRLERYLPTHSICSLPFVTSFCLGMGARRVCYGQEEAVGPWYHLSAQEIQPLFGEHRLGGDGRGWVRTHCCLEDAWHGGSSLLVRGVIPPEVGNVAVRLFSLQAPVPPKIYLSMVYKLEGPTDVTVALELTTGDAGSCHIGGISVLNAETSSRHSLRPLRVPPTKLARWVGRCGRQLSGGWVQHCYEVSLRGCLLLDLLVCFSRPPGSREEESFTCRLGEIQVVDAASLLAPLPQVQAVTISHIRWQPSASEREGPPALLQLSCTLHWSFLLSQVRCFRIHCWGGMSDDSPGRELPRPEMPMFLGLAFATQYRIVDLLVEAAGPGQDRRMEFLVEPVPKEGFRVPQAEWGRAVLLYSAPA

SEQ ID NO: 27222 - protein, 146 aa, Homo sapiens
  Payload ID: 5357
  Gene Symbol: ENGASE
  Gene Name: endo-beta-N-acetylglucosaminidase
  ENSP ID: ENSP00000463537
MEAAAVTVTRSATRRRRRQLQGLAAPEAGTQEEQEDQEPRPRRRRPGRSIKDEEEETVFREVVSFSPDPLPVRYYDKDTTKPISFYLSSLEELLAWKPRLEDGFNVALEPLACRQPPLSSQRPRTLLCHDMMGGYLDDRDFHHGVE

SEQ ID NO: 27223 - protein, 366 aa, Homo sapiens
  Payload ID: 5358
  Gene Symbol: EBLN1
  Gene Name: endogenous Bornavirus-like nucleoprotein 1
  Uniprot ID: P0CF75
  ENSP ID: ENSP00000473842
MSRPRNNPQTSSPQDSTKDGSSFHYFQGRFELSGKSRQYPADALEPQPGIGDVKVIEKATKSMLDPAQRSHFYLVTPSLVFLCFIFDGLHKALLSVGVSKRSNIVIGNENKETGTLYASKFEDVLPTFTALEMSSILRHCCDLIGIAAGSSDPICTNSLQVQRQFKAMMISIGRPLHSESADLLISYNAGPAIDWINSRPWVGGLMFTFLFGEFESPACELLDQVKVVASKAQMMTYYTVRMFLDQCVDGSTALPAVVLEIPVFEQKKPLAKKVLGDFFEFGGVLRHPVIGVLSPQMFPNLATAANYWAKRRNSTFSGFEALDIIPGSTITFPVLQMASAQKISRGSDMDPYTLNILRGYGISGFE

SEQ ID NO: 27224 - protein, 272 aa, Homo sapiens
  Payload ID: 5359
  Gene Symbol: EBLN2
  Gene Name: endogenous Bornavirus-like nucleoprotein 2
  Uniprot ID: Q6P2I7
  ENSP ID: ENSP00000432104
MGYFLKLYAYVNSHSLFVWVCDRSYKRSFRPMILNKIKELSRNQFSTMSHLRKDSQPSSPGDDAMDRSGLPDLQGRFELSGKNRQYPLDALEPQPSIGDIKDIKKAAKSMLDPAHKSHFHPVTPSLVFLCFIFDGLHQALLSVGVSKRSNTVVGNENEERGTPYASRFKDMPNFIALEKSSVLRHCCDLLIGIAAGSSDKICTSSLQVQRRFKAMMASIGRLSHGESADLLISCNAESAIGWISSRPWVGELMFTLLFGDFESPLHKLRKSS

SEQ ID NO: 27225 - protein, 604 aa, Homo sapiens
  Payload ID: 5360
  Gene Symbol: ERV3-1
  Gene Name: endogenous retrovirus group 3, member 1
  Uniprot ID: Q14264
  ENSP ID: ENSP00000391594
MLGMNMLLITLFLLLPLSMLKGEPWEGCLHCTHTTWSGNIMTKTLLYHTYYECAGTCLGTCTHNQTTYSVCDPGRGQPYVCYDPKSSPGTWFEIHVGSKEGDLLNQTKVFPSGKDVVSLYFDVCQIVSMGSLFPVIFSSMEYYSSCHKNRYAHPACSTDSPVTTCWDCTTWSTNQQSLGPIMLTKIPLEPDCKTSTCNSVNLTILEPDQPIWTTGLKAPLGARVSGEEIGPGAYVYLYIIKKTRTRSTQQFRVFESFYEHVNQKLPEPPPLASNLFAQLAENIASSLHVASCYVCGGMNMGDQWPWEARELMPQDNFTLTASSLEPAPSSQSIWFLKTSIIGKFCIARWGKAFTDPVGELTCLGQQYYNETLGKTLWRGKSNNSESPHPSPFSRFPSLNHSWYQLEAPNTWQAPSGLYWICGPQAYRQLPAKWSGACVLGTIRPSFFLMPLKQGEALGYPIYDETKRKSKRGITIGDWKDNEWPPERIIQYYGPATWAEDGMWGYRTPVYMLNRIIRLQAVLEIITNETAGALNLLAQQATKMRNVIYQNRLALDYLLAQEEGVCGKFNLTNCCLELDDEGKVIKEITAKIQKLAHIPVQTWKG

SEQ ID NO: 27226 - protein, 538 aa, Homo sapiens
  Payload ID: 5361
  Gene Symbol: ERVFRD-1
  Gene Name: endogenous retrovirus group FRD, member 1
  Uniprot ID: P60508
  ENSP ID: ENSP00000420174
MGLLLLVLILTPSLAAYRHPDFPLLEKAQQLLQSTGSPYSTNCWLCTSSSTETPGTAYPASPREWTSIEAELHISYRWDPNLKGLMRPANSLLSTVKQDFPDIRQKPPIFGPIFTNINLMGIAPICVMAKRKNGTNVGTLPSTVCNVTFTVDSNQQTYQTYTHNQFRHQPRFPKPPNITFPQGTLLDKSSRFCQGRPSSCSTRNFWFRPADYNQCLQISNLSSTAEWVLLDQTRNSLFWENKTKGANQSQTPCVQVLAGMTIATSYLGISAVSEFFGTSLTPLFHFHISTCLKTQGAFYICGQSIHQCLPSNWTGTCTIGYVTPDIFIAPGNLSLPIPIYGNSPLPRVRRAIHFIPLLAGLGILAGTGTGIAGITKASLTYSQLSKEIANNIDTMAKALTTMQEQIDSLAAVVLQNRRGLDMLTAAQGGICLALDEKCCFWVNQSGKVQDNIRQLLNQASSLRERATQGWLNWEGTWKWFSWVLPLTGPLVSLLLLLLFGPCLLNLITQFVSSRLQAIKLQTNLSAGRHPRNIQESPF

SEQ ID NO: 27227 - protein, 538 aa, Homo sapiens; identical to SEQ ID NO: 27226
  Payload ID: 5361
  Gene Symbol: ERVFRD-1
  Gene Name: endogenous retrovirus group FRD, member 1
  Uniprot ID: P60508
  ENSP ID: ENSP00000444461

SEQ ID NO: 27228 - protein, 74 aa, Homo sapiens
  Payload ID: 5362
  Gene Symbol: ERVK3-1
  Gene Name: endogenous retrovirus group K3, member 1
  ENSP ID: ENSP00000488921
MSQRNLNAKTEQGPTGVTMTSNPITWGQIKKTTQEAEKLLERQGQAKTPDSMFLAMLAVVSCASIGSGEPPTGN

SEQ ID NO: 27229 - protein, 109 aa, Homo sapiens
  Payload ID: 5362
  Gene Symbol: ERVK3-1
  Gene Name: endogenous retrovirus group K3, member 1
  ENSP ID: ENSP00000489018
MDKPCGCPPGVCDHGTGDRRDPWYSTVGLLPPVRAMSQRNLNAKTEQGPTGVTMTSNPITWGQIKKTTQEAEKLLERQGQAKTPDSMFLAMLAVVSCASIGSGEPPTGN

SEQ ID NO: 27230 - protein, 79 aa, Homo sapiens
  Payload ID: 5362
  Gene Symbol: ERVK3-1
  Gene Name: endogenous retrovirus group K3, member 1
  ENSP ID: ENSP00000489068
MLVFLQEMDKPCGCPPGVCDHGTGDRRDPWYSTVGLLPPVRAMSQRNLNAKTEQGPTGVTMTSNPITWGQIKKTTQEAE

SEQ ID NO: 27231 - protein, 85 aa, Homo sapiens
  Payload ID: 5362
  Gene Symbol: ERVK3-1
  Gene Name: endogenous retrovirus group K3, member 1
  ENSP ID: ENSP00000489088
MLPLFIFLISDLTHNFLGPLSLDPSRTTLATARGKEEMDKPCGCPPGVCDHGTGDRRDPWYSTVGLLPPVRAMSQRNLNAKTEQG

SEQ ID NO: 27232 - protein, 98 aa, Homo sapiens
  Payload ID: 5362
  Gene Symbol: ERVK3-1
  Gene Name: endogenous retrovirus group K3, member 1
  ENSP ID: ENSP00000489148
MDKPCGCPPGVCDHGTGDRRDPWYSTVGLLPPVRAMSQRNLNAKTEQGPTGVTMTSNPITWGQIKKTTQEAEKLLERQGQAKTPDSMFLAMLAVVSCA

SEQ ID NO: 27233 - protein, 116 aa, Homo sapiens
  Payload ID: 5362
  Gene Symbol: ERVK3-1
  Gene Name: endogenous retrovirus group K3, member 1
  ENSP ID: ENSP00000489180
MLVFLQEMDKPCGCPPGVCDHGTGDRRDPWYSTVGLLPPVRAMSQRNLNAKTEQGPTGVTMTSNPITWGQIKKTTQEAEKLLERQGQAKTPDSMFLAMLAVVSCASIGSGEPPTGN

SEQ ID NO: 27234 - protein, 563 aa, Homo sapiens
  Payload ID: 5363
  Gene Symbol: ERVMER34-1
  Gene Name: endogenous retrovirus group MER34, member 1
  Uniprot ID: Q9H9K5
  ENSP ID: ENSP00000460255
MGSLSNYALLQLTLTAFLTILVQPQHLLAPVFRTLSILTNQSNCWLCEHLDNAEQPELVFVPASASTWWTYSGQWMYERVWYPQAEVQNHSTSSYRKVTWHWEASMEAQGLSFAQVRLLEGNFSLCVENKNGSGPFLGNIPKQYCNQILWFDSTDGTFMPSIDVTNESRNDDDDTSVCLGTRQCSWFAGCTNRTWNSSAVPLIGLPNTQDYKWVDRNSGLTWSGNDTCLYSCQNQTKGLLYQLFRNLFCSYGLTEAHGKWRCADASITNDKGHDGHRTPTWWLTGSNLTLSVNNSGLFFLCGNGVYKGFPPKWSGRCGLGYLVPSLTRYLTLNASQITNLRSFIHKVTPHRCTQGDTDNPPLYCNPKDNSTIRALFPSLGTYDLEKAILNISKAMEQEFSATKQTLEAHQSKVSSLASASRKDHVLDIPTTQRQTACGTVGKQCCLYINYSEEIKSNIQRLHEASENLKNVPLLDWQGIFAKVGDWFRSWGYVLLIVLFCLFIFVLIYVRVFRKSRRSLNSQPLNLALSPQQSAQLLVSETSCQVSNRAMKGLTTHQYDTSLL

SEQ ID NO: 27235 - protein, 563 aa, Homo sapiens; identical to SEQ ID NO: 27234
  Payload ID: 5363
  Gene Symbol: ERVMER34-1
  Gene Name: endogenous retrovirus group MER34, member 1
  Uniprot ID: Q9H9K5
  ENSP ID: ENSP00000460602

SEQ ID NO: 27236 - protein, 477 aa, Homo sapiens
  Payload ID: 5364
  Gene Symbol: ERVV-1
  Gene Name: endogenous retrovirus group V, member 1
  Uniprot ID: B6SEH8
  ENSP ID: ENSP00000473153
MTEKFLFLYLSLLPMPLLSQAQWNENSLVSFSKIIASGNHLSNCWICHNFITRSSSYQYILVRNFSLNLTFGSGIPEGQHKSVPLQVSLANSAHQVPCLDLTPPFNQSSKTSFYFYNCSSLNQTCCPCPEGHCDRKNTSEEGFPSPTIHPMSFSPAGCHPNLTHWCPAKQMNDYRDKSPQNRCAAWEGKELITWRVLYLLPKAHTVPTWPKSTVPLGGPLSPACNQTIPAGWKSQLHKWFDSHIPRWACTPPGYVFLCGPQKNKLPFDGSPKITYSTPPVANLYTCINNIQHTGECAVGLLGPRGIGVTIYNTTQPRQKRALGLILAGMGAAIGMIAPWGGFTYHDVTLRNLSRQIDNIAKSTRDSISKLKASIDSLANVVMNNRLALDYLLAEQGGVCAVISKSCCIYVNNSGAIEEDIKKIYDEVTWLHNFGKGDSAGSIWEAVKSALPSLTWFVPLLGPAALNSLLSPLWPLSL

SEQ ID NO: 27237 - protein, 535 aa, Homo sapiens
  Payload ID: 5365
  Gene Symbol: ERVV-2
  Gene Name: endogenous retrovirus group V, member 2
  Uniprot ID: B6SEH9
  ENSP ID: ENSP00000472919
MTEKFLFLYLSLLPMPLLSQAQWNENSLVSFSKIIASGNHLSNCWICHNFITRSSSYQYILVRNFSLNLTFGSGIPEGQHKSVPLQVSLANSAHQVPCLDLTPPFNQSSKTSFYFYNCSSLNQTCCPCPEGHCDRKNTSEEGFPSPTIHPMSFSPAGCHPNLTHWCPAKQMNDYRDKSPQNRCAAWEGKELITWRVLYSLPKAHTVPTWPKSTVPLGGPLSPACNQTIPAGWKSQLHKWFDSHIPRWACTPPGYVFLCGPQKNKLPFDGSPKITYSTPPVANLYTCINNIQHTGECAVGLLGPRGIGVTIYNTTQPRQKRALGLILAGMGAAIGMIAPWGGFTYHDVTLRNLSRQIDNIAKSTRDSISKLKASIDSLANVVMDNRLALDYLLAEQGGVCAVINKSCCVYVNNSGAIEEDIKKIYDEATWLHDFGKGGASARAIWEAVKSALPSLNWFVPLLGPATVILLLFLFGPCFFNLLIKCVSSRIKQFHMKSPQMERYQLSVIGGPSTYKHISPLDASGQRFRETMEEFSL

SEQ ID NO: 27238 - protein, 538 aa, Homo sapiens
  Payload ID: 5366
  Gene Symbol: ERVW-1
  Gene Name: endogenous retrovirus group W, member 1
  Uniprot ID: Q9UQF0
  ENSP ID: ENSP00000419945
MALPYHIFLFTVLLPSFTLTAPPPCRCMTSSSPYQEFLWRMQRPGNIDAPSYRSLSKGTPTFTAHTHMPRNCYHSATLCMHANTHYWTGKMINPSCPGGLGVTVCWTYFTQTGMSDGGGVQDQAREKHVKEVISQLTRVHGTSSPYKGLDLSKLHETLRTHTRLVSLFNTTLTGLHEVSAQNPTNCWICLPLNFRPYVSIPVPEQWNNFSTEINTTSVLVGPLVSNLEITHTSNLTCVKFSNTTYTTNSQCIRWVTPPTQIVCLPSGIFFVCGTSAYRCLNGSSESMCFLSFLVPPMTIYTEQDLYSYVISKPRNKRVPILPFVIGAGVLGALGTGIGGITTSTQFYYKLSQELNGDMERVADSLVTLQDQLNSLAAVVLQNRRALDLLTAERGGTCLFLGEECCYYVNQSGIVTEKVKEIRDRIQRRAEELRNTGPWGLLSQWMPWILPFLGPLAAIILLLLFGPCIFNLLVNFVSSRIEAVKLQMEPKMQSKTKIYRRPLDRPASPRSDVNDIKGTPPEEISAAQPLLRPNSAGSS

SEQ ID NO: 27239 - protein, 538 aa, Homo sapiens; identical to SEQ ID NO: 27238
  Payload ID: 5366
  Gene Symbol: ERVW-1
  Gene Name: endogenous retrovirus group W, member 1
  Uniprot ID: Q9UQF0
  ENSP ID: ENSP00000474984

SEQ ID NO: 27240 - protein, 625 aa, Homo sapiens
  Payload ID: 5367
  Gene Symbol: ENG
  Gene Name: endoglin
  Uniprot ID: P17813
  ENSP ID: ENSP00000341917
MDRGTLPLAVALLLASCSLSPTSLAETVHCDLQPVGPERGEVTYTTSQVSKGCVAQAPNAILEVHVLFLEFPTGPSQLELTLQASKQNGTWPREVLLVLSVNSSVFLHLQALGIPLHLAYNSSLVTFQEPPGVNTTELPSFPKTQILEWAAERGPITSAAELNDPQSILLRLGQAQGSLSFCMLEASQDMGRTLEWRPRTPALVRGCHLEGVAGHKEAHILRVLPGHSAGPRTVTVKVELSCAPGDLDAVLILQGPPYVSWLIDANHNMQIWTTGEYSFKIFPEKNIRGFKLPDTPQGLLGEARMLNASIVASFVELPLASIVSLHASSCGGRLQTSPAPIQTTPPKDTCSPELLMSLIQTKCADDAMTLVLKKELVAHLKCTITGLTFWDPSCEAEDRGDKFVLRSAYSSCGMQVSASMISNEAVVNILSSSSPQRKKVHCLNMDSLSFQLGLYLSPHFLQASNTIEPGQQSFVQVRVSPSVSEFLLQLDSCHLDLGPEGGTVELIQGRAAKGNCVSLLSPSPEGDPRFSFLLHFYTVPIPKTGTLSCTVALRPKTGSQDQEVHRTVFMRLNIISPDLSGCTSKGLVLPAVLGITFGAFLIGALLTAALWYIYSHTREYPRPPQ

SEQ ID NO: 27241 - protein, 658 aa, Homo sapiens
  Payload ID: 5367
  Gene Symbol: ENG
  Gene Name: endoglin
  Uniprot ID: P17813
  ENSP ID: ENSP00000362299
MDRGTLPLAVALLLASCSLSPTSLAETVHCDLQPVGPERGEVTYTTSQVSKGCVAQAPNAILEVHVLFLEFPTGPSQLELTLQASKQNGTWPREVLLVLSVNSSVFLHLQALGIPLHLAYNSSLVTFQEPPGVNTTELPSFPKTQILEWAAERGPITSAAELNDPQSILLRLGQAQGSLSFCMLEASQDMGRTLEWRPRTPALVRGCHLEGVAGHKEAHILRVLPGHSAGPRTVTVKVELSCAPGDLDAVLILQGPPYVSWLIDANHNMQIWTTGEYSFKIFPEKNIRGFKLPDTPQGLLGEARMLNASIVASFVELPLASIVSLHASSCGGRLQTSPAPIQTTPPKDTCSPELLMSLIQTKCADDAMTLVLKKELVAHLKCTITGLTFWDPSCEAEDRGDKFVLRSAYSSCGMQVSASMISNEAVVNILSSSSPQRKKVHCLNMDSLSFQLGLYLSPHFLQASNTIEPGQQSFVQVRVSPSVSEFLLQLDSCHLDLGPEGGTVELIQGRAAKGNCVSLLSPSPEGDPRFSFLLHFYTVPIPKTGTLSCTVALRPKTGSQDQEVHRTVFMRLNIISPDLSGCTSKGLVLPAVLGITFGAFLIGALLTAALWYIYSHTRSPSKREPVVAVAAPASSESSSTNHSIGSTQSTPCSTSSMA

SEQ ID NO: 27242 - protein, 476 aa, Homo sapiens
  Payload ID: 5367
  Gene Symbol: ENG
  Gene Name: endoglin
  ENSP ID: ENSP00000479015
MLEASQDMGRTLEWRPRTPALVRGCHLEGVAGHKEAHILRVLPGHSAGPRTVTVKVELSCAPGDLDAVLILQGPPYVSWLIDANHNMQIWTTGEYSFKIFPEKNIRGFKLPDTPQGLLGEARMLNASIVASFVELPLASIVSLHASSCGGRLQTSPAPIQTTPPKDTCSPELLMSLIQTKCADDAMTLVLKKELVAHLKCTITGLTFWDPSCEAEDRGDKFVLRSAYSSCGMQVSASMISNEAVVNILSSSSPQRKKVHCLNMDSLSFQLGLYLSPHFLQASNTIEPGQQSFVQVRVSPSVSEFLLQLDSCHLDLGPEGGTVELIQGRAAKGNCVSLLSPSPEGDPRFSFLLHFYTVPIPKTGTLSCTVALRPKTGSQDQEVHRTVFMRLNIISPDLSGCTSKGLVLPAVLGITFGAFLIGALLTAALWYIYSHTRSPSKREPVVAVAAPASSESSSTNHSIGSTQSTPCSTSSMA

SEQ ID NO: 27243 - protein, 261 aa, Homo sapiens
  Payload ID: 5368
  Gene Symbol: EMCN
  Gene Name: endomucin
  Uniprot ID: Q9ULC0
  ENSP ID: ENSP00000296420
MELLQVTILFLLPSICSSNSTGVLEAANNSLVVTTTKPSITTPNTESLQKNVVTPTTGTTPKGTITNELLKMSLMSTATFLTSKDEGLKATTTDVRKNDSIISNVTVTSVTLPNAVSTLQSSKPKTETQSSIKTTEIPGSVLQPDASPSKTGTLTSIPVTIPENTSQSQVIGTEGGKNASTSATSRSYSSIILPVVIALIVITLSVFVLVGLYRMCWKADPGTPENGNDQPQSDKESVKLLTVKTISHESGEHSAQGKTKN

SEQ ID NO: 27244 - protein, 178 aa, Homo sapiens
  Payload ID: 5368
  Gene Symbol: EMCN
  Gene Name: endomucin
  Uniprot ID: Q9ULC0
  ENSP ID: ENSP00000304780
MELLQVTILFLLPSICSSNSTGVLEAANNSLVVTTTKPSITTPNTESLQKNVVTPTTGTTPKGTITNELLKMSLMSTATFLTSKDEGLKATTTDVRKNDSIISNVTVTSVTLPNAVSTLQSSKPKTETQSSIKTTEIPGTPENGNDQPQSDKESVKLLTVKTISHESGEHSAQGKTKN

SEQ ID NO: 27245 - protein, 248 aa, Homo sapiens
  Payload ID: 5368
  Gene Symbol: EMCN
  Gene Name: endomucin
  Uniprot ID: Q9ULC0
  ENSP ID: ENSP00000422432
MELLQVTILFLLPSICSSNSTGVLEAANNSLVVTTTKPSITTPNTESLQKNVVTPTTGTTPKGTITNELLKMSLMSTATFLTSKDEGLKATTTDVRKNDSIISNVTVTSVTLPNAVSTLQSSKPKSSVLQPDASPSKTGTLTSIPVTIPENTSQSQVIGTEGGKNASTSATSRSYSSIILPVVIALIVITLSVFVLVGLYRMCWKADPGTPENGNDQPQSDKESVKLLTVKTISHESGEHSAQGKTKN

SEQ ID NO: 27246 - protein, 76 aa, Homo sapiens
  Payload ID: 5368
  Gene Symbol: EMCN
  Gene Name: endomucin
  ENSP ID: ENSP00000426515
LMSTATFLTSKDEGLKATTTDVRKNDSIISNVTVTSVTLPNAVSTLQSSKPKTETQSSIKTTEIPGEHSAQGKTKN

SEQ ID NO: 27247 - protein, 165 aa, Homo sapiens
  Payload ID: 5368
  Gene Symbol: EMCN
  Gene Name: endomucin
  ENSP ID: ENSP00000427608
MELLQVTILFLLPSICSSNSTGVLEAANNSLVVTTTKPSITTPNTESLQKNVVTPTTGTTPKGTITNELLKMSLMSTATFLTSKDEGLKATTTDVRKNDSIISNVTVTSVTLPNAVSTLQSSKPKTETQSSIKTTEIPGIILPVVIALIVITLSVFVLVGLYRMC

SEQ ID NO: 27248 - protein, 500 aa, Homo sapiens
  Payload ID: 5369
  Gene Symbol: ENDOD1
  Gene Name: endonuclease domain containing 1
  Uniprot ID: O94919
  ENSP ID: ENSP00000278505
MGTARWLALGSLFALAGLLEGRLVGEEEAGFGECDKFFYAGTPPAGLAADSHVKICQRAEGAERFATLYSTRDRIPVYSAFRAPRPAPGGAEQRWLVEPQIDDPNSNLEEAINEAEAITSVNSLGSKQALNTDYLDSDYQRGQLYPFSLSSDVQVATFTLTNSAPMTQSFQERWYVNLHSLMDRALTPQCGSGEDLYILTGTVPSDYRVKDKVAVPEFVWLAACCAVPGGGWAMGFVKHTRDSDIIEDVMVKDLQKLLPFNPQLFQNNCGETEQDTEKMKKILEVVNQIQDEERMVQSQKSSSPLSSTRSKRSTLLPPEASEGSSSFLGKLMGFIATPFIKLFQLIYYLVVAILKNIVYFLWCVTKQVINGIESCLYRLGSATISYFMAIGEELVSIPWKVLKVVAKVIRALLRILCCLLKAICRVLSIPVRVLVDVATFPVYTMGAIPIVCKDIALGLGGTVSLLFDTAFGTLGGLFQVVFSVCKRIGYKVTFDNSGEL

SEQ ID NO: 27249 - protein, 297 aa, Homo sapiens
  Payload ID: 5370
  Gene Symbol: ENDOG
  Gene Name: endonuclease G
  Uniprot ID: Q14249
  ENSP ID: ENSP00000361725
MRALRAGLTLASGAGLGAVVEGWRRRREDARAAPGLLGRLPVLPVAAAAELPPVPGGPRGPGELAKYGLPGLAQLKSRESYVLCYDPRTRGALWVVEQLRPERLRGDGDRRECDFREDDSVHAYHRATNADYRGSGFDRGHLAAAANHRWSQKAMDDTFYLSNVAPQVPHLNQNAWNNLEKYSRSLTRSYQNVYVCTGPLFLPRTEADGKSYVKYQVIGKNHVAVPTHFFKVLILEAAGGQIELRTYVMPNAPVDEAIPLERFLVPIESIERASGLLFVPNILARAGSLKAITAGSK

SEQ ID NO: 27250 - protein, 264 aa, Homo sapiens
  Payload ID: 5371
  Gene Symbol: ENDOV
  Gene Name: endonuclease V
  Uniprot ID: Q8N8Q3
  ENSP ID: ENSP00000317810
MALEAAGGPPEETLSLWKREQARLKAHVVDRDTEAWQRDPAFSGLQRVGGVDVSFVKGDSVRACASLVVLSFPELEVLLVDGNGVLHHRGFGVACHLGVLTDLPCVGVAKKLLQVDGLENNALHKEKIRLLQTRGDSFPLLGDSGTVLGMALRSHDRSTRPLYISVGHRMSLEAAVRLTCCCCRFRIPEPVRQADICSREHIRKSLGLPGPPTPRSPKAQRPVACPKGDSGESSGEGQPPQDHSPGPRTAPRPGSQEQAGKDWQ

SEQ ID NO: 27251 - protein, 105 aa, Homo sapiens
  Payload ID: 5371
  Gene Symbol: ENDOV
  Gene Name: endonuclease V
  ENSP ID: ENSP00000427921
MALEAAGGPPEETLSLWKREQARLKAHVVDRDTEAWQRDPAFSGLQRVGGVDVSFVKGDSVRACASLVVLSFPELEFCLQVAKQNGSSLPSACQPFCCWKQLPAP

SEQ ID NO: 27252 - protein, 236 aa, Homo sapiens
  Payload ID: 5371
  Gene Symbol: ENDOV
  Gene Name: endonuclease V
  ENSP ID: ENSP00000428283
MVSLTAPYVSGFLAFREVPFLLELVQQLREKEPGLMPQVLLVDGNGVLHHRGFGVACHLGVLTDLPCVGVAKKLLQVDGLENNALHKEKIRLLQTRGDSFPLLGDSGTVLGMPTGQPSPSLSQALRSHDRSTRPLYISVGHRMSLEAAVRLTCCCCRFRIPEPVRQADICSREHIRKSLGLPGPPTPRSPKAQRPVACPKGDSGESSGGAPSPQRQADRTTPGGRRSTAQHQVGQR

SEQ ID NO: 27253 - protein, 97 aa, Homo sapiens
  Payload ID: 5371
  Gene Symbol: ENDOV
  Gene Name: endonuclease V
  ENSP ID: ENSP00000429183
MALEAAGGPPEETLSLWKREQARLKAHVVDRDTEAWQRDPAFSGLQRVGGVDVSFVKGDSVRACASLVVLSFPELEGWPCPEGRGAAQLTVTLPVAP

SEQ ID NO: 27254 - protein, 282 aa, Homo sapiens
  Payload ID: 5371
  Gene Symbol: ENDOV
  Gene Name: endonuclease V
  Uniprot ID: Q8N8Q3
  ENSP ID: ENSP00000429190
MALEAAGGPPEETLSLWKREQARLKAHVVDRDTEAWQRDPAFSGLQRVGGVDVSFVKGDSVRACASLVVLSFPELEVVYEESRMVSLTAPYVSGFLAFREVPFLLELVQQLREKEPGLMPQVLLVDGNGVLHHRGFGVACHLGVLTDLPCVGVAKKLLQVDGLENNALHKEKIRLLQTRGDSFPLLGDSGTVLGMALRSHDRSTRPLYISVGHRMSLEAAVRLTCCCCRFRIPEPVRQADICSREHIRKSLGLPGPPTPRSPKAQRPVACPKGDSGESSALC

SEQ ID NO: 27255 - protein, 138 aa, Homo sapiens
  Payload ID: 5371
  Gene Symbol: ENDOV
  Gene Name: endonuclease V
  ENSP ID: ENSP00000429442
MALEAAGGPPEETLSLWKREQARLKAHVVDRDTEAWQRDPAFSGLQRVGGVDVSFVKGDSVRACASLVVLSFPELEALGWPATLASLQTCRVLGWPRNFCRWMGWRTTPCTRRRSDSCRLEETHSLCWETLGLSWEWP

SEQ ID NO: 27256 - protein, 50 aa, Homo sapiens
  Payload ID: 5371
  Gene Symbol: ENDOV
  Gene Name: endonuclease V
  ENSP ID: ENSP00000429603
MVSLTAPYVSGFLAFREVPFLLELVQQLREKEPGLMPQVLLVDGNGVLHH

SEQ ID NO: 27257 - protein, 123 aa, Homo sapiens
  Payload ID: 5371
  Gene Symbol: ENDOV
  Gene Name: endonuclease V
  ENSP ID: ENSP00000430046
MALEAAGGPPEETLSLWKRLWGGLPPWRPYRPAVCWGGQETSAGGWAGEQRPAQGEDPTPADSRRLIPSAGRLWDCPGNGPEEPRPQHQAPLHLRGPQDEPGGRCAPDLLLLQVPDPRARAPG

SEQ ID NO: 27258 - protein, 131 aa, Homo sapiens
  Payload ID: 5371
  Gene Symbol: ENDOV
  Gene Name: endonuclease V
  ENSP ID: ENSP00000430509
  MOD_RES (1)..(1): Any amino acid
XFGVACHLGVLTDLPCVGVAKKLLQVDGLENNALHKEKIRLLQTRGDSFPLLGDSGTVLGMADICSREHIRKSLGLPGPPTPRSPKAQRPVACPKGDSGESSGGAPSPQRQADRTTPGGRRSTAQHQVGQR

SEQ ID NO: 27259 - protein, 170 aa, Homo sapiens
  Payload ID: 5371
  Gene Symbol: ENDOV
  Gene Name: endonuclease V
  ENSP ID: ENSP00000430639
HDRSTRPLYISVGHRMSLEAAVRLTCCCCRFRIPEPVRQVHLLLCSRRSWESTDGVSVGLLSPWLRAGPSWWPHGHRRCGAPGCQVQALLPGQAGPLQGKADICSREHIRKSLGLPGPPTPRSPKAQRPVACPKGDSGESSGGAPSPQRQADRTTPGGRRSTAQHQVGQR

SEQ ID NO: 27260 - protein, 237 aa, Homo sapiens
  Payload ID: 5371
  Gene Symbol: ENDOV
  Gene Name: endonuclease V
  Uniprot ID: Q8N8Q3
  ENSP ID: ENSP00000431036
MALEAAGGPPEETLSLWKREQARLKAHVVDRDTEAWQRDPAFSGLQRVGGVDVSFVKGDSVRACASLVVLSFPELEVLLVDGNGVLHHRGFGVACHLGVLTDLPCVGVAKKLLQVDGLENNALHKEKIRLLQTRGDSFPLLGDSGTVLGMALRSHDRSTRPLYISVGHRMSLEAAVRLTCCCCRFRIPEPVRQADICSREHIRKSLGLPGPPTPRSPKAQRPVACPKGDSGESSALC

SEQ ID NO: 27261 - protein, 115 aa, Homo sapiens
  Payload ID: 5371
  Gene Symbol: ENDOV
  Gene Name: endonuclease V
  ENSP ID: ENSP00000458185
MALRSHDRSTRPLYISVGHRMSLEAAVRLTCCCCRFRIPEPVRQADICSREHIRKSLGLPGPPTPRSPKAQRPVACPKGDSGESSGEGQPPQDHSPGPRTAPRPGSQEQAGKDWQ

SEQ ID NO: 27262 - protein, 65 aa, Homo sapiens
  Payload ID: 5371
  Gene Symbol: ENDOV
  Gene Name: endonuclease V
  Uniprot ID: Q8N8Q3
  ENSP ID: ENSP00000458361
MALRSHDRSTRPLYISVGHRMSLEAAVRLTCCCCRFRIPEPVRQHFVERGGESTRPRLIPDRTRW

SEQ ID NO: 27263 - protein, 65 aa, Homo sapiens; identical to SEQ ID NO: 27262
  Payload ID: 5371
  Gene Symbol: ENDOV
  Gene Name: endonuclease V
  Uniprot ID: Q8N8Q3
  ENSP ID: ENSP00000458391

SEQ ID NO: 27264 - protein, 97 aa, Homo sapiens
  Payload ID: 5371
  Gene Symbol: ENDOV
  Gene Name: endonuclease V
  ENSP ID: ENSP00000459127
MVSLTAPYVSGFLAFREVPFLLELVQQLREKEPGLMPQVLLVDGNGVLHHRGFGVACHLGVLTDLPCVGVAKKLLQVDGLENNALHKEKIRLLQTRG

SEQ ID NO: 27265 - protein, 8 aa, Homo sapiens
  Payload ID: 5371
  Gene Symbol: ENDOV
  Gene Name: endonuclease V
  ENSP ID: ENSP00000459831
MALRSHDR

SEQ ID NO: 27266 - protein, 88 aa, Homo sapiens
  Payload ID: 5371
  Gene Symbol: ENDOV
  Gene Name: endonuclease V
  Uniprot ID: Q8N8Q3
  ENSP ID: ENSP00000460685
MALRSHDRSTRPLYISVGHRMSLEAAVRLTCCCCRFRIPEPVRQADICSREHIRKSLGLPGPPTPRSPKAQRPVACPKGDSGESSALC

SEQ ID NO: 27267 - protein, 105 aa, Homo sapiens
  Payload ID: 5371
  Gene Symbol: ENDOV
  Gene Name: endonuclease V
  ENSP ID: ENSP00000461060
MVSLTAPYVSGFLAFREVPFLLELVQQLREKEPGLMPQVLLVDGNGVLHHRGFGVACHLGVLTDLPCVGVAKKLLQVDGLENNALHKEKLSGACMEKLLNKNLLS

SEQ ID NO: 27268 - protein, 3 aa, Homo sapiens
  Payload ID: 5371
  Gene Symbol: ENDOV
  Gene Name: endonuclease V
  ENSP ID: ENSP00000461194
MAL

SEQ ID NO: 27269 - protein, 109 aa, Homo sapiens
  Payload ID: 5371
  Gene Symbol: ENDOV
  Gene Name: endonuclease V
  ENSP ID: ENSP00000461376
  MOD_RES (1)..(1): Any amino acid
XVGVAKKLLQVDGLENNALHKEKVPQPPGPPPAKTCLELPPTLFLPHLPLHLPPLGPHVGTGSETLTMEGAVDTPSCFTGWQILRAETVSLIPPSSQVPAWRSCLIKIC

SEQ ID NO: 27270 - protein, 155 aa, Homo sapiens
  Payload ID: 5371
  Gene Symbol: ENDOV
  Gene Name: endonuclease V
  ENSP ID: ENSP00000461563
MVSLTAPYVSGFLAFREVPFLLELVQQLREKEPGLMPQVLLVDGNGVLHHRGFGVACHLGVLTDLPCVGVAKKLLQVDGLENNALHKEKIRLLQTRGDSFPLLGDSGTVLGMALRSHDRSTRPLYISVGHRMSLEAAVRLTCCCCRFRIPEPVRQ

SEQ ID NO: 27271 - protein, 88 aa, Homo sapiens; identical to SEQ ID NO: 27266
  Payload ID: 5371
  Gene Symbol: ENDOV
  Gene Name: endonuclease V
  Uniprot ID: Q8N8Q3
  ENSP ID: ENSP00000461577

SEQ ID NO: 27272 - protein, 369 aa, Homo sapiens
  Payload ID: 5372
  Gene Symbol: ENDOU
  Gene Name: endonuclease, polyU-specific
  Uniprot ID: P21128
  ENSP ID: ENSP00000229003
MRACISLVLAVLCGLAWAEDHKESEPLPQLEEETEEALASNLYSAPTSCQGRCYEAFDKHHQCHCNARCQEFGNCCKDFESLCSDHEVSHSSDAITKEEIQSISEKIYRADTNKAQKEDIVLNSQNCISPSETRNQVDRCPKPLFTYVNEKLFSKPTYAAFINLLNNYQRATGHGEHFSAQELAEQDAFLREIMKTAVMKELYSFLHHQNRYGSEQEFVDDLKNMWFGLYSRGNEEGDSSGFEHVFSGEVKKGKVTGFHNWIRFYLEEKEGLVDYYSHIYDGPWDSYPDVLAMQFNWDGYYKEVGSAFIGSSPEFEFALYSLCFIARPGKVCQLSLGGYPLAVRTYTWDKSTYGNGKKYIATAYIVSST

SEQ ID NO: 27273 - protein, 410 aa, Homo sapiens
  Payload ID: 5372
  Gene Symbol: ENDOU
  Gene Name: endonuclease, polyU-specific
  Uniprot ID: P21128
  ENSP ID: ENSP00000397679
MRACISLVLAVLCGLAWAGKIESCASRCNEKFNRDAACQCDRRCLWHGNCCEDYEHLCTEDHKESEPLPQLEEETEEALASNLYSAPTSCQGRCYEAFDKHHQCHCNARCQEFGNCCKDFESLCSDHEVSHSSDAITKEEIQSISEKIYRADTNKAQKEDIVLNSQNCISPSETRNQVDRCPKPLFTYVNEKLFSKPTYAAFINLLNNYQRATGHGEHFSAQELAEQDAFLREIMKTAVMKELYSFLHHQNRYGSEQEFVDDLKNMWFGLYSRGNEEGDSSGFEHVFSGEVKKGKVTGFHNWIRFYLEEKEGLVDYYSHIYDGPWDSYPDVLAMQFNWDGYYKEVGSAFIGSSPEFEFALYSLCFIARPGKVCQLSLGGYPLAVRTYTWDKSTYGNGKKYIATAYIVSST

SEQ ID NO: 27274 - protein, 347 aa, Homo sapiens
  Payload ID: 5372
  Gene Symbol: ENDOU
  Gene Name: endonuclease, polyU-specific
  Uniprot ID: P21128
  ENSP ID: ENSP00000445004
MRACISLVLAVLCGLAWADLYSAPTSCQGRCYEAFDKHHQCHCNARCQEFGNCCKDFESLCSDHEVSHSSDAITKEEIQSISEKIYRADTNKAQKEDIVLNSQNCISPSETRNQVDRCPKPLFTYVNEKLFSKPTYAAFINLLNNYQRATGHGEHFSAQELAEQDAFLREIMKTAVMKELYSFLHHQNRYGSEQEFVDDLKNMWFGLYSRGNEEGDSSGFEHVFSGEVKKGKVTGFHNWIRFYLEEKEGLVDYYSHIYDGPWDSYPDVLAMQFNWDGYYKEVGSAFIGSSPEFEFALYSLCFIARPGKVCQLSLGGYPLAVRTYTWDKSTYGNGKKYIATAYIVSST

SEQ ID NO: 27275 - protein, 569 aa, Homo sapiens
  Payload ID: 5373
  Gene Symbol: EEPD1
  Gene Name: endonuclease/exonuclease/phosphatase family domain containing 1
  Uniprot ID: Q7L9B9
  ENSP ID: ENSP00000242108
MGSTLGCHRSIPRDPSDLSHSRKFSAACNFSNILVNQERLNINTATEEELMTLPGVTRAVARSIVEYREYIGGFKKVEDLALVSGVGATKLEQVKFEICVSSKGSSAQHSPSSLRRDLLAEQQPHHLATAVPLTPRVNINTATPAQLMSVRGLSEKMALSIVDFRREHGPFRSVEDLVRMDGINAAFLDRIRHQVFAERSRPPSTHTNGGLTFTAKPHPSPTSLSLQSEDLDLPPGGPTQIISTRPSVEAFGGTRDGRPVLRLATWNLQGCSVEKANNPGVREVVCMTLLENSIKLLAVQELLDREALEKFCTELNQPTLPNIRKWKGPRGCWKAVVAEKPSSQLQKGAGYAGFLWDAAAGMELRDAGSQESSPSNGHGKLAGPSPYLGRFKVGSHDLTLVNLHLAALTLLGSENPSKNHSDGHRLASFAQTLQETLKGEKDVIILGDFGQGPDSNDYDILRKEKFHHLIPAHTFTNISTKNPQGSKSLDNIWISKSLKKVFTGHWAVVREGLTNPWIPDNWSWGGVASEHCPVLAEFYTEKDWSKKDAPRNGSGVALERSEANIKHER

SEQ ID NO: 27276 - protein, 34 aa, Homo sapiens
  Payload ID: 5373
  Gene Symbol: EEPD1
  Gene Name: endonuclease/exonuclease/phosphatase family domain containing 1
  ENSP ID: ENSP00000416373
  MOD_RES (1)..(1): Any amino acid
XDNIWISKSLKKDAPRNGSGVALERSEANIKHER

SEQ ID NO: 27277 - protein, 569 aa, Homo sapiens; identical to SEQ ID NO: 27275
  Payload ID: 5373
  Gene Symbol: EEPD1
  Gene Name: endonuclease/exonuclease/phosphatase family domain containing 1
  Uniprot ID: Q7L9B9
  ENSP ID: ENSP00000442692

SEQ ID NO: 27278 - protein, 948 aa, Homo sapiens
  Payload ID: 5374
  Gene Symbol: ERAP1
  Gene Name: endoplasmic reticulum aminopeptidase 1
  Uniprot ID: Q9NZ08
  ENSP ID: ENSP00000296754
MVFLPLKWSLATMSFLLSSLLALLTVSTPSWCQSTEASPKRSDGTPFPWNKIRLPEYVIPVHYDLLIHANLTTLTFWGTTKVEITASQPTSTIILHSHHLQISRATLRKGAGERLSEEPLQVLEHPRQEQIALLAPEPLLVGLPYTVVIHYAGNLSETFHGFYKSTYRTKEGELRILASTQFEPTAARMAFPCFDEPAFKASFSIKIRREPRHLAISNMPLVKSVTVAEGLIEDHFDVTVKMSTYLVAFIISDFESVSKITKSGVKVSVYAVPDKINQADYALDAAVTLLEFYEDYFSIPYPLPKQDLAAIPDFQSGAMENWGLTTYRESALLFDAEKSSASSKLGITMTVAHELAHQWFGNLVTMEWWNDLWLNEGFAKFMEFVSVSVTHPELKVGDYFFGKCFDAMEVDALNSSHPVSTPVENPAQIREMFDDVSYDKGACILNMLREYLSADAFKSGIVQYLQKHSYKNTKNEDLWDSMASICPTDGVKGMDGFCSRSQHSSSSSHWHQEGVDVKTMMNTWTLQKGFPLITITVRGRNVHMKQEHYMKGSDGAPDTGYLWHVPLTFITSKSDMVHRFLLKTKTDVLILPEEVEWIKFNVGMNGYYIVHYEDDGWDSLTGLLKGTHTAVSSNDRASLINNAFQLVSIGKLSIEKALDLSLYLKHETEIMPVFQGLNELIPMYKLMEKRDMNEVETQFKAFLIRLLRDLIDKQTWTDEGSVSERMLRSQLLLLACVHNYQPCVQRAEGYFRKWKESNGNLSLPVDVTLAVFAVGAQSTEGWDFLYSKYQFSLSSTEKSQIEFALCRTQNKEKLQWLLDESFKGDKIKTQEFPQILTLIGRNPVGYPLAWQFLRKNWNKLVQKFELGSSSIAHMVMGTTNQFSTRTRLEEVKGFFSSLKENGSQLRCVQQTIETIEENIGWMDKNFDKIRVWLQSEKLEHDPEADATG

SEQ ID NO: 27279 - protein, 941 aa, Homo sapiens
  Payload ID: 5374
  Gene Symbol: ERAP1
  Gene Name: endoplasmic reticulum aminopeptidase 1
  Uniprot ID: Q9NZ08
  ENSP ID: ENSP00000406304
MVFLPLKWSLATMSFLLSSLLALLTVSTPSWCQSTEASPKRSDGTPFPWNKIRLPEYVIPVHYDLLIHANLTTLTFWGTTKVEITASQPTSTIILHSHHLQISRATLRKGAGERLSEEPLQVLEHPRQEQIALLAPEPLLVGLPYTVVIHYAGNLSETFHGFYKSTYRTKEGELRILASTQFEPTAARMAFPCFDEPAFKASFSIKIRREPRHLAISNMPLVKSVTVAEGLIEDHFDVTVKMSTYLVAFIISDFESVSKITKSGVKVSVYAVPDKINQADYALDAAVTLLEFYEDYFSIPYPLPKQDLAAIPDFQSGAMENWGLTTYRESALLFDAEKSSASSKLGITMTVAHELAHQWFGNLVTMEWWNDLWLNEGFAKFMEFVSVSVTHPELKVGDYFFGKCFDAMEVDALNSSHPVSTPVENPAQIREMFDDVSYDKGACILNMLREYLSADAFKSGIVQYLQKHSYKNTKNEDLWDSMASICPTDGVKGMDGFCSRSQHSSSSSHWHQEGVDVKTMMNTWTLQKGFPLITITVRGRNVHMKQEHYMKGSDGAPDTGYLWHVPLTFITSKSDMVHRFLLKTKTDVLILPEEVEWIKFNVGMNGYYIVHYEDDGWDSLTGLLKGTHTAVSSNDRASLINNAFQLVSIGKLSIEKALDLSLYLKHETEIMPVFQGLNELIPMYKLMEKRDMNEVETQFKAFLIRLLRDLIDKQTWTDEGSVSERMLRSQLLLLACVHNYQPCVQRAEGYFRKWKESNGNLSLPVDVTLAVFAVGAQSTEGWDFLYSKYQFSLSSTEKSQIEFALCRTQNKEKLQWLLDESFKGDKIKTQEFPQILTLIGRNPVGYPLAWQFLRKNWNKLVQKFELGSSSIAHMVMGTTNQFSTRTRLEEVKGFFSSLKENGSQLRCVQQTIETIEENIGWMDKNFDKIRVWLQSEKLERM

SEQ ID NO: 27280 - protein, 129 aa, Homo sapiens
  Payload ID: 5374
  Gene Symbol: ERAP1
  Gene Name: endoplasmic reticulum aminopeptidase 1
  ENSP ID: ENSP00000421697
MVFLPLKWSLATMSFLLSSLLALLTVSTPSWCQSTEASPKRSDGTPFPWNKIRLPEYVIPVHYDLLIHANLTTLTFWGTTKVEITASQPTSTIILHSHHLQISRATLRKGAGERLSEEPLQVLEHPRQE

SEQ ID NO: 27281 - protein, 9 aa, Homo sapiens
  Payload ID: 5374
  Gene Symbol: ERAP1
  Gene Name: endoplasmic reticulum aminopeptidase 1
  ENSP ID: ENSP00000422631
MAFPCFDEP

SEQ ID NO: 27282 - protein, 144 aa, Homo sapiens
  Payload ID: 5374
  Gene Symbol: ERAP1
  Gene Name: endoplasmic reticulum aminopeptidase 1
  ENSP ID: ENSP00000425381
  MOD_RES (1)..(1): Any amino acid
XKGDKIKTQEFPQILTLIGRNPVGYPLAWQFLRKNWNKLVQKFELGSSSIAHMVMGTTNQFSTRTRLEEVKGFFSSLKENGSQLRCVQQTIETIEENIGWMDKNFDKIRVWLQSEKLERVALQRKPKCWVPCHRRIKYLILLIL

SEQ ID NO: 27283 - protein, 1 aa, Homo sapiens
  Payload ID: 5374
  Gene Symbol: ERAP1
  Gene Name: endoplasmic reticulum aminopeptidase 1
  ENSP ID: ENSP00000427025
M

SEQ ID NO: 27284 - protein, 915 aa, Homo sapiens
  Payload ID: 5375
  Gene Symbol: ERAP2
  Gene Name: endoplasmic reticulum aminopeptidase 2
  Uniprot ID: Q6P179
  ENSP ID: ENSP00000369235
MFHSSAMVNSHRKPMFNIHRGFYCLTAILPQICICSQFSVPSSYHFTEDPGAFPVATNGERFPWQELRLPSVVIPLHYDLFVHPNLTSLDFVASEKIEVLVSNATQFIILHSKDLEITNATLQSEEDSRYMKPGKELKVLSYPAHEQIALLVPEKLTPHLKYYVAMDFQAKLGDGFEGFYKSTYRTLGGETRILAVTDFEPTQARMAFPCFDEPLFKANFSIKIRRESRHIALSNMPKVSIYASPDKRNQTHYALQASLKLLDFYEKYFDIYYPLSKLDLIAIPDFAPGAMENWGLITYRETSLLFDPKTSSASDKLWVTRVIAHELAHQWFGNLVTMEWWNDIWLKEGFAKYMELIAVNATYPELQFDDYFLNVCFEVITKDSLNSSRPISKPAETPTQIQEMFDEVSYNKGACILNMLKDFLGEEKFQKGIIQYLKKFSYRNAKNDDLWSSLSNSCLESDFTSGGVCHSDPKMTSNMLAFLGENAEVKEMMTTWTLQKGIPLLVVKQDGCSLRLQQERFLQGVFQEDPEWRALQERYLWHIPLTYSTSSSNVIHRHILKSKTDTLDLPEKTSWVKFNVDSNGYYIVHYEGHGWDQLITQLNQNHTLLRPKDRVGLIHDVFQLVGAGRLTLDKALDMTYYLQHETSSPALLEGLSYLESFYHMMDRRNISDISENLKRYLLQYFKPVIDRQSWSDKGSVWDRMLRSALLKLACDLNHAPCIQKAAELFSQWMESSGKLNIPTDVLKIVYSVGAQTTAGWNYLLEQYELSMSSAEQNKILYALSTSKHQEKLLKLIELGMEGKVIKTQNLAALLHAIARRPKGQQLAWDFVRENWTHLLKKFDLGSYDIRMIISGTTAHFSSKDKLQEVKLFFESLEAQGSHLDIFQTVLETITKNIKWLEKNLPTLRTWLMVNT

SEQ ID NO: 27285 - protein, 960 aa, Homo sapiens
  Payload ID: 5375
  Gene Symbol: ERAP2
  Gene Name: endoplasmic reticulum aminopeptidase 2
  Uniprot ID: Q6P179
  ENSP ID: ENSP00000400376
MFHSSAMVNSHRKPMFNIHRGFYCLTAILPQICICSQFSVPSSYHFTEDPGAFPVATNGERFPWQELRLPSVVIPLHYDLFVHPNLTSLDFVASEKIEVLVSNATQFIILHSKDLEITNATLQSEEDSRYMKPGKELKVLSYPAHEQIALLVPEKLTPHLKYYVAMDFQAKLGDGFEGFYKSTYRTLGGETRILAVTDFEPTQARMAFPCFDEPLFKANFSIKIRRESRHIALSNMPKVKTIELEGGLLEDHFETTVKMSTYLVAYIVCDFHSLSGFTSSGVKVSIYASPDKRNQTHYALQASLKLLDFYEKYFDIYYPLSKLDLIAIPDFAPGAMENWGLITYRETSLLFDPKTSSASDKLWVTRVIAHELAHQWFGNLVTMEWWNDIWLKEGFAKYMELIAVNATYPELQFDDYFLNVCFEVITKDSLNSSRPISKPAETPTQIQEMFDEVSYNKGACILNMLKDFLGEEKFQKGIIQYLKKFSYRNAKNDDLWSSLSNSCLESDFTSGGVCHSDPKMTSNMLAFLGENAEVKEMMTTWTLQKGIPLLVVKQDGCSLRLQQERFLQGVFQEDPEWRALQERYLWHIPLTYSTSSSNVIHRHILKSKTDTLDLPEKTSWVKFNVDSNGYYIVHYEGHGWDQLITQLNQNHTLLRPKDRVGLIHDVFQLVGAGRLTLDKALDMTYYLQHETSSPALLEGLSYLESFYHMMDRRNISDISENLKRYLLQYFKPVIDRQSWSDKGSVWDRMLRSALLKLACDLNHAPCIQKAAELFSQWMESSGKLNIPTDVLKIVYSVGAQTTAGWNYLLEQYELSMSSAEQNKILYALSTSKHQEKLLKLIELGMEGKVIKTQNLAALLHAIARRPKGQQLAWDFVRENWTHLLKKFDLGSYDIRMIISGTTAHFSSKDKLQEVKLFFESLEAQGSHLDIFQTVLETITKNIKWLEKNLPTLRTWLMVNT

SEQ ID NO: 27286 - protein, 694 aa, Homo sapiens
  Payload ID: 5375
  Gene Symbol: ERAP2
  Gene Name: endoplasmic reticulum aminopeptidase 2
  ENSP ID: ENSP00000421175
MFHSSAMVNSHRKPMFNIHRGFYCLTAILPQICICSQFSVPSSYHFTEDPGAFPVATNGERFPWQELRLPSVVIPLHYDLFVHPNLTSLDFVASEKIEVLVSNATQFIILHSKDLEITNATLQSEEDSRYMKPGKELKVLSYPAHEQIALLVPEKLTPHLKYYVAMDFQAKLGDGFEGFYKSTYRTLGGETRILAVTDFEPTQARMAFPCFDEPLFKANFSIKIRRESRHIALSNMPKVKTIELEGGLLEDHFETTVKMSTYLVAYIVCDFHSLSGFTSSGVKVSIYASPDKRNQTHYALQASLKLLDFYEKYFDIYYPLSKLDLIAIPDFAPGAMENWGLITYRETSLLFDPKTSSASDKLWVTRVIAHELAHQWFGNLVTMEWWNDIWLKEGFAKYMELIAVNATYPELQFDDYFLNVCFEVITKDSLNSSRPISKPAETPTQIQEMFDEVSYNKGACILNMLKDFLGEEKFQKGIIQYLKKFSYRNAKNDDLWSSLSNSCLESDFTSGGVCHSDPKMTSNMLAFLGENAEVKEMMTTWTLQKGIPLLVVKQDGCSLRLQQERFLQGVFQEDPEWRALQERYLWHIPLTYSTSSSNVIHRHILKSKTDTLDLPEKTSWVKFNVDSNGYYIVHYEGHGWDQLITQLNQNHTLLRPKDRVGLIHDVFQLVGAGRLTLDKALDMTYYLQHETSSP

SEQ ID NO: 27287 - protein, 532 aa, Homo sapiens
  Payload ID: 5375
  Gene Symbol: ERAP2
  Gene Name: endoplasmic reticulum aminopeptidase 2
  Uniprot ID: Q6P179
  ENSP ID: ENSP00000421849
MFHSSAMVNSHRKPMFNIHRGFYCLTAILPQICICSQFSVPSSYHFTEDPGAFPVATNGERFPWQELRLPSVVIPLHYDLFVHPNLTSLDFVASEKIEVLVSNATQFIILHSKDLEITNATLQSEEDSRYMKPGKELKVLSYPAHEQIALLVPEKLTPHLKYYVAMDFQAKLGDGFEGFYKSTYRTLGGETRILAVTDFEPTQARMAFPCFDEPLFKANFSIKIRRESRHIALSNMPKVKTIELEGGLLEDHFETTVKMSTYLVAYIVCDFHSLSGFTSSGVKVSIYASPDKRNQTHYALQASLKLLDFYEKYFDIYYPLSKLDLIAIPDFAPGAMENWGLITYRETSLLFDPKTSSASDKLWVTRVIAHELAHQWFGNLVTMEWWNDIWLKEGFAKYMELIAVNATYPELQFDDYFLNVCFEVITKDSLNSSRPISKPAETPTQIQEMFDEVSYNKGACILNMLKDFLGEEKFQKGIIQYLKKFSYRNAKNDDLWSSLSNSCLESDFTSGGVCHSDPKMTSNMVRIKRVTE

SEQ ID NO: 27288 - protein, 79 aa, Homo sapiens
  Payload ID: 5375
  Gene Symbol: ERAP2
  Gene Name: endoplasmic reticulum aminopeptidase 2
  ENSP ID: ENSP00000425415
  MOD_RES (1)..(1): Any amino acid
XGKVIKTQNLAALLHAIARRPKGQQLAWDFVRENWTHLLKKFDLGSYDIRMIISGTTAHFSSKDKLQEVCDFLFLTISK

SEQ ID NO: 27289 - protein, 350 aa, Homo sapiens
  Payload ID: 5375
  Gene Symbol: ERAP2
  Gene Name: endoplasmic reticulum aminopeptidase 2
  Uniprot ID: Q6P179
  ENSP ID: ENSP00000425758
MFHSSAMVNSHRKPMFNIHRGFYCLTAILPQICICSQFSVPSSYHFTEDPGAFPVATNGERFPWQELRLPSVVIPLHYDLFVHPNLTSLDFVASEKIEVLVSNATQFIILHSKDLEITNATLQSEEDSRYMKPGKELKVLSYPAHEQIALLVPEKLTPHLKYYVAMDFQAKLGDGFEGFYKSTYRTLGGETRILAVTDFEPTQARMAFPCFDEPLFKANFSIKIRRESRHIALSNMPKVKTIELEGGLLEDHFETTVKMSTYLVAYIVCDFHSLSGFTSSGVKVSIYASPDKRNQTHYALQASLKLLDFYEKYFDIYYPLSKLGMFKFHIIVFIFAHKTCFDLFPLSLSM

SEQ ID NO: 27290 - protein, 29 aa, Homo sapiens
  Payload ID: 5375
  Gene Symbol: ERAP2
  Gene Name: endoplasmic reticulum aminopeptidase 2
  ENSP ID: ENSP00000426655
MLHRVDGLVSQGQDPSGRILAVTDFEPTQ

SEQ ID NO: 27291 - protein, 163 aa, Homo sapiens
  Payload ID: 5375
  Gene Symbol: ERAP2
  Gene Name: endoplasmic reticulum aminopeptidase 2
  ENSP ID: ENSP00000427573
  MOD_RES (1)..(1): Any amino acid
XQTHYALQASLKLLDFYEKYFDIYYPLSKLDLIAIPDFAPGAMENWGLITYRETSLLFDPKTSSASDKLWVTRVIAHELAHQWFGNLVTMEWWNDIWLKEGFAKYMELIAVNATYPELQFGACILNMLKDFLGEEKFQKGIIQYLKKFSYRNAKNDDLWSSLS

SEQ ID NO: 27292 - protein, 483 aa, Homo sapiens
  Payload ID: 5376
  Gene Symbol: ERLEC1
  Gene Name: endoplasmic reticulum lectin 1
  Uniprot ID: Q96DZ1
  ENSP ID: ENSP00000185150
MEEGGGGVRSLVPGGPVLLVLCGLLEASGGGRALPQLSDDIPFRVNWPGTEFSLPTTGVLYKEDNYVIMTTAHKEKYKCILPLVTSGDEEEEKDYKGPNPRELLEPLFKQSSCSYRIESYWTYEVCHGKHIRQYHEEKETGQKINIHEYYLGNMLAKNLLFEKEREAEEKEKSNEIPTKNIEGQMTPYYPVGMGNGTPCSLKQNRPRSSTVMYICHPESKHEILSVAEVTTCEYEVVILTPLLCSHPKYRFRASPVNDIFCQSLPGSPFKPLTLRQLEQQEEILRVPFRRNKEEDLQSTKEERFPAIHKSIAIGSQPVLTVGTTHISKLTDDQLIKEFLSGSYCFRGGVGWWKYEFCYGKHVHQYHEDKDSGKTSVVVGTWNQEEHIEWAKKNTARAYHLQDDGTQTVRMVSHFYGNGDICDITDKPRQVTVKLKCKESDSPHAVTVYMLEPHSCQYILGVESPVICKILDTADENGLLSLPN

SEQ ID NO: 27293 - protein, 429 aa, Homo sapiens
  Payload ID: 5376
  Gene Symbol: ERLEC1
  Gene Name: endoplasmic reticulum lectin 1
  Uniprot ID: Q96DZ1
  ENSP ID: ENSP00000367485
MEEGGGGVRSLVPGGPVLLVLCGLLEASGGGRALPQLSDDIPFRVNWPGTEFSLPTTGVLYKEDNYVIMTTAHKEKYKCILPLVTSGDEEEEKDYKGPNPRELLEPLFKQSSCSYRIESYWTYEVCHGKHIRQYHEEKETGQKINIHEYYLGNMLAKNLLFEKEREAEEKEKSNEIPTKNIEGQMTPYYPVGMGNGTPCSLKQNRPRSSTVMYICHPESKHEILSVAEVTTCEYEVVILTPLLCSHPKYRFRASPVNDIFCQSLPGSPFKPLTLRQLEQQEEILRVPFRRNKEGVGWWKYEFCYGKHVHQYHEDKDSGKTSVVVGTWNQEEHIEWAKKNTARAYHLQDDGTQTVRMVSHFYGNGDICDITDKPRQVTVKLKCKESDSPHAVTVYMLEPHSCQYILGVESPVICKILDTADENGLLSLPN

SEQ ID NO: 27294 - protein, 457 aa, Homo sapiens
  Payload ID: 5376
  Gene Symbol: ERLEC1
  Gene Name: endoplasmic reticulum lectin 1
  Uniprot ID: Q96DZ1
  ENSP ID: ENSP00000385629
MEEGGGGVRSLVPGGPVLLVLCGLLEASGGGRALPQLSDDIPFRVNWPGTEFSLPTTGVLYKEDNYVIMTTAHKEKYKCILPLVTSGDEEEEKDYKGPNPRELLEPLFKQSSCSYRIESYWTYEVCHGKHIRQYHEEKETGQKINIHEYYLGNMLAKNLLFEKEREAEEKEKSNEIPTKNIEGQMTPYYPVGMGNGTPCSLKQNRPRSSTVMYICHPESKHEILSVAEVTTCEYEVVILTPLLCSHPKYRFRASPVNDIFCQSLPGSPFKPLTLRQLEQQEEILRVPFRRNKEEDLQSTKEERFPAIHKSIAIGSQPVLTVGTTHISKLTDDQLIKEFLSGSYCFRGGVGWWKYEFCYGKHVHQYHEDKDSGKTSVVVGTWNQEEHIEWAKKNTARAYHLQDDGTQTVRCKESDSPHAVTVYMLEPHSCQYILGVESPVICKILDTADENGLLSLPN

SEQ ID NO: 27295 - protein, 904 aa, Homo sapiens
  Payload ID: 5377
  Gene Symbol: ERMP1
  Gene Name: endoplasmic reticulum metallopeptidase 1
  Uniprot ID: Q7Z2K6
  ENSP ID: ENSP00000340427
MEWGSESAAVRRHRVGVERREGAAAAPPPEREARAQEPLVDGCSGGGRTRKRSPGGSGGASRGAGTGLSEVRAALGLALYLIALRTLVQLSLQQLVLRGAAGHRGEFDALQARDYLEHITSIGPRTTGSPENEILTVHYLLEQIKLIEVQSNSLHKISVDVQRPTGSFSIDFLGGFTSYYDNITNVVVKLEPRDGAQHAVLANCHFDSVANSPGASDDAVSCSVMLEVLRVLSTSSEALHHAVIFLFNGAEENVLQASHGFITQHPWASLIRAFINLEAAGVGGKELVFQTGPENPWLVQAYVSAAKHPFASVVAQEVFQSGIIPSDTDFRIYRDFGNIPGIDLAFIENGYIYHTKYDTADRILTDSIQRAGDNILAVLKHLATSDMLAAASKYRHGNMVFFDVLGLFVIAYPSRIGSIINYMVVMGVVLYLGKKFLQPKHKTGNYKKDFLCGLGITLISWFTSLVTVLIIAVFISLIGQSLSWYNHFYVSVCLYGTATVAKIILIHTLAKRFYYMNASAQYLGEVFFDISLFVHCCFLVTLTYQGLCSAFISAVWVAFPLLTKLCVHKDFKQHGAQGKFIAFYLLGMFIPYLYALYLIWAVFEMFTPILGRSGSEIPPDVVLASILAGCTMILSSYFINFIYLAKSTKKTMLTLTLVCAITFLLVCSGTFFPYSSNPANPKPKRVFLQHMTRTFHDLEGNAVKRDSGIWINGFDYTGISHITPHIPEINDSIRAHCEENAPLCGFPWYLPVHFLIRKNWYLPAPEVSPRNPPHFRLISKEQTPWDSIKLTFEATGPSHMSFYVRAHKGSTLSQWSLGNGTPVTSKGGDYFVFYSHGLQASAWQFWIEVQVSEEHPEGMVTVAIAAHYLSGEDKRSPQLDALKEKFPDWTFPSAWVCTYDLFVF

SEQ ID NO: 27296 - protein, 904 aa, Homo sapiens; identical to SEQ ID NO: 27295
  Payload ID: 5377
  Gene Symbol: ERMP1
  Gene Name: endoplasmic reticulum metallopeptidase 1
  Uniprot ID: Q7Z2K6
  ENSP ID: ENSP00000417160

SEQ ID NO: 27297 - protein, 841 aa, Homo sapiens
  Payload ID: 5377
  Gene Symbol: ERMP1
  Gene Name: endoplasmic reticulum metallopeptidase 1
  ENSP ID: ENSP00000417474
MEWGSESAAVRRHRVGVERREGAAAAPPPEREARAQEPLVDGCSGGGRTRKRSPGGSGGASRGAGTGLSEVRAALGLALYLIALRTLVQLSLQQLVLRGAAGHRGEFDALQARDYLEHITSIGPRTTGSPENEILTVHYLLEQIKLIEVQSNSLHKISVDVQRPTGSFSIDFLGGFTSYYDNITNVVVKLEPRDGAQHAVLANCHFDSVANSPGASDDAVSCSVMLEVLRVLSTSSEALHHAVIFLFNGAEENVLQASHGFITQHPWASLIRAFINLEAAGVGGKELVFQTGPENPWLVQAYVSAAKHPFASVVAQEVFQSGIIPSDTDFRIYRDFGNIPGIDLAFIENGYIYHTKYDTADRILTDSIQRAGDNILAVLKHLATSDMLAAASKYRHGNMVFFDVLGLFVIAYPSRIGSIINYMVVMGVVLYLGKKFLQPKHKTGNYKKDFLCGLGITLISWFTSLVTVLIIAVFISLIGQSLSWYNHFYVSVCLYGTATVAKIILIHTLAKRFYYMNASAQYLGEVFFDISLFVHCCFLVTLTYQGLCSAFISAVWVAFPLLTKLCVHKDFKQHGAQGKFIAFYLLGMFIPYLYALYLIWAVFEMFTPILGRSGSEIPPDVVLASILAGCTMILSSYFINFIYLAKSTKKTMLTLTLVCAITFLLVCSGTFFPYSSNPANPKPKRVFLQHMTRTFHDLEGNAVKRDSGIWINGFDYTGISHITPHIPEINDSIRAHCEENAPLCGFPWYLPVHFLIRKNWYLPAPEVSPRNPPHFRLISKEQTPWDSIKLTFEATACLPILQILDLPASTIMTKPYVLLCSSPQRVNTFSVVSWQWHPSHK

SEQ ID NO: 27298 - protein, 351 aa, Homo sapiens
  Payload ID: 5377
  Gene Symbol: ERMP1
  Gene Name: endoplasmic reticulum metallopeptidase 1
  ENSP ID: ENSP00000432986
MLEVLRVLSTSSEALHHAVIFLFNGAEENVLQASHGFITQHPWASLIRAFINLEAAGVGGKELVFQTGPENPWLVQAYVSAAKHPFASVVAQEVFQSGIIPSDTDFRIYRDFGNIPGIDLAFIENGYIYHTKYDTADRILTDSIQRAGDNILAVLKHLATSDMLAAASKYRHGNMVFFDVLGLFVIAYPSRIGSIINYMVVMGVVLYLGKKFLQPKHKTGNYKKDFLCGLGITLISWFTSLVTVLIIAVFISLIGQSLSWYNHFYVSVCLYGTATVAKIILIHTLAKRFYYMNASAQYLGEVFFDISLFVHCCFLVTLTYQGLCSAFISAVWVAFPLLTKLCVHKDFKQHD

SEQ ID NO: 27299 - protein, 468 aa, Homo sapiens
  Payload ID: 5378
  Gene Symbol: ERO1A
  Gene Name: endoplasmic reticulum oxidoreductase alpha
  Uniprot ID: Q96HE7
  ENSP ID: ENSP00000379042
MGRGWGFLFGLLGAVWLLSSGHGEEQPPETAAQRCFCQVSGYLDDCTCDVETIDRFNNYRLFPRLQKLLESDYFRYYKVNLKRPCPFWNDISQCGRRDCAVKPCQSDEVPDGIKSASYKYSEEANNLIEECEQAERLGAVDESLSEETQKAVLQWTKHDDSSDNFCEADDIQSPEAEYVDLLLNPERYTGYKGPDAWKIWNVIYEENCFKPQTIKRPLNPLASGQGTSEENTFYSWLEGLCVEKRAFYRLISGLHASINVHLSARYLLQETWLEKKWGHNITEFQQRFDGILTEGEGPRRLKNLYFLYLIELRALSKVLPFFERPDFQLFTGNKIQDEENKMLLLEILHEIKSFPLHFDENSFFAGDKKEAHKLKEDFRLHFRNISRIMDCVGCFKCRLWGKLQTQGLGTALKILFSEKLIANMPESGPSYEFHLTRQEIVSLFNAFGRISTSVKELENFRNLLQNIH

SEQ ID NO: 27300 - protein, 75 aa, Homo sapiens
  Payload ID: 5378
  Gene Symbol: ERO1A
  Gene Name: endoplasmic reticulum oxidoreductase alpha
  ENSP ID: ENSP00000450655
MLLLEILHEIKSFPLHFDENSFFAGDKKEAHKLKEDFRLHFRNISRIMDCVGCFKCRLWGKLQTQGLGTALKILF

SEQ ID NO: 27301 - protein, 257 aa, Homo sapiens
  Payload ID: 5378
  Gene Symbol: ERO1A
  Gene Name: endoplasmic reticulum oxidoreductase alpha
  ENSP ID: ENSP00000451204
MGRGWGFLFGLLGAVWLLSSGHGEEQPPETAAQRCFCQVSGYLDDCTCDVETIDRFNNYRLFPRLQKLLESDYFRYYKVNLKRPCPFWNDISQCGRRDCAVKPCQSDEVPDGIKSASYKYSEEANNLIEECEQAERLGAVDESLSEETQKAVLQWTKHDDSSDNFCEADDIQSPEAEYVDLLLNPERYTGYKGPDAWKIWNVIYEENCFKPQTIKRPLNPLASGQGKLLICVSLLFLRSLCRKKSILQTYIWPTCKH

SEQ ID NO: 27302 - protein, 257 aa, Homo sapiens; identical to SEQ ID NO: 27301
  Payload ID: 5378
  Gene Symbol: ERO1A
  Gene Name: endoplasmic reticulum oxidoreductase alpha
  ENSP ID: ENSP00000452020

SEQ ID NO: 27303 - protein, 125 aa, Homo sapiens
  Payload ID: 5378
  Gene Symbol: ERO1A
  Gene Name: endoplasmic reticulum oxidoreductase alpha
  ENSP ID: ENSP00000452093
MGRGWGFLFGLLGAVWLLSSGHGEEQPPETAAQRCFCQVSGYLDDCTCDVETIDRFNNYRLFPRLQKLLESDYFRYYKVNLKRPCPFWNDISQCGRRDCAVKPCQSDEVPDGIKSASYKVCTYTY

SEQ ID NO: 27304 - protein, 169 aa, Homo sapiens
  Payload ID: 5378
  Gene Symbol: ERO1A
  Gene Name: endoplasmic reticulum oxidoreductase alpha
  ENSP ID: ENSP00000452269
MGRGWGFLFGLLGAVWLLSSGHGEEQPPETAAQRCFCQVNLKRPCPFWNDISQCGRRDCAVKPCQSDEVPDGIKSASYKYSEEANNLIEECEQAERLGAVDESLSEETQKAVLQWTKHDDSSDNFCEADDIQSPEAEYVDLLLNPERYTGYKGPDAWKIWNVIYEENCF

SEQ ID NO: 27305 - protein, 257 aa, Homo sapiens; identical to SEQ ID NO: 27301
  Payload ID: 5378
  Gene Symbol: ERO1A
  Gene Name: endoplasmic reticulum oxidoreductase alpha
  ENSP ID: ENSP00000487101

SEQ ID NO: 27306 - protein, 173 aa, Homo sapiens
  Payload ID: 5379
  Gene Symbol: ERO1B
  Gene Name: endoplasmic reticulum oxidoreductase beta
  ENSP ID: ENSP00000264181
WGPNIKEFKHRFDPVETKGEGPRRLKNLYFLYLIELRALSKVAPYFERSIVDLYTGNAEEDADTKTLLLNIFQDTKSFPMHFDEKSMFAGDKKGAKSLKEEFRLHFKNISRIMDCVGCDKCRLWGKLQTQGLGTALKILFSEKEIQKLPENSPSKGFQLTRQEIVALLNAFGR

SEQ ID NO: 27307 - protein, 467 aa, Homo sapiens
  Payload ID: 5379
  Gene Symbol: ERO1B
  Gene Name: endoplasmic reticulum oxidoreductase beta
  Uniprot ID: Q86YB8
  ENSP ID: ENSP00000346635
MSQGVRRAGAGQGVAAAVQLLVTLSFLRSVVEAQVTGVLDDCLCDIDSIDNFNTYKIFPKIKKLQERDYFRYYKVNLKRPCPFWAEDGHCSIKDCHVEPCPESKIPVGIKAGHSNKYLKMANNTKELEDCEQANKLGAINSTLSNQSKEAFIDWARYDDSRDHFCELDDERSPAAQYVDLLLNPERYTGYKGTSAWRVWNSIYEENCFKPRSVYRPLNPLAPSRGEDDGESFYTWLEGLCLEKRVFYKLISGLHASINLHLCANYLLEETWGKPSWGPNIKEFKHRFDPVETKGEGPRRLKNLYFLYLIELRALSKVAPYFERSIVDLYTGNAEEDADTKTLLLNIFQDTKSFPMHFDEKSMFAGDKKGAKSLKEEFRLHFKNISRIMDCVGCDKCRLWGKLQTQGLGTALKILFSEKEIQKLPENSPSKGFQLTRQEIVALLNAFGRLSTSIRDLQNFKVLLQHSR

SEQ ID NO: 27308 - protein, 71 aa, Homo sapiens
  Payload ID: 5379
  Gene Symbol: ERO1B
  Gene Name: endoplasmic reticulum oxidoreductase beta
  ENSP ID: ENSP00000355548
MANNTKELEDCEQANKLGAINSTLSNQSKEAFIDWARYDDSRDHFCELDDERSPAAQYVDLLLNPERYTGY

SEQ ID NO: 27309 - protein, 273 aa, Homo sapiens
  Payload ID: 5380
  Gene Symbol: ERP27
  Gene Name: endoplasmic reticulum protein 27
  Uniprot ID: Q96DN0
  ENSP ID: ENSP00000266397
MEAAPSRFMFLLFLLTCELAAEVAAEVEKSSDGPGAAQEPTWLTDVPAAMEFIAATEVAVIGFFQDLEIPAVPILHSMVQKFPGVSFGISTDSEVLTHYNITGNTICLFRLVDNEQLNLEDEDIESIDATKLSRFIEINSLHMVTEYNPVTVIGLFNSVIQIHLLLIMNKASPEYEENMHRYQKAAKLFQGKILFILVDSGMKENGKVISFFKLKESQLPALAIYQTLDDEWDTLPTAEVSVEHVQNFCDGFLSGKLLKENRESEGKTPKVEL

SEQ ID NO: 27310 - protein, 172 aa, Homo sapiens
  Payload ID: 5380
  Gene Symbol: ERP27
  Gene Name: endoplasmic reticulum protein 27
  ENSP ID: ENSP00000440573
MKETCQLEIQVDNEQLNLEDEDIESIDATKLSRFIEINSLHMVTEYNPVTVIGLFNSVIQIHLLLIMNKASPEYEENMHRYQKAAKLFQGKILFILVDSGMKENGKVISFFKLKESQLPALAIYQTLDDEWDTLPTAEVSVEHVQNFCDGFLSGKLLKENRESEGKTPKVEL

SEQ ID NO: 27311 - protein, 261 aa, Homo sapiens
  Payload ID: 5381
  Gene Symbol: ERP29
  Gene Name: endoplasmic reticulum protein 29
  Uniprot ID: P30040
  ENSP ID: ENSP00000261735
MAAAVPRAAFLSPLLPLLLGFLLLSAPHGGSGLHTKGALPLDTVTFYKVIPKSKFVLVKFDTQYPYGEKQDEFKRLAENSASSDDLLVAEVGISDYGDKLNMELSEKYKLDKESYPVFYLFRDGDFENPVPYTGAVKVGAIQRWLKGQGVYLGMPGCLPVYDALAGEFIRASGVEARQALLKQGQDNLSSVKETQKKWAEQYLKIMGKILDQGEDFPASEMTRIARLIEKNKMSDGKKEELQKSLNILTAFQKKGAEKEEL

SEQ ID NO: 27312 - protein, 53 aa, Homo sapiens
  Payload ID: 5381
  Gene Symbol: ERP29
  Gene Name: endoplasmic reticulum protein 29
  Uniprot ID: P30040
  ENSP ID: ENSP00000412083
MAAAVPRAAFLSPLLPLLLGFLLLSAPHGGSGLHTKGALPLDTVTFYKIMVTS

SEQ ID NO: 27313 - protein, 95 aa, Homo sapiens
  Payload ID: 5381
  Gene Symbol: ERP29
  Gene Name: endoplasmic reticulum protein 29
  ENSP ID: ENSP00000447472
  MOD_RES (1)..(1): Any amino acid
XPAPHFSPRCFPFSWASCSSPLRMAAAACTPRAPFPWIRSLSTRGPLGRGISPKSPWNTHLLSSIRPQVIPKSKFVLVKFDTQYPYGEKQDEFKR

SEQ ID NO: 27314 - protein, 160 aa, Homo sapiens
  Payload ID: 5381
  Gene Symbol: ERP29
  Gene Name: endoplasmic reticulum protein 29
  ENSP ID: ENSP00000449018
MELSEKYKLDKESYPVFYLFRDGDFENPVPYTGAVKVGAIQRWLKGQGVYLGMPGCLPVYDALAGEFIRASGVEARQALLKQGQDNLSSVKETQKKWAEQYLKIMGKILDQGEDFPASEMTRIARLIEKNKMSDGKKEELQKSLNILTAFQKKGAEKEEL

SEQ ID NO: 27315 - protein, 406 aa, Homo sapiens
  Payload ID: 5382
  Gene Symbol: ERP44
  Gene Name: endoplasmic reticulum protein 44
  Uniprot ID: Q9BS26
  ENSP ID: ENSP00000262455
MHPAVFLSLPDLRCSLLLLVTWVFTPVTTEITSLDTENIDEILNNADVALVNFYADWCRFSQMLHPIFEEASDVIKEEFPNENQVVFARVDCDQHSDIAQRYRISKYPTLKLFRNGMMMKREYRGQRSVKALADYIRQQKSDPIQEIRDLAEITTLDRSKRNIIGYFEQKDSDNYRVFERVANILHDDCAFLSAFGDVSKPERYSGDNIIYKPPGHSAPDMVYLGAMTNFDVTYNWIQDKCVPLVREITFENGEELTEEGLPFLILFHMKEDTESLEIFQNEVARQLISEKGTINFLHADCDKFRHPLLHIQKTPADCPVIAIDSFRHMYVFGDFKDVLIPGKLKQFVFDLHSGKLHREFHHGPDPTDTAPGEQAQDVASSPPESSFQKLAPSEYRYTLLRDRDEL

SEQ ID NO: 27316 - protein, 977 aa, Homo sapiens
  Payload ID: 5383
  Gene Symbol: ERN1
  Gene Name: endoplasmic reticulum to nucleus signaling 1
  Uniprot ID: O75460
  ENSP ID: ENSP00000401445
MPARRLLLLLTLLLPGLGIFGSTSTVTLPETLLFVSTLDGSLHAVSKRTGSIKWTLKEDPVLQVPTHVEEPAFLPDPNDGSLYTLGSKNNEGLTKLPFTIPELVQASPCRSSDGILYMGKKQDIWYVIDLLTGEKQQTLSSAFADSLCPSTSLLYLGRTEYTITMYDTKTRELRWNATYFDYAASLPEDDVDYKMSHFVSNGDGLVVTVDSESGDVLWIQNYASPVVAFYVWQREGLRKVMHINVAVETLRYLTFMSGEVGRITKWKYPFPKETEAKSKLTPTLYVGKYSTSLYASPSMVHEGVAVVPRGSTLPLLEGPQTDGVTIGDKGECVITPSTDVKFDPGLKSKNKLNYLRNYWLLIGHHETPLSASTKMLERFPNNLPKHRENVIPADSEKKSFEEVINLVDQTSENAPTTVSRDVEEKPAHAPARPEAPVDSMLKDMATIILSTFLLIGWVAFIITYPLSMHQQQQLQHQQFQKELEKIQLLQQQQQQLPFHPPGDTAQDGELLDTSGPYSESSGTSSPSTSPRASNHSLCSGSSASKAGSSPSLEQDDGDEETSVVIVGKISFCPKDVLGHGAEGTIVYRGMFDNRDVAVKRILPECFSFADREVQLLRESDEHPNVIRYFCTEKDRQFQYIAIELCAATLQEYVEQKDFAHLGLEPITLLQQTTSGLAHLHSLNIVHRDLKPHNILISMPNAHGKIKAMISDFGLCKKLAVGRHSFSRRSGVPGTEGWIAPEMLSEDCKENPTYTVDIFSAGCVFYYVISEGSHPFGKSLQRQANILLGACSLDCLHPEKHEDVIARELIEKMIAMDPQKRPSAKHVLKHPFFWSLEKQLQFFQDVSDRIEKESLDGPIVKQLERGGRAVVKMDWRENITVPLQTDLRKFRTYKGGSVRDLLRAMRNKKHHYRELPAEVRETLGSLPDDFVCYFTSRFPHLLAHTYRAMELCSHERLFQPYYFHEPPEPQPPVTPDAL

SEQ ID NO: 27317 - protein, 70 aa, Homo sapiens
  Payload ID: 5383
  Gene Symbol: ERN1
  Gene Name: endoplasmic reticulum to nucleus signaling 1
  Uniprot ID: O75460
  ENSP ID: ENSP00000475519
MPARRLLLLLTLLLPGLGVSDRGAWGGGQLATAGSGPGQRRGAGAGVRAGSATAAARCPVSPAVGGSGRA

SEQ ID NO: 27318 - protein, 926 aa, Homo sapiens
  Payload ID: 5384
  Gene Symbol: ERN2
  Gene Name: endoplasmic reticulum to nucleus signaling 2
  Uniprot ID: Q76MJ5
  ENSP ID: ENSP00000256797
MASAVRGSRPWPRLGLQLQFAALLLGTLSPQVHTLRPENLLLVSTLDGSLHALSKQTGDLKWTLRDDPVIEGPMYVTEMAFLSDPADGSLYILGTQKQQGLMKLPFTIPELVHASPCRSSDGVFYTGRKQDAWFVVDPESGETQMTLTTEGPSTPRLYIGRTQYTVTMHDPRAPALRWNTTYRRYSAPPMDGSPGKYMSHLASCGMGLLLTVDPGSGTVLWTQDLGVPVMGVYTWHQDGLRQLPHLTLARDTLHFLALRWGHIRLPASGPRDTATLFSTLDTQLLMTLYVGKDETGFYVSKALVHTGVALVPRGLTLAPADGPTTDEVTLQVSGEREGSPSTAVRYPSGSVALPSQWLLIGHHELPPVLHTTMLRVHPTLGSGTAETRPPENTQAPAFFLELLSLSREKLWDSELHPEEKTPDSYLGLGPQDLLAASLTAVLLGGWILFVMRQQQPQVVEKQQETPLAPADFAHISQDAQSLHSGASRRSQKRLQSPSKQAQPLDDPEAEQLTVVGKISFNPKDVLGRGAGGTFVFRGQFEGRAVAVKRLLRECFGLVRREVQLLQESDRHPNVLRYFCTERGPQFHYIALELCRASLQEYVENPDLDRGGLEPEVVLQQLMSGLAHLHSLHIVHRDLKPGNILITGPDSQGLGRVVLSDFGLCKKLPAGRCSFSLHSGIPGTEGWMAPELLQLLPPDSPTSAVDIFSAGCVFYYVLSGGSHPFGDSLYRQANILTGAPCLAHLEEEVHDKVVARDLVGAMLSPLPQPRPSAPQVLAHPFFWSRAKQLQFFQDVSDWLEKESEQEPLVRALEAGGCAVVRDNWHEHISMPLQTDLRKFRSYKGTSVRDLLRAVRNKKHHYRELPVEVRQALGQVPDGFVQYFTNRFPRLLLHTHRAMRSCASESLFLPYYPPDSEARRPCPGATGR

SEQ ID NO: 27319 - protein, 874 aa, Homo sapiens
  Payload ID: 5384
  Gene Symbol: ERN2
  Gene Name: endoplasmic reticulum to nucleus signaling 2
  ENSP ID: ENSP00000413812
MASAVRGSRPWPRLGLQLQFAALLLGTLSPQVHTLRPENLLLVSTLDGSLHALSKQTGDLKWTLRDDPVIEGPMYVTEMAFLSDPADGSLYILGTQKQQGLMKLPFTIPELVHASPCRSSDGVFYTGRKQDAWFVVDPESGETQMTLTTEGPSTPRLYIGRTQYTVTMHDPRAPALRWNTTYRRYSAPPMDGSPGKYMSHLASCGMGLLLTVDPGSGTVLWTQDLGVPVMGVYTWHQDGLRQLPHLTLARDTLHFLALRWGHIRLPASGPRDTATLFSTLDTQLLMTLYVGKDETGFYVSKALVHTGVALVPRGLTLAPADGPTTDEVTLQVSGEREGSPSTAVRYPSGSVALPSQWLLIGHHELPPVLHTTMLRVHPTLGSGTAETRPPENTQAPAFFLEQQPQVVEKQQETPLAPADFAHISQDAQSLHSGASRRSQKRLQSPSKQAQPLDDPEAEQLTVVGKISFNPKDVLGRGAGGTFVFRGQFEGRAVAVKRLLRECFGLVRREVQLLQESDRHPNVLRYFCTERGPQFHYIALELCRASLQEYVENPDLDRGGLEPEVVLQQLMSGLAHLHSLHIVHRDLKPGNILITGPDSQGLGRVVLSDFGLCKKLPAGRCSFSLHSGIPGTEGWMAPELLQLLPPDSPTSAVDIFSAGCVFYYVLSGGSHPFGDSLYRQANILTGAPCLAHLEEEVHDKVVARDLVGAMLSPLPQPRPSAPQVLAHPFFWSRAKQLQFFQDVSDWLEKESEQEPLVRALEAGGCAVVRDNWHEHISMPLQTDLRKFRSYKGTSVRDLLRAVRNKKHHYRELPVEVRQALGQVPDGFVQYFTNRFPRLLLHTHRAMRSCASESLFLPYYPPDSEARRPCPGATGR

SEQ ID NO: 27320 - protein, 23 aa, Homo sapiens
  Payload ID: 5384
  Gene Symbol: ERN2
  Gene Name: endoplasmic reticulum to nucleus signaling 2
  ENSP ID: ENSP00000456866
ELLQLLPPDSPTRWLPGTWLEPC

SEQ ID NO: 27321 - protein, 129 aa, Homo sapiens
  Payload ID: 5384
  Gene Symbol: ERN2
  Gene Name: endoplasmic reticulum to nucleus signaling 2
  ENSP ID: ENSP00000457361
MASAVRGSRPWPRLGLQLQFAALLLGTLSPQVHTLRPENLLLVSTLDGSLHALSKQTGDLKWTLRDDPVIEGPMYVTEMAFLSDPADGSLYILGTQKQQGLMAGVQWYDHKAHCSLELLASSNPRTSVS

SEQ ID NO: 27322 - protein, 80 aa, Homo sapiens
  Payload ID: 5384
  Gene Symbol: ERN2
  Gene Name: endoplasmic reticulum to nucleus signaling 2
  ENSP ID: ENSP00000457796
MASAVRGSRPWPRLGLQLQFAALLLGTLSPQGCGWATRMLGLLLGAQPHPVCSRRDWSRFILSGQRTSCWCPPWMEVSTH

SEQ ID NO: 27323 - protein, 974 aa, Homo sapiens
  Payload ID: 5384
  Gene Symbol: ERN2
  Gene Name: endoplasmic reticulum to nucleus signaling 2
  ENSP ID: ENSP00000489461
MRRAGIGEDSRLGLQAQPGAEPSPGRAGTERSLGGTQGPGQPCSCPGAMASAVRGSRPWPRLGLQLQFAALLLGTLSPQVHTLRPENLLLVSTLDGSLHALSKQTGDLKWTLRDDPVIEGPMYVTEMAFLSDPADGSLYILGTQKQQGLMKLPFTIPELVHASPCRSSDGVFYTGRKQDAWFVVDPESGETQMTLTTEGPSTPRLYIGRTQYTVTMHDPRAPALRWNTTYRRYSAPPMDGSPGKYMSHLASCGMGLLLTVDPGSGTVLWTQDLGVPVMGVYTWHQDGLRQLPHLTLARDTLHFLALRWGHIRLPASGPRDTATLFSTLDTQLLMTLYVGKDETGFYVSKALVHTGVALVPRGLTLAPADGPTTDEVTLQVSGEREGSPSTAVRYPSGSVALPSQWLLIGHHELPPVLHTTMLRVHPTLGSGTAETRPPENTQAPAFFLELLSLSREKLWDSELHPEEKTPDSYLGLGPQDLLAASLTAVLLGGWILFVMRQQQPQVVEKQQETPLAPADFAHISQDAQSLHSGASRRSQKRLQSPSKQAQPLDDPEAEQLTVVGKISFNPKDVLGRGAGGTFVFRGQFEGRAVAVKRLLRECFGLVRREVQLLQESDRHPNVLRYFCTERGPQFHYIALELCRASLQEYVENPDLDRGGLEPEVVLQQLMSGLAHLHSLHIVHRDLKPGNILITGPDSQGLGRVVLSDFGLCKKLPAGRCSFSLHSGIPGTEGWMAPELLQLLPPDSPTSAVDIFSAGCVFYYVLSGGSHPFGDSLYRQANILTGAPCLAHLEEEVHDKVVARDLVGAMLSPLPQPRPSAPQVLAHPFFWSRAKQLQFFQDVSDWLEKESEQEPLVRALEAGGCAVVRDNWHEHISMPLQTDLRKFRSYKGTSVRDLLRAVRNKKHHYRELPVEVRQALGQVPDGFVQYFTNRFPRLLLHTHRAMRSCASESLFLPYYPPDSEARRPCPGATGR

SEQ ID NO: 27324 - protein, 159 aa, Homo sapiens
  Payload ID: 5385
  Gene Symbol: ERGIC1
  Gene Name: endoplasmic reticulum-golgi intermediate compartment 1
  Uniprot ID: Q969X5
  ENSP ID: ENSP00000325127
MERWAMRVNELYVDDPDKDSGGKIDVSLNISLPNLHCELVGLDIQDEMGRHEVGHIDNSMKIPLNNGAGCRFEGQFSINKVWKPCLSPFYLLPFPAVSPLPGNWLWRHSLDLTLTQPPASEGSCPAAWPFLLRIWMGVQAPWGFKPLMAGSGRSYSSLQ

SEQ ID NO: 27325 - protein, 290 aa, Homo sapiens
  Payload ID: 5385
  Gene Symbol: ERGIC1
  Gene Name: endoplasmic reticulum-golgi intermediate compartment 1
  Uniprot ID: Q969X5
  ENSP ID: ENSP00000377374
MPFDFRRFDIYRKVPKDLTQPTYTGAIISICCCLFILFLFLSELTGFITTEVVNELYVDDPDKDSGGKIDVSLNISLPNLHCELVGLDIQDEMGRHEVGHIDNSMKIPLNNGAGCRFEGQFSINKVPGNFHVSTHSATAQPQNPDMTHVIHKLSFGDTLQVQNIHGAFNALGGADRLTSNPLASHDYILKIVPTVYEDKSGKQRYSYQYTVANKEYVAYSHTGRIIPAIWFRYDLSPITVKYTERRQPLYRFITTICAIIGGTFTVAGILDSCIFTASEAWKKIQLGKMH

SEQ ID NO: 27326 - protein, 138 aa, Homo sapiens
  Payload ID: 5385
  Gene Symbol: ERGIC1
  Gene Name: endoplasmic reticulum-golgi intermediate compartment 1
  ENSP ID: ENSP00000427713
MPFDFRRFDIYRKVPKDLTQPTYTGAIISICCCLFILFLFLSELTGFITTEVVNELYVDDPDKDSGGKIDVSLNISLPNLHCELVGLDIQDEMGRHEVGHIDNSMKIPLNNGAGCRFEGQFSINKEVDQQPDVRVCVF

SEQ ID NO: 27327 - protein, 55 aa, Homo sapiens
  Payload ID: 5385
  Gene Symbol: ERGIC1
  Gene Name: endoplasmic reticulum-golgi intermediate compartment 1
  ENSP ID: ENSP00000428064
MPFDFRRFDIYRKVPKDLTQPTYTGAIISICCCLFILFLFLSELTGFITTEVGWA

SEQ ID NO: 27328 - protein, 54 aa, Homo sapiens
  Payload ID: 5385
  Gene Symbol: ERGIC1
  Gene Name: endoplasmic reticulum-golgi intermediate compartment 1
  ENSP ID: ENSP00000428116
  MOD_RES (1)..(1): Any amino acid
XVNELYVDDPDKDSGGKIDVSLNISLPNLHCEFFGPQTMSSWRSPARPAPAMDE

SEQ ID NO: 27329 - protein, 105 aa, Homo sapiens
  Payload ID: 5385
  Gene Symbol: ERGIC1
  Gene Name: endoplasmic reticulum-golgi intermediate compartment 1
  ENSP ID: ENSP00000429501
MERWAMRVNELYVDDPDKDSGGKIDVSLNISLPNLHCELVGLDIQDEMGRHEVGHIDNSMKIPLNNGAGCRFEGQFSINKVPGNFHVSTHSATAQPQNPDMTHVI

SEQ ID NO: 27330 - protein, 117 aa, Homo sapiens
  Payload ID: 5386
  Gene Symbol: ENSA
  Gene Name: endosulfine alpha
  Uniprot ID: O43768
  ENSP ID: ENSP00000271690
MSQKQEEENPAEETGEEKQDTQEKEGILPERAEEAKLKAKYPSLGQKPGGSDFLMKRLQKGQKYFDSGDYNMAKAKMKNKQLPSAGPDKNLVTGDHIPTPQDLPQRKSSLVTSKLAG

SEQ ID NO: 27331 - protein, 137 aa, Homo sapiens
  Payload ID: 5386
  Gene Symbol: ENSA
  Gene Name: endosulfine alpha
  Uniprot ID: O43768
  ENSP ID: ENSP00000341743
MSQKQEEENPAEETGEEKQDTQEKEGILPERAEEAKLKAKYPSLGQKPGGSDFLMKRLQKGDYKSLHWSVLLCADEMQKYFDSGDYNMAKAKMKNKQLPSAGPDKNLVTGDHIPTPQDLPQRKSSLVTSKLAGGQVE

SEQ ID NO: 27332 - protein, 140 aa, Homo sapiens
  Payload ID: 5386
  Gene Symbol: ENSA
  Gene Name: endosulfine alpha
  ENSP ID: ENSP00000348921
MSQKQEEENPAEETGEEKQDTQEKEGILPERAEEAKLKAKYPSLGQKPGGSDFLMKRLQKGVWGIVSYPLSLELKEVLRMKSVEQKYFDSGDYNMAKAKMKNKQLPSAGPDKNLVTGDHIPTPQDLPQRKSSLVTSKLAG

SEQ ID NO: 27333 - protein, 117 aa, Homo sapiens
  Payload ID: 5386
  Gene Symbol: ENSA
  Gene Name: endosulfine alpha
  Uniprot ID: O43768
  ENSP ID: ENSP00000354835
MAGGLGCDVCYWFVEDTQEKEGILPERAEEAKLKAKYPSLGQKPGGSDFLMKRLQKGQKYFDSGDYNMAKAKMKNKQLPSAGPDKNLVTGDHIPTPQDLPQRKSSLVTSKLAGGQVE

SEQ ID NO: 27334 - protein, 105 aa, Homo sapiens
  Payload ID: 5386
  Gene Symbol: ENSA
  Gene Name: endosulfine alpha
  Uniprot ID: O43768
  ENSP ID: ENSP00000355220
MSQKQEEENPAEETGEEKQDTQEKEGILPERAEEAKLKAKYPSLGQKPGGSDFLMKRLQKGVWGIVSYPLSLELKEVLRMKSVEVLLDPFLEVLLLNRSRGEFEI

SEQ ID NO: 27335 - protein, 133 aa, Homo sapiens
  Payload ID: 5386
  Gene Symbol: ENSA
  Gene Name: endosulfine alpha
  Uniprot ID: O43768
  ENSP ID: ENSP00000355239
MAGGLGCDVCYWFVEDTQEKEGILPERAEEAKLKAKYPSLGQKPGGSDFLMKRLQKGDYKSLHWSVLLCADEMQKYFDSGDYNMAKAKMKNKQLPSAGPDKNLVTGDHIPTPQDLPQRKSSLVTSKLAGGQVE

SEQ ID NO: 27336 - protein, 121 aa, Homo sapiens
  Payload ID: 5386
  Gene Symbol: ENSA
  Gene Name: endosulfine alpha
  Uniprot ID: O43768
  ENSP ID: ENSP00000358010
MSQKQEEENPAEETGEEKQDTQEKEGILPERAEEAKLKAKYPSLGQKPGGSDFLMKRLQKGQKYFDSGDYNMAKAKMKNKQLPSAGPDKNLVTGDHIPTPQDLPQRKSSLVTSKLAGGQVE

SEQ ID NO: 27337 - protein, 187 aa, Homo sapiens
  Payload ID: 5386
  Gene Symbol: ENSA
  Gene Name: endosulfine alpha
  ENSP ID: ENSP00000358012
MSQKQEEENPAEETGEEKQDTQEKEGILPERAEEAKLKAKYPSLGQKPGGSDFLMKRLQKGDYKSLHWSVLLCADEMQKYFDSGDYNMAKAKMKNKQLPSAGPDKNLVTGDHIPTPQDLPQRKSSLVTSKLAGQSFALVAQAGVQWHDLCLLQPLPPGFKRFSCLSLLSSWDYRHATPRPANFVIFL

SEQ ID NO: 27338 - protein, 105 aa, Homo sapiens; identical to SEQ ID NO: 27334
  Payload ID: 5386
  Gene Symbol: ENSA
  Gene Name: endosulfine alpha
  Uniprot ID: O43768
  ENSP ID: ENSP00000421458

SEQ ID NO: 27339 - protein, 113 aa, Homo sapiens
  Payload ID: 5386
  Gene Symbol: ENSA
  Gene Name: endosulfine alpha
  Uniprot ID: O43768
  ENSP ID: ENSP00000422343
MAGGLGCDVCYWFVEDTQEKEGILPERAEEAKLKAKYPSLGQKPGGSDFLMKRLQKGQKYFDSGDYNMAKAKMKNKQLPSAGPDKNLVTGDHIPTPQDLPQRKSSLVTSKLAG

SEQ ID NO: 27340 - protein, 133 aa, Homo sapiens
  Payload ID: 5386
  Gene Symbol: ENSA
  Gene Name: endosulfine alpha
  Uniprot ID: O43768
  ENSP ID: ENSP00000424242
MSQKQEEENPAEETGEEKQDTQEKEGILPERAEEAKLKAKYPSLGQKPGGSDFLMKRLQKGDYKSLHWSVLLCADEMQKYFDSGDYNMAKAKMKNKQLPSAGPDKNLVTGDHIPTPQDLPQRKSSLVTSKLAG

SEQ ID NO: 27341 - protein, 105 aa, Homo sapiens; identical to SEQ ID NO: 27334
  Payload ID: 5386
  Gene Symbol: ENSA
  Gene Name: endosulfine alpha
  Uniprot ID: O43768
  ENSP ID: ENSP00000426110

SEQ ID NO: 27342 - protein, 390 aa, Homo sapiens
  Payload ID: 5387
  Gene Symbol: ESAM
  Gene Name: endothelial cell adhesion molecule
  Uniprot ID: Q96AP7
  ENSP ID: ENSP00000278927
MISLPGPLVTNLLRFLFLGLSALAPPSRAQLQLHLPANRLQAVEGGEVVLPAWYTLHGEVSSSQPWEVPFVMWFFKQKEKEDQVLSYINGVTTSKPGVSLVYSMPSRNLSLRLEGLQEKDSGPYSCSVNVQDKQGKSRGHSIKTLELNVLVPPAPPSCRLQGVPHVGANVTLSCQSPRSKPAVQYQWDRQLPSFQTFFAPALDVIRGSLSLTNLSSSMAGVYVCKAHNEVGTAQCNVTLEVSTGPGAAVVAGAVVGTLVGLGLLAGLVLLYHRRGKALEEPANDIKEDAIAPRTLPWPKSSDTISKNGTLSSVTSARALRPPHGPPRPGALTPTPSLSSQALPSPRLPTTDGAHPQPISPIPGGVSSSGLSRMGAVPVMVPAQSQAGSLV

SEQ ID NO: 27343 - protein, 245 aa, Homo sapiens
  Payload ID: 5387
  Gene Symbol: ESAM
  Gene Name: endothelial cell adhesion molecule
  ENSP ID: ENSP00000389235
MISLPGPLVTNLLRFLFLGLSALAPPSRAQLQLHLPANRLQAVEGGEVVLPAWYTLHGEVSSSQPWEVPFVMWFFKQKEKEDQVLSYINGVTTSKPGVSLVYSMPSRNLSLRLEGLQEKDSGPYSCSVNVQDKQGKSRGHSIKTLELNVLVPPAPPSCRLQGVPHVGANVTLSCQSPRSKPAVQYQWDRQLPSFQTFFAPALDVIRGSLSLTNLSSSMAGVYVCKAHNEVGTAQCNVTLEVSTGQ

SEQ ID NO: 27344 - protein, 141 aa, Homo sapiens
  Payload ID: 5387
  Gene Symbol: ESAM
  Gene Name: endothelial cell adhesion molecule
  Uniprot ID: Q96AP7
  ENSP ID: ENSP00000406689
MISLPGPLVTNLLRFLFLGLSALDVIRGSLSLTNLSSSMAGVYVCKAHNEVGTAQCNVTLEVSTGPGAAVVAGAVVGTLVGLGLLAGLVLLYHRRGKALEEPANDIKVRSPLGLSFSAPKMEWLWKWRDAHFYRDSYLSKW

SEQ ID NO: 27345 - protein, 148 aa, Homo sapiens
  Payload ID: 5387
  Gene Symbol: ESAM
  Gene Name: endothelial cell adhesion molecule
  ENSP ID: ENSP00000415893
MISLPGPLVTNLLRFLFLGLSALVPPAPPSCRLQGVPHVGANVTLSCQSPRSKPAVQYQWDRQLPSFQTFFAPALDVIRGSLSLTNLSSSMAGVYVCKAHNEVGTAQCNVTLEVSTGPGAAVVAGAVVGTLVGLGLLAGLVLLYHRRG

SEQ ID NO: 27346 - protein, 205 aa, Homo sapiens
  Payload ID: 5388
  Gene Symbol: ECSCR
  Gene Name: endothelial cell surface expressed chemotaxis and apoptosis regulator
  Uniprot ID: Q19T08
  ENSP ID: ENSP00000479243
MGTAGAMQLCWVILGFLLFRGHNSQPTMTQTSSSQGGLGGLSLTTEPVSSNPGYIPSSEANRPSHLSSTGTPGAGVPSSGRDGGTSRDTFQTVPPNSTTMSLSMREDATILPSPTSETVLTVAAFGVISFIVILVVVVIILVGVVSLRFKCRKSKESEDPQKPGSSGLSESCSTANGEKDSITLISMKNINMNNGKQSLSAEKVL

SEQ ID NO: 27347 - protein, 205 aa, Homo sapiens; identical to SEQ ID NO: 27346
  Payload ID: 5389
  Gene Symbol:
  Gene Name: endothelial cell surface expressed chemotaxis and apoptosis regulator [Source:EntrezGene Acc:641700]
  Uniprot ID: Q19T08
  ENSP ID: ENSP00000421364

SEQ ID NO: 27348 - protein, 134 aa, Homo sapiens
  Payload ID: 5390
  Gene Symbol: ESM1
  Gene Name: endothelial cell-specific molecule 1
  Uniprot ID: Q9NQ30
  ENSP ID: ENSP00000370810
MKSVLLLTTLLVPAHLVAAWSNNYAVDCPQHCDSSECKSSPRCKRTVLDDCGCCRVCAAGRGETCYRTVSGMDGMKCGPGLRCQPSNGEDPFGEEFGICKEHDMASGDGNIVREEVVKENAAGSPVMRKWLNPR

SEQ ID NO: 27349 - protein, 184 aa, Homo sapiens
  Payload ID: 5390
  Gene Symbol: ESM1
  Gene Name: endothelial cell-specific molecule 1
  Uniprot ID: Q9NQ30
  ENSP ID: ENSP00000370812
MKSVLLLTTLLVPAHLVAAWSNNYAVDCPQHCDSSECKSSPRCKRTVLDDCGCCRVCAAGRGETCYRTVSGMDGMKCGPGLRCQPSNGEDPFGEEFGICKDCPYGTFGMDCRETCNCQSGICDRGTGKCLKFPFFQYSVTKSSNRFVSLTEHDMASGDGNIVREEVVKENAAGSPVMRKWLNPR

SEQ ID NO: 27350 - protein, 89 aa, Homo sapiens
  Payload ID: 5390
  Gene Symbol: ESM1
  Gene Name: endothelial cell-specific molecule 1
  ENSP ID: ENSP00000471642
MKSVLLLTTLLVPAHLVAAWSNNYAVDCPQHCDSSECKSSPRCKRTVLDDCGCCRVCAAGRGETCYRTVSGMDGMKCGPGLRCQPSNGE

SEQ ID NO: 27351 - protein, 148 aa, Homo sapiens
  Payload ID: 5391
  Gene Symbol: EDF1
  Gene Name: endothelial differentiation-related factor 1
  Uniprot ID: O60869
  ENSP ID: ENSP00000224073
MAESDWDTVTVLRKKGPTAAQAKSKQAILAAQRRGEDVETSKKWAAGQNKQHSITKNTAKLDRETEELHHDRVTLEVGKVIQQGRQSKGLTQKDLATKINEKPQVIADYESGRAIPNNQVLGKIERAIGLKLRGKDIGKPIEKGPRAK

SEQ ID NO: 27352 - protein, 139 aa, Homo sapiens
  Payload ID: 5391
  Gene Symbol: EDF1
  Gene Name: endothelial differentiation-related factor 1
  Uniprot ID: O60869
  ENSP ID: ENSP00000360711
MAESDWDTVTVLRKKGPTAAQAKSKQAILAAQRRGEDVETSKKWAAGQNKQHSITKNTAKLDRETEELHHDRVTLEVGKVIQQGRQSKGLTQKDLATKINEKPQVIADYESGRAIPNNQVLGKIERAIGECPSTLRRVR

SEQ ID NO: 27353 - protein, 141 aa, Homo sapiens
  Payload ID: 5391
  Gene Symbol: EDF1
  Gene Name: endothelial differentiation-related factor 1
  Uniprot ID: O60869
  ENSP ID: ENSP00000360712
MAESDWDTVTVLRKKGPTAAQAKSKQAILAAQRRGEDVETSKKWAAGQNKQHSITKNTAKLDRETEELHHDRVTLEVGKVIQQGRQSKGLTQKDLATKINEKPQVIADYESGRAIPNNQVLGKIERAIDVGTRSARVLRAQ

SEQ ID NO: 27354 - protein, 870 aa, Homo sapiens
  Payload ID: 5392
  Gene Symbol: EPAS1
  Gene Name: endothelial PAS domain protein 1
  Uniprot ID: Q99814
  ENSP ID: ENSP00000263734
MTADKEKKRSSSERRKEKSRDAARCRRSKETEVFYELAHELPLPHSVSSHLDKASIMRLAISFLRTHKLLSSVCSENESEAEADQQMDNLYLKALEGFIAVVTQDGDMIFLSENISKFMGLTQVELTGHSIFDFTHPCDHEEIRENLSLKNGSGFGKKSKDMSTERDFFMRMKCTVTNRGRTVNLKSATWKVLHCTGQVKVYNNCPPHNSLCGYKEPLLSCLIIMCEPIQHPSHMDIPLDSKTFLSRHSMDMKFTYCDDRITELIGYHPEELLGRSAYEFYHALDSENMTKSHQNLCTKGQVVSGQYRMLAKHGGYVWLETQGTVIYNPRNLQPQCIMCVNYVLSEIEKNDVVFSMDQTESLFKPHLMAMNSIFDSSGKGAVSEKSNFLFTKLKEEPEELAQLAPTPGDAIISLDFGNQNFEESSAYGKAILPPSQPWATELRSHSTQSEAGSLPAFTVPQAAAPGSTTPSATSSSSSCSTPNSPEDYYTSLDNDLKIEVIEKLFAMDTEAKDQCSTQTDFNELDLETLAPYIPMDGEDFQLSPICPEERLLAENPQSTPQHCFSAMTNIFQPLAPVAPHSPFLLDKFQQQLESKKTEPEHRPMSSIFFDAGSKASLPPCCGQASTPLSSMGGRSNTQWPPDPPLHFGPTKWAVGDQRTEFLGAAPLGPPVSPPHVSTFKTRSAKGFGARGPDVLSPAMVALSNKLKLKRQLEYEEQAFQDLSGGDPPGGSTSHLMWKRMKNLRGGSCPLMPDKPLSANVPNDKFTQNPMRGLGHPLRHLPLPQPPSAISPGENSKSRFPPQCYATQYQDYSLSSAHKVSGMASRLLGPSFESYLLPELTRYDCEVNVPVLGSSTLLQGGDLLRALDQAT

SEQ ID NO: 27355 - protein, 259 aa, Homo sapiens
  Payload ID: 5392
  Gene Symbol: EPAS1
  Gene Name: endothelial PAS domain protein 1
  ENSP ID: ENSP00000406137
MTADKEKKRSSSERRKEKSRDAARCRRSKETEVFYELAHELPLPHSVSSHLDKASIMRLAISFLRTHKLLSSVCSENESEAEADQQMDNLYLKALEGFIAVVTQDGDMIFLSENISKFMGLTQVELTGHSIFDFTHPCDHEEIRENLSLKNGSGFGKKSKDMSTERDFFMRMKCTVTNRGRTVNLKSATWKVLHCTGQVKVYNNCPPHNSLCGYKEPLLSCLIIMCEPIQHPSHMDIPLDSKTFLSRHSMDMKFTYCDD

SEQ ID NO: 27356 - protein, 212 aa, Homo sapiens
  Payload ID: 5393
  Gene Symbol: EDN1
  Gene Name: endothelin 1
  Uniprot ID: P05305
  ENSP ID: ENSP00000368683
MDYLLMIFSLLFVACQGAPETAVLGAELSAVGENGGEKPTPSPPWRLRRSKRCSCSSLMDKECVYFCHLDIIWVNTPEHVVPYGLGSPRSKRALENLLPTKATDRENRCQCASQKDKKCWNFCQAGKELRAEDIMEKDWNNHKKGKDCSKLGKKCIYQQLVRGRKIRRSSEEHLRQTRSETMRNSVKSSFHDPKLKGKPSRERYVTHNRAHW

SEQ ID NO: 27357 - protein, 178 aa, Homo sapiens
  Payload ID: 5394
  Gene Symbol: EDN2
  Gene Name: endothelin 2
  Uniprot ID: P20800
  ENSP ID: ENSP00000361668
MVSVPTTWCSVALALLVALHEGKGQAAATLEQPASSSHAQGTHLRLRRCSCSSWLDKECVYFCHLDIIWVNTPEQTAPYGLGNPPRRRRRSLPRRCQCSSARDPACATFCLRRPWTEAGAVPSRKSPADVFQTGKTGATTGELLQRLRDISTVKSLFAKRQQEAMREPRSTHSRWRKR

SEQ ID NO: 27358 - protein, 219 aa, Homo sapiens
  Payload ID: 5395
  Gene Symbol: EDN3
  Gene Name: endothelin 3
  Uniprot ID: P14138
  ENSP ID: ENSP00000311854
MEPGLWLLFGLTVTSAAGFVPCSQSGDAGRRGVSQAPTAARSEGDCEETVAGPGEETVAGPGEGTVAPTALQGPSPGSPGQEQAAEGAPEHHRSRRCTCFTYKDKECVYYCHLDIIWINTPEQTVPYGLSNYRGSFRGKRSAGPLPGNLQLSHRPHLRCACVGRYDKACLHFCTQTLDVSSNSRTAEKTDKEEEGKVRGANRGLCQRRLKSRTNKASRL

SEQ ID NO: 27359 - protein, 238 aa, Homo sapiens
  Payload ID: 5395
  Gene Symbol: EDN3
  Gene Name: endothelin 3
  Uniprot ID: P14138
  ENSP ID: ENSP00000337128
MEPGLWLLFGLTVTSAAGFVPCSQSGDAGRRGVSQAPTAARSEGDCEETVAGPGEETVAGPGEGTVAPTALQGPSPGSPGQEQAAEGAPEHHRSRRCTCFTYKDKECVYYCHLDIIWINTPEQTVPYGLSNYRGSFRGKRSAGPLPGNLQLSHRPHLRCACVGRYDKACLHFCTQTLDVSSNSRTAEKTDKEEEGKVEVKDQQSKQALDLHHPKLMPGSGLALAPSTCPRCLFQEGAP

SEQ ID NO: 27360 - protein, 192 aa, Homo sapiens
  Payload ID: 5395
  Gene Symbol: EDN3
  Gene Name: endothelin 3
  ENSP ID: ENSP00000360064
MEPGLWLLFGLTVTSAAGFVPCSQSGDAGRRGVSQAPTAARSEGDCEETVAGPGEETVAGPGEGTVAPTALQGPSPGSPGQEQAAEGAPEHHRSRRCTCFTYKDKECVYYCHLDIIWINTPEQTVPYGLSNYRGSFRGKRSAGPLPGNLQLSHRPHLRCACVGRYDKACLHFCTQTLDVSRLKSRTNKASRL

SEQ ID NO: 27361 - protein, 238 aa, Homo sapiens; identical to SEQ ID NO: 27359
  Payload ID: 5395
  Gene Symbol: EDN3
  Gene Name: endothelin 3
  Uniprot ID: P14138
  ENSP ID: ENSP00000360067

SEQ ID NO: 27362 - protein, 224 aa, Homo sapiens
  Payload ID: 5395
  Gene Symbol: EDN3
  Gene Name: endothelin 3
  Uniprot ID: P14138
  ENSP ID: ENSP00000379015
MEPGLWLLFGLTVTSAAGFVPCSQSGDAGRRGVSQAPTAARSEGDCEETVAGPGEETVAGPGEGTVAPTALQGPSPGSPGQEQAAEGAPEHHRSRRCTCFTYKDKECVYYCHLDIIWINTPEQTVPYGLSNYRGSFRGKRSAGPLPGNLQLSHRPHLRCACVGRYDKACLHFCTQTLDVSRQVEVKDQQSKQALDLHHPKLMPGSGLALAPSTCPRCLFQEGAP

SEQ ID NO: 27363 - protein, 767 aa, Homo sapiens
  Payload ID: 5396
  Gene Symbol: ECE1
  Gene Name: endothelin converting enzyme 1
  Uniprot ID: P42892
  ENSP ID: ENSP00000264205
MEALRESVLHLALQMSTYKRATLDEEDLVDSLSEGDAYPNGLQVNFHSPRSGQRCWAARTQVEKRLVVLVVLLAAGLVACLAALGIQYQTRSPSVCLSEACVSVTSSILSSMDPTVDPCHDFFSYACGGWIKANPVPDGHSRWGTFSNLWEHNQAIIKHLLENSTASVSEAERKAQVYYRACMNETRIEELRAKPLMELIERLGGWNITGPWAKDNFQDTLQVVTAHYRTSPFFSVYVSADSKNSNSNVIQVDQSGLGLPSRDYYLNKTENEKVLTGYLNYMVQLGKLLGGGDEEAIRPQMQQILDFETALANITIPQEKRRDEELIYHKVTAAELQTLAPAINWLPFLNTIFYPVEINESEPIVVYDKEYLEQISTLINTTDRCLLNNYMIWNLVRKTSSFLDQRFQDADEKFMEVMYGTKKTCLPRWKFCVSDTENNLGFALGPMFVKATFAEDSKSIATEIILEIKKAFEESLSTLKWMDEETRKSAKEKADAIYNMIGYPNFIMDPKELDKVFNDYTAVPDLYFENAMRFFNFSWRVTADQLRKAPNRDQWSMTPPMVNAYYSPTKNEIVFPAGILQAPFYTRSSPKALNFGGIGVVVGHELTHAFDDQGREYDKDGNLRPWWKNSSVEAFKRQTECMVEQYSNYSVNGEPVNGRHTLGENIADNGGLKAAYRAYQNWVKKNGAEHSLPTLGLTNNQLFFLGFAQVWCSVRTPESSHEGLITDPHSPSRFRVIGSLSNSKEFSEHFRCPPGSPMNPPHKCEVW

SEQ ID NO: 27364 - protein, 758 aa, Homo sapiens
  Payload ID: 5396
  Gene Symbol: ECE1
  Gene Name: endothelin converting enzyme 1
  Uniprot ID: P42892
  ENSP ID: ENSP00000349581
MPLQGLGLQRNPFLQGKRGPGLTSSPPLLPPSLQVNFHSPRSGQRCWAARTQVEKRLVVLVVLLAAGLVACLAALGIQYQTRSPSVCLSEACVSVTSSILSSMDPTVDPCHDFFSYACGGWIKANPVPDGHSRWGTFSNLWEHNQAIIKHLLENSTASVSEAERKAQVYYRACMNETRIEELRAKPLMELIERLGGWNITGPWAKDNFQDTLQVVTAHYRTSPFFSVYVSADSKNSNSNVIQVDQSGLGLPSRDYYLNKTENEKVLTGYLNYMVQLGKLLGGGDEEAIRPQMQQILDFETALANITIPQEKRRDEELIYHKVTAAELQTLAPAINWLPFLNTIFYPVEINESEPIVVYDKEYLEQISTLINTTDRCLLNNYMIWNLVRKTSSFLDQRFQDADEKFMEVMYGTKKTCLPRWKFCVSDTENNLGFALGPMFVKATFAEDSKSIATEIILEIKKAFEESLSTLKWMDEETRKSAKEKADAIYNMIGYPNFIMDPKELDKVFNDYTAVPDLYFENAMRFFNFSWRVTADQLRKAPNRDQWSMTPPMVNAYYSPTKNEIVFPAGILQAPFYTRSSPKALNFGGIGVVVGHELTHAFDDQGREYDKDGNLRPWWKNSSVEAFKRQTECMVEQYSNYSVNGEPVNGRHTLGENIADNGGLKAAYRAYQNWVKKNGAEHSLPTLGLTNNQLFFLGFAQVWCSVRTPESSHEGLITDPHSPSRFRVIGSLSNSKEFSEHFRCPPGSPMNPPHKCEVW

SEQ ID NO: 27365 - protein, 770 aa, Homo sapiens
  Payload ID: 5396
  Gene Symbol: ECE1
  Gene Name: endothelin converting enzyme 1
  Uniprot ID: P42892
  ENSP ID: ENSP00000364028
MRGVWPPPVSALLSALGMSTYKRATLDEEDLVDSLSEGDAYPNGLQVNFHSPRSGQRCWAARTQVEKRLVVLVVLLAAGLVACLAALGIQYQTRSPSVCLSEACVSVTSSILSSMDPTVDPCHDFFSYACGGWIKANPVPDGHSRWGTFSNLWEHNQAIIKHLLENSTASVSEAERKAQVYYRACMNETRIEELRAKPLMELIERLGGWNITGPWAKDNFQDTLQVVTAHYRTSPFFSVYVSADSKNSNSNVIQVDQSGLGLPSRDYYLNKTENEKVLTGYLNYMVQLGKLLGGGDEEAIRPQMQQILDFETALANITIPQEKRRDEELIYHKVTAAELQTLAPAINWLPFLNTIFYPVEINESEPIVVYDKEYLEQISTLINTTDRCLLNNYMIWNLVRKTSSFLDQRFQDADEKFMEVMYGTKKTCLPRWKFCVSDTENNLGFALGPMFVKATFAEDSKSIATEIILEIKKAFEESLSTLKWMDEETRKSAKEKADAIYNMIGYPNFIMDPKELDKVFNDYTAVPDLYFENAMRFFNFSWRVTADQLRKAPNRDQWSMTPPMVNAYYSPTKNEIVFPAGILQAPFYTRSSPKALNFGGIGVVVGHELTHAFDDQGREYDKDGNLRPWWKNSSVEAFKRQTECMVEQYSNYSVNGEPVNGRHTLGENIADNGGLKAAYRAYQNWVKKNGAEHSLPTLGLTNNQLFFLGFAQVWCSVRTPESSHEGLITDPHSPSRFRVIGSLSNSKEFSEHFRCPPGSPMNPPHKCEVW

SEQ ID NO: 27366 - protein, 738 aa, Homo sapiens
  Payload ID: 5396
  Gene Symbol: ECE1
  Gene Name: endothelin converting enzyme 1
  ENSP ID: ENSP00000388439
MRGVWPPPVSALLSALGMSTYKRATLDEEDLVDSLSEGDAYPNGLQVNFHSPRSGQRCWAARTQVEKRLVVLVVLLAAGLVACLAALGIQYQTRSPSVCLSEACVSVTSSILSSMDPTVDPCHDFFSYACGGWIKANPVPDGHSRWGTFSNLWEHNQAIIKHLLENSTASVSEAERKAQVYYRACMNETRIEELRAKPLMELIERLGGWNITGPWAKDNFQDTLQVVTAHYRTSPFFSVYVSADSKNSNSNVIQVDQSGLGLPSRDYYLNKTENEKVLTGYLNYMVQLGKLLGGGDEEAIRPQMQQILDFETALANITIPQEKRRDEELIYHKVTAAELQTLAPAINWLPFLNTIFYPVEINESEPIVVYDKEYLEQISTLINTTDRCLLNNYMIWNLVRKTSSFLDQRFQDADEKFMEVMYGTKKTCLPRWKFCVSDTENNLGFALGPMFVKATFAEDSKSIATEIILEIKKAFEESLSTLKWMDEETRKSAKEKADAIYNMIGYPNFIMDPKELDKVFNDYTAVPDLYFENAMRFFNFSWRVTADQLRKAPNRDQWSMTPPMVNAYYSPTKNEIVFPAGILQAPFYTRSSPKALNFGGIGVVVGHELTHAFDDQGREYDKDGNLRPWWKNSSVEAFKRQTECMVEQYSNYSVNGEPVNGRHTLGENIADNGGLKAAYRVWCSVRTPESSHEGLITDPHSPSRFRVIGSLSNSKEFSEHFRCPPGSPMNPPHKCEVW

SEQ ID NO: 27367 - protein, 754 aa, Homo sapiens
  Payload ID: 5396
  Gene Symbol: ECE1
  Gene Name: endothelin converting enzyme 1
  Uniprot ID: P42892
  ENSP ID: ENSP00000405088
MMSTYKRATLDEEDLVDSLSEGDAYPNGLQVNFHSPRSGQRCWAARTQVEKRLVVLVVLLAAGLVACLAALGIQYQTRSPSVCLSEACVSVTSSILSSMDPTVDPCHDFFSYACGGWIKANPVPDGHSRWGTFSNLWEHNQAIIKHLLENSTASVSEAERKAQVYYRACMNETRIEELRAKPLMELIERLGGWNITGPWAKDNFQDTLQVVTAHYRTSPFFSVYVSADSKNSNSNVIQVDQSGLGLPSRDYYLNKTENEKVLTGYLNYMVQLGKLLGGGDEEAIRPQMQQILDFETALANITIPQEKRRDEELIYHKVTAAELQTLAPAINWLPFLNTIFYPVEINESEPIVVYDKEYLEQISTLINTTDRCLLNNYMIWNLVRKTSSFLDQRFQDADEKFMEVMYGTKKTCLPRWKFCVSDTENNLGFALGPMFVKATFAEDSKSIATEIILEIKKAFEESLSTLKWMDEETRKSAKEKADAIYNMIGYPNFIMDPKELDKVFNDYTAVPDLYFENAMRFFNFSWRVTADQLRKAPNRDQWSMTPPMVNAYYSPTKNEIVFPAGILQAPFYTRSSPKALNFGGIGVVVGHELTHAFDDQGREYDKDGNLRPWWKNSSVEAFKRQTECMVEQYSNYSVNGEPVNGRHTLGENIADNGGLKAAYRAYQNWVKKNGAEHSLPTLGLTNNQLFFLGFAQVWCSVRTPESSHEGLITDPHSPSRFRVIGSLSNSKEFSEHFRCPPGSPMNPPHKCEVW

SEQ ID NO: 27368 - protein, 77 aa, Homo sapiens
  Payload ID: 5396
  Gene Symbol: ECE1
  Gene Name: endothelin converting enzyme 1
  ENSP ID: ENSP00000431856
MDPTVDPCHDFFSYACGGWIKANPVPDGHSRWGTFSNLWEHNQAIIKHLLENSTASVSEAERKAQVYYRACMNETRI

SEQ ID NO: 27369 - protein, 103 aa, Homo sapiens
  Payload ID: 5396
  Gene Symbol: ECE1
  Gene Name: endothelin converting enzyme 1
  ENSP ID: ENSP00000432860
MSTYKRATLDEEDLVDSLSEGDAYPNGLQVNFHSPRSGQRCWAARTQVEKRLVVLVVLLAAGLVACLAALGIQYQTRSPSVCLSEACVSVTSSILSSMDPTVD

SEQ ID NO: 27370 - protein, 134 aa, Homo sapiens
  Payload ID: 5396
  Gene Symbol: ECE1
  Gene Name: endothelin converting enzyme 1
  ENSP ID: ENSP00000436633
MEQMSTYKRATLDEEDLVDSLSEGDAYPNGLQVNFHSPRSGQRCWAARTQVEKRLVVLVVLLAAGLVACLAALGIQYQTRSPSVCLSEACVSVTSSILSSMDPTVDPCHDFFSYACGGWIKANPVPDGHSRWGT

SEQ ID NO: 27371 - protein, 255 aa, Homo sapiens
  Payload ID: 5397
  Gene Symbol: ECE2
  Gene Name: endothelin converting enzyme 2
  Uniprot ID: O60344
  ENSP ID: ENSP00000314295
MASPGAGRAPPELPERNCGYREVEYWDQRYQGAADSAPYDWFGDFSSFRALLEPELRPEDRILVLGCGNSALSYELFLGGFPNVTSVDYSSVVVAAMQARHAHVPQLRWETMDVRKLDFPSASFDVVLEKGTLDALLAGERDPWTVSSEGVHTVDQVLSEVSRVLVPGGRFISMTSAAPHFRTRHYAQAYYGWSLRHATYGSGFHFHLYLMHKGGKLSVAQLALGAQILSPPRPPTSPCFLQDSDHEDFLSAIQL

SEQ ID NO: 27372 - protein, 811 aa, Homo sapiens
  Payload ID: 5397
  Gene Symbol: ECE2
  Gene Name: endothelin converting enzyme 2
  Uniprot ID: O60344
  ENSP ID: ENSP00000350066
MNVALQELGAGSNMVEYKRATLRDEDAPETPVEGGASPDAMEVGKGASPFSPGPSPGMTPGTPRSSGLFWRVTCPHLRSISGLCSRTMVGFQKGTRQLLGSRTQLELVLAGASLLLAALLLGCLVALGVQYHRDPSHSTCLTEACIRVAGKILESLDRGVSPCEDFYQFSCGGWIRRNPLPDGRSRWNTFNSLWDQNQAILKHLLENTTFNSSSEAEQKTQRFYLSCLQVERIEELGAQPLRDLIEKIGGWNITGPWDQDNFMEVLKAVAGTYRATPFFTVYISADSKSSNSNVIQVDQSGLFLPSRDYYLNRTANEKVLTAYLDYMEELGMLLGGRPTSTREQMQQVLELEIQLANITVPQDQRRDEEKIYHKMSISELQALAPSMDWLEFLSFLLSPLELSDSEPVVVYGMDYLQQVSELINRTEPSILNNYLIWNLVQKTTSSLDRRFESAQEKLLETLYGTKKSCVPRWQTCISNTDDALGFALGSLFVKATFDRQSKEIAEGMISEIRTAFEEALGQLVWMDEKTRQAAKEKADAIYDMIGFPDFILEPKELDDVYDGYEISEDSFFQNMLNLYNFSAKVMADQLRKPPSRDQWSMTPQTVNAYYLPTKNEIVFPAGILQAPFYARNHPKALNFGGIGVVMGHELTHAFDDQGREYDKEGNLRPWWQNESLAAFRNHTACMEEQYNQYQVNGERLNGRQTLGENIADNGGLKAAYNAYKAWLRKHGEEQQLPAVGLTNHQLFFVGFAQVWCSVRTPESSHEGLVTDPHSPARFRVLGTLSNSRDFLRHFGCPVGSPMNPGQLCEVW

SEQ ID NO: 27373 - protein, 736 aa, Homo sapiens
  Payload ID: 5397
  Gene Symbol: ECE2
  Gene Name: endothelin converting enzyme 2
  Uniprot ID: O60344
  ENSP ID: ENSP00000352052
MNVALQELGAGSNVGFQKGTRQLLGSRTQLELVLAGASLLLAALLLGCLVALGVQYHRDPSHSTCLTEACIRVAGKILESLDRGVSPCEDFYQFSCGGWIRRNPLPDGRSRWNTFNSLWDQNQAILKHLLENTTFNSSSEAEQKTQRFYLSCLQVERIEELGAQPLRDLIEKIGGWNITGPWDQDNFMEVLKAVAGTYRATPFFTVYISADSKSSNSNVIQVDQSGLFLPSRDYYLNRTANEKVLTAYLDYMEELGMLLGGRPTSTREQMQQVLELEIQLANITVPQDQRRDEEKIYHKMSISELQALAPSMDWLEFLSFLLSPLELSDSEPVVVYGMDYLQQVSELINRTEPSILNNYLIWNLVQKTTSSLDRRFESAQEKLLETLYGTKKSCVPRWQTCISNTDDALGFALGSLFVKATFDRQSKEIAEGMISEIRTAFEEALGQLVWMDEKTRQAAKEKADAIYDMIGFPDFILEPKELDDVYDGYEISEDSFFQNMLNLYNFSAKVMADQLRKPPSRDQWSMTPQTVNAYYLPTKNEIVFPAGILQAPFYARNHPKALNFGGIGVVMGHELTHAFDDQGREYDKEGNLRPWWQNESLAAFRNHTACMEEQYNQYQVNGERLNGRQTLGENIADNGGLKAAYNAYKAWLRKHGEEQQLPAVGLTNHQLFFVGFAQVWCSVRTPESSHEGLVTDPHSPARFRVLGTLSNSRDFLRHFGCPVGSPMNPGQLCEVW

SEQ ID NO: 27374 - protein, 883 aa, Homo sapiens
  Payload ID: 5397
  Gene Symbol: ECE2
  Gene Name: endothelin converting enzyme 2
  Uniprot ID: O60344
  ENSP ID: ENSP00000384223
MASPGAGRAPPELPERNCGYREVEYWDQRYQGAADSAPYDWFGDFSSFRALLEPELRPEDRILVLGCGNSALSYELFLGGFPNVTSVDYSSVVVAAMQARHAHVPQLRWETMDVRKLDFPSASFDVVLEKGTLDALLAGERDPWTVSSEGVHTVDQVLSEVGFQKGTRQLLGSRTQLELVLAGASLLLAALLLGCLVALGVQYHRDPSHSTCLTEACIRVAGKILESLDRGVSPCEDFYQFSCGGWIRRNPLPDGRSRWNTFNSLWDQNQAILKHLLENTTFNSSSEAEQKTQRFYLSCLQVERIEELGAQPLRDLIEKIGGWNITGPWDQDNFMEVLKAVAGTYRATPFFTVYISADSKSSNSNVIQVDQSGLFLPSRDYYLNRTANEKVLTAYLDYMEELGMLLGGRPTSTREQMQQVLELEIQLANITVPQDQRRDEEKIYHKMSISELQALAPSMDWLEFLSFLLSPLELSDSEPVVVYGMDYLQQVSELINRTEPSILNNYLIWNLVQKTTSSLDRRFESAQEKLLETLYGTKKSCVPRWQTCISNTDDALGFALGSLFVKATFDRQSKEIAEGMISEIRTAFEEALGQLVWMDEKTRQAAKEKADAIYDMIGFPDFILEPKELDDVYDGYEISEDSFFQNMLNLYNFSAKVMADQLRKPPSRDQWSMTPQTVNAYYLPTKNEIVFPAGILQAPFYARNHPKALNFGGIGVVMGHELTHAFDDQGREYDKEGNLRPWWQNESLAAFRNHTACMEEQYNQYQVNGERLNGRQTLGENIADNGGLKAAYNAYKAWLRKHGEEQQLPAVGLTNHQLFFVGFAQVWCSVRTPESSHEGLVTDPHSPARFRVLGTLSNSRDFLRHFGCPVGSPMNPGQLCEVW

SEQ ID NO: 27375 - protein, 765 aa, Homo sapiens
  Payload ID: 5397
  Gene Symbol: ECE2
  Gene Name: endothelin converting enzyme 2
  Uniprot ID: O60344
  ENSP ID: ENSP00000385846
MNVALQELGAGSNMVEYKRATLRDEDAPETPVEGGASPDAMEVGFQKGTRQLLGSRTQLELVLAGASLLLAALLLGCLVALGVQYHRDPSHSTCLTEACIRVAGKILESLDRGVSPCEDFYQFSCGGWIRRNPLPDGRSRWNTFNSLWDQNQAILKHLLENTTFNSSSEAEQKTQRFYLSCLQVERIEELGAQPLRDLIEKIGGWNITGPWDQDNFMEVLKAVAGTYRATPFFTVYISADSKSSNSNVIQVDQSGLFLPSRDYYLNRTANEKVLTAYLDYMEELGMLLGGRPTSTREQMQQVLELEIQLANITVPQDQRRDEEKIYHKMSISELQALAPSMDWLEFLSFLLSPLELSDSEPVVVYGMDYLQQVSELINRTEPSILNNYLIWNLVQKTTSSLDRRFESAQEKLLETLYGTKKSCVPRWQTCISNTDDALGFALGSLFVKATFDRQSKEIAEGMISEIRTAFEEALGQLVWMDEKTRQAAKEKADAIYDMIGFPDFILEPKELDDVYDGYEISEDSFFQNMLNLYNFSAKVMADQLRKPPSRDQWSMTPQTVNAYYLPTKNEIVFPAGILQAPFYARNHPKALNFGGIGVVMGHELTHAFDDQGREYDKEGNLRPWWQNESLAAFRNHTACMEEQYNQYQVNGERLNGRQTLGENIADNGGLKAAYNAYKAWLRKHGEEQQLPAVGLTNHQLFFVGFAQVWCSVRTPESSHEGLVTDPHSPARFRVLGTLSNSRDFLRHFGCPVGSPMNPGQLCEVW

SEQ ID NO: 27376 - protein, 67 aa, Homo sapiens
  Payload ID: 5397
  Gene Symbol: ECE2
  Gene Name: endothelin converting enzyme 2
  ENSP ID: ENSP00000392467
MNVALQELGAGSNVGFQKGTRQLLGSRTQLELVLAGASLLLAALLLGCLVALGVQYHREFASSRQTD

SEQ ID NO: 27377 - protein, 716 aa, Homo sapiens
  Payload ID: 5397
  Gene Symbol: ECE2
  Gene Name: endothelin converting enzyme 2
  ENSP ID: ENSP00000398444
SPGMTPGTPRSSGLFWRVTCPHLRSISGLCSRTMVGFQKGTRQLLGSRTQLELVLAGASLLLAALLLGCLVALGVQYHRDPSHSTCLTEACIRVAGKILESLDRGVSPCEDFYQFSCGGWIRRNPLPDGRSRWNTFNSLWDQNQAILKHLLENTTFNSSSEAEQKTQRFYLSCLQVERIEELGAQPLRDLIEKIGGWNITGPWDQDNFMEVLKAVAGTYRATPFFTVYISADSKSSNSNVIQVDQSGLFLPSRDYYLNRTANEKVLTAYLDYMEELGMLLGGRPTSTREQMQQVLELEIQLANITVPQDQRRDEEKIYHKMSISELQALAPSMDWLEFLSFLLSPLELSDSEPVVVYGMDYLQQVSELINRTEPSILNNYLIWNLVQKTTSSLDRRFESAQEKLLETLYGTKKSCVPRWQTCISNTDDALGFALGSLFVKATFDRQSKEIAEGMISEIRTAFEEALGQLVWMDEKTRQAAKEKADAIYDMIGFPDFILEPKELDDVYDGYEISEDSFFQNMLNLYNFSAKVMADQLRKPPSRDQWSMTPQTVNAYYLPTKNEIVFPAGILQAPFYARNHPKALNFGGIGVVMGHELTHAFDDQGREYDKEGNLRPWWQNESLAAFRNHTACMEEQYNQYQVNGERLNGRQTLGENIADNGGLKAAYNAYKAWLRKHGEEQQLPAVGLTNHQLFFVGFAQVSPSRKAWGLPLCPAPS

SEQ ID NO: 27378 - protein, 775 aa, Homo sapiens
  Payload ID: 5398
  Gene Symbol: ECEL1
  Gene Name: endothelin converting enzyme-like 1
  Uniprot ID: O95672
  ENSP ID: ENSP00000302051
MEPPYSLTAHYDEFQEVKYVSRCGAGGARGASLPPGFPLGAARSATGARSGLPRWNRREVCLLSGLVFAAGLCAILAAMLALKYLGPVAAGGGACPEGCPERKAFARAARFLAANLDASIDPCQDFYSFACGGWLRRHAIPDDKLTYGTIAAIGEQNEERLRRLLARPGGGPGGAAQRKVRAFFRSCLDMREIERLGPRPMLEVIEDCGGWDLGGAEERPGVAARWDLNRLLYKAQGVYSAAALFSLTVSLDDRNSSRYVIRIDQDGLTLPERTLYLAQDEDSEKILAAYRVFMERVLSLLGADAVEQKAQEILQVEQQLANITVSEHDDLRRDVSSMYNKVTLGQLQKITPHLRWKWLLDQIFQEDFSEEEEVVLLATDYMQQVSQLIRSTPHRVLHNYLVWRVVVVLSEHLSPPFREALHELAQEMEGSDKPQELARVCLGQANRHFGMALGALFVHEHFSAASKAKVQQLVEDIKYILGQRLEELDWMDAETRAAARAKLQYMMVMVGYPDFLLKPDAVDKEYEFEVHEKTYFKNILNSIRFSIQLSVKKIRQEVDKSTWLLPPQALNAYYLPNKNQMVFPAGILQPTLYDPDFPQSLNYGGIGTIIGHELTHGYDDWGGQYDRSGNLLHWWTEASYSRFLRKAECIVRLYDNFTVYNQRVNGKHTLGENIADMGGLKLAYHAYQKWVREHGPEHPLPRLKYTHDQLFFIAFAQNWCIKRRSQSIYLQVLTDKHAPEHYRVLGSVSQFEEFGRAFHCPKDSPMNPAHKCSVW

SEQ ID NO: 27379 - protein, 773 aa, Homo sapiens
  Payload ID: 5398
  Gene Symbol: ECEL1
  Gene Name: endothelin converting enzyme-like 1
  Uniprot ID: O95672
  ENSP ID: ENSP00000386333
MEPPYSLTAHYDEFQEVKYVSRCGAGGARGASLPPGFPLGAARSATGARSGLPRWNRREVCLLSGLVFAAGLCAILAAMLALKYLGPVAAGGGACPEGCPERKAFARAARFLAANLDASIDPCQDFYSFACGGWLRRHAIPDDKLTYGTIAAIGEQNEERLRRLLARPGGGPGGAAQRKVRAFFRSCLDMREIERLGPRPMLEVIEDCGGWDLGGAEERPGVAARWDLNRLLYKAQGVYSAAALFSLTVSLDDRNSSRYVIRIDQDGLTLPERTLYLAQDEDSEKILAAYRVFMERVLSLLGADAVEQKAQEILQVEQQLANITVSEHDDLRRDVSSMYNKVTLGQLQKITPHLRWKWLLDQIFQEDFSEEEEVVLLATDYMQQVSQLIRSTPHRVLHNYLVWRVVVVLSEHLSPPFREALHELAQEMEGSDKPQELARVCLGQANRHFGMALGALFVHEHFSAASKAKVQQLVEDIKYILGQRLEELDWMDAETRAAARAKLQYMMVMVGYPDFLLKPDAVDKEYEFEVHEKTYFKNILNSIRFSIQLSVKKIRQEVDKWLLPPQALNAYYLPNKNQMVFPAGILQPTLYDPDFPQSLNYGGIGTIIGHELTHGYDDWGGQYDRSGNLLHWWTEASYSRFLRKAECIVRLYDNFTVYNQRVNGKHTLGENIADMGGLKLAYHAYQKWVREHGPEHPLPRLKYTHDQLFFIAFAQNWCIKRRSQSIYLQVLTDKHAPEHYRVLGSVSQFEEFGRAFHCPKDSPMNPAHKCSVW

SEQ ID NO: 27380 - protein, 168 aa, Homo sapiens
  Payload ID: 5398
  Gene Symbol: ECEL1
  Gene Name: endothelin converting enzyme-like 1
  ENSP ID: ENSP00000412683
GILQPTLYDPDFPQSLNYGGIGTIIGHELTHGYDDWGGQYDRSGNLLHWWTEASYSRFLRKAECIVRLYDNFTVYNQRAYQKWVREHGPEHPLPRLKYTHDQLFFIAFAQNWCIKRRSQSIYLQVLTDKHAPEHYRVLGSVSQFEEFGRAFHCPKDSPMNPAHKCSVW

SEQ ID NO: 27381 - protein, 427 aa, Homo sapiens
  Payload ID: 5399
  Gene Symbol: EDNRA
  Gene Name: endothelin receptor type A
  Uniprot ID: P25101
  ENSP ID: ENSP00000315011
METLCLRASFWLALVGCVISDNPERYSTNLSNHVDDFTTFRGTELSFLVTTHQPTNLVLPSNGSMHNYCPQQTKITSAFKYINTVISCTIFIVGMVGNATLLRIIYQNKCMRNGPNALIASLALGDLIYVVIDLPINVFKLLAGRWPFDHNDFGVFLCKLFPFLQKSSVGITVLNLCALSVDRYRAVASWSRVQGIGIPLVTAIEIVSIWILSFILAIPEAIGFVMVPFEYRGEQHKTCMLNATSKFMEFYQDVKDWWLFGFYFCMPLVCTAIFYTLMTCEMLNRRNGSLRIALSEHLKQRREVAKTVFCLVVIFALCWFPLHLSRILKKTVYNEMDKNRCELLSFLLLMDYIGINLATMNSCINPIALYFVSKKFKNCFQSCLCCCCYQSKSLMTSVPMNGTSIQWKNHDQNNHNTDRSSHKDSMN

SEQ ID NO: 27382 - protein, 318 aa, Homo sapiens
  Payload ID: 5399
  Gene Symbol: EDNRA
  Gene Name: endothelin receptor type A
  Uniprot ID: P25101
  ENSP ID: ENSP00000351359
METLCLRASFWLALVGCVISDNPERYSTNLSNHVDDFTTFRGTELSFLVTTHQPTNLVLPSNGSMHNYCPQQTKITSAFKYINTVISCTIFIVGMVGNATLLRIIYQNKCMRNGPNALIASLALGDLIYVVIDLPINVFKFYQDVKDWWLFGFYFCMPLVCTAIFYTLMTCEMLNRRNGSLRIALSEHLKQRREVAKTVFCLVVIFALCWFPLHLSRILKKTVYNEMDKNRCELLSFLLLMDYIGINLATMNSCINPIALYFVSKKFKNCFQSCLCCCCYQSKSLMTSVPMNGTSIQWKNHDQNNHNTDRSSHKDSMN

SEQ ID NO: 27383 - protein, 318 aa, Homo sapiens; identical to SEQ ID NO: 27382
  Payload ID: 5399
  Gene Symbol: EDNRA
  Gene Name: endothelin receptor type A
  Uniprot ID: P25101
  ENSP ID: ENSP00000425281

SEQ ID NO: 27384 - protein, 202 aa, Homo sapiens
  Payload ID: 5399
  Gene Symbol: EDNRA
  Gene Name: endothelin receptor type A
  Uniprot ID: P25101
  ENSP ID: ENSP00000425354
MVPFEYRGEQHKTCMLNATSKFMEFYQDVKDWWLFGFYFCMPLVCTAIFYTLMTCEMLNRRNGSLRIALSEHLKQRREVAKTVFCLVVIFALCWFPLHLSRILKKTVYNEMDKNRCELLSFLLLMDYIGINLATMNSCINPIALYFVSKKFKNCFQSCLCCCCYQSKSLMTSVPMNGTSIQWKNHDQNNHNTDRSSHKDSMN

SEQ ID NO: 27385 - protein, 187 aa, Homo sapiens
  Payload ID: 5399
  Gene Symbol: EDNRA
  Gene Name: endothelin receptor type A
  Uniprot ID: P25101
  ENSP ID: ENSP00000427259
METLCLRASFWLALVGCVISDNPERYSTNLSNHVDDFTTFRGTELSFLVTTHQPTNLVLPSNGSMHNYCPQQTKITSAFKYINTVISCTIFIVGMVGNATLLRIIYQNKCMRNGPNALIASLALGDLIYVVIDLPINVFKLLAGRWPFDHNDFGVFLCKLFPFLQKSSVGITVLNLCALSVDSSTKM

SEQ ID NO: 27386 - protein, 442 aa, Homo sapiens
  Payload ID: 5400
  Gene Symbol: EDNRB
  Gene Name: endothelin receptor type B
  Uniprot ID: P24530
  ENSP ID: ENSP00000335311
MQPPPSLCGRALVALVLACGLSRIWGEERGFPPDRATPLLQTAEIMTPPTKTLWPKGSNASLARSLAPAEVPKGDRTAGSPPRTISPPPCQGPIEIKETFKYINTVVSCLVFVLGIIGNSTLLRIIYKNKCMRNGPNILIASLALGDLLHIVIDIPINVYKLLAEDWPFGAEMCKLVPFIQKASVGITVLSLCALSIDRYRAVASWSRIKGIGVPKWTAVEIVLIWVVSVVLAVPEAIGFDIITMDYKGSYLRICLLHPVQKTAFMQFYKTAKDWWLFSFYFCLPLAITAFFYTLMTCEMLRKKSGMQIALNDHLKQRREVAKTVFCLVLVFALCWLPLHLSRILKLTLYNQNDPNRCELLSFLLVLDYIGINMASLNSCINPIALYLVSKRFKNCFKSCLCCWCQSFEEKQSLEEKQSCLKFKANDHGYDNFRSSNKYSSS

SEQ ID NO: 27387 - protein, 532 aa, Homo sapiens
  Payload ID: 5400
  Gene Symbol: EDNRB
  Gene Name: endothelin receptor type B
  Uniprot ID: P24530
  ENSP ID: ENSP00000366416
MNKSTCLMAAETPSKRWRLHCLAFSQRFVRAGPACSSREACSSPRAGWNPAGFRLPGRWSPFVALHLVCQIREALKLRSGHRTPSGAGSSMQPPPSLCGRALVALVLACGLSRIWGEERGFPPDRATPLLQTAEIMTPPTKTLWPKGSNASLARSLAPAEVPKGDRTAGSPPRTISPPPCQGPIEIKETFKYINTVVSCLVFVLGIIGNSTLLRIIYKNKCMRNGPNILIASLALGDLLHIVIDIPINVYKLLAEDWPFGAEMCKLVPFIQKASVGITVLSLCALSIDRYRAVASWSRIKGIGVPKWTAVEIVLIWVVSVVLAVPEAIGFDIITMDYKGSYLRICLLHPVQKTAFMQFYKTAKDWWLFSFYFCLPLAITAFFYTLMTCEMLRKKSGMQIALNDHLKQRREVAKTVFCLVLVFALCWLPLHLSRILKLTLYNQNDPNRCELLSFLLVLDYIGINMASLNSCINPIALYLVSKRFKNCFKSCLCCWCQSFEEKQSLEEKQSCLKFKANDHGYDNFRSSNKYSSS

SEQ ID NO: 27388 - protein, 436 aa, Homo sapiens
  Payload ID: 5400
  Gene Symbol: EDNRB
  Gene Name: endothelin receptor type B
  Uniprot ID: P24530
  ENSP ID: ENSP00000486202
MQPPPSLCGRALVALVLACGLSRIWGEERGFPPDRATPLLQTAEIMTPPTKTLWPKGSNASLARSLAPAEVPKGDRTAGSPPRTISPPPCQGPIEIKETFKYINTVVSCLVFVLGIIGNSTLLRIIYKNKCMRNGPNILIASLALGDLLHIVIDIPINVYKLLAEDWPFGAEMCKLVPFIQKASVGITVLSLCALSIDRYRAVASWSRIKGIGVPKWTAVEIVLIWVVSVVLAVPEAIGFDIITMDYKGSYLRICLLHPVQKTAFMQFYKTAKDWWLFSFYFCLPLAITAFFYTLMTCEMLRKKSGMQIALNDHLKQRREVAKTVFCLVLVFALCWLPLHLSRILKLTLYNQNDPNRCELLSFLLVLDYIGINMASLNSCINPIALYLVSKRFKNCFKAGPHVGNKLVMLFSVNIECDGTVNQNPTMWPERKSNNN

SEQ ID NO: 27389 - protein, 78 aa, Homo sapiens
  Payload ID: 5400
  Gene Symbol: EDNRB
  Gene Name: endothelin receptor type B
  ENSP ID: ENSP00000487082
MQPPPSLCGRALVALVLACGLSRIWGEERGFPPDRATPLLQTAEIMTPPTKTLWPKGSNASLARSLAPAEVPKGDRTA

SEQ ID NO: 27390 - protein, 76 aa, Homo sapiens
  Payload ID: 5401
  Gene Symbol: ENHO
  Gene Name: energy homeostasis associated
  Uniprot ID: Q6UWT2
  ENSP ID: ENSP00000382675
MGAAISQGALIAIVCNGLVGFLLLLLWVILCWACHSRSADVDSLSESSPNSSPGPCPEKAPPPQKPSHEGSYLLQP

SEQ ID NO: 27391 - protein, 392 aa, Homo sapiens
  Payload ID: 5402
  Gene Symbol: EN1
  Gene Name: engrailed homeobox 1
  Uniprot ID: Q05925
  ENSP ID: ENSP00000295206
MEEQQPEPKSQRDSALGAAAAATPGGLSLSLSPGASGSSGSGSDGDSVPVSPQPAPPSPPAAPCLPPLAHHPHLPPHPPPPPPQHLAAPAHQPQPAAQLHRTTNFFIDNILRPDFGCKKEQPPPQLLVAAAARGGAGGGGRVERDRGQTAAGRDPVHPLGTRAPGAASLLCAPDANCGPPDGSQPAAAGAGASKAGNPAAAAAAAAAAVAAAAAAAAAKPSDTGGGGSGGGAGSPGAQGTKYPEHGNPAILLMGSANGGPVVKTDSQQPLVWPAWVYCTRYSDRPSSGPRTRKLKKKKNEKEDKRPRTAFTAEQLQRLKAEFQANRYITEQRRQTLAQELSLNESQIKIWFQNKRAKIKKATGIKNGLALHLMAQGLYNHSTTTVQDKDESE

SEQ ID NO: 27392 - protein, 333 aa, Homo sapiens
  Payload ID: 5403
  Gene Symbol: EN2
  Gene Name: engrailed homeobox 2
  Uniprot ID: P19622
  ENSP ID: ENSP00000297375
MEENDPKPGEAAAAVEGQRQPESSPGGGSGGGGGSSPGEADTGRRRALMLPAVLQAPGNHQHPHRITNFFIDNILRPEFGRRKDAGTCCAGAGGGRGGGAGGEGGASGAEGGGGAGGSEQLLGSGSREPRQNPPCAPGAGGPLPAAGSDSPGDGEGGSKTLSLHGGAKKGGDPGGPLDGSLKARGLGGGDLSVSSDSDSSQAGANLGAQPMLWPAWVYCTRYSDRPSSGPRSRKPKKKNPNKEDKRPRTAFTAEQLQRLKAEFQTNRYLTEQRRQSLAQELSLNESQIKIWFQNKRAKIKKATGNKNTLAVHLMAQGLYNHSTTAKEGKSDSE

SEQ ID NO: 27393 - protein, 727 aa, Homo sapiens
  Payload ID: 5404
  Gene Symbol: ELMO1
  Gene Name: engulfment and cell motility 1
  Uniprot ID: Q92556
  ENSP ID: ENSP00000312185
MPPPADIVKVAIEWPGAYPKLMEIDQKKPLSAIIKEVCDGWSLANHEYFALQHADSSNFYITEKNRNEIKNGTILRLTTSPAQNAQQLHERIQSSSMDAKLEALKDLASLSRDVTFAQEFINLDGISLLTQMVESGTERYQKLQKIMKPCFGDMLSFTLTAFVELMDHGIVSWDTFSVAFIKKIASFVNKSAIDISILQRSLAILESMVLNSHDLYQKVAQEITIGQLIPHLQGSDQEIQTYTIAVINALFLKAPDERRQEMANILAQKQLRSIILTHVIRAQRAINNEMAHQLYVLQVLTFNLLEDRMMTKMDPQDQAQRDIIFELRRIAFDAESEPNNSSGSMEKRKSMYTRDYKKLGFINHVNPAMDFTQTPPGMLALDNMLYFAKHHQDAYIRIVLENSSREDKHECPFGRSSIELTKMLCEILKVGELPSETCNDFHPMFFTHDRSFEEFFCICIQLLNKTWKEMRATSEDFNKVMQVVKEQVMRALTTKPSSLDQFKSKLQNLSYTEILKIRQSERMNQEDFQSRPILELKEKIQPEILELIKQQRLNRLVEGTCFRKLNARRRQDKFWYCRLSPNHKVLHYGDLEESPQGEVPHDSLQDKLPVADIKAVVTGKDCPHMKEKGALKQNKEVLELAFSILYDSNCQLNFIAPDKHEYCIWTDGLNALLGKDMMSDLTRNDLDTLLSMEIKLRLLDLENIQIPDAPPPIPKEPSNYDFVYDCN

SEQ ID NO: 27394 - protein, 247 aa, Homo sapiens
  Payload ID: 5404
  Gene Symbol: ELMO1
  Gene Name: engulfment and cell motility 1
  Uniprot ID: Q92556
  ENSP ID: ENSP00000379355
MQVVKEQVMRALTTKPSSLDQFKSKLQNLSYTEILKIRQSERMNQEDFQSRPILELKEKIQPEILELIKQQRLNRLVEGTCFRKLNARRRQDKFWYCRLSPNHKVLHYGDLEESPQGEVPHDSLQDKLPVADIKAVVTGKDCPHMKEKGALKQNKEVLELAFSILYDSNCQLNFIAPDKHEYCIWTDGLNALLGKDMMSDLTRNDLDTLLSMEIKLRLLDLENIQIPDAPPPIPKEPSNYDFVYDCN

SEQ ID NO: 27395 - protein, 247 aa, Homo sapiens; identical to SEQ ID NO: 27394
  Payload ID: 5404
  Gene Symbol: ELMO1
  Gene Name: engulfment and cell motility 1
  Uniprot ID: Q92556
  ENSP ID: ENSP00000379360

SEQ ID NO: 27396 - protein, 81 aa, Homo sapiens
  Payload ID: 5404
  Gene Symbol: ELMO1
  Gene Name: engulfment and cell motility 1
  ENSP ID: ENSP00000391734
MPPPADIVKVAIEWPGAYPKLMEIDQKKPLSAIIKEVCDGWSLANHEYFALQHADSSNFYITEKNRNEIKNGTILRLTTSP

SEQ ID NO: 27397 - protein, 727 aa, Homo sapiens; identical to SEQ ID NO: 27393
  Payload ID: 5404
  Gene Symbol: ELMO1
  Gene Name: engulfment and cell motility 1
  Uniprot ID: Q92556
  ENSP ID: ENSP00000394458

SEQ ID NO: 27398 - protein, 124 aa, Homo sapiens
  Payload ID: 5404
  Gene Symbol: ELMO1
  Gene Name: engulfment and cell motility 1
  ENSP ID: ENSP00000395933
QEMANILAQKQLRSIILTHVIRAQRAINNEMAHQLYVLQVLTFNLLEDRMMTKMDPQDQAQRDIIFELRRIAFDAESEPNNSSGSMEKRKSMYTRDYKKLGFIVSKLSPVCALPPASPGLTSAT

SEQ ID NO: 27399 - protein, 182 aa, Homo sapiens
  Payload ID: 5404
  Gene Symbol: ELMO1
  Gene Name: engulfment and cell motility 1
  ENSP ID: ENSP00000396465
ANILAQKQLRSIILTHVIRAQRAINNEMAHQLYVLQVLTFNLLEDRMMTKMDPQDQAQRDIIFELRRIAFDAESEPNNSSGSMEKRKSMYTRDYKKLGFINHVNPAMDFTQTPPGMLALDNMLYFAKHHQDAYIRIVLENSSREDKHECPFGRSSIELTKMLCEILKVGELHHLSPEKFTLP

SEQ ID NO: 27400 - protein, 59 aa, Homo sapiens
  Payload ID: 5404
  Gene Symbol: ELMO1
  Gene Name: engulfment and cell motility 1
  ENSP ID: ENSP00000397857
MPPPADIVKVAIEWPGAYPKLMEIDQKKPLSAIIKEVCDGWSLANHEYFALQHADSSNF

SEQ ID NO: 27401 - protein, 167 aa, Homo sapiens
  Payload ID: 5404
  Gene Symbol: ELMO1
  Gene Name: engulfment and cell motility 1
  ENSP ID: ENSP00000406610
MPPPADIVKVAIEWPGAYPKLMEIDQKKPLSAIIKEVCDGWSLANHEYFALQHADSSNFYITEKNRNEIKNGTILRLTTSPAQNAQQLHERIQSSSMDAKLEALKDLASLSRDVTFAQEFINLDGISLLTQMVESGTDFGDMLSFTLTAFVELMDHGIVSWDTFSVA

SEQ ID NO: 27402 - protein, 727 aa, Homo sapiens; identical to SEQ ID NO: 27393
  Payload ID: 5404
  Gene Symbol: ELMO1
  Gene Name: engulfment and cell motility 1
  Uniprot ID: Q92556
  ENSP ID: ENSP00000406952

SEQ ID NO: 27403 - protein, 193 aa, Homo sapiens
  Payload ID: 5404
  Gene Symbol: ELMO1
  Gene Name: engulfment and cell motility 1
  ENSP ID: ENSP00000413108
  MOD_RES (1)..(1): Any amino acid
XQEIQTYTIAVINALFLKAPDERRQVDVESNVDILDCPLTEMANILAQKQLRSIILTHVIRAQRAINNEMAHQLYVLQVLTFNLLEDRMMTKMDPQDQAQRDIIFELRRIAFDAESEPNNSSGSMEKRKSMYTRDYKKLGFINHVNPAMDFTQTPPGMLALDNMLYFAKHHQDAYIRIVLENSSREDKHECPF

SEQ ID NO: 27404 - protein, 149 aa, Homo sapiens
  Payload ID: 5404
  Gene Symbol: ELMO1
  Gene Name: engulfment and cell motility 1
  ENSP ID: ENSP00000416090
MPPPADIVKVAIEWPGAYPKLMEIDQKKPLSAIIKEVCDGWSLANHEYFALQHADSSNFYITEKNRNEIKNGTILRLTTSPAQNAQQLHERIQSSSMDAKLEALKDLASLSRDVTFAQEFINLDGISLLTQMVESGTERYQKLQKIMKP

SEQ ID NO: 27405 - protein, 720 aa, Homo sapiens
  Payload ID: 5405
  Gene Symbol: ELMO2
  Gene Name: engulfment and cell motility 2
  Uniprot ID: Q96JJ3
  ENSP ID: ENSP00000290246
MPPPSDIVKVAIEWPGANAQLLEIDQKRPLASIIKEVCDGWSLPNPEYYTLRYADGPQLYITEQTRSDIKNGTILQLAISPSRAARQLMERTQSSNMETRLDAMKELAKLSADVTFATEFINMDGIIVLTRLVESGTKLLSHYSEMLAFTLTAFLELMDHGIVSWDMVSITFIKQIAGYVSQPMVDVSILQRSLAILESMVLNSQSLYQKIAEEITVGQLISHLQVSNQEIQTYAIALINALFLKAPEDKRQDMANAFAQKHLRSIILNHVIRGNRPIKTEMAHQLYVLQVLTFNLLEERMMTKMDPNDQAQRDIIFELRRIAFDAESDPSNAPGSGTEKRKAMYTKDYKMLGFTNHINPAMDFTQTPPGMLALDNMLYLAKVHQDTYIRIVLENSSREDKHECPFGRSAIELTKMLCEILQVGELPNEGRNDYHPMFFTHDRAFEELFGICIQLLNKTWKEMRATAEDFNKVMQVVREQITRALPSKPNSLDQFKSKLRSLSYSEILRLRQSERMSQDDFQSPPIVELREKIQPEILELIKQQRLNRLCEGSSFRKIGNRRRQERFWYCRLALNHKVLHYGDLDDNPQGEVTFESLQEKIPVADIKAIVTGKDCPHMKEKSALKQNKEVLELAFSILYDPDETLNFIAPNKYEYCIWIDGLSALLGKDMSSELTKSDLDTLLSMEMKLRLLDLENIQIPEAPPPIPKEPSSYDFVYHYG

SEQ ID NO: 27406 - protein, 718 aa, Homo sapiens
  Payload ID: 5405
  Gene Symbol: ELMO2
  Gene Name: engulfment and cell motility 2
  ENSP ID: ENSP00000326172
MPPPSDIVKVAIEWPGANAQLLEIDQKRPLASIIKEVCDGWSLPNPEYYTLRYADGPQLYITEQTRSDIKNGTILQLAISPSRAARQLMERTQSSNMETRLDAMKELAKLSADVTFATEFINMDGIIVLTRLVESGTKLLSHEMLAFTLTAFLELMDHGIVSWDMVSITFIKQIAGYVSQPMVDVSILQRSLAILESMVLNSQSLYQKIAEEITVGQLISHLQVSNQEIQTYAIALINALFLKAPEDKRQDMANAFAQKHLRSIILNHVIRGNRPIKTEMAHQLYVLQVLTFNLLEERMMTKMDPNDQAQRDIIFELRRIAFDAESDPSNAPGSGTEKRKAMYTKDYKMLGFTNHINPAMDFTQTPPGMLALDNMLYLAKVHQDTYIRIVLENSSREDKHECPFGRSAIELTKMLCEILQVGELPNEGRNDYHPMFFTHDRAFEELFGICIQLLNKTWKEMRATAEDFNKVMQVVREQITRALPSKPNSLDQFKSKLRSLSYSEILRLRQSERMSQDDFQSPPIVELREKIQPEILELIKQQRLNRLCEGSSFRKIGNRRRQERFWYCRLALNHKVLHYGDLDDNPQGEVTFESLQEKIPVADIKAIVTGKDCPHMKEKSALKQNKEVLELAFSILYDPDETLNFIAPNKYEYCIWIDGLSALLGKDMSSELTKSDLDTLLSMEMKLRLLDLENIQIPEAPPPIPKEPSSYDFVYHYG

SEQ ID NO: 27407 - protein, 632 aa, Homo sapiens
  Payload ID: 5405
  Gene Symbol: ELMO2
  Gene Name: engulfment and cell motility 2
  Uniprot ID: Q96JJ3
  ENSP ID: ENSP00000361249
MERTQSSNMETRLDAMKELAKLSADVTFATEFINMDGIIVLTRLVESGTKLLSHYSEMLAFTLTAFLELMDHGIVSWDMVSITFIKQIAGYVSQPMVDVSILQRSLAILESMVLNSQSLYQKIAEEITVGQLISHLQVSNQEIQTYAIALINALFLKAPEDKRQDMANAFAQKHLRSIILNHVIRGNRPIKTEMAHQLYVLQVLTFNLLEERMMTKMDPNDQAQRDIIFELRRIAFDAESDPSNAPGSGTEKRKAMYTKDYKMLGFTNHINPAMDFTQTPPGMLALDNMLYLAKVHQDTYIRIVLENSSREDKHECPFGRSAIELTKMLCEILQVGELPNEGRNDYHPMFFTHDRAFEELFGICIQLLNKTWKEMRATAEDFNKVMQVVREQITRALPSKPNSLDQFKSKLRSLSYSEILRLRQSERMSQDDFQSPPIVELREKIQPEILELIKQQRLNRLCEGSSFRKIGNRRRQERFWYCRLALNHKVLHYGDLDDNPQGEVTFESLQEKIPVADIKAIVTGKDCPHMKEKSALKQNKEVLELAFSILYDPDETLNFIAPNKYEYCIWIDGLSALLGKDMSSELTKSDLDTLLSMEMKLRLLDLENIQIPEAPPPIPKEPSSYDFVYHYG

SEQ ID NO: 27408 - protein, 720 aa, Homo sapiens; identical to SEQ ID NO: 27405
  Payload ID: 5405
  Gene Symbol: ELMO2
  Gene Name: engulfment and cell motility 2
  Uniprot ID: Q96JJ3
  ENSP ID: ENSP00000379673

SEQ ID NO: 27409 - protein, 267 aa, Homo sapiens
  Payload ID: 5405
  Gene Symbol: ELMO2
  Gene Name: engulfment and cell motility 2
  ENSP ID: ENSP00000388962
EEITVGQLISHLQVSNQEIQTYAIALINALFLKAPEDKRQDMANAFAQKHLRSIILNHVIRGNRPIKTEMAHQLYVLQVLTFNLLEERMMTKMDPNDQAQRDIIFELRRIAFDAESDPSNAPGSGTEKRKAMYTKDYKMLGFTNHINPAMDFTQTPPGMLALDNMLYLAKVHQDTYIRIVLENSSREDKHECPFGRSAIELTKMLCEILQVGELPNEGRNDYHPMFFTHDRAFEELFGICIQLLNKTWKEMRATAEDFNKVSVSGLL

SEQ ID NO: 27410 - protein, 283 aa, Homo sapiens
  Payload ID: 5405
  Gene Symbol: ELMO2
  Gene Name: engulfment and cell motility 2
  ENSP ID: ENSP00000414329
YHPMFFTHDRAFEELFGICIQLLNKTWKEMRATAEDFNKVMQVVREQITRALPSKPNSLDQFKSKLRSLSYSEILRLRQSERMSQDDFQSPPIVELREKIQPEILELIKQQRLNRLCEGSSFRKIGNRRRQERFWYCRLALNHKVLHYGDLDDNPQGEVTFESLQEKNIKAIVTGKDCPHMKEKSALKQNKEVLELAFSILYDPDETLNFIAPNKYEYCIWIDGLSALLGKDMSSELTKSDLDTLLSMEMKLRLLDLENIQIPEAPPPIPKEPSSYDFVYHYG

SEQ ID NO: 27411 - protein, 338 aa, Homo sapiens
  Payload ID: 5405
  Gene Symbol: ELMO2
  Gene Name: engulfment and cell motility 2
  ENSP ID: ENSP00000416181
MPPPSDIVKVAIEWPGANAQLLEIDQKRPLASIIKEVCDGWSLPNPEYYTLRYADGPQLYITEQTRSDIKNGTILQLAISPSRAARQLMERTQSSNMETRLDAMKELAKLSADVTFATEFINMDGIIVLTRLVESGTKLLSHYSEMLAFTLTAFLELMDHGIVSWDMVSITFIKQIAGYVSQPMVDVSILQRSLAILESMVLNSQSLYQKIAEEITVGQLISHLQVSNQEIQTYAIALINALFLKAPEDKRQDMANAFAQKHLRSIILNHVIRGNRPIKTEMAHQLYVLQVLTFNLLEERMMTKMDPNDQAQRDIIFELRRIAFDAESDPSNAPGSGT

SEQ ID NO: 27412 - protein, 441 aa, Homo sapiens
  Payload ID: 5405
  Gene Symbol: ELMO2
  Gene Name: engulfment and cell motility 2
  ENSP ID: ENSP00000431972
  MOD_RES (1)..(1): Any amino acid
XPIKTEMAHQLYVLQVLTFNLLEERMMTKMDPNDQAQRDIIFELRRIAFDAESDPSNAPGSGTEKRKAMYTKDYKMLGFTNHINPAMDFTQTPPGMLALDNMLYLAKVHQDTYIRIVLENSSREDKHECPFGRSAIELTKMLCEILQVGELPNEGRNDYHPMFFTHDRAFEELFGICIQLLNKTWKEMRATAEDFNKVMQVVREQITRALPSKPNSLDQFKSKLRSLSYSEILRLRQSERMSQDDFQSPPIVELREKIQPEILELIKQQRLNRLCEGSSFRKIGNRRRQERFWYCRLALNHKVLHYGDLDDNPQGEVTFESLQEKIPVADIKAIVTGKDCPHMKEKSALKQNKVSREASLSSWPSDTWRVPLVVVFSRCILGIFPSLFLNVLLRILNIHKNRWNLCIHITQTQQPWPVLPIHLFLSFIALKKVPSITLFHL

SEQ ID NO: 27413 - protein, 756 aa, Homo sapiens
  Payload ID: 5406
  Gene Symbol: ELMO3
  Gene Name: engulfment and cell motility 3
  ENSP ID: ENSP00000354077
MARSSSLGRECGTPRSGLGKGGPPRPQGPQARCTLGRRCTVSGKCRRPRPSWTMAPPRNVVKIAIKMRDAIPQLIQLDQAKPLAAVLKEVCDAWSLTHSERYALQFADGHRRYITENDLEAEQLLGGLQSNSPEGRREALRRLVPLASDMIFAREVISRNGLQILGTIIEDGDDLGEVLALSLRAFSELMEHGVVSWETLSIPFVRKVVCYVNMNLMDASVPPLALGLLESVTLSSPALGQLVKSEVPLDRLLVHLQVMNQQLQTKAMALLTALLQGASPVERKHMLDYLWQRNLRQFIYKNIIHSAAPMGDEMAHHLYVLQALMLGLLEPRMRTPLDPYSQEQREQLQVLRQAAFEVEGESSGAGLSADRRRSLCAREFRKLGFSNSNPAQDLERVPPGLLALDNMLYFSRNAPSAYSRFVLENSSREDKHECPFARGSIQLTVLLCELLRVGEPCSETAQDFSPMFFGQDQSFHELFCVGIQLLNKTWKEMRATQEDFDKVMQVVREQLARTLALKPTSLELFRTKVNALTYGEVLRLRQTERLHQEGTLAPPILELREKLKPELMGLIRQQRLLRLCEGTLFRKISSRRRQDKLWFCCLSPNHKLLQYGDMEEGASPPTLESLPEQLPVADMRALLTGKDCPHVREKGSGKQNKDLYELAFSISYDRGEEEAYLNFIAPSKREFYLWTDGLSALLGSPMGSEQTRLDLEQLLTMETKLRLLELENVPIPERPPPVPPPPTNFNFCYDCSIAEP

SEQ ID NO: 27414 - protein, 773 aa, Homo sapiens
  Payload ID: 5406
  Gene Symbol: ELMO3
  Gene Name: engulfment and cell motility 3
  Uniprot ID: Q96BJ8
  ENSP ID: ENSP00000377566
MARSSSLGRECGTPRSGLGKGGPPRPQGPQARCTLGRRCTVSGKCRRPRPSWTMAPPRNVVKIAIKMRDAIPQLIQLDQAKPLAAVLKEVCDAWSLTHSERYALQFADGHRRYITENNRAEIKNGSILCLSTAPDLEAEQLLGGLQSNSPEGRREALRRLVPLASDMIFAREVISRNGLQILGTIIEDGDDLGEVLALSLRAFSELMEHGVVSWETLSIPFVRKVVCYVNMNLMDASVPPLALGLLESVTLSSPALGQLVKSEVPLDRLLVHLQVMNQQLQTKAMALLTALLQGASPVERKHMLDYLWQRNLRQFIYKNIIHSAAPMGDEMAHHLYVLQALMLGLLEPRMRTPLDPYSQEQREQLQVLRQAAFEVEGESSGAGLSADRRRSLCAREFRKLGFSNSNPAQDLERVPPGLLALDNMLYFSRNAPSAYSRFVLENSSREDKHECPFARGSIQLTVLLCELLRVGEPCSETAQDFSPMFFGQDQSFHELFCVGIQLLNKTWKEMRATQEDFDKVMQVVREQLARTLALKPTSLELFRTKVNALTYGEVLRLRQTERLHQEGTLAPPILELREKLKPELMGLIRQQRLLRLCEGTLFRKISSRRRQDKLWFCCLSPNHKLLQYGDMEEGASPPTLESLPEQLPVADMRALLTGKDCPHVREKGSGKQNKDLYELAFSISYDRGEEEAYLNFIAPSKREFYLWTDGLSALLGSPMGSEQTRLDLEQLLTMETKLRLLELENVPIPERPPPVPPPPTNFNFCYDCSIAEP

SEQ ID NO: 27415 - protein, 607 aa, Homo sapiens
  Payload ID: 5406
  Gene Symbol: ELMO3
  Gene Name: engulfment and cell motility 3
  Uniprot ID: Q96BJ8
  ENSP ID: ENSP00000458539
MIFAREVISRNGLQILGTIIEDGDDLGEVLALSLRAFSELMEHGVVSWETLSIPFVRKVVCYVNMNLMDASVPPLALGLLESVTLSSPALGQLVKSEVPLDRLLVHLQVMNQQLQTKAMALLTALLQGASPVERKHMLDYLWQRNLRQFIYKNIIHSAAPMGDEMAHHLYVLQALMLGLLEPRMRTPLDPYSQEQREQLQVLRQAAFEVEGESSGAGLSADRRRSLCAREFRKLGFSNSNPAQDLERVPPGLLALDNMLYFSRNAPSAYSRFVLENSSREDKHECPFARGSIQLTVLLCELLRVGEPCSETAQDFSPMFFGQDQSFHELFCVGIQLLNKTWKEMRATQEDFDKVMQVVREQLARTLALKPTSLELFRTKVNALTYGEVLRLRQTERLHQEGTLAPPILELREKLKPELMGLIRQQRLLRLCEGTLFRKISSRRRQDKLWFCCLSPNHKLLQYGDMEEGASPPTLESLPEQLPVADMRALLTGKDCPHVREKGSGKQNKDLYELAFSISYDRGEEEAYLNFIAPSKREFYLWTDGLSALLGSPMGSEQTRLDLEQLLTMETKLRLLELENVPIPERPPPVPPPPTNFNFCYDCSIAEP

SEQ ID NO: 27416 - protein, 95 aa, Homo sapiens
  Payload ID: 5406
  Gene Symbol: ELMO3
  Gene Name: engulfment and cell motility 3
  ENSP ID: ENSP00000461166
MARSSSLGRECGTPRSGLGKGGPPRPQGPQARCTLGRRCTVSGKCRRPRPSWTMAPPRNVVKIAIKMRDAIPQLIQLDQAKPLAAVLKEVEPDAL

SEQ ID NO: 27417 - protein, 508 aa, Homo sapiens
  Payload ID: 5407
  Gene Symbol: EDC3
  Gene Name: enhancer of mRNA decapping 3
  Uniprot ID: Q96F86
  ENSP ID: ENSP00000320503
MATDWLGSIVSINCGDSLGVYQGRVSAVDQVSQTISLTRPFHNGVKCLVPEVTFRAGDITELKILEIPGPGDNQHFGDLHQTELGPSGAGCQVGINQNGTGKFVKKPASSSSAPQNIPKRTDVKSQDVAVSPQQQQCSKSYVDRHMESLSQSKSFRRRHNSWSSSSRHPNQATPKKSGLKNGQMKNKDDECFGDDIEEIPDTDFDFEGNLALFDKAAVFEEIDTYERRSGTRSRGIPNERPTRYRHDENILESEPIVYRRIIVPHNVSKEFCTDSGLVVPSISYELHKKLLSVAEKHGLTLERRLEMTGVCASQMALTLLGGPNRLNPKNVHQRPTVALLCGPHVKGAQGISCGRHLANHDVQVILFLPNFVKMLESITNELSLFSKTQGQQVSSLKDLPTSPVDLVINCLDCPENVFLRDQPWYKAAVAWANQNRAPVLSIDPPVHEVEQGIDAKWSLALGLPLPLGEHAGRIYLCDIGIPQQVFQEVGINYHSPFGCKFVIPLHSA

SEQ ID NO: 27418 - protein, 508 aa, Homo sapiens; identical to SEQ ID NO: 27417
  Payload ID: 5407
  Gene Symbol: EDC3
  Gene Name: enhancer of mRNA decapping 3
  Uniprot ID: Q96F86
  ENSP ID: ENSP00000401343

SEQ ID NO: 27419 - protein, 92 aa, Homo sapiens
  Payload ID: 5407
  Gene Symbol: EDC3
  Gene Name: enhancer of mRNA decapping 3
  ENSP ID: ENSP00000454317
MATDWLGSIVSINCGDSLGVYQGRVSAVDQVSQTISLTRPFHNGVKCLVPEVTFRAGDITELKILEIPGPGDNQHFGDLHQTELGPSGAGCQ

SEQ ID NO: 27420 - protein, 57 aa, Homo sapiens
  Payload ID: 5407
  Gene Symbol: EDC3
  Gene Name: enhancer of mRNA decapping 3
  ENSP ID: ENSP00000454885
MATDWLGSIVSINCGDSLGVYQGRVSAVDQVSQTISLTRPFHNGVKCLVPEVTFRVI

SEQ ID NO: 27421 - protein, 213 aa, Homo sapiens
  Payload ID: 5407
  Gene Symbol: EDC3
  Gene Name: enhancer of mRNA decapping 3
  ENSP ID: ENSP00000455393
  MOD_RES (1)..(1): Any amino acid
XEIDTYERRSGTRSRGIPNERPTRYRHDENILESEPIVYRRIIVPHNVSKEFCTDSGLVVPSISYELHKKLLSVAEKHGLTLERRLEMTGVCASQMALTLLGGPNRLNPKNVHQRPTVALLCGPHVKGAQGISCGRHLANHDVQVILFLPNFVKMLESITNELSLFSKTQGQQVSSLKGEHLGRAGLKASSLLSSLMVSSCHPVATGGKALRV

SEQ ID NO: 27422 - protein, 253 aa, Homo sapiens
  Payload ID: 5407
  Gene Symbol: EDC3
  Gene Name: enhancer of mRNA decapping 3
  ENSP ID: ENSP00000455503
MATDWLGSIVSINCGDSLGVYQGRVSAVDQVSQTISLTRPFHNGVKCLVPEVTFRAGDITELKILEIPGPGDNQHFGDLHQTELGPSGAGCQVGINQNGTGKFVKKPASSSSAPQNIPKRTDVKSQDVAVSPQQQQCSKSYVDRHMESLSQSKSFRRRHNSWSSSSRHPNQATPKKSGLKNGQMKNKDDECFGDDIEEIPDTDFDFEGNLALFDKAAVFEEIDTYERRSGTRSRGIPNERPTRYRHDENILES

SEQ ID NO: 27423 - protein, 508 aa, Homo sapiens; identical to SEQ ID NO: 27417
  Payload ID: 5407
  Gene Symbol: EDC3
  Gene Name: enhancer of mRNA decapping 3
  Uniprot ID: Q96F86
  ENSP ID: ENSP00000455580

SEQ ID NO: 27424 - protein, 177 aa, Homo sapiens
  Payload ID: 5407
  Gene Symbol: EDC3
  Gene Name: enhancer of mRNA decapping 3
  ENSP ID: ENSP00000455589
MATDWLGSIVSINCGDSLGVYQGRVSAVDQVSQTISLTRPFHNGVKCLVPEVTFRAGDITELKILEIPGPGDNQHFGDLHQTELGPSGAGCQVGINQNGTGKFVKKPASSSSAPQNIPKRTDVKSQDVAVSPQQQQCSKSYVDRHMESLSQSKSFRRRHNSWSSSSRHPNQATPKKS

SEQ ID NO: 27425 - protein, 31 aa, Homo sapiens
  Payload ID: 5407
  Gene Symbol: EDC3
  Gene Name: enhancer of mRNA decapping 3
  ENSP ID: ENSP00000455682
MATDWLGSIVSINCGDSLGVYQGRVSAVDQV

SEQ ID NO: 27426 - protein, 123 aa, Homo sapiens
  Payload ID: 5407
  Gene Symbol: EDC3
  Gene Name: enhancer of mRNA decapping 3
  ENSP ID: ENSP00000455870
MATDWLGSIVSINCGDSLGVYQGRVSAVDQVSQTISLTRPFHNGVKCLVPEVTFRAGDITELKILEIPGPGDNQHFGDLHQTELGPSGAGCQVGINQNGTGKFVKKPASSSSAPQNIPKRTDV

SEQ ID NO: 27427 - protein, 163 aa, Homo sapiens
  Payload ID: 5407
  Gene Symbol: EDC3
  Gene Name: enhancer of mRNA decapping 3
  ENSP ID: ENSP00000456805
MKNKDDECFGDDIEEIPDTDFDFEGNLALFDKAAVFEEIDTYERRSGTRSRGIPNERPTRYRHDENILESEPIVYRRIIVPHNVSKEFCTDSGLVVPSISYELHKKLLSVAEKHGLTLERRLEMTGVCASQMALTLLGGPNRLNPKNVHQRPTVALLCGPHVK

SEQ ID NO: 27428 - protein, 68 aa, Homo sapiens
  Payload ID: 5407
  Gene Symbol: EDC3
  Gene Name: enhancer of mRNA decapping 3
  ENSP ID: ENSP00000457128
PQNIPKRTDVKSQDVAVSPQQQQCSKSYVDRHMESLSQSKSFRRRHNSYSGLVVPSISYELHKKLLSV

SEQ ID NO: 27429 - protein, 54 aa, Homo sapiens
  Payload ID: 5407
  Gene Symbol: EDC3
  Gene Name: enhancer of mRNA decapping 3
  ENSP ID: ENSP00000457156
MATDWLGSIVSINCGDSLGVYQGRVSAVDQVSQTISLTRPFHNGVKCLVPEVTF

SEQ ID NO: 27430 - protein, 101 aa, Homo sapiens
  Payload ID: 5407
  Gene Symbol: EDC3
  Gene Name: enhancer of mRNA decapping 3
  ENSP ID: ENSP00000457170
MATDWLGSIVSINCGDSLGVYQGRVSAVDQVSQTISLTRPFHNGVKCLVPEVTFRAGDITELKILEIPGPGDNQHFGDLHQTELGPSGAGCQVGINQNGTG

SEQ ID NO: 27431 - protein, 131 aa, Homo sapiens
  Payload ID: 5407
  Gene Symbol: EDC3
  Gene Name: enhancer of mRNA decapping 3
  ENSP ID: ENSP00000457523
MATDWLGSIVSINCGDSLGVYQGRVSAVDQVSQTISLTRPFHNGVKCLVPEVTFRAGDITELKILEIPGPGDNQHFGDLHQTELGPSGAGCQVGINQNGTGKFVKKPASSSSAPQNIPKRTDVKSQDVAVS

SEQ ID NO: 27432 - protein, 1401 aa, Homo sapiens
  Payload ID: 5408
  Gene Symbol: EDC4
  Gene Name: enhancer of mRNA decapping 4
  Uniprot ID: Q6P2E9
  ENSP ID: ENSP00000351811
MASCASIDIEDATQHLRDILKLDRPAGGPSAESPRPSSAYNGDLNGLLVPDPLCSGDSTSANKTGLRTMPPINLQEKQVICLSGDDSSTCIGILAKEVEIVASSDSSISSKARGSNKVKIQPVAKYDWEQKYYYGNLIAVSNSFLAYAIRAANNGSAMVRVISVSTSERTLLKGFTGSVADLAFAHLNSPQLACLDEAGNLFVWRLALVNGKIQEEILVHIRQPEGTPLNHFRRIIWCPFIPEESEDCCEESSPTVALLHEDRAEVWDLDMLRSSHSTWPVDVSQIKQGFIVVKGHSTCLSEGALSPDGTVLATASHDGYVKFWQIYIEGQDEPRCLHEWKPHDGRPLSCLLFCDNHKKQDPDVPFWRFLITGADQNRELKMWCTVSWTCLQTIRFSPDIFSSVSVPPSLKVCLDLSAEYLILSDVQRKVLYVMELLQNQEEGHACFSSISEFLLTHPVLSFGIQVVSRCRLRHTEVLPAEEENDSLGADGTHGAGAMESAAGVLIKLFCVHTKALQDVQIRFQPQLNPDVVAPLPTHTAHEDFTFGESRPELGSEGLGSAAHGSQPDLRRIVELPAPADFLSLSSETKPKLMTPDAFMTPSASLQQITASPSSSSSGSSSSSSSSSSSLTAVSAMSSTSAVDPSLTRPPEELTLSPKLQLDGSLTMSSSGSLQASPRGLLPGLLPAPADKLTPKGPGQVPTATSALSLELQEVEPLGLPQASPSRTRSPDVISSASTALSQDIPEIASEALSRGFGSSAPEGLEPDSMASAASALHLLSPRPRPGPELGPQLGLDGGPGDGDRHNTPSLLEAALTQEASTPDSQVWPTAPDITRETCSTLAESPRNGLQEKHKSLAFHRPPYHLLQQRDSQDASAEQSDHDDEVASLASASGGFGTKVPAPRLPAKDWKTKGSPRTSPKLKRKSKKDDGDAAMGSRLTEHQVAEPPEDWPALIWQQQRELAELRHSQEELLQRLCTQLEGLQSTVTGHVERALETRHEQEQRRLERALAEGQQRGGQLQEQLTQQLSQALSSAVAGRLERSIRDEIKKTVPPCVSRSLEPMAGQLSNSVATKLTAVEGSMKENISKLLKSKNLTDAIARAAADTLQGPMQAAYREAFQSVVLPAFEKSCQAMFQQINDSFRLGTQEYLQQLESHMKSRKAREQEAREPVLAQLRGLVSTLQSATEQMAATVAGSVRAEVQHQLHVAVGSLQESILAQVQRIVKGEVSVALKEQQAAVTSSIMQAMRSAAGTPVPSAHLDCQAQQAHILQLLQQGHLNQAFQQALTAADLNLVLYVCETVDPAQVFGQPPCPLSQPVLLSLIQQLASDLGTRTDLKLSYLEEAVMHLDHSDPITRDHMGSVMAQVRQKLFQFLQAEPHNSLGKAARRLSLMLHGLVTPSLP

SEQ ID NO: 27433 - protein, 154 aa, Homo sapiens
  Payload ID: 5408
  Gene Symbol: EDC4
  Gene Name: enhancer of mRNA decapping 4
  ENSP ID: ENSP00000458357
LPTGKPSRVWCCRPLRRAARPCSSKSMIASGWGHRNALTAADLNLVLYVCETVDPAQVFGQPPCPLSQPVLLSLIQQLASDLGTRTDLKLSYLEEAVMHLDHSDPITRDHMGSVMAQVRQKLFQFLQAEPHNSLGKAARRLSLMLHGLVTPSLP

SEQ ID NO: 27434 - protein, 135 aa, Homo sapiens
  Payload ID: 5408
  Gene Symbol: EDC4
  Gene Name: enhancer of mRNA decapping 4
  ENSP ID: ENSP00000459624
  MOD_RES (1)..(1): Any amino acid
XRAAADTLQGPMQAAYREAFQSVVLPAFEKSCQAMFQQINDSFRLGTQEYLQQLESHMKSRKAREQEAREPVLAQLRGLVSTLQSATEQMAATVAGSVRAEVQHQLHVAEPHNSLGKAARRLSLMLHGLVTPSLP

SEQ ID NO: 27435 - protein, 176 aa, Homo sapiens
  Payload ID: 5408
  Gene Symbol: EDC4
  Gene Name: enhancer of mRNA decapping 4
  ENSP ID: ENSP00000460563
QSATEQMAATVAGSVRAEVQHQLHVAVGSLQESILAQVQRIVKGEAQQAHILQLLQQGHLNQAFQQALTAADLNLVLYVCETVDPAQVFGQPPCPLSQPVLLSLIQQLASDLGTRTDLKLSYLEEAVMHLDHSDPITRDHMGSVMAQVRQKLFQFLQAEPHNSLGKAARRLSLMLH

SEQ ID NO: 27436 - protein, 836 aa, Homo sapiens
  Payload ID: 5409
  Gene Symbol: EPC1
  Gene Name: enhancer of polycomb homolog 1 (Drosophila)
  Uniprot ID: Q9H2F5
  ENSP ID: ENSP00000263062
MSKLSFRARALDASKPLPVFRCEDLPDLHEYASINRAVPQMPTGMEKEEESEHHLQRAISAQQVYGEKRDNMVIPVPEAESNIAYYESIYPGEFKMPKQLIHIQPFSLDAEQPDYDLDSEDEVFVNKLKKKMDICPLQFEEMIDRLEKGSGQQPVSLQEAKLLLKEDDELIREVYEYWIKKRKNCRGPSLIPSVKQEKRDGSSTNDPYVAFRRRTEKMQTRKNRKNDEASYEKMLKLRRDLSRAVTILEMIKRREKSKRELLHLTLEIMEKRYNLGDYNGEIMSEVMAQRQPMKPTYAIPIIPITNSSQFKHQEAMDVKEFKVNKQDKADLIRPKRKYEKKPKVLPSSAAATPQQTSPAALPVFNAKDLNQYDFPSSDEEPLSQVLSGSSEAEEDNDPDGPFAFRRKAGCQYYAPHLDQTGNWPWTSPKDGGLGDVRYRYCLTTLTVPQRCIGFARRRVGRGGRVLLDRAHSDYDSVFHHLDLEMLSSPQHSPVNQFANTSETNTSDKSFSKDLSQILVNIKSCRWRHFRPRTPSLHDSDNDELSCRKLYRSINRTGTAQPGTQTCSTSTQSKSSSGSAHFAFTAEQYQQHQQQLALMQKQQLAQIQQQQANSNSSTNTSQNLASNQQKSGFRLNIQGLERTLQGFVSKTLDSASAQFAASALVTSEQLMGFKMKDDVVLGIGVNGVLPASGVYKGLHLSSTTPTALVHTSPSTAGSALLQPSNITQTSSSHSALSHQVTAANSATTQVLIGNNIRLTVPSSVATVNSIAPINARHIPRTLSAVPSSALKLAAAANCQVSKVPSSSSVDSVPRENHESEKPALNNIADNTVAMEVT

SEQ ID NO: 27437 - protein, 813 aa, Homo sapiens
  Payload ID: 5409
  Gene Symbol: EPC1
  Gene Name: enhancer of polycomb homolog 1 (Drosophila)
  Uniprot ID: Q9H2F5
  ENSP ID: ENSP00000318559
MSKLSFRARALDASKPLPVFRCEDLPDLHEYASINRAVPQMPTGMEKEEESEHHLQRAISAQQVYGEKRDNMVIPVPEAESNIAYYESIYPGEFKMPKQLIHIQPFSLDAEQPDYDLDSEDEVFVNKLKKKMDICPLQFEEMIDRLEKGSGQQPVSLQEAKLLLKEDDELIREVYEYWIKKRKNCRGPSLIPSVKQEKRDGSSTNDPYVAFRRRTEKMQTRKNRKNDEASYEKMLKLRRDLSRAVTILEMIKRREKSKRELLHLTLEIMEKRYNLGDYNGEIMSEVMAQRQPMKPTYAIPIIPITNSSQFKHQEAMDVKEFKVNKQDKADLIRPKRKYEKKPKVLPSSAAATPQQTSPAALPVFNAKDLNQYDFPSSDEEPLSQVLSGSSEAEEDNDPDGPFAFRRKAGCQYYAPHLDQTGNWPWTSPKDGGLGDVRYRYCLTTLTVPQRCIGFARRRVGRGGRVLLDRAHSDYDSVFHHLDLEMLSSPQHSPVNQFANTSETNTSDKSFSKDLSQILVNIKSCRWRHFRPRTPSLHDSDNDELSCRKLYRSINRTGTAQPGTQTCSTSTQSKSSSGSAHFAFTAEQYQQHQQQLALMQKQQLAQIQQQQANSNSSTNTSQGFVSKTLDSASAQFAASALVTSEQLMGFKMKDDVVLGIGVNGVLPASGVYKGLHLSSTTPTALVHTSPSTAGSALLQPSNITQTSSSHSALSHQVTAANSATTQVLIGNNIRLTVPSSVATVNSIAPINARHIPRTLSAVPSSALKLAAAANCQVSKVPSSSSVDSVPRENHESEKPALNNIADNTVAMEVT

SEQ ID NO: 27438 - protein, 763 aa, Homo sapiens
  Payload ID: 5409
  Gene Symbol: EPC1
  Gene Name: enhancer of polycomb homolog 1 (Drosophila)
  Uniprot ID: Q9H2F5
  ENSP ID: ENSP00000364251
MEHHLQRAISAQQVYGEKRDNMVIPVPEAESNIAYYESIYPGEFKMPKQLIHIQPFSLDAEQPDYDLDSEDEVFVNKLKKKMDICPLQFEEMIDRLEKGSGQQPVSLQEAKLLLKEDDELIREVYEYWIKKRKNCRGPSLIPSVKQEKRDGSSTNDPYVAFRRRTEKMQTRKNRKNDEASYEKMLKLRRDLSRAVTILEMIKRREKSKRELLHLTLEIMEKRYNLGDYNGEIMSEVMAQRQPMKPTYAIPIIPITNSSQFKHQEAMDVKEFKVNKQDKADLIRPKRKYEKKPKVLPSSAAATPQQTSPAALPVFNAKDLNQYDFPSSDEEPLSQVLSGSSEAEEDNDPDGPFAFRRKAGCQYYAPHLDQTGNWPWTSPKDGGLGDVRYRYCLTTLTVPQRCIGFARRRVGRGGRVLLDRAHSDYDSVFHHLDLEMLSSPQHSPVNQFANTSETNTSDKSFSKDLSQILVNIKSCRWRHFRPRTPSLHDSDNDELSCRKLYRSINRTGTAQPGTQTCSTSTQSKSSSGSAHFAFTAEQYQQHQQQLALMQKQQLAQIQQQQANSNSSTNTSQGFVSKTLDSASAQFAASALVTSEQLMGFKMKDDVVLGIGVNGVLPASGVYKGLHLSSTTPTALVHTSPSTAGSALLQPSNITQTSSSHSALSHQVTAANSATTQVLIGNNIRLTVPSSVATVNSIAPINARHIPRTLSAVPSSALKLAAAANCQVSKVPSSSSVDSVPRENHESEKPALNNIADNTVAMEVT

SEQ ID NO: 27439 - protein, 807 aa, Homo sapiens
  Payload ID: 5410
  Gene Symbol: EPC2
  Gene Name: enhancer of polycomb homolog 2 (Drosophila)
  Uniprot ID: Q52LR7
  ENSP ID: ENSP00000258484
MSKLSFRARALDAAKPLPIYRGKDMPDLNDCVSINRAVPQMPTGMEKEEESEHHLQRAISAQQVFREKKESMVIPVPEAESNVNYYNRLYKGEFKQPKQFIHIQPFNLDNEQPDYDMDSEDETLLNRLNRKMEIKPLQFEIMIDRLEKASSNQLVTLQEAKLLLNEDDYLIKAVYDYWVRKRKNCRGPSLIPQIKQEKRDGSTNNDPYVAFRRRTEKMQTRKNRKNDEASYEKMLKLRREFSRAITILEMIKRREKTKRELLHLTLEVVEKRYHLGDYGGEILNEVKISRSEKELYATPATLHNGNHHKVQECKTKHPHHLSLKEEASDVVRQKKKYPKKPKAEALITSQQPTPETLPVINKSDIKQYDFHSSDEDEFPQVLSPVSEPEEENDPDGPCAFRRRAGCQYYAPRLDQANHSCENSELADLDKLRYRHCLTTLTVPRRCIGFARRRIGRGGRVIMDRISTEHDPVLKQIDPEMLNSFSSSSQTIDFSSNFSRTNASSKHCENRLSLSEILSNIRSCRLQCFQPRLLNLQDSDSEECTSRKPGQTVNNKRVSAASVALLNTSKNGISVTGGITEEQFQTHQQQLVQMQRQQLAQLQQKQQSQHSSQQTHPKAQGSSTSDCMSKTLDSASAHFAASAVVSAPVPSRSEVAKEQNTGHNNINGVVQPSGTSKTLYSTNMALSSSPGISAVQLVRTVGHTTTNHLIPALCTSSPQTLPMNNSCLTNAVHLNNVSVVSPVNVHINTRTSAPSPTALKLATVAASMDRVPKVTPSSAISSIARENHEPERLGLNGIAETTVAMEVT

SEQ ID NO: 27440 - protein, 160 aa, Homo sapiens
  Payload ID: 5410
  Gene Symbol: EPC2
  Gene Name: enhancer of polycomb homolog 2 (Drosophila)
  ENSP ID: ENSP00000380569
MVIPVPEAESNVNYYNRLYKGEFKQPKQFIHIQPFNLDNEQPDYDMDSEDETLLNRLNRKMEIKPLQFEIMIDRLEKASSNQLVTLQEAKLLLNEDDYLIKAVYDYWVRKRKNCRGPSLIPQIKQEKRDGSTNNDPYVAFRRRTEKMQTRKNRKNDEASY

SEQ ID NO: 27441 - protein, 121 aa, Homo sapiens
  Payload ID: 5410
  Gene Symbol: EPC2
  Gene Name: enhancer of polycomb homolog 2 (Drosophila)
  ENSP ID: ENSP00000387097
MSKLSFRARALDAAKPLPIYRGKDMPDLNDCVSINRAVPQMPTGMEKEEESEHHLQRAISAQQVFREKKESMVIPVPEAESNVNYYNRLYKGEFKQPKQFIHIQLKLHLKLLLFRIEVLFF

SEQ ID NO: 27442 - protein, 126 aa, Homo sapiens
  Payload ID: 5410
  Gene Symbol: EPC2
  Gene Name: enhancer of polycomb homolog 2 (Drosophila)
  ENSP ID: ENSP00000395431
EHHLQRAISAQQVFREKKESMVIPVPEAESNVNYYNRLYKGEFKQPKQFIHIQRIWGHYQPETTLKFLLVCFVHLFLDHSISFNLGCRSAQGSVLRKIFCFSFLPKGKLRNTKFFAFPFCMANLFL

SEQ ID NO: 27443 - protein, 160 aa, Homo sapiens
  Payload ID: 5410
  Gene Symbol: EPC2
  Gene Name: enhancer of polycomb homolog 2 (Drosophila)
  ENSP ID: ENSP00000415543
MPDLNDCVSINRAVPQMPTGMEKEEESEHHLQRAISAQQVFREKKESMVIPVPEAESNVNYYNRLYKGEFKQPKQFIHIQPFNLDNEQPDYDMDSEDETLLNRLNRKMEIKPLQFEIMIDRLEKASSNQLVTLQEAKLLLNEDDYLIKAVYDYWVRKRKN

SEQ ID NO: 27444 - protein, 71 aa, Homo sapiens
  Payload ID: 5411
  Gene Symbol: ERH
  Gene Name: enhancer of rudimentary homolog (Drosophila)
  ENSP ID: ENSP00000450503
MSHTILLVQPTKRPEGRTYADYESVNECMEGVCKMYEEHLKRMNPNSPSITYDISQLFDFIDDLADLSCLV

SEQ ID NO: 27445 - protein, 104 aa, Homo sapiens
  Payload ID: 5411
  Gene Symbol: ERH
  Gene Name: enhancer of rudimentary homolog (Drosophila)
  Uniprot ID: P84090
  ENSP ID: ENSP00000451080
MSHTILLVQPTKRPEGRTYADYESVNECMEGVCKMYEEHLKRMNPNSPSITYDISQLFDFIDDLADLSCLVYRADTQTYQPYNKDWIKEKIYVLLRRQAQQAGK

SEQ ID NO: 27446 - protein, 48 aa, Homo sapiens
  Payload ID: 5412
  Gene Symbol: ENY2
  Gene Name: enhancer of yellow 2 homolog (Drosophila)
  ENSP ID: ENSP00000339861
MNKDAQMRAAINQKLIETGERERLKELLRAKLIECGWKDQLKAHCKGN

SEQ ID NO: 27447 - protein, 51 aa, Homo sapiens
  Payload ID: 5412
  Gene Symbol: ENY2
  Gene Name: enhancer of yellow 2 homolog (Drosophila)
  ENSP ID: ENSP00000428514
MNKDAQMRAAINQKLIETGERERLKELLRAKLIECGWKDQLKAHCKDNDFK

SEQ ID NO: 27448 - protein, 56 aa, Homo sapiens
  Payload ID: 5412
  Gene Symbol: ENY2
  Gene Name: enhancer of yellow 2 homolog (Drosophila)
  ENSP ID: ENSP00000429196
MVVSKMNKDAQMRAAINQKLIETGERERLKELLRAKLIECGWKDQLKAHCKDNDFK

SEQ ID NO: 27449 - protein, 100 aa, Homo sapiens
  Payload ID: 5412
  Gene Symbol: ENY2
  Gene Name: enhancer of yellow 2 homolog (Drosophila)
  ENSP ID: ENSP00000429588
MNKDAQMRAAINQKLIETGERERLKELLRAKLIECGWKDQLKAHCKEVIKEKGLEHVTVDDLVAEITPKGRETGFAMLPRLVLSSRTQAILLPQPSRLLG

SEQ ID NO: 27450 - protein, 53 aa, Homo sapiens
  Payload ID: 5412
  Gene Symbol: ENY2
  Gene Name: enhancer of yellow 2 homolog (Drosophila)
  ENSP ID: ENSP00000429670
MVVSKMNKDAQMRAAINQKLIETGERERLKELLRAKLIECGWKDQLKAHCKGN

SEQ ID NO: 27451 - protein, 96 aa, Homo sapiens
  Payload ID: 5412
  Gene Symbol: ENY2
  Gene Name: enhancer of yellow 2 homolog (Drosophila)
  Uniprot ID: Q9NPA8
  ENSP ID: ENSP00000429713
MNKDAQMRAAINQKLIETGERERLKELLRAKLIECGWKDQLKAHCKEVIKEKGLEHVTVDDLVAEITPKGRALVPDSVKKELLQRIRTFLAQHASL

SEQ ID NO: 27452 - protein, 101 aa, Homo sapiens
  Payload ID: 5412
  Gene Symbol: ENY2
  Gene Name: enhancer of yellow 2 homolog (Drosophila)
  Uniprot ID: Q9NPA8
  ENSP ID: ENSP00000429986
MVVSKMNKDAQMRAAINQKLIETGERERLKELLRAKLIECGWKDQLKAHCKEVIKEKGLEHVTVDDLVAEITPKGRALVPDSVKKELLQRIRTFLAQHASL

SEQ ID NO: 27453 - protein, 747 aa, Homo sapiens
  Payload ID: 5413
  Gene Symbol: EZH1
  Gene Name: enhancer of zeste 1 polycomb repressive complex 2 subunit
  Uniprot ID: Q92800
  ENSP ID: ENSP00000404658
MEIPNPPTSKCITYWKRKVKSEYMRLRQLKRLQANMGAKALYVANFAKVQEKTQILNEEWKKLRVQPVQSMKPVSGHPFLKKCTIESIFPGFASQHMLMRSLNTVALVPIMYSWSPLQQNFMVEDETVLCNIPYMGDEVKEEDETFIEELINNYDGKVHGEEEMIPGSVLISDAVFLELVDALNQYSDEEEEGHNDTSDGKQDDSKEDLPVTRKRKRHAIEGNKKSSKKQFPNDMIFSAIASMFPENGVPDDMKERYRELTEMSDPNALPPQCTPNIDGPNAKSVQREQSLHSFHTLFCRRCFKYDCFLHPFHATPNVYKRKNKEIKIEPEPCGTDCFLLLEGAKEYAMLHNPRSKCSGRRRRRHHIVSASCSNASASAVAETKEGDSDRDTGNDWASSSSEANSRCQTPTKQKASPAPPQLCVVEAPSEPVEWTGAEESLFRVFHGTYFNNFCSIARLLGTKTCKQVFQFAVKESLILKLPTDELMNPSQKKKRKHRLWAAHCRKIQLKKDNSSTQVYNYQPCDHPDRPCDSTCPCIMTQNFCEKFCQCNPDCQNRFPGCRCKTQCNTKQCPCYLAVRECDPDLCLTCGASEHWDCKVVSCKNCSIQRGLKKHLLLAPSDVAGWGTFIKESVQKNEFISEYCGELISQDEADRRGKVYDKYMSSFLFNLNNDFVVDATRKGNKIRFANHSVNPNCYAKVVMVNGDHRIGIFAKRAIQAGEELFFDYRYSQADALKYVGIERETDVL

SEQ ID NO: 27454 - protein, 738 aa, Homo sapiens
  Payload ID: 5413
  Gene Symbol: EZH1
  Gene Name: enhancer of zeste 1 polycomb repressive complex 2 subunit
  ENSP ID: ENSP00000407869
MEIPNPPTSKCITYWKRKVKSEYMRLRQLKRLQANMGAKALYVANFAKVQEKTQILNEEWKKLRVQPVQSMKPCTIESIFPGFASQHMLMRSLNTVALVPIMYSWSPLQQNFMVEDETVLCNIPYMGDEVKEEDETFIEELINNYDGKVHGEEEMIPGSVLISDAVFLELVDALNQYSDEEEEGHNDTSDGKQDDSKEDLPVTRKRKRHAIEGNKKSSKKQFPNDMIFSAIASMFPENGVPDDMKERYRELTEMSDPNALPPQCTPNIDGPNAKSVQREQSLHSFHTLFCRRCFKYDCFLHPFHATPNVYKRKNKEIKIEPEPCGTDCFLLLEGAKEYAMLHNPRSKCSGRRRRRHHIVSASCSNASASAVAETKEGDSDRDTGNDWASSSSEANSRCQTPTKQKASPAPPQLCVVEAPSEPVEWTGAEESLFRVFHGTYFNNFCSIARLLGTKTCKQVFQFAVKESLILKLPTDELMNPSQKKKRKHRLWAAHCRKIQLKKDNSSTQVYNYQPCDHPDRPCDSTCPCIMTQNFCEKFCQCNPDCQNRFPGCRCKTQCNTKQCPCYLAVRECDPDLCLTCGASEHWDCKVVSCKNCSIQRGLKKHLLLAPSDVAGWGTFIKESVQKNEFISEYCGELISQDEADRRGKVYDKYMSSFLFNLNNDFVVDATRKGNKIRFANHSVNPNCYAKVVMVNGDHRIGIFAKRAIQAGEELFFDYRYSQADALKYVGIERETDVL

SEQ ID NO: 27455 - protein, 296 aa, Homo sapiens
  Payload ID: 5413
  Gene Symbol: EZH1
  Gene Name: enhancer of zeste 1 polycomb repressive complex 2 subunit
  ENSP ID: ENSP00000464753
MEIPNPPTSKCITYWKRKVKSEYMRLRQLKRLQANMGAKALYVANFAKVQEKTQILNEEWKKLRVQPVQSMKPVEDETVLCNIPYMGDEVKEEDETFIEELINNYDGKVHGEEEMIPGSVLISDAVFLELVDALNQYSDEEEEGHNDTSDGKQDDSKEDLPVTRKRKRHAIEGNKKSSKKQFPNDMIFSAIASMFPENGVPDDMKERYRELTEMSDPNALPPQCTPNIDGPNAKSVQREQSLHSFHTLFCRRCFKYDCFLHPFHATPNVYKRKNKEIKIEPEPCGTDCFLLLEGAK

SEQ ID NO: 27456 - protein, 677 aa, Homo sapiens
  Payload ID: 5413
  Gene Symbol: EZH1
  Gene Name: enhancer of zeste 1 polycomb repressive complex 2 subunit
  Uniprot ID: Q92800
  ENSP ID: ENSP00000465220
MKPVSGHPFLKKCTIESIFPGFASQHMLMRSLNTVALVPIMYSWSPLQQNFMVEDETVLCNIPYMGDEVKEEDETFIEELINNYDGKVHGEEEMIPGSVLISDAVFLELVDALNQYSDEEEEGHNDTSDGKQDDSKEDLPVTRKRKRHAIEGNKKSSKKQFPNDMIFSAIASMFPENGVPDDMKERYRELTEMSDPNALPPQCTPNIDGPNAKSVQREQSLHSFHTLFCRRCFKYDCFLHPFHATPNVYKRKNKEIKIEPEPCGTDCFLLLEGAKEYAMLHNPRSKCSGRRRRRHHIVSASCSNASASAVAETKEGDSDRDTGNDWASSSSEANSRCQTPTKQKASPAPPQLCVVEAPSEPVEWTGAEESLFRVFHGTYFNNFCSIARLLGTKTCKQVFQFAVKESLILKLPTDELMNPSQKKKRKHRLWAAHCRKIQLKKDNSSTQVYNYQPCDHPDRPCDSTCPCIMTQNFCEKFCQCNPDCQNRFPGCRCKTQCNTKQCPCYLAVRECDPDLCLTCGASEHWDCKVVSCKNCSIQRGLKKHLLLAPSDVAGWGTFIKESVQKNEFISEYCGELISQDEADRRGKVYDKYMSSFLFNLNNDFVVDATRKGNKIRFANHSVNPNCYAKVVMVNGDHRIGIFAKRAIQAGEELFFDYRYSQADALKYVGIERETDVL

SEQ ID NO: 27457 - protein, 123 aa, Homo sapiens
  Payload ID: 5413
  Gene Symbol: EZH1
  Gene Name: enhancer of zeste 1 polycomb repressive complex 2 subunit
  ENSP ID: ENSP00000465327
MEIPNPPTSKCITYWKRKVKSEYMRLRQLKRLQANMGAKALYVANFAKVQEKTQILNEEWKKLRVQPVQSMKPVSGHPFLKKCTIESIFPGFASQHMLMRSLNTVALVPIMYSWSPLQQNFMR

SEQ ID NO: 27458 - protein, 125 aa, Homo sapiens
  Payload ID: 5413
  Gene Symbol: EZH1
  Gene Name: enhancer of zeste 1 polycomb repressive complex 2 subunit
  ENSP ID: ENSP00000465423
  MOD_RES (1)..(1): Any amino acid
XEVKEEDETFIEELINNYDGKVHGEEEMIPGSVLISDAVFLELVDALNQYSDEEEEGHNDTSDGKQDDSKEDLPVTRKRKRHAIEGRSKGVCHAPQPPLQVLWSSPEKAPHSQCFLLQCLSLCCG

SEQ ID NO: 27459 - protein, 106 aa, Homo sapiens
  Payload ID: 5413
  Gene Symbol: EZH1
  Gene Name: enhancer of zeste 1 polycomb repressive complex 2 subunit
  ENSP ID: ENSP00000465482
MEIPNPPTSKCITYWKRKVKSEYMRLRQLKRLQANMGAKALYVANFAKVQEKTQILNEEWKKLRVQPVQSMKPVSGHPFLKKCTIESIFPGFASQHMLMRSLNTVA

SEQ ID NO: 27460 - protein, 169 aa, Homo sapiens
  Payload ID: 5413
  Gene Symbol: EZH1
  Gene Name: enhancer of zeste 1 polycomb repressive complex 2 subunit
  ENSP ID: ENSP00000466393
MEIPNPPTSKCITYWKRKVKSEYMRLRQLKRLQANMGAKALYVANFAKVQEKTQILNEEWKKLRVQPVQSMKPVSGHPFLKKVEDETVLCNIPYMGDEVKEEDETFIEELINNYDGKVHGEEEMIPGSVLISDAVFLELVDALNQYSDEEEEGHNDTSDGKQDDSKEDL

SEQ ID NO: 27461 - protein, 747 aa, Homo sapiens; identical to SEQ ID NO: 27453
  Payload ID: 5413
  Gene Symbol: EZH1
  Gene Name: enhancer of zeste 1 polycomb repressive complex 2 subunit
  Uniprot ID: Q92800
  ENSP ID: ENSP00000466924

SEQ ID NO: 27462 - protein, 83 aa, Homo sapiens
  Payload ID: 5413
  Gene Symbol: EZH1
  Gene Name: enhancer of zeste 1 polycomb repressive complex 2 subunit
  ENSP ID: ENSP00000467036
MEIPNPPTSKCITYWKRKVKSEYMRLRQLKRLQANMGAKALYVANFAKVQEKTQILNEEWKKLRVQPVQSMKPVSGHPFLKKR

SEQ ID NO: 27463 - protein, 166 aa, Homo sapiens
  Payload ID: 5413
  Gene Symbol: EZH1
  Gene Name: enhancer of zeste 1 polycomb repressive complex 2 subunit
  ENSP ID: ENSP00000467320
MEIPNPPTSKCITYWKRKVKSEYMRLRQLKRLQANMGAKALYVANFAKVQEKTQILNEEWKKLRVQPVQSMKPVSGHPFLKKCTIESIFPGFASQHMLMRSLNTVALVPIMYSWSPLQQNFMVEDETVLCNIPYMGDEVKEEDETFIEELINNYDGKVHGEEEMIP

SEQ ID NO: 27464 - protein, 707 aa, Homo sapiens
  Payload ID: 5413
  Gene Symbol: EZH1
  Gene Name: enhancer of zeste 1 polycomb repressive complex 2 subunit
  Uniprot ID: Q92800
  ENSP ID: ENSP00000467871
MEIPNPPTSKCITYWKRKVKSEYMRLRQLKRLQANMGAKALYVANFAKVQEKTQILNEEWKKLRVQPVQSMKPVSGHPFLKKVEDETVLCNIPYMGDEVKEEDETFIEELINNYDGKVHGEEEMIPGSVLISDAVFLELVDALNQYSDEEEEGHNDTSDGKQDDSKEDLPVTRKRKRHAIEGNKKSSKKQFPNDMIFSAIASMFPENGVPDDMKERYRELTEMSDPNALPPQCTPNIDGPNAKSVQREQSLHSFHTLFCRRCFKYDCFLHPFHATPNVYKRKNKEIKIEPEPCGTDCFLLLEGAKEYAMLHNPRSKCSGRRRRRHHIVSASCSNASASAVAETKEGDSDRDTGNDWASSSSEANSRCQTPTKQKASPAPPQLCVVEAPSEPVEWTGAEESLFRVFHGTYFNNFCSIARLLGTKTCKQVFQFAVKESLILKLPTDELMNPSQKKKRKHRLWAAHCRKIQLKKDNSSTQVYNYQPCDHPDRPCDSTCPCIMTQNFCEKFCQCNPDCQNRFPGCRCKTQCNTKQCPCYLAVRECDPDLCLTCGASEHWDCKVVSCKNCSIQRGLKKHLLLAPSDVAGWGTFIKESVQKNEFISEYCGELISQDEADRRGKVYDKYMSSFLFNLNNDFVVDATRKGNKIRFANHSVNPNCYAKVVMVNGDHRIGIFAKRAIQAGEELFFDYRYSQADALKYVGIERETDVL

SEQ ID NO: 27465 - protein, 51 aa, Homo sapiens
  Payload ID: 5413
  Gene Symbol: EZH1
  Gene Name: enhancer of zeste 1 polycomb repressive complex 2 subunit
  ENSP ID: ENSP00000468640
  MOD_RES (1)..(1): Any amino acid
XTRKRKRHAIEGNKKSSKKQFPNDMIFSAIASMFPENGVPDDMKESFSCHP

SEQ ID NO: 27466 - protein, 707 aa, Homo sapiens
  Payload ID: 5414
  Gene Symbol: EZH2
  Gene Name: enhancer of zeste 2 polycomb repressive complex 2 subunit
  Uniprot ID: Q15910
  ENSP ID: ENSP00000223193
MGQTGKKSEKGPVCWRKRVKSEYMRLRQLKRFRRADEVKSMFSSNRQKILERTEILNQEWKQRRIQPVHILTSVSSLRGTREVEDETVLHNIPYMGDEVLDQDGTFIEELIKNYDGKVHGDRECGFINDEIFVELVNALGQYNDDDDDDDGDDPEEREEKQKDLEDHRDDKESRPPRKFPSDKIFEAISSMFPDKGTAEELKEKYKELTEQQLPGALPPECTPNIDGPNAKSVQREQSLHSFHTLFCRRCFKYDCFLHPFHATPNTYKRKNTETALDNKPCGPQCYQHLEGAKEFAAALTAERIKTPPKRPGGRRRGRLPNNSSRPSTPTINVLESKDTDSDREAGTETGGENNDKEEEEKKDETSSSSEANSRCQTPIKMKPNIEPPENVEWSGAEASMFRVLIGTYYDNFCAIARLIGTKTCRQVYEFRVKESSIIAPAPAEDVDTPPRKKKRKHRLWAAHCRKIQLKKDGSSNHVYNYQPCDHPRQPCDSSCPCVIAQNFCEKFCQCSSECQNRFPGCRCKAQCNTKQCPCYLAVRECDPDLCLTCGAADHWDSKNVSCKNCSIQRGSKKHLLLAPSDVAGWGIFIKDPVQKNEFISEYCGEIISQDEADRRGKVYDKYMCSFLFNLNNDFVVDATRKGNKIRFANHSVNPNCYAKVMMVNGDHRIGIFAKRAIQTGEELFFDYRYSQADALKYVGIEREMEIP

SEQ ID NO: 27467 - protein, 751 aa, Homo sapiens
  Payload ID: 5414
  Gene Symbol: EZH2
  Gene Name: enhancer of zeste 2 polycomb repressive complex 2 subunit
  Uniprot ID: Q15910
  ENSP ID: ENSP00000320147
MGQTGKKSEKGPVCWRKRVKSEYMRLRQLKRFRRADEVKSMFSSNRQKILERTEILNQEWKQRRIQPVHILTSVSSLRGTRECSVTSDLDFPTQVIPLKTLNAVASVPIMYSWSPLQQNFMVEDETVLHNIPYMGDEVLDQDGTFIEELIKNYDGKVHGDRECGFINDEIFVELVNALGQYNDDDDDDDGDDPEEREEKQKDLEDHRDDKESRPPRKFPSDKIFEAISSMFPDKGTAEELKEKYKELTEQQLPGALPPECTPNIDGPNAKSVQREQSLHSFHTLFCRRCFKYDCFLHRKCNYSFHATPNTYKRKNTETALDNKPCGPQCYQHLEGAKEFAAALTAERIKTPPKRPGGRRRGRLPNNSSRPSTPTINVLESKDTDSDREAGTETGGENNDKEEEEKKDETSSSSEANSRCQTPIKMKPNIEPPENVEWSGAEASMFRVLIGTYYDNFCAIARLIGTKTCRQVYEFRVKESSIIAPAPAEDVDTPPRKKKRKHRLWAAHCRKIQLKKDGSSNHVYNYQPCDHPRQPCDSSCPCVIAQNFCEKFCQCSSECQNRFPGCRCKAQCNTKQCPCYLAVRECDPDLCLTCGAADHWDSKNVSCKNCSIQRGSKKHLLLAPSDVAGWGIFIKDPVQKNEFISEYCGEIISQDEADRRGKVYDKYMCSFLFNLNNDFVVDATRKGNKIRFANHSVNPNCYAKVMMVNGDHRIGIFAKRAIQTGEELFFDYRYSQADALKYVGIEREMEIP

SEQ ID NO: 27468 - protein, 695 aa, Homo sapiens
  Payload ID: 5414
  Gene Symbol: EZH2
  Gene Name: enhancer of zeste 2 polycomb repressive complex 2 subunit
  Uniprot ID: Q15910
  ENSP ID: ENSP00000417062
MGQTGKKSEKGPVCWRKRVKSEYMRLRQLKRFRRADEVKSMFSSNRQKILERTEILNQEWKQRRIQPVHILTSCSVTSDLDFPTQVIPLKTLNAVASVPIMYSWSPLQQNFMVEDETVLHNIPYMGDEVLDQDGTFIEELIKNYDGKVHGDRECGFINDEIFVELVNALGQYNDDDDDDDGDDPEEREEKQKDLEDHRDDKESRPPRKFPSDKIFEAISSMFPDKGTAEELKEKYKELTEQQLPGALPPECTPNIDGPNAKSVQREQSLHSFHTLFCRRCFKYDCFLHPFHATPNTYKRKNTETALDNKPCGPQCYQHLEGAKEFAAALTAERIKTPPKRPGGRRRGRLPNNSSRPSTPTINVLESKDTDSDREAGTETGGENNDKEEEEKKDETSSSSEANSRCQTPIKMKPNIEPPENVEWSGAEASMFRVLIGTYYDNFCAIARLIGTKTCRQVYEFRVKESSIIAPAPAEDVDTPPRKKKRKHRLWAAHCRKIQLKKGQNRFPGCRCKAQCNTKQCPCYLAVRECDPDLCLTCGAADHWDSKNVSCKNCSIQRGSKKHLLLAPSDVAGWGIFIKDPVQKNEFISEYCGEIISQDEADRRGKVYDKYMCSFLFNLNNDFVVDATRKGNKIRFANHSVNPNCYAKVMMVNGDHRIGIFAKRAIQTGEELFFDYRYSQADALKYVGIEREMEIP

SEQ ID NO: 27469 - protein, 334 aa, Homo sapiens
  Payload ID: 5414
  Gene Symbol: EZH2
  Gene Name: enhancer of zeste 2 polycomb repressive complex 2 subunit
  ENSP ID: ENSP00000417377
MGQTGKKSEKGPVCWRKRVKSEYMRLRQLKRFRRADEVKSMFSSNRQKILERTEILNQEWKQRRIQPVHILTSVSSLRGTRECSVTSDLDFPTQVIPLKTLNAVASVPIMYSWSPLQQNFMVEDETVLHNIPYMGDEVLDQDGTFIEELIKNYDGKVHGDRECGFINDEIFVELVNALGQYNDDDDDDDGDDPEEREEKQKDLEDHRDDKESRPPRKFPSDKIFEAISSMFPDKGTAEELKEKYKELTEQQLPGALPPECTPNIDGPNAKSVQREQSLHSFHTLFCRRCFKYDCFLHPFHATPNTYKRKNTETALDNKPCGPQCYQHLPLLPRN

SEQ ID NO: 27470 - protein, 144 aa, Homo sapiens
  Payload ID: 5414
  Gene Symbol: EZH2
  Gene Name: enhancer of zeste 2 polycomb repressive complex 2 subunit
  ENSP ID: ENSP00000417704
MGQTGKKSEKGPVCWRKRVKSEYMRLRQLKRFRRADEVKSMFSSNRQKILERTEILNQEWKQRRIQPVHILTSVSSLRGTREAIHLLFPLRFSITQFLLGTSLLPRVSVWLCTPTTTIFGLTSLSSSQWSSHTVAYCTSWLIVR

SEQ ID NO: 27471 - protein, 695 aa, Homo sapiens; identical to SEQ ID NO: 27468
  Payload ID: 5414
  Gene Symbol: EZH2
  Gene Name: enhancer of zeste 2 polycomb repressive complex 2 subunit
  Uniprot ID: Q15910
  ENSP ID: ENSP00000419050

SEQ ID NO: 27472 - protein, 746 aa, Homo sapiens
  Payload ID: 5414
  Gene Symbol: EZH2
  Gene Name: enhancer of zeste 2 polycomb repressive complex 2 subunit
  Uniprot ID: Q15910
  ENSP ID: ENSP00000419711
MGQTGKKSEKGPVCWRKRVKSEYMRLRQLKRFRRADEVKSMFSSNRQKILERTEILNQEWKQRRIQPVHILTSVSSLRGTRECSVTSDLDFPTQVIPLKTLNAVASVPIMYSWSPLQQNFMVEDETVLHNIPYMGDEVLDQDGTFIEELIKNYDGKVHGDRECGFINDEIFVELVNALGQYNDDDDDDDGDDPEEREEKQKDLEDHRDDKESRPPRKFPSDKIFEAISSMFPDKGTAEELKEKYKELTEQQLPGALPPECTPNIDGPNAKSVQREQSLHSFHTLFCRRCFKYDCFLHPFHATPNTYKRKNTETALDNKPCGPQCYQHLEGAKEFAAALTAERIKTPPKRPGGRRRGRLPNNSSRPSTPTINVLESKDTDSDREAGTETGGENNDKEEEEKKDETSSSSEANSRCQTPIKMKPNIEPPENVEWSGAEASMFRVLIGTYYDNFCAIARLIGTKTCRQVYEFRVKESSIIAPAPAEDVDTPPRKKKRKHRLWAAHCRKIQLKKDGSSNHVYNYQPCDHPRQPCDSSCPCVIAQNFCEKFCQCSSECQNRFPGCRCKAQCNTKQCPCYLAVRECDPDLCLTCGAADHWDSKNVSCKNCSIQRGSKKHLLLAPSDVAGWGIFIKDPVQKNEFISEYCGEIISQDEADRRGKVYDKYMCSFLFNLNNDFVVDATRKGNKIRFANHSVNPNCYAKVMMVNGDHRIGIFAKRAIQTGEELFFDYRYSQADALKYVGIEREMEIP

SEQ ID NO: 27473 - protein, 737 aa, Homo sapiens
  Payload ID: 5414
  Gene Symbol: EZH2
  Gene Name: enhancer of zeste 2 polycomb repressive complex 2 subunit
  Uniprot ID: Q15910
  ENSP ID: ENSP00000419856
MGQTGKKSEKGPVCWRKRVKSEYMRLRQLKRFRRADEVKSMFSSNRQKILERTEILNQEWKQRRIQPVHILTSCSVTSDLDFPTQVIPLKTLNAVASVPIMYSWSPLQQNFMVEDETVLHNIPYMGDEVLDQDGTFIEELIKNYDGKVHGDRECGFINDEIFVELVNALGQYNDDDDDDDGDDPEEREEKQKDLEDHRDDKESRPPRKFPSDKIFEAISSMFPDKGTAEELKEKYKELTEQQLPGALPPECTPNIDGPNAKSVQREQSLHSFHTLFCRRCFKYDCFLHPFHATPNTYKRKNTETALDNKPCGPQCYQHLEGAKEFAAALTAERIKTPPKRPGGRRRGRLPNNSSRPSTPTINVLESKDTDSDREAGTETGGENNDKEEEEKKDETSSSSEANSRCQTPIKMKPNIEPPENVEWSGAEASMFRVLIGTYYDNFCAIARLIGTKTCRQVYEFRVKESSIIAPAPAEDVDTPPRKKKRKHRLWAAHCRKIQLKKDGSSNHVYNYQPCDHPRQPCDSSCPCVIAQNFCEKFCQCSSECQNRFPGCRCKAQCNTKQCPCYLAVRECDPDLCLTCGAADHWDSKNVSCKNCSIQRGSKKHLLLAPSDVAGWGIFIKDPVQKNEFISEYCGEIISQDEADRRGKVYDKYMCSFLFNLNNDFVVDATRKGNKIRFANHSVNPNCYAKVMMVNGDHRIGIFAKRAIQTGEELFFDYRYSQADALKYVGIEREMEIP

SEQ ID NO: 27474 - protein, 346 aa, Homo sapiens
  Payload ID: 5415
  Gene Symbol: ENKD1
  Gene Name: enkurin domain containing 1
  Uniprot ID: Q9H0I2
  ENSP ID: ENSP00000243878
MCEGPSRISGPIPPDPTLCPDNYRRPTSAQGRLEGNALKLDLLTSDRALDTTAPRGPCIGPGAGEILERGQRGVGDVLLQLEGISLGPGASLKRKDPKDHEKENLRRIREIQKRFREQERSREQGQPRPLKALWRSPKYDKVESRVKAQLQEPGPASGTESAHFLRAHSRCGPGLPPPHVSSPQPTPPGPEAKEPGLGVDFIRHNARAAKRAPRRHSCSLQVLAQVLEQQRQAQEHYNATQKGHVPHYLLERRDLWRREAEARKQSQPDPAMPPGHTRMPENQRLETLTKLLQSQSQLLRELVLLPAGADSLRAQSHRAELDRKLVQVEEAIKIFSRPKVFVKMDD

SEQ ID NO: 27475 - protein, 225 aa, Homo sapiens
  Payload ID: 5415
  Gene Symbol: ENKD1
  Gene Name: enkurin domain containing 1
  ENSP ID: ENSP00000473501
MCEGPSRISGPIPPDPTLCPDNYRRPTSAQGRLEGNALKLDLLTSDRALDTTAPRGPCIGPGAGEILERGQRGVGDVLLQLEGISLGPGASLKRKDPKDHEKENLRRIREIQKRFREQERSREQGQPRPLKALWRSPKYDKVESRVKAQLQEPGPASGTESAHFLRAHSRCGPGLPPPHVSSPQPTPPGPEAKLVGAQGPVAAGGRGPQAEPAGPCHAPRPHAHA

SEQ ID NO: 27476 - protein, 89 aa, Homo sapiens
  Payload ID: 5415
  Gene Symbol: ENKD1
  Gene Name: enkurin domain containing 1
  ENSP ID: ENSP00000483290
  MOD_RES (1)..(1): Any amino acid
XGDVLLQLEGISLGPGASLKRKDPKDHEKENLRRIREIQKRFREQERSREQGQPRPLKALWRSPKYDKVESRVKAQLQEPGLGVDFIRH

SEQ ID NO: 27477 - protein, 256 aa, Homo sapiens
  Payload ID: 5416
  Gene Symbol: ENKUR
  Gene Name: enkurin, TRPC channel interacting protein
  Uniprot ID: Q8TC29
  ENSP ID: ENSP00000331044
MDPTCSSECIYNLIPSDLKEPPQPPRYISIFKATVKDDMQKAKTAMKTMGPAKVEVPSPKDFLKKHSKEKTLPPKKNFDRNVPKKPAVPLKTDHPVMGIQSGKNFINTNAADIIMGVAKKPKPIYVDKRTGDKHDLEPSGLVPKYINKKDYGVTPEYICKRNEEIKKAQEDYDRYIQENLKKAAMKRLSDEEREAVLQGLKKNWEEVHKEFQSLSVFIDSIPKKIRKQRLEEEMKQLEHDIGIIEKHKIIYIANNA

SEQ ID NO: 27478 - protein, 255 aa, Homo sapiens
  Payload ID: 5416
  Gene Symbol: ENKUR
  Gene Name: enkurin, TRPC channel interacting protein
  ENSP ID: ENSP00000365541
MDPTCSSECIYNLIPSDLKEPPQPPRYISIFKATVKDDMQKAKTAMKTMGPAKVEVPSPKDFLKKHSKEKTLPPKKNFDRNVPKKPAVPLKTDHPVMGIQSGKNFINTNAADIIMGVAKKPKPIYVDKRTGDKHDLEPSGLVPKYINKKDYGVTPEYICKRNEEIKKAQEDYDRYIQENLKKAAMKRLSDEEREAVLQGLKKNWEEVHKEFQSLSVFIDSIPKKIRKQRLEEEMKQLEHDIGIIEKHKIIYIANK

SEQ ID NO: 27479 - protein, 256 aa, Homo sapiens; identical to SEQ ID NO: 27477
  Payload ID: 5416
  Gene Symbol: ENKUR
  Gene Name: enkurin, TRPC channel interacting protein
  Uniprot ID: Q8TC29
  ENSP ID: ENSP00000432930

SEQ ID NO: 27480 - protein, 125 aa, Homo sapiens
  Payload ID: 5416
  Gene Symbol: ENKUR
  Gene Name: enkurin, TRPC channel interacting protein
  ENSP ID: ENSP00000433763
MGIQSGKNFINTNAADIIMGVAKKPKPIYVDKRTGDKHDLEPSGLVPKYINKKDYGVTPEYICKRNEEIKKAQEDYDRYIQENLKKAAMKRLSDEEREAVLQGLKKNWEEVHKEFQSLSVFIDSI

SEQ ID NO: 27481 - protein, 194 aa, Homo sapiens
  Payload ID: 5416
  Gene Symbol: ENKUR
  Gene Name: enkurin, TRPC channel interacting protein
  ENSP ID: ENSP00000478989
MKTERVTGGGSPEKNFDRNVPKKPAVPLKTDHPVMGIQSGKNFINTNAADIIMGVAKKPKPIYVDKRTGDKHDLEPSGLVPKYINKKDYGVTPEYICKRNEEIKKAQEDYDRYIQENLKKAAMKRLSDEEREAVLQGLKKNWEEVHKEFQSLSVFIDSIPKKIRKQRLEEEMKQLEHDIGIIEKHKIIYIANNA

SEQ ID NO: 27482 - protein, 434 aa, Homo sapiens
  Payload ID: 5417
  Gene Symbol: ENO1
  Gene Name: enolase 1, (alpha)
  Uniprot ID: P06733
  ENSP ID: ENSP00000234590
MSILKIHAREIFDSRGNPTVEVDLFTSKGLFRAAVPSGASTGIYEALELRDNDKTRYMGKGVSKAVEHINKTIAPALVSKKLNVTEQEKIDKLMIEMDGTENKSKFGANAILGVSLAVCKAGAVEKGVPLYRHIADLAGNSEVILPVPAFNVINGGSHAGNKLAMQEFMILPVGAANFREAMRIGAEVYHNLKNVIKEKYGKDATNVGDEGGFAPNILENKEGLELLKTAIGKAGYTDKVVIGMDVAASEFFRSGKYDLDFKSPDDPSRYISPDQLADLYKSFIKDYPVVSIEDPFDQDDWGAWQKFTASAGIQVVGDDLTVTNPKRIAKAVNEKSCNCLLLKVNQIGSVTESLQACKLAQANGWGVMVSHRSGETEDTFIADLVVGLCTGQIKTGAPCRSERLAKYNQLLRIEEELGSKAKFAGRNFRNPLAK

SEQ ID NO: 27483 - protein, 195 aa, Homo sapiens
  Payload ID: 5417
  Gene Symbol: ENO1
  Gene Name: enolase 1, (alpha)
  ENSP ID: ENSP00000466406
MSILKIHAREIFDSRGNPTVEVDLFTSKGLFRAAVPSGASTGIYEALELRDNDKTRYMGKGVSKAVEHINKTIAPALVSKKLNVTEQEKIDKLMIEMDGTENKSKFGANAILGVSLAVCKAGAVEKGVPLYRHIADLAGNSEVILPVPAFNVINGGSHAGNKLAMQEFMILPVGAANFREAMRIGAEVYHNLKNV

SEQ ID NO: 27484 - protein, 17 aa, Homo sapiens
  Payload ID: 5417
  Gene Symbol: ENO1
  Gene Name: enolase 1, (alpha)
  ENSP ID: ENSP00000468392
MSILKIHAREIFDSRGN

SEQ ID NO: 27485 - protein, 434 aa, Homo sapiens
  Payload ID: 5418
  Gene Symbol: ENO2
  Gene Name: enolase 2 (gamma, neuronal)
  Uniprot ID: P09104
  ENSP ID: ENSP00000229277
MSIEKIWAREILDSRGNPTVEVDLYTAKGLFRAAVPSGASTGIYEALELRDGDKQRYLGKGVLKAVDHINSTIAPALISSGLSVVEQEKLDNLMLELDGTENKSKFGANAILGVSLAVCKAGAAERELPLYRHIAQLAGNSDLILPVPAFNVINGGSHAGNKLAMQEFMILPVGAESFRDAMRLGAEVYHTLKGVIKDKYGKDATNVGDEGGFAPNILENSEALELVKEAIDKAGYTEKIVIGMDVAASEFYRDGKYDLDFKSPTDPSRYITGDQLGALYQDFVRDYPVVSIEDPFDQDDWAAWSKFTANVGIQIVGDDLTVTNPKRIERAVEEKACNCLLLKVNQIGSVTEAIQACKLAQENGWGVMVSHRSGETEDTFIADLVVGLCTGQIKTGAPCRSERLAKYNQLMRIEEELGDEARFAGHNFRNPSVL

SEQ ID NO: 27486 - protein, 434 aa, Homo sapiens; identical to SEQ ID NO: 27485
  Payload ID: 5418
  Gene Symbol: ENO2
  Gene Name: enolase 2 (gamma, neuronal)
  Uniprot ID: P09104
  ENSP ID: ENSP00000437402

SEQ ID NO: 27487 - protein, 315 aa, Homo sapiens
  Payload ID: 5418
  Gene Symbol: ENO2
  Gene Name: enolase 2 (gamma, neuronal)
  ENSP ID: ENSP00000438062
MSIEKIWAREILDSRGNPTVEVDLYTAKGLFRAAVPSGASTGIYEALELRDGDKQRYLGKGVLKAVDHINSTIAPALISSGLSVVEQEKLDNLMLELDGTENKSLELVKEAIDKAGYTEKIVIGMDVAASEFYRDGKYDLDFKSPTDPSRYITGDQLGALYQDFVRDYPVVSIEDPFDQDDWAAWSKFTANVGIQIVGDDLTVTNPKRIERAVEEKACNCLLLKVNQIGSVTEAIQACKLAQENGWGVMVSHRSGETEDTFIADLVVGLCTGQIKTGAPCRSERLAKYNQLMRIEEELGDEARFAGHNFRNPSVL

SEQ ID NO: 27488 - protein, 434 aa, Homo sapiens; identical to SEQ ID NO: 27485
  Payload ID: 5418
  Gene Symbol: ENO2
  Gene Name: enolase 2 (gamma, neuronal)
  Uniprot ID: P09104
  ENSP ID: ENSP00000438873

SEQ ID NO: 27489 - protein, 391 aa, Homo sapiens
  Payload ID: 5418
  Gene Symbol: ENO2
  Gene Name: enolase 2 (gamma, neuronal)
  Uniprot ID: P09104
  ENSP ID: ENSP00000441490
MSIEKIWAREILDSRGNPTVEVDLYTAKGLFRAAVPSGASTGIYEALELRDGDKQRYLGKAKFGANAILGVSLAVCKAGAAERELPLYRHIAQLAGNSDLILPVPAFNVINGGSHAGNKLAMQEFMILPVGAESFRDAMRLGAEVYHTLKGVIKDKYGKDATNVGDEGGFAPNILENSEALELVKEAIDKAGYTEKIVIGMDVAASEFYRDGKYDLDFKSPTDPSRYITGDQLGALYQDFVRDYPVVSIEDPFDQDDWAAWSKFTANVGIQIVGDDLTVTNPKRIERAVEEKACNCLLLKVNQIGSVTEAIQACKLAQENGWGVMVSHRSGETEDTFIADLVVGLCTGQIKTGAPCRSERLAKYNQLMRIEEELGDEARFAGHNFRNPSVL

SEQ ID NO: 27490 - protein, 103 aa, Homo sapiens
  Payload ID: 5418
  Gene Symbol: ENO2
  Gene Name: enolase 2 (gamma, neuronal)
  ENSP ID: ENSP00000445788
MSIEKIWAREILDSRGNPTVEVDLYTAKGLFRAAVPSGASTGIYEALELRDGDKQRYLGKGVLKAVDHINSTIAPALISSGLSVVEQEKLDNLMLELDGTENK

SEQ ID NO: 27491 - protein, 73 aa, Homo sapiens
  Payload ID: 5418
  Gene Symbol: ENO2
  Gene Name: enolase 2 (gamma, neuronal)
  ENSP ID: ENSP00000476096
LVKEAIDKAGYTEKIVIGMDVAASEFYRDGKYDLDFKSPTDPSRYITGDQLGALYQDFVRDYPGNKGACSCLM

SEQ ID NO: 27492 - protein, 86 aa, Homo sapiens
  Payload ID: 5418
  Gene Symbol: ENO2
  Gene Name: enolase 2 (gamma, neuronal)
  ENSP ID: ENSP00000476112
  MOD_RES (1)..(1): Any amino acid
XVSIEDPFDQDDWAAWSKFTANVGIQIVGDDLTVTNPKRIERAVEEKACNCLLLKVNQIGSVTEAIQASRLVPRAVLNVWLNTTSS

SEQ ID NO: 27493 - protein, 434 aa, Homo sapiens
  Payload ID: 5419
  Gene Symbol: ENO3
  Gene Name: enolase 3 (beta, muscle)
  Uniprot ID: P13929
  ENSP ID: ENSP00000324105
MAMQKIFAREILDSRGNPTVEVDLHTAKGRFRAAVPSGASTGIYEALELRDGDKGRYLGKGVLKAVENINNTLGPALLQKKLSVVDQEKVDKFMIELDGTENKSKFGANAILGVSLAVCKAGAAEKGVPLYRHIADLAGNPDLILPVPAFNVINGGSHAGNKLAMQEFMILPVGASSFKEAMRIGAEVYHHLKGVIKAKYGKDATNVGDEGGFAPNILENNEALELLKTAIQAAGYPDKVVIGMDVAASEFYRNGKYDLDFKSPDDPARHITGEKLGELYKSFIKNYPVVSIEDPFDQDDWATWTSFLSGVNIQIVGDDLTVTNPKRIAQAVEKKACNCLLLKVNQIGSVTESIQACKLAQSNGWGVMVSHRSGETEDTFIADLVVGLCTGQIKTGAPCRSERLAKYNQLMRIEEALGDKAIFAGRKFRNPKAK

SEQ ID NO: 27494 - protein, 148 aa, Homo sapiens
  Payload ID: 5419
  Gene Symbol: ENO3
  Gene Name: enolase 3 (beta, muscle)
  ENSP ID: ENSP00000428502
MAMQKIFAREILDSRGNPTVEVDLHTAKGRFRAAVPSGASTGIYEALELRDGDKGRYLGKGVLKAVENINNTLGPALLQKKLSVVDQEKVDKFMIELDGTENKSKFGANAILGVSLAVCKAGAAEKGVPLYRHIADLAGNPDLILPVP

SEQ ID NO: 27495 - protein, 154 aa, Homo sapiens
  Payload ID: 5419
  Gene Symbol: ENO3
  Gene Name: enolase 3 (beta, muscle)
  ENSP ID: ENSP00000428811
MAMQKIFAREILDSRGNPTVEVDLHTAKGRFRAAVPSGASTGIYEALELRDGDKGRYLGKGVLKAVENINNTLGPALLQKKLSVVDQEKVDKFMIELDGTENKSKFGANAILGVSLAVCKAGAAEKGVPLYRHIADLAGNPDLILPVPAFNVIN

SEQ ID NO: 27496 - protein, 283 aa, Homo sapiens
  Payload ID: 5419
  Gene Symbol: ENO3
  Gene Name: enolase 3 (beta, muscle)
  ENSP ID: ENSP00000430055
MAMQKIFAREILDSRGNPTVEVDLHTAKGRFRAAVPSGASTGIYEALELRDGDKGRYLGKGVLKAVENINNTLGPALLQKKLSVVDQEKVDKFMIELDGTENKSKFGANAILGVSLAVCKAGAAEKGVPLYRHIADLAGNPDLILPVPAFNVINGGSHAGNKLAMQEFMILPVGASSFKEAMRIGAEVYHHLKGVIKAKYGKDATNVGDEGGFAPNILENNEALELLKTAIQAAGYPDKVVIGMDVAASEFYRNGKYDLDFKSPDDPARHITGEKLGELYKSF

SEQ ID NO: 27497 - protein, 58 aa, Homo sapiens
  Payload ID: 5419
  Gene Symbol: ENO3
  Gene Name: enolase 3 (beta, muscle)
  ENSP ID: ENSP00000430554
MAMQKIFAREILDSRGNPTVEVDLHTAKDFFPSPLLPTWNQSWKLGEAGVSLCTASCP

SEQ ID NO: 27498 - protein, 391 aa, Homo sapiens
  Payload ID: 5419
  Gene Symbol: ENO3
  Gene Name: enolase 3 (beta, muscle)
  Uniprot ID: P13929
  ENSP ID: ENSP00000430636
MAMQKIFAREILDSRGNPTVEVDLHTAKGRFRAAVPSGASTGIYEALELRDGDKGRYLGKAKFGANAILGVSLAVCKAGAAEKGVPLYRHIADLAGNPDLILPVPAFNVINGGSHAGNKLAMQEFMILPVGASSFKEAMRIGAEVYHHLKGVIKAKYGKDATNVGDEGGFAPNILENNEALELLKTAIQAAGYPDKVVIGMDVAASEFYRNGKYDLDFKSPDDPARHITGEKLGELYKSFIKNYPVVSIEDPFDQDDWATWTSFLSGVNIQIVGDDLTVTNPKRIAQAVEKKACNCLLLKVNQIGSVTESIQACKLAQSNGWGVMVSHRSGETEDTFIADLVVGLCTGQIKTGAPCRSERLAKYNQLMRIEEALGDKAIFAGRKFRNPKAK

SEQ ID NO: 27499 - protein, 434 aa, Homo sapiens; identical to SEQ ID NO: 27493
  Payload ID: 5419
  Gene Symbol: ENO3
  Gene Name: enolase 3 (beta, muscle)
  Uniprot ID: P13929
  ENSP ID: ENSP00000431087

SEQ ID NO: 27500 - protein, 148 aa, Homo sapiens; identical to SEQ ID NO: 27494
  Payload ID: 5419
  Gene Symbol: ENO3
  Gene Name: enolase 3 (beta, muscle)
  ENSP ID: ENSP00000464874

SEQ ID NO: 27501 - protein, 212 aa, Homo sapiens
  Payload ID: 5419
  Gene Symbol: ENO3
  Gene Name: enolase 3 (beta, muscle)
  ENSP ID: ENSP00000465697
MAMQKIFAREILDSRGNPTVEVDLHTAKGRFRAAVPSGASTGIYEALELRDGDKGRYLGKGVLKAVENINNTLGPALLQKKLSVVDQEKVDKFMIELDGTENKSKFGANAILGVSLAVCKAGAAEKGVPLYRHIADLAGNPDLILPVPAFNVINGGSHAGNKLAMQEFMILPVGASSFKEAMRIGAEVYHHLKGVIKAKYGKDATNVGDEGG

SEQ ID NO: 27502 - protein, 28 aa, Homo sapiens
  Payload ID: 5419
  Gene Symbol: ENO3
  Gene Name: enolase 3 (beta, muscle)
  ENSP ID: ENSP00000467270
MAMQKIFAREILDSRGNPTVEVDLHTAK

SEQ ID NO: 27503 - protein, 196 aa, Homo sapiens
  Payload ID: 5419
  Gene Symbol: ENO3
  Gene Name: enolase 3 (beta, muscle)
  ENSP ID: ENSP00000467444
MAMQKIFAREILDSRGNPTVEVDLHTAKGRFRAAVPSGASTGIYEALELRDGDKGRYLGKGVLKAVENINNTLGPALLQKKLSVVDQEKVDKFMIELDGTENKSKFGANAILGVSLAVCKAGAAEKGVPLYRHIADLAGNPDLILPVPAFNVINGGSHAGNKLAMQEFMILPVGASSFKEAMRIGAEVYHHLKGVI

SEQ ID NO: 27504 - protein, 625 aa, Homo sapiens
  Payload ID: 5420
  Gene Symbol: ENO4
  Gene Name: enolase family member 4
  ENSP ID: ENSP00000345555
MEEEGGGRSCGTTRELQKLKQQAMEYYRENDVPRRLEELLNSTFYLQPADVYGHLANCFSKLAKPPTICKIVGKDVLDGLGLPTLQVDIFCTIQNFPKNVCSVVISTHFEVHENALPELAKAEEAERASAVSTAVQWVNSTITHELQGMAPSDQAEVDHLLRIFFASKVQEDKGRKELEKSLEYSTVPTPLPPVPPPPPPPPPTKKKGQKPGRKDTITEKPIAPAEPVEPVLSGSMAIGAVSLAVAKACAMLLNKPLYLNIALLKHNQEQPTTLSMPLLMVSLVSCGKSSSGKLNLMKEVICIPHPELTTKQGVEMLMEMQKHINKIIEMPSPPKAETKKGHDGSKRGQQQITGKMSHLGCLTINCDSIEQPLLLIQEICANLGLELGTNLHLAINCAGHELMDYNKGKYEVIMGTYKNAAEMVDLYVDLINKYPSIIALIDPFRKEDSEQWDSIYHALGSRCYIIAGTASKSISKLLEQGNISIPKSNGLIIKHTNQTTMSDLVEITNLIDSKKHITVFGSTEGESSDDSLVDLAVGLGVRFIKLGGLSRGERVTKYNRLLTIEEELVQNGTLGFKEEHTFFYFNEEAEKAAEALEAAAAREPLVPTFPTQGVEESAETGASSG

SEQ ID NO: 27505 - protein, 363 aa, Homo sapiens
  Payload ID: 5420
  Gene Symbol: ENO4
  Gene Name: enolase family member 4
  ENSP ID: ENSP00000358208
MAIGAVSLAVAKACAMLLNKPLYLNIALLKHNQEQPTTLSMPLLMVSLVSCGKSSSGKLNLMKEVICIPHPELTTKQGVEMLMEMQKHINKIIEMPSPPKAETKKGHDGSKRGQQQITGKMSHLGCLTINCDSIEQPLLLIQEICANLGLELGTNLHLAINCAGHELMDYNKGKYEVIMGTYKNAAEMVDLYVDLINKYPSIIALIDPFRKEDSEQWDSIYHALGSRCYIIAGTASKSISKLLEQGNISIPKSNGLIIKHTNQTTMSDLVEITNLIDSKKHITVFGSTEGESSDDSLVDLAVGLGVRFIKLGGLSRGERVTKYNRLLTIEEELVQNGTLATSSSSCDARIGGQEQETMTLVKV

SEQ ID NO: 27506 - protein, 308 aa, Homo sapiens
  Payload ID: 5420
  Gene Symbol: ENO4
  Gene Name: enolase family member 4
  Uniprot ID: A6NNW6
  ENSP ID: ENSP00000387194
MEEEGGGRSCGTTRELQKLKQQAMEYYRENDVPRRLEELLNSTFYLQPADVYGHLPSPPKAETKKGHDGSKRGQQQITGKMSHLGCLTINCDSIEQPLLLIQEICANLGLELGTNLHLAINCAGHELMDYDSEQWDSIYHALGSRCYIIAGTASKSISKLLEQGNISIPKSNGLIIKHTNQTTMSDLVEITNLIDSKKHITVFGSTEGESSDDSLVDLAVGLGVRFIKLGGLSRGERVTKYNRLLTIEEELVQNGTLGFKEEHTFFYFNEEAEKAAEALEAAAAREPLVPTFPTQGVEESAETGASSG

SEQ ID NO: 27507 - protein, 138 aa, Homo sapiens
  Payload ID: 5420
  Gene Symbol: ENO4
  Gene Name: enolase family member 4
  ENSP ID: ENSP00000474839
  MOD_RES (1)..(1): Any amino acid
XGRSCGTTRELQKLKQQAMEYYRENDVPRRLEELLNSTFYLQPADVYGHLANCFSKLAKPPTICKIVGKDVLDGLGLPTLQVDIFCTIQNFPKNVCSVVISTHFEVHENALPELAKAEEAERASAVSTAVQWVNSTIT

SEQ ID NO: 27508 - protein, 628 aa, Homo sapiens [sequence omitted]

SEQ ID NO: 27509 - protein, 443 aa, Homo sapiens
  Payload ID: 5421
  Gene Symbol: ENOSF1
  Gene Name: enolase superfamily member 1
  Uniprot ID: Q7L5Y1
  ENSP ID: ENSP00000251101
MVRGRISRLSVRDVRFPTSLGGHGADAMHTDPDYSAAYVVIETDAEDGIKGCGITFTLGKGTEVVVCAVNALAHHVLNKDLKDIVGDFRGFYRQLTSDGQLRWIGPEKGVVHLATAAVLNAVWDLWAKQEGKPVWKLLVDMDPRMLVSCIDFRYITDVLTEEDALEILQKGQIGKKEREKQMLAQGYPAYTTSCAWLGYSDDTLKQLCAQALKDGWTRFKVKVGADLQDDMRRCQIIRDMIGPEKTLMMDANQRWDVPEAVEWMSKLAKFKPLWIEEPTSPDDILGHATISKALVPLGIGIATGEQCHNRVIFKQLLQAKALQFLQIDSCRLGSVNENLSVLLMAKKFEIPVCPHAGGVGLCELVQHLIIFDYISVSASLENRVCEYVDHLHEHFKYPVMIQRASYMPPKDPGYSTEMKEESVKKHQYPDGEVWKKLLPAQEN

SEQ ID NO: 27510 - protein, 450 aa, Homo sapiens
  Payload ID: 5421
  Gene Symbol: ENOSF1
  Gene Name: enolase superfamily member 1
  Uniprot ID: Q7L5Y1
  ENSP ID: ENSP00000345974
MVSADAMVSADAMVSADAMVSADAMVSADAMVSADAMVSADAMVSADAMHTDPDYSAAYVVIETDAEDGIKGCGITFTLGKGTEVVVCAVNALAHHVLNKDLKDIVGDFRGFYRQLTSDGQLRWIGPEKGVVHLATAAVLNAVWDLWAKQEGKPVWKLLVDMDPRMLVSCIDFRYITDVLTEEDALEILQKGQIGKKEREKQMLAQGYPAYTTSCAWLGYSDDTLKQLCAQALKDGWTRFKVKVGADLQDDMRRCQIIRDMIGPEKTLMMDANQRWDVPEAVEWMSKLAKFKPLWIEEPTSPDDILGHATISKCHNRVIFKQLLQAKALQFLQIDSCRLGSVNENLSVLLMAKKFEIPVCPHAGGVGLCELVQHLIIFDYISVSASLENRVCEYVDHLHEHFKYPVMIQRASYMPPKDPGYSTEMKEESVKKHQYPDGEVWKKLLPAQEN

SEQ ID NO: 27511 - protein, 361 aa, Homo sapiens
  Payload ID: 5421
  Gene Symbol: ENOSF1
  Gene Name: enolase superfamily member 1
  Uniprot ID: Q7L5Y1
  ENSP ID: ENSP00000373072
MQKMESRGVELPSLWEKALKLIGPEKGVVHLATAAVLNAVWDLWAKQEGKPVWKLLVDMDPRMLVSCIDFRYITDVLTEEDALEILQKGQIGKKEREKQMLAQGYPAYTTSCAWLGYSDDTLKQLCAQALKDGWTRFKVKVGADLQDDMRRCQIIRDMIGPEKTLMMDANQRWDVPEAVEWMSKLAKFKPLWIEEPTSPDDILGHATISKALVPLGIGIATGEQCHNRVIFKQLLQAKALQFLQIDSCRLGSVNENLSVLLMAKKFEIPVCPHAGGVGLCELVQHLIIFDYISVSASLENRVCEYVDHLHEHFKYPVMIQRASYMPPKDPGYSTEMKEESVKKHQYPDGEVWKKLLPAQEN

SEQ ID NO: 27512 - protein, 96 aa, Homo sapiens
  Payload ID: 5421
  Gene Symbol: ENOSF1
  Gene Name: enolase superfamily member 1
  ENSP ID: ENSP00000462925
  MOD_RES (1)..(1): Any amino acid
XHGADAMHTDPDYSAAYVVIETDAEDGIKGCGITFTLGKGTEVDWSRKGRGAPGDSGRPKRGVGLVGQAGGKACLEVTCGHGSQDAGILHRFQVHH

SEQ ID NO: 27513 - protein, 367 aa, Homo sapiens
  Payload ID: 5421
  Gene Symbol: ENOSF1
  Gene Name: enolase superfamily member 1
  ENSP ID: ENSP00000463425
MVRGRISRLSVRDVRFPTSLGGHGADAMHTDPDYSAAYVVIETDAEDGIKGCGITFTLGKGTEVDWSRKGRGAPGDSGRPKRGVGLVGQAGGKACLEVTCGHEKQMLAQGYPAYTTSCAWLGYSDDTLKQLCAQALKDGWTRFKVKVGADLQDDMRRCQIIRDMIGPEKTLMMDANQRWDVPEAVEWMSKLAKFKPLWIEEPTSPDDILGHATISKALVPLGIGIATGEQCHNRVIFKQLLQAKALQFLQIDSCRLGSVNENLSVLLMAKKFEIPVCPHAGGVGLCELVQHLIIFDYISVSASLENRVCEYVDHLHEHFKYPVMIQRASYMPPKDPGYSTEMKEESVKKHQYPDGEVWKKLLPAQEN

SEQ ID NO: 27514 - protein, 179 aa, Homo sapiens
  Payload ID: 5421
  Gene Symbol: ENOSF1
  Gene Name: enolase superfamily member 1
  ENSP ID: ENSP00000463448
MVRGRISRLSVRDVRFPTSLGGHGADAMHTDPDYSAAYVVIETDAEDGIKGCGITFTLGKGTEVVVCAVNALAHHVLNKDLKDIVGDFRGFYRQLTSDGQLRWIGPEKGVVHLATAAVLNAVWDLWAKQEGKPVWKLLVDMKYCRKVKLVKKKERSKCWHKDTLLTRHRAPGWGTQMTR

SEQ ID NO: 27515 - protein, 204 aa, Homo sapiens
  Payload ID: 5421
  Gene Symbol: ENOSF1
  Gene Name: enolase superfamily member 1
  ENSP ID: ENSP00000464614
MVRGRISRLSVRDVRFPTSLGGHGADAMHTDPDYSAAYVVIETDAEDGIKGCGITFTLGKGTEVVVCAVNALAHHVLNKDLKDIVGDFRGFYRQLTSDGQLRWIGPEKGVVHLATAAVLNAVWDLWAKQEGKPVWKLLVDMGRIRRTAGLSRGNSLATGTSNSEGPWKVQNVDGAVFSQRSKCWHKDTLLTRHRAPGWGTQMTR

SEQ ID NO: 27516 - protein, 98 aa, Homo sapiens
  Payload ID: 5421
  Gene Symbol: ENOSF1
  Gene Name: enolase superfamily member 1
  ENSP ID: ENSP00000473632
MIGPEKGVVHLATAAVLNAVWDLWAKQEGKPVWKLLVDMDPRMLVSCIDFRYITDVLTEEDALEILQKGQIGKKEREKQMLAQGYPAYTTSCAWLGYS

SEQ ID NO: 27517 - protein, 261 aa, Homo sapiens
  Payload ID: 5422
  Gene Symbol: ENOPH1
  Gene Name: enolase-phosphatase 1
  Uniprot ID: Q9UHY7
  ENSP ID: ENSP00000273920
MVVLSVPAEVTVILLDIEGTTTPIAFVKDILFPYIEENVKEYLQTHWEEEECQQDVSLLRKQAEEDAHLDGAVPIPAASGNGVDDLQQMIQAVVDNVCWQMSLDRKTTALKQLQGHMWRAAFTAGRMKAEFFADVVPAVRKWREAGMKVYIYSSGSVEAQKLLFGHSTEGDILELVDGHFDTKIGHKVESESYRKIADSIGCSTNNILFLTDVTREASAAEEADVHVAVVVRPGNAGLTDDEKTYYSLITSFSELYLPSST

SEQ ID NO: 27518 - protein, 173 aa, Homo sapiens
  Payload ID: 5422
  Gene Symbol: ENOPH1
  Gene Name: enolase-phosphatase 1
  ENSP ID: ENSP00000422005
MIQAVVDNVCWQMSLDRKTTALKQLQGHMWRAAFTAGRMKAEFFADVVPAVRKWREAGMKVYIYSSGSVEAQKLLFGHSTEGDILELVDGHFDTKIGHKVESESYRKIADSIGCSTNNILFLTDVTREASAAEEADVHVAVVVRPGNAGLTDDEKTYYSLITSFSELYLPSST

SEQ ID NO: 27519 - protein, 115 aa, Homo sapiens
  Payload ID: 5422
  Gene Symbol: ENOPH1
  Gene Name: enolase-phosphatase 1
  Uniprot ID: Q9UHY7
  ENSP ID: ENSP00000427209
MKVYIYSSGSVEAQKLLFGHSTEGDILELVDGHFDTKIGHKVESESYRKIADSIGCSTNNILFLTDVTREASAAEEADVHVAVVVRPGNAGLTDDEKTYYSLITSFSELYLPSST

SEQ ID NO: 27520 - protein, 207 aa, Homo sapiens
  Payload ID: 5422
  Gene Symbol: ENOPH1
  Gene Name: enolase-phosphatase 1
  ENSP ID: ENSP00000477863
MVVLSVPAEVTVILLDIEGTTTPIAFVKDILFPYIEENVKEYLQTHWEEEECQQDVSLLRKQAEEDAHLDGAVPIPAASGNGVDDLQQMIQAVVDNVCWQMSLDRKTTALKQLQGHMWRAAFTAGRMKAEFFADVVPAVRKWREAGMKVYIYSSGSVEAQKLLFGHSTEGDILELVDGHFDTKIGHKVESLPKDCRQHWVLNQTFCF

SEQ ID NO: 27521 - protein, 149 aa, Homo sapiens [sequence omitted]

SEQ ID NO: 27522 - protein, 328 aa, Homo sapiens
  Payload ID: 5423
  Gene Symbol: ECH1
  Gene Name: enoyl CoA hydratase 1, peroxisomal
  Uniprot ID: Q13011
  ENSP ID: ENSP00000221418
MAAGIVASRRLRDLLTRRLTGSNYPGLSISLRLTGSSAQEEASGVALGEAPDHSYESLRVTSAQKHVLHVQLNRPNKRNAMNKVFWREMVECFNKISRDADCRAVVISGAGKMFTAGIDLMDMASDILQPKGDDVARISWYLRDIITRYQETFNVIERCPKPVIAAVHGGCIGGGVDLVTACDIRYCAQDAFFQVKEVDVGLAADVGTLQRLPKVIGNQSLVNELAFTARKMMADEALGSGLVSRVFPDKEVMLDAALALAAEISSKSPVAVQSTKVNLLYSRDHSVAESLNYVASWNMSMLQTQDLVKSVQATTENKELKTVTFSKL

SEQ ID NO: 27523 - protein, 36 aa, Homo sapiens
  Payload ID: 5423
  Gene Symbol: ECH1
  Gene Name: enoyl CoA hydratase 1, peroxisomal
  ENSP ID: ENSP00000469354
MNKVFWREMVECFNKISRDADCRAVVISGAGKMFTA

SEQ ID NO: 27524 - protein, 69 aa, Homo sapiens
  Payload ID: 5423
  Gene Symbol: ECH1
  Gene Name: enoyl CoA hydratase 1, peroxisomal
  ENSP ID: ENSP00000470519
RRLRDLLTRRESPLALWGCVALSCCYSRCRTGRAIRGHEGPESPKFRGLTGSNYPGLSISLRLTGSSAQ

SEQ ID NO: 27525 - protein, 181 aa, Homo sapiens
  Payload ID: 5423
  Gene Symbol: ECH1
  Gene Name: enoyl CoA hydratase 1, peroxisomal
  ENSP ID: ENSP00000470809
MAAGIVASRRLRDLLTRRLTGSNYPGLSISLRLTGSSAQEEASGVALGEAPDHSYESLRVTSAQKHVLHVQLNRPNKRNAMNKVFWREMVECFNKISRDADCRAVVISGAGKMFTAGIDLMDMASDILQPKGDDVARISWYLRDIITRYQETFNVIERCPKPVIAAVHGGCIGGGESAAIL

SEQ ID NO: 27526 - protein, 37 aa, Homo sapiens
  Payload ID: 5423
  Gene Symbol: ECH1
  Gene Name: enoyl CoA hydratase 1, peroxisomal
  ENSP ID: ENSP00000470839
MAAGIVASRRLRDLLTRRESPLALWGTDRLQLPGTQY

SEQ ID NO: 27527 - protein, 55 aa, Homo sapiens
  Payload ID: 5423
  Gene Symbol: ECH1
  Gene Name: enoyl CoA hydratase 1, peroxisomal
  ENSP ID: ENSP00000471738
MAAGIVASRRLRDLLTRRESPLALWGEMVECFNKISRDADCRAVVISGAGKMFTA

SEQ ID NO: 27528 - protein, 267 aa, Homo sapiens
  Payload ID: 5423
  Gene Symbol: ECH1
  Gene Name: enoyl CoA hydratase 1, peroxisomal
  ENSP ID: ENSP00000472322
  MOD_RES (1)..(1): Any amino acid
XIVASRRLRDLLTRRLTGSNYPGLSISLRLTGSSAQEEASGVALGEAPDHSYESLRVTSAQKHVLHVQLNRPNKRNAMNKVFWREMVECFNKISRDADCRAVVISGAGKMFTAGIDLMDMASDILQPKGDDVARISWYLRDIITRYQETFNVIERCPKPVIAAVHGGCIGGGVDLVTACDIRYCAQDAFFQVKEVDVGLAADVGTLQRLPKVIGNQSRVFPDKEVMLDAALALAAEISSKSPVAVQSTKVNLLYSRDHSVAESLNYV

SEQ ID NO: 27529 - protein, 17 aa, Homo sapiens
  Payload ID: 5423
  Gene Symbol: ECH1
  Gene Name: enoyl CoA hydratase 1, peroxisomal
  ENSP ID: ENSP00000472378
MNKVFWREMVECFNKIS

SEQ ID NO: 27530 - protein, 261 aa, Homo sapiens
  Payload ID: 5424
  Gene Symbol: ECHDC2
  Gene Name: enoyl CoA hydratase domain containing 2
  Uniprot ID: Q86YB7
  ENSP ID: ENSP00000351125
MLRVLCLLRPWRPLRARGCASDGAAGGSEIQVRALAGPDQGITEILMNRPSARNALGNVFVSELLETLAQLREDRQVRVLLFRSGVKGVFCAGADLKEREQMSEAEVGVFVQRLRGLMNDIASSAVMGLIETTRGLLPGAGGTQRLPRCLGVALAKELIFTGRRLSGTEAHVLGLVNHAVAQNEEGDAAYQRARALAQEILPQAPIAVRLGKVAIDRGTEVDIASGMAIEGMCYAQNIPTRDRLEGMAAFREKRTPKFVGK

SEQ ID NO: 27531 - protein, 65 aa, Homo sapiens
  Payload ID: 5424
  Gene Symbol: ECHDC2
  Gene Name: enoyl CoA hydratase domain containing 2
  ENSP ID: ENSP00000360575
MLRVLCLLRPWRPLRARGCASDGAAGGSEIQVRALAGPDQGKCAVPGRRMTRLGLGRRQRGTGRL

SEQ ID NO: 27532 - protein, 292 aa, Homo sapiens
  Payload ID: 5424
  Gene Symbol: ECHDC2
  Gene Name: enoyl CoA hydratase domain containing 2
  Uniprot ID: Q86YB7
  ENSP ID: ENSP00000360577
MLRVLCLLRPWRPLRARGCASDGAAGGSEIQVRALAGPDQGITEILMNRPSARNALGNVFVSELLETLAQLREDRQVRVLLFRSGVKGVFCAGADLKEREQMSEAEVGVFVQRLRGLMNDIAAFPAPTIAAMDGFALGGGLELALACDLRVAASSAVMGLIETTRGLLPGAGGTQRLPRCLGVALAKELIFTGRRLSGTEAHVLGLVNHAVAQNEEGDAAYQRARALAQEILPQAPIAVRLGKVAIDRGTEVDIASGMAIEGMCYAQNIPTRDRLEGMAAFREKRTPKFVGK

SEQ ID NO: 27533 - protein, 43 aa, Homo sapiens
  Payload ID: 5424
  Gene Symbol: ECHDC2
  Gene Name: enoyl CoA hydratase domain containing 2
  ENSP ID: ENSP00000438535
MLRVLCLLRPWRPLRARGCASDGAAGGSEIQVRALAGPDQAGH

SEQ ID NO: 27534 - protein, 244 aa, Homo sapiens
  Payload ID: 5424
  Gene Symbol: ECHDC2
  Gene Name: enoyl CoA hydratase domain containing 2
  ENSP ID: ENSP00000439264
MLRVLCLLRPWRPLRARGCASDGAAGGSEIQVRALAGPDQGITEILMNRPSARNALGNVFVSELLETLAQLREDRQVRVLLFRSGVKGVFCAGADLKEREQMSEAEVGVFVQRLRGLMNDIASSAVMGLIETTRGLLPGAGGTQRLPRCLGVALAKELIFTGRRLSGTEAHVLGLVNHAVAQNEEGDAAYQRARALAQEILPQVDIASGMAIEGMCYAQNIPTRDRLEGMAAFREKRTPKFVGK

SEQ ID NO: 27535 - protein, 49 aa, Homo sapiens
  Payload ID: 5424
  Gene Symbol: ECHDC2
  Gene Name: enoyl CoA hydratase domain containing 2
  ENSP ID: ENSP00000439906
MLRVLCLLRPWRPLRARGCASDGAAGGSEIQVRALAGPDQGCRFHEDRP

SEQ ID NO: 27536 - protein, 219 aa, Homo sapiens
  Payload ID: 5424
  Gene Symbol: ECHDC2
  Gene Name: enoyl CoA hydratase domain containing 2
  ENSP ID: ENSP00000441962
MLRVLCLLRPWRPLRARGCASDGAAGGSEIQVRALAGPDQGITEILMNRPSARNALGNVFVSELLETLAQLREDRQVRVLLFRSGVKGVFCAGADLKEREQMSEAEVGVFVQRLRGLMNDIASSAVMGLIETTRGLLPGAGGTQRLPRCLGVALAKELIFTGRRLSGTEAHVLGLVNHAVAQNEEGDAAYQRARALAQEILPQVDIASGMAIEGMCYAQ

SEQ ID NO: 27537 - protein, 48 aa, Homo sapiens
  Payload ID: 5424
  Gene Symbol: ECHDC2
  Gene Name: enoyl CoA hydratase domain containing 2
  ENSP ID: ENSP00000446190
MLRVLCLLRPWRPLRARGCASDGAAGGSEIQVRALAGPDQDKAEDPGR

SEQ ID NO: 27538 - protein, 303 aa, Homo sapiens
  Payload ID: 5425
  Gene Symbol: ECHDC3
  Gene Name: enoyl CoA hydratase domain containing 3
  Uniprot ID: Q96DC8
  ENSP ID: ENSP00000368517
MAAVAVLRAFGASGPMCLRRGPWAQLPARFCSRDPAGAGRRESEPRPTSARQLDGIRNIVLSNPKKRNALSLAMLKSLQSDILHDADSNDLKVIIISAEGPVFSSGHDLKELTEEQGRDYHAEVFQTCSKVMMHIRNHPVPVIAMVNGLAAAAGCQLVASCDIAVASDKSSFATPGVNVGLFCSTPGVALARAVPRKVALEMLFTGEPISAQEALLHGLLSKVVPEAELQEETMRIARKIASLSRPVVSLGKATFYKQLPQDLGTAYYLTSQAMVDNLALRDGQEGITAFLQKRKPVWSHEPV

SEQ ID NO: 27539 - protein, 166 aa, Homo sapiens
  Payload ID: 5425
  Gene Symbol: ECHDC3
  Gene Name: enoyl CoA hydratase domain containing 3
  ENSP ID: ENSP00000398429
MLKSLQSDILHDADSNDLKVIIISAEGPVFSSGHDLKELTEEQGRDYHAEVFQTCSKVMMHIRNHPVPVIAMVNGLAAAAGCQLVASCDIAVASDKSSFATPGVNVGLFCSTPGVALARAVPRKVALEMLFTGEPISAQEALLHGLLSKVVPEAELQEETMRIARK

SEQ ID NO: 27540 - protein, 241 aa, Homo sapiens
  Payload ID: 5425
  Gene Symbol: ECHDC3
  Gene Name: enoyl CoA hydratase domain containing 3
  ENSP ID: ENSP00000405584
MAAVAVLRAFGASGPMCLRRGPWAQLPARFCSRDPAGAGRRESEPRPTSARQLDGIRSAPGRAGSSRWCRVGVRAPPLTRGGPGEPEPRLRPWGGNSPCPGPGPGSETRRNIVLSNPKKRNALSLAMLKSLQSDILHDADSNDLKVIIISAEGPVFSSGHDLKELTEEQGRDYHAEVFQTCSKVMMHIRNHPVPVIAMVNGLAAAAGCQLVASCDIAVASDKSSFATPGVNVGLFCSTPGV

SEQ ID NO: 27541 - protein, 290 aa, Homo sapiens
  Payload ID: 5426
  Gene Symbol: ECHS1
  Gene Name: enoyl CoA hydratase, short chain, 1, mitochondrial
  Uniprot ID: P30084
  ENSP ID: ENSP00000357535
MAALRVLLSCVRGPLRPPVRCPAWRPFASGANFEYIIAEKRGKNNTVGLIQLNRPKALNALCDGLIDELNQALKTFEEDPAVGAIVLTGGDKAFAAGADIKEMQNLSFQDCYSSKFLKHWDHLTQVKKPVIAAVNGYAFGGGCELAMMCDIIYAGEKAQFAQPEILIGTIPGAGGTQRLTRAVGKSLAMEMVLTGDRISAQDAKQAGLVSKICPVETLVEEAIQCAEKIASNSKIVVAMAKESVNAAFEMTLTEGSKLEKKLFYSTFATDDRKEGMTAFVEKRKANFKDQ

SEQ ID NO: 27542 - protein, 302 aa, Homo sapiens
  Payload ID: 5427
  Gene Symbol: ECI1
  Gene Name: enoyl-CoA delta isomerase 1
  Uniprot ID: P42126
  ENSP ID: ENSP00000301729
MALVASVRVPARVLLRAGARLPGAALGRTERAAGGGDGARRFGSQRVLVEPDAGAGVAVMKFKNPPVNSLSLEFLTELVISLEKLENDKSFRGVILTSDRPGVFSAGLDLTEMCGRSPAHYAGYWKAVQELWLRLYQSNLVLVSAINGACPAGGCLVALTCDYRILADNPRYCIGLNETQLGIIAPFWLKDTLENTIGHRAAERALQLGLLFPPAEALQVGIVDQVVPEEQVQSTALSAIAQWMAIPDHARQLTKAMMRKATASRLVTQRDADVQNFVSFISKDSIQKSLQMYLERLKEEKG

SEQ ID NO: 27543 - protein, 285 aa, Homo sapiens
  Payload ID: 5427
  Gene Symbol: ECI1
  Gene Name: enoyl-CoA delta isomerase 1
  Uniprot ID: P42126
  ENSP ID: ENSP00000456319
MALVASVRVPARVLLRAGARLPGAALGRTERAAGGGDGARRFGSQRVLVEPDAGAGVAVMKFKNPPVNSLSLEFLTELVISLEKLENDKSFRGVILTSDRPGVFSAGLDLTEMCGRSPAHYAGYWKAVQELWLRLYQSNLVLVSAINGACPAGGCLVALTCDYRILADNPRLKDTLENTIGHRAAERALQLGLLFPPAEALQVGIVDQVVPEEQVQSTALSAIAQWMAIPDHARQLTKAMMRKATASRLVTQRDADVQNFVSFISKDSIQKSLQMYLERLKEEKG

SEQ ID NO: 27544 - protein, 224 aa, Homo sapiens
  Payload ID: 5427
  Gene Symbol: ECI1
  Gene Name: enoyl-CoA delta isomerase 1
  ENSP ID: ENSP00000456565
MKFKNPPVNSLSLEFLTELVISLEKLENDKSFRGVILTSDRPGVFSAGLDLTEMCGRSPAHYAGYWKAVQELWLRLYQSNLVLVSAINGACPAGGCLVALTCDYRILADNPRYCIGLNETQLGIIAPFWLKDTLENTIGHRAAERALQLGLLFPPAEALQVGIVDQVVPEEQVQSTALSAIAQWMAIPDHARQLTKAMMRKATASRLVTQRDADVQNFVSFISK

SEQ ID NO: 27545 - protein, 243 aa, Homo sapiens
  Payload ID: 5427
  Gene Symbol: ECI1
  Gene Name: enoyl-CoA delta isomerase 1
  ENSP ID: ENSP00000457900
MKFKNPPVNSLSLEFLTELVISLEKLENDKSFRGVILTSDRPGVFSAGLDLTEMCGRSPAHYAGYWKAVQELWLRLYQSNLVLVSAINGACPAGGCLVALTCDYRILADNPRYCIGLNETQLGIIAPFWLKDTLENTIGHRAAERALQLGLLFPPAEALQVGIVDQVVPEEQVQSTALSAIAQWMAIPDHARQLTKAMMRKATASRLVTQRDADVQNFVSFISKDSIQKSLQMYLERLKEEKG

SEQ ID NO: 27546 - protein, 364 aa, Homo sapiens
  Payload ID: 5428
  Gene Symbol: ECI2
  Gene Name: enoyl-CoA delta isomerase 2
  ENSP ID: ENSP00000354737
MNRTAMRASQKDFENSMNQVKLLKKDPGNEVKLKLYALYKQATEGPCNMPKPGVFDLINKAKWDAWNALGSLPKEAARQNYVDLVSSLSPSLESSSQVEPGTDRKSTGFETLVVTSEDGITKIMFNRPKKKNAINTEMYHEIMRALKAASKDDSIITVLTGNGDYYSSGNDLTNFTDIPPGGVEEKAKNNAVLLREFVGCFIDFPKPLIAVVNGPAVGISVTLLGLFDAVYASDRATFHTPFSHLGQSPEGCSSYTFPKIMSPAKATEMLIFGKKLTAGEACAQGLVTEVFPDSTFQKEVWTRLKAFAKLPPNALRISKEVIRKREREKLHAVNAEECNVLQGRWLSDECTNAVVNFLSRKSKL

SEQ ID NO: 27547 - protein, 394 aa, Homo sapiens
  Payload ID: 5428
  Gene Symbol: ECI2
  Gene Name: enoyl-CoA delta isomerase 2
  Uniprot ID: O75521
  ENSP ID: ENSP00000369461
MAMAYLAWRLARRSCPSSLQVTSFPVVQLHMNRTAMRASQKDFENSMNQVKLLKKDPGNEVKLKLYALYKQATEGPCNMPKPGVFDLINKAKWDAWNALGSLPKEAARQNYVDLVSSLSPSLESSSQVEPGTDRKSTGFETLVVTSEDGITKIMFNRPKKKNAINTEMYHEIMRALKAASKDDSIITVLTGNGDYYSSGNDLTNFTDIPPGGVEEKAKNNAVLLREFVGCFIDFPKPLIAVVNGPAVGISVTLLGLFDAVYASDRATFHTPFSHLGQSPEGCSSYTFPKIMSPAKATEMLIFGKKLTAGEACAQGLVTEVFPDSTFQKEVWTRLKAFAKLPPNALRISKEVIRKREREKLHAVNAEECNVLQGRWLSDECTNAVVNFLSRKSKL

SEQ ID NO: 27548 - protein, 152 aa, Homo sapiens
  Payload ID: 5428
  Gene Symbol: ECI2
  Gene Name: enoyl-CoA delta isomerase 2
  ENSP ID: ENSP00000369463
MAMAYLAWRLARRSCPSSLQVTSFPVVQLHMNRTAMRASQKDFENSMNQVKLLKKDPGNEVKLKLYALYKQATEGPCNMPKPGVFDLINKAKWDAWNALGSLPKVLVISIVTFSKCLFIDHGLRLFVIVRSGSCQAELCGFGVQFESFIGIL

SEQ ID NO: 27549 - protein, 364 aa, Homo sapiens; identical to SEQ ID NO: 27546
  Payload ID: 5428
  Gene Symbol: ECI2
  Gene Name: enoyl-CoA delta isomerase 2
  ENSP ID: ENSP00000369468

SEQ ID NO: 27550 - protein, 140 aa, Homo sapiens
  Payload ID: 5428
  Gene Symbol: ECI2
  Gene Name: enoyl-CoA delta isomerase 2
  ENSP ID: ENSP00000417170
MNRTAMRASQKDFENSMNQVKLLKKDPGNEVKLKLYALYKQATEGPCNMPKPGVFDLINKAKWDAWNALGSLPKEAARQNYVDLVSSLSPSLESSSQVEPGTDRKSTGFETLVVTSEDGITKIMFNRPKKKNAINTEEGW

SEQ ID NO: 27551 - protein, 220 aa, Homo sapiens
  Payload ID: 5428
  Gene Symbol: ECI2
  Gene Name: enoyl-CoA delta isomerase 2
  ENSP ID: ENSP00000417459
MGASGGQGYGSLSAVPKVSACLRARSHPPGAGLRAGEPPQLSTRACTSQPGCFWGAKRRLLKASSLQVTSFPVVQLHMNRTAMRASQKDFENSMNQVKLLKKDPGNEVKLKLYALYKQATEGPCNMPKPGVFDLINKAKWDAWNALGSLPKEAARQNYVDLVSSLSPSLESSSQVEPGTDRKSTGFETLVVTSEDGITKIMFNRPKKKNAINTEMYHEIM

SEQ ID NO: 27552 - protein, 197 aa, Homo sapiens
  Payload ID: 5428
  Gene Symbol: ECI2
  Gene Name: enoyl-CoA delta isomerase 2
  ENSP ID: ENSP00000417803
MAMAYLAWRLARRSCPSSLQVTSFPVVQLHMNRTAMRASQKDFENSMNQVKLLKKDPGNEVKLKLYALYKQATEGPCNMPKPGVFDLINKAKWDAWNALGSLPKEAARQNYVDLVSSLSPSLESSSQVEPGTDRKSTGFETLVVTSEDGITKIMFNRPKKKNAINTEMYHEIMRALKAASKDDSIITVLTGNISYTI

SEQ ID NO: 27553 - protein, 364 aa, Homo sapiens; identical to SEQ ID NO: 27546
  Payload ID: 5428
  Gene Symbol: ECI2
  Gene Name: enoyl-CoA delta isomerase 2
  ENSP ID: ENSP00000420309

SEQ ID NO: 27554 - protein, 17 aa, Homo sapiens
  Payload ID: 5429
  Gene Symbol: ECH1
  Gene Name: Enoyl-CoA hydratase 1, peroxisomal
  ENSP ID: ENSP00000488977
MNKVFWREMVECFNKIS

SEQ ID NO: 27555 - protein, 69 aa, Homo sapiens; identical to SEQ ID NO: 27524
  Payload ID: 5429
  Gene Symbol: ECH1
  Gene Name: Enoyl-CoA hydratase 1, peroxisomal
  ENSP ID: ENSP00000489210

SEQ ID NO: 27556 - protein, 37 aa, Homo sapiens; identical to SEQ ID NO: 27526
  Payload ID: 5429
  Gene Symbol: ECH1
  Gene Name: Enoyl-CoA hydratase 1, peroxisomal
  ENSP ID: ENSP00000489283

SEQ ID NO: 27557 - protein, 36 aa, Homo sapiens; identical to SEQ ID NO: 27523
  Payload ID: 5429
  Gene Symbol: ECH1
  Gene Name: Enoyl-CoA hydratase 1, peroxisomal
  ENSP ID: ENSP00000489296

SEQ ID NO: 27558 - protein, 55 aa, Homo sapiens; identical to SEQ ID NO: 27527
  Payload ID: 5429
  Gene Symbol: ECH1
  Gene Name: Enoyl-CoA hydratase 1, peroxisomal
  ENSP ID: ENSP00000489301

SEQ ID NO: 27559 - protein, 181 aa, Homo sapiens; identical to SEQ ID NO: 27525
  Payload ID: 5429
  Gene Symbol: ECH1
  Gene Name: Enoyl-CoA hydratase 1, peroxisomal
  ENSP ID: ENSP00000489400

SEQ ID NO: 27560 - protein, 328 aa, Homo sapiens; identical to SEQ ID NO: 27522
  Payload ID: 5429
  Gene Symbol: ECH1
  Gene Name: Enoyl-CoA hydratase 1, peroxisomal
  ENSP ID: ENSP00000489530

SEQ ID NO: 27561 - protein, 267 aa, Homo sapiens; identical to SEQ ID NO: 27528
  Payload ID: 5429
  Gene Symbol: ECH1
  Gene Name: Enoyl-CoA hydratase 1, peroxisomal
  ENSP ID: ENSP00000489574
  MOD_RES (1)..(1): Any amino acid

SEQ ID NO: 27562 - protein, 723 aa, Homo sapiens
  Payload ID: 5430
  Gene Symbol: EHHADH
  Gene Name: enoyl-CoA, hydratase/3-hydroxyacyl CoA dehydrogenase
  Uniprot ID: Q08426
  ENSP ID: ENSP00000231887
MAEYTRLHNALALIRLRNPPVNAISTTLLRDIKEGLQKAVIDHTIKAIVICGAEGKFSAGADIRGFSAPRTFGLTLGHVVDEIQRNEKPVVAAIQGMAFGGGLELALGCHYRIAHAEAQVGLPEVTLGLLPGARGTQLLPRLTGVPAALDLITSGRRILADEALKLGILDKVVNSDPVEEAIRFAQRVSDQPLESRRLCNKPIQSLPNMDSIFSEALLKMRRQHPGCLAQEACVRAVQAAVQYPYEVGIKKEEELFLYLLQSGQARALQYAFFAERKANKWSTPSGASWKTASARPVSSVGVVGLGTMGRGIVISFARARIPVIAVDSDKNQLATANKMITSVLEKEASKMQQSGHPWSGPKPRLTSSVKELGGVDLVIEAVFEEMSLKKQVFAELSAVCKPEAFLCTNTSALDVDEIASSTDRPHLVIGTHFFSPAHVMKLLEVIPSQYSSPTTIATVMNLSKKIKKIGVVVGNCFGFVGNRMLNPYYNQAYFLLEEGSKPEEVDQVLEEFGFKMGPFRVSDLAGLDVGWKSRKGQGLTGPTLLPGTPARKRGNRRYCPIPDVLCELGRFGQKTGKGWYQYDKPLGRIHKPDPWLSKFLSRYRKTHHIEPRTISQDEILERCLYSLINEAFRILGEGIAASPEHIDVVYLHGYGWPRHKGGPMFYASTVGLPTVLEKLQKYYRQNPDIPQLEPSDYLKKLASQGNPPLKEWQSLAGSPSSKL

SEQ ID NO: 27563 - protein, 627 aa, Homo sapiens
  Payload ID: 5430
  Gene Symbol: EHHADH
  Gene Name: enoyl-CoA, hydratase/3-hydroxyacyl CoA dehydrogenase
  Uniprot ID: Q08426
  ENSP ID: ENSP00000387746
MAFGGGLELALGCHYRIAHAEAQVGLPEVTLGLLPGARGTQLLPRLTGVPAALDLITSGRRILADEALKLGILDKVVNSDPVEEAIRFAQRVSDQPLESRRLCNKPIQSLPNMDSIFSEALLKMRRQHPGCLAQEACVRAVQAAVQYPYEVGIKKEEELFLYLLQSGQARALQYAFFAERKANKWSTPSGASWKTASARPVSSVGVVGLGTMGRGIVISFARARIPVIAVDSDKNQLATANKMITSVLEKEASKMQQSGHPWSGPKPRLTSSVKELGGVDLVIEAVFEEMSLKKQVFAELSAVCKPEAFLCTNTSALDVDEIASSTDRPHLVIGTHFFSPAHVMKLLEVIPSQYSSPTTIATVMNLSKKIKKIGVVVGNCFGFVGNRMLNPYYNQAYFLLEEGSKPEEVDQVLEEFGFKMGPFRVSDLAGLDVGWKSRKGQGLTGPTLLPGTPARKRGNRRYCPIPDVLCELGRFGQKTGKGWYQYDKPLGRIHKPDPWLSKFLSRYRKTHHIEPRTISQDEILERCLYSLINEAFRILGEGIAASPEHIDVVYLHGYGWPRHKGGPMFYASTVGLPTVLEKLQKYYRQNPDIPQLEPSDYLKKLASQGNPPLKEWQSLAGSPSSKL

SEQ ID NO: 27564 - protein, 76 aa, Homo sapiens
  Payload ID: 5430
  Gene Symbol: EHHADH
  Gene Name: enoyl-CoA, hydratase/3-hydroxyacyl CoA dehydrogenase
  ENSP ID: ENSP00000396798
MAEYTRLHNALALIRLRNPPVNAISTTLLRDIKEGLQKAVIDHTIKAIVICGAEGKFSAGNSSLTLSHHLWNPATD

SEQ ID NO: 27565 - protein, 607 aa, Homo sapiens
  Payload ID: 5431
  Gene Symbol: ENTHD1
  Gene Name: ENTH domain containing 1
  Uniprot ID: Q8IYW4
  ENSP ID: ENSP00000317431
MAFRRQVKNFVKNYSDAEIKVREATSNDPWGPSSSLMLDISDLTFNTISLSEIMNMLWHRLNDHGKNWRHVYKSLTLMDYLIKNGSKKVIQHCREGFCNLQTLKDFQHIDEAGKDQGYYIREKSKQVITLLMDEPLLCKEREVACRTRQRTSHSILFSKRQLGSSNSLTACTSAPTPDISASEKKYKLPKFGRLHNKRNVCKAGLKQEHCQDVHLPTETMLSQETLPLKIHGWKSTEDLMTFLDDDPELPLLATPPSIVSPITCLSEAEEVCNLSGADAVPTLSENSPSGQRDVSLDKRSDGIFTNTVTENLLETPLEKQSAAEGLKTLTILPACWSSKEEFISPDLRVSKSDSTFHNQASVETLCLSPSFKIFDRVKEIVINKAYQKPAQSSIQMDDKILKTTTRVSTASEGASSFSPLSMSSPDLASPEKSAHLLSPILAGPSFWTLSHQQLSSTSFKDEDKTAKLHHSFASRGPVSSDVEENDSLNLLGILPNNSDSAKKNISHISSSHWGEFSTQNVDQFIPLSCSGFQSTKDFPQEPEAKNSISVLLREVKRAIARLHEDLSTVIQELNVINNILMSMSLNSSQISQSSQVPQSSEGSSDQI

SEQ ID NO: 27566 - protein, 525 aa, Homo sapiens
  Payload ID: 5432
  Gene Symbol: ENTHD2
  Gene Name: ENTH domain containing 2
  Uniprot ID: Q96N21
  ENSP ID: ENSP00000300714
MAAAPPLRDRLSFLHRLPILLKGTSDDDVPCPGYLFEEIAKISHESPGSSQCLLEYLLSRLHSSSGHGKLKVLKILLYLCSHGSSFFLLILKRNSAFIQEAAAFAGPPDPLHGNSLYQKVRAAAQDLGSTLFSDTVLPLAPSQPLGTPPATGMGSQARPHSTLQGFGYSKEHGRTAVRHQPGQAGGGWDELDSGPSSQNSSQNSDLSRVSDSGSHSGSDSHSGASREPGDLAERVEVVALSDCQQELSLVRTVTRGPRAFLSREEAQHFIKACGLLNCEAVLQLLTCHLRGTSECTQLRALCAIASLGSSDLLPQEHILLRTRPWLQELSMGSPGPVTNKATKILRHFEASCGQLSPARGTSAEPGPTAALPGPSDLLTDAVPLPGSQVFLQPLSSTPVSSRSPAPSSGMPSSPVPTPPPDASPIPAPGDPSEAEARLAESRRWRPERIPGGTDSPKRGPSSCAWSRDSLFAGMELVACPRLVGAGAAAGESCPDAPRAPQTSSQRTAAKEPPGSEPSAFAFLNA

SEQ ID NO: 27567 - protein, 52 aa, Homo sapiens
  Payload ID: 5432
  Gene Symbol: ENTHD2
  Gene Name: ENTH domain containing 2
  ENSP ID: ENSP00000460582
  MOD_RES (1)..(1): Any amino acid
XLSDCQQELSLVRTVTRGPRAFLSREEAQHFIKACPLCAGVDCSTVRPCCSC

SEQ ID NO: 27568 - protein, 183 aa, Homo sapiens
  Payload ID: 5432
  Gene Symbol: ENTHD2
  Gene Name: ENTH domain containing 2
  ENSP ID: ENSP00000460661
MAAAPPLRDRLSFLHRVSEGGPPGPRSHGSSRAPHSPDSPRAGAIDLASPRRVAAPGPFARADAPELPARRAVPGPSKPGLPSRTRRAQGRWAQPDPGGTNRPRPAFSGLRREGRSGGPGGRGAAVSVLLAPRWAGSPPSSLTVAFQRTPVLERHPWVAENTDVSKGQRRTHHSPDSPEGDVR

SEQ ID NO: 27569 - protein, 97 aa, Homo sapiens
  Payload ID: 5432
  Gene Symbol: ENTHD2
  Gene Name: ENTH domain containing 2
  ENSP ID: ENSP00000461294
  MOD_RES (1)..(1): Any amino acid
XDRLSFLHRLLLAPSPAPTPLSCPPAAPSRGLPSRAFQAGPAERKGDGHSQTLGERTGLGQHSVASDGREGAADPVDVEPLCPCCWRPGGLAARRPP

SEQ ID NO: 27570 - protein, 113 aa, Homo sapiens
  Payload ID: 5432
  Gene Symbol: ENTHD2
  Gene Name: ENTH domain containing 2
  ENSP ID: ENSP00000461490
MVGALVPFQLPILLKGTSDDDVPCPGYLFEEIAKISHESPGSSQCLLEYLLSRLHSSSGHGKLKVLKILLYLCSHGSSFFLLILKRNSAFIQEAAAFAGPPDPLHGNSLYQKV

SEQ ID NO: 27571 - protein, 2033 aa, Homo sapiens
  Payload ID: 5433
  Gene Symbol: EVPL
  Gene Name: envoplakin
  Uniprot ID: Q92817
  ENSP ID: ENSP00000301607
MFKGLSKGSQGKGSPKGSPAKGSPKGSPSRHSRAATQELALLISRMQANADQVERDILETQKRLQQDRLNSEQSQALQHQQETGRSLKEAEVLLKDLFLDVDKARRLKHPQAEEIEKDIKQLHERVTQECAEYRALYEKMVLPPDVGPRVDWARVLEQKQKQVCAGQYGPGMAELEQQIAEHNILQKEIDAYGQQLRSLVGPDAATIRSQYRDLLKAASWRGQSLGSLYTHLQGCTRQLSALAEQQRRILQQDWSDLMADPAGVRREYEHFKQHELLSQEQSVNQLEDDGERMVELRHPAVGPIQAHQEALKMEWQNFLNLCICQETQLQHVEDYRRFQEEADSVSQTLAKLNSNLDAKYSPAPGGPPGAPTELLQQLEAEEKRLAVTERATGDLQRRSRDVAPLPQRRNPPQQPLHVDSICDWDSGEVQLLQGERYKLVDNTDPHAWVVQGPGGETKRAPAACFCIPAPDPDAVARASRLASELQALKQKLATVQSRLKASAVESLRPSQQAPSGSDLANPQAQKLLTQMTRLDGDLGQIERQVLAWARAPLSRPTPLEDLEGRIHSHEGTAQRLQSLGTEKETAQKECEAFLSTRPVGPAALQLPVALNSVKNKFSDVQVLCSLYGEKAKAALDLERQIQDADRVIRGFEATLVQEAPIPAEPGALQERVSELQRQRRELLEQQTCVLRLHRALKASEHACAALQNNFQEFCQDLPRQQRQVRALTDRYHAVGDQLDLREKVVQDAALTYQQFKNCKDNLSSWLEHLPRSQVRPSDGPSQIAYKLQAQKRLTQEIQSRERDRATASHLSQALQAALQDYELQADTYRCSLEPTLAVSAPKRPRVAPLQESIQAQEKNLAKAYTEVAAAQQQLLQQLEFARKMLEKKELSEDIRRTHDAKQGSESPAQAGRESEALKAQLEEERKRVARVQHELEAQRSQLLQLRTQRPLERLEEKEVVEFYRDPQLEGSLSRVKAQVEEEGKRRAGLQADLEVAAQKVVQLESKRKTMQPHLLTKEVTQVERDPGLDSQAAQLRIQIQQLRGEDAVISARLEGLKKELLALEKREVDVKEKVVVKEVVKVEKNLEMVKAAQALRLQMEEDAARRKQAEEAVAKLQARIEDLERAISSVEPKVIVKEVKKVEQDPGLLQESSRLRSLLEEERTKNATLARELSDLHSKYSVVEKQRPKVQLQERVHEIFQVDPETEQEITRLKAKLQEMAGKRSGVEKEVEKLLPDLEVLRAQKPTVEYKEVTQEVVRHERSPEVLREIDRLKAQLNELVNSHGRSQEQLIRLQGERDEWRRERAKVETKTVSKEVVRHEKDPVLEKEAERLRQEVREAAQKRRAAEDAVYELQSKRLLLERRKPEEKVVVQEVVVTQKDPKLREEHSRLSGSLDEEVGRRRQLELEVQQLRAGVEEQEGLLSFQEDRSKKLAVERELRQLTLRIQELEKRPPTVQEKIIMEEVVKLEKDPDLEKSTEALRWDLDQEKTQVTELNRECKNLQVQIDVLQKAKSQEKTIYKEVIRVQKDRVLEDERARVWEMLNRERTARQAREEEARRLRERIDRAETLGRTWSREESELQRARDQADQECGRLQQELRALERQKQQQTLQLQEESKLLSQKTESERQKAAQRGQELSRLEAAILREKDQIYEKERTLRDLHAKVSREELSQETQTRETNLSTKISILEPETGKDMSPYEAYKRGIIDRGQYLQLQELECDWEEVTTSGPCGEESVLLDRKSGKQYSIEAALRCRRISKEEYHLYKDGHLPISEFALLVAGETKPSSSLSIGSIISKSPLASPAPQSTSFFSPSFSLGLGDDSFPIAGIYDTTTDNKCSIKTAVAKNMLDPITGQKLLEAQAATGGIVDLLSRERYSVHKAMERGLIENTSTQRLLNAQKAFTGIEDPVTKKRLSVGEAVQKGWMPRESVLPHLQVQHLTGGLIDPKRTGRIPIQQALLSGMISEELAQLLQDESSYEKDLTDPISKERLSYKEAMGRCRKDPLSGLLLLPAALEGYRCYRSASPTVPRSLR

SEQ ID NO: 27572 - protein, 2055 aa, Homo sapiens
  Payload ID: 5433
  Gene Symbol: EVPL
  Gene Name: envoplakin
  ENSP ID: ENSP00000465630
MFKGLSKGSQGKGSPKGSPAKGSPKGSPSRHSRAATQELALLISRMQANADQVERDILETQKRLQQDRLNSEQSQALQHQQETGRSLKEAEVLLKDLFLDVDKARRLKHPQAEEIEKDIKQLHERVTQECAEYRALYEKMVLPPDVGPRVDWARVLEQKQKQVCAGQYGPGMAELEQQIAEHNILQKEIDAYGQQLRSLVGPDAATIRSQYRDLLKAASWRGQSLGSLYTHLQGCTRQLSALAEQQRRILQQDWSDLMADPAGVRREYEHFKQHELLSQEQSVNQLEDDGERMVELRHPAVGPIQAHQEALKMEWQNFLNLCICQETQLQHVEDYRRFQEEADSVSQTLAKLNSNLDAKYSPAPGGPPGAPTELLQQLEAEEKRLAVTERATGDLQRRSRDVAPLPQRRNPPQQPLHVDSICDWDSGEVQLLQGERYKLVDNTDPHAWVVQGPGGETKRAPAACFCIPAPDPDAVARASRLASELQALKQKLATVQSRLKASAVESLRPSQQGTQGGPGRGGCGARRSRFRLPTAPSGSDLANPQAQKLLTQMTRLDGDLGQIERQVLAWARAPLSRPTPLEDLEGRIHSHEGTAQRLQSLGTEKETAQKECEAFLSTRPVGPAALQLPVALNSVKNKFSDVQVLCSLYGEKAKAALDLERQIQDADRVIRGFEATLVQEAPIPAEPGALQERVSELQRQRRELLEQQTCVLRLHRALKASEHACAALQNNFQEFCQDLPRQQRQVRALTDRYHAVGDQLDLREKVVQDAALTYQQFKNCKDNLSSWLEHLPRSQVRPSDGPSQIAYKLQAQKRLTQEIQSRERDRATASHLSQALQAALQDYELQADTYRCSLEPTLAVSAPKRPRVAPLQESIQAQEKNLAKAYTEVAAAQQQLLQQLEFARKMLEKKELSEDIRRTHDAKQGSESPAQAGRESEALKAQLEEERKRVARVQHELEAQRSQLLQLRTQRPLERLEEKEVVEFYRDPQLEGSLSRVKAQVEEEGKRRAGLQADLEVAAQKVVQLESKRKTMQPHLLTKEVTQVERDPGLDSQAAQLRIQIQQLRGEDAVISARLEGLKKELLALEKREVDVKEKVVVKEVVKVEKNLEMVKAAQALRLQMEEDAARRKQAEEAVAKLQARIEDLERAISSVEPKVIVKEVKKVEQDPGLLQESSRLRSLLEEERTKNATLARELSDLHSKYSVVEKQRPKVQLQERVHEIFQVDPETEQEITRLKAKLQEMAGKRSGVEKEVEKLLPDLEVLRAQKPTVEYKEVTQEVVRHERSPEVLREIDRLKAQLNELVNSHGRSQEQLIRLQGERDEWRRERAKVETKTVSKEVVRHEKDPVLEKEAERLRQEVREAAQKRRAAEDAVYELQSKRLLLERRKPEEKVVVQEVVVTQKDPKLREEHSRLSGSLDEEVGRRRQLELEVQQLRAGVEEQEGLLSFQEDRSKKLAVERELRQLTLRIQELEKRPPTVQEKIIMEEVVKLEKDPDLEKSTEALRWDLDQEKTQVTELNRECKNLQVQIDVLQKAKSQEKTIYKEVIRVQKDRVLEDERARVWEMLNRERTARQAREEEARRLRERIDRAETLGRTWSREESELQRARDQADQECGRLQQELRALERQKQQQTLQLQEESKLLSQKTESERQKAAQRGQELSRLEAAILREKDQIYEKERTLRDLHAKVSREELSQETQTRETNLSTKISILEPETGKDMSPYEAYKRGIIDRGQYLQLQELECDWEEVTTSGPCGEESVLLDRKSGKQYSIEAALRCRRISKEEYHLYKDGHLPISEFALLVAGETKPSSSLSIGSIISKSPLASPAPQSTSFFSPSFSLGLGDDSFPIAGIYDTTTDNKCSIKTAVAKNMLDPITGQKLLEAQAATGGIVDLLSRERYSVHKAMERGLIENTSTQRLLNAQKAFTGIEDPVTKKRLSVGEAVQKGWMPRESVLPHLQVQHLTGGLIDPKRTGRIPIQQALLSGMISEELAQLLQDESSYEKDLTDPISKERLSYKEAMGRCRKDPLSGLLLLPAALEGYRCYRSASPTVPRSLR

SEQ ID NO: 27573 - protein, 112 aa, Homo sapiens
  Payload ID: 5433
  Gene Symbol: EVPL
  Gene Name: envoplakin
  ENSP ID: ENSP00000467717
QKGWMPRESVLPHLQVQHLTGGLIDPKRTGRIPIQQALLSGMISEELAQLLQDESSYEKDLTDPISKERLSYKEAMGRCRKDPLSGLLLLPAALEGYRCYRSASPTVPRSLR

SEQ ID NO: 27574 - protein, 301 aa, Homo sapiens
  Payload ID: 5434
  Gene Symbol: EVPLL
  Gene Name: envoplakin-like
  Uniprot ID: A8MZ36
  ENSP ID: ENSP00000382086
MQASADQVERDILETQKRLQQDRLNSEQSQALQHQQETGSSLKEAEVLLKDLFLDVDKARRLKHPQAEETEKDIEQLHERVTQECAEYCALYEKMVLPPRRGIQGRLGTRAGAETEAGLRRPVWAGHGGAGGTDRGAQHRAEGDQRPRRAAAEPGGAGCRHHPEPIPRPTEGGVVARAEPGQPVHALQGCTWQLSALAEQQRRILQQDWSDLMADPAGVRREYEHFKQHELLSQEQSVNQLEEDGKRMVELRHPAVGPIQAHQEALKMEWQNFLNLCICQETQLQHVEDYSRILCPSSSPH

SEQ ID NO: 27575 - protein, 686 aa, Homo sapiens
  Payload ID: 5435
  Gene Symbol: EOMES
  Gene Name: eomesodermin
  Uniprot ID: O95936
  ENSP ID: ENSP00000295743
MQLGEQLLVSSVNLPGAHFYPLESARGGSGGSAGHLPSAAPSPQKLDLDKASKKFSGSLSCEAVSGEPAAASAGAPAAMLSDTDAGDAFASAAAVAKPGPPDGRKGSPCGEEELPSAAAAAAAAAAAAAATARYSMDSLSSERYYLQSPGPQGSELAAPCSLFPYQAAAGAPHGPVYPAPNGARYPYGSMLPPGGFPAAVCPPGRAQFGPGAGAGSGAGGSSGGGGGPGTYQYSQGAPLYGPYPGAAAAGSCGGLGGLGVPGSGFRAHVYLCNRPLWLKFHRHQTEMIITKQGRRMFPFLSFNINGLNPTAHYNVFVEVVLADPNHWRFQGGKWVTCGKADNNMQGNKMYVHPESPNTGSHWMRQEISFGKLKLTNNKGANNNNTQMIVLQSLHKYQPRLHIVEVTEDGVEDLNEPSKTQTFTFSETQFIAVTAYQNTDITQLKIDHNPFAKGFRDNYDSSHQIVPGGRYGVQSFFPEPFVNTLPQARYYNGERTVPQTNGLLSPQQSEEVANPPQRWLVTPVQQPGTNKLDISSYESEYTSSTLLPYGIKSLPLQTSHALGYYPDPTFPAMAGWGGRGSYQRKMAAGLPWTSRTSPTVFSEDQLSKEKVKEEIGSSWIETPPSIKSLDSNDSGVYTSACKRRRLSPSNSSNENSPSIKCEDINAEEYSKDTSKGMGGYYAFYTTP

SEQ ID NO: 27576 - protein, 705 aa, Homo sapiens
  Payload ID: 5435
  Gene Symbol: EOMES
  Gene Name: eomesodermin
  Uniprot ID: O95936
  ENSP ID: ENSP00000388620
MQLGEQLLVSSVNLPGAHFYPLESARGGSGGSAGHLPSAAPSPQKLDLDKASKKFSGSLSCEAVSGEPAAASAGAPAAMLSDTDAGDAFASAAAVAKPGPPDGRKGSPCGEEELPSAAAAAAAAAAAAAATARYSMDSLSSERYYLQSPGPQGSELAAPCSLFPYQAAAGAPHGPVYPAPNGARYPYGSMLPPGGFPAAVCPPGRAQFGPGAGAGSGAGGSSGGGGGPGTYQYSQGAPLYGPYPGAAAAGSCGGLGGLGVPGSGFRAHVYLCNRPLWLKFHRHQTEMIITKQGRRMFPFLSFNINGLNPTAHYNVFVEVVLADPNHWRFQGGKWVTCGKADNNMQGNKMYVHPESPNTGSHWMRQEISFGKLKLTNNKGANNNNTQMIVLQSLHKYQPRLHIVEVTEDGVEDLNEPSKTQTFTFSETQFIAVTAYQNTDITQLKIDHNPFAKGFRDNYDSMYTASENDRLTPSPTDSPRSHQIVPGGRYGVQSFFPEPFVNTLPQARYYNGERTVPQTNGLLSPQQSEEVANPPQRWLVTPVQQPGTNKLDISSYESEYTSSTLLPYGIKSLPLQTSHALGYYPDPTFPAMAGWGGRGSYQRKMAAGLPWTSRTSPTVFSEDQLSKEKVKEEIGSSWIETPPSIKSLDSNDSGVYTSACKRRRLSPSNSSNENSPSIKCEDINAEEYSKDTSKGMGGYYAFYTTP

SEQ ID NO: 27577 - protein, 410 aa, Homo sapiens
  Payload ID: 5435
  Gene Symbol: EOMES
  Gene Name: eomesodermin
  Uniprot ID: O95936
  ENSP ID: ENSP00000487112
MFPFLSFNINGLNPTAHYNVFVEVVLADPNHWRFQGGKWVTCGKADNNMQGNKMYVHPESPNTGSHWMRQEISFGKLKLTNNKGANNNNTQMIVLQSLHKYQPRLHIVEVTEDGVEDLNEPSKTQTFTFSETQFIAVTAYQNTDITQLKIDHNPFAKGFRDNYDSMYTASENDRLTPSPTDSPRSHQIVPGGRYGVQSFFPEPFVNTLPQARYYNGERTVPQTNGLLSPQQSEEVANPPQRWLVTPVQQPGTNKLDISSYESEYTSSTLLPYGIKSLPLQTSHALGYYPDPTFPAMAGWGGRGSYQRKMAAGLPWTSRTSPTVFSEDQLSKEKVKEEIGSSWIETPPSIKSLDSNDSGVYTSACKRRRLSPSNSSNENSPSIKCEDINAEEYSKDTSKGMGGYYAFYTTP

SEQ ID NO: 27578 - protein, 715 aa, Homo sapiens
  Payload ID: 5436
  Gene Symbol: EPX
  Gene Name: eosinophil peroxidase
  Uniprot ID: P11678
  ENSP ID: ENSP00000225371
MHLLPALAGVLATLVLAQPCEGTDPASPGAVETSVLRDCIAEAKLLVDAAYNWTQKSIKQRLRSGSASPMDLLSYFKQPVAATRTVVRAADYMHVALGLLEEKLQPQRSGPFNVTDVLTEPQLRLLSQASGCALRDQAERCSDKYRTITGRCNNKRRPLLGASNQALARWLPAEYEDGLSLPFGWTPSRRRNGFLLPLVRAVSNQIVRFPNERLTSDRGRALMFMQWGQFIDHDLDFSPESPARVAFTAGVDCERTCAQLPPCFPIKIPPNDPRIKNQRDCIPFFRSAPSCPQNKNRVRNQINALTSFVDASMVYGSEVSLSLRLRNRTNYLGLLAINQRFQDNGRALLPFDNLHDDPCLLTNRSARIPCFLAGDTRSTETPKLAAMHTLFMREHNRLATELRRLNPRWNGDKLYNEARKIMGAMVQIITYRDFLPLVLGKARARRTLGHYRGYCSNVDPRVANVFTLAFRFGHTMLQPFMFRLDSQYRASAPNSHVPLSSAFFASWRIVYEGGIDPILRGLMATPAKLNRQDAMLVDELRDRLFRQVRRIGLDLAALNMQRSRDHGLPGYNAWRRFCGLSQPRNLAQLSRVLKNQDLARKFLNLYGTPDNIDIWIGAIAEPLLPGARVGPLLACLFENQFRRARDGDRFWWQKRGVFTKRQRKALSRISLSRIICDNTGITTVSRDIFRANIYPRGFVNCSRIPRLNLSAWRGT

SEQ ID NO: 27579 - protein, 187 aa, Homo sapiens
  Payload ID: 5437
  Gene Symbol: EID1
  Gene Name: EP300 interacting inhibitor of differentiation 1
  Uniprot ID: Q9Y6B2
  ENSP ID: ENSP00000431162
MSEMAELSELYEESSDLQMDVMPGEGDLPQMEVGSGSRELSLRPSRSGAQQLEEEGPMEEEEAQPMAAPEGKRSLANGPNAGEQPGQVAGADFESEDEGEEFDDWEDDYDYPEEEQLSGAGYRVSAALEEADKMFLRTREPALDGGFQMHYEKTPFDQLAFIEELFSLMVVNRLTEELGCDEIIDRE

SEQ ID NO: 27580 - protein, 165 aa, Homo sapiens
  Payload ID: 5437
  Gene Symbol: EID1
  Gene Name: EP300 interacting inhibitor of differentiation 1
  ENSP ID: ENSP00000453886
MSEMAELSELYEESSDLQMDVMPGEGDLPQMEEGPMEEEEAQPMAAPEGKRSLANGPNAGEQPGQVAGADFESEDEGEEFDDWEDDYDYPEEEQLSGAGYRVSAALEEADKMFLRTREPALDGGFQMHYEKTPFDQLAFIEELFSLMVVNRLTEELGCDEIIDRE

SEQ ID NO: 27581 - protein, 236 aa, Homo sapiens
  Payload ID: 5438
  Gene Symbol: EID2
  Gene Name: EP300 interacting inhibitor of differentiation 2
  Uniprot ID: Q8N6I1
  ENSP ID: ENSP00000375073
MSKLPADSSVPQTGAANGDRDVPQAEVGRGRREPAPAQPEEAGEGAMAAARGGPVPAAREGRMAAARAAPAAAARGAPVAAAALARAAAAGRESPAAAAAREARMAEVARLLGEPVDEEGPEGRPRSRHGNGGLAALPYLRLRHPLSVLGINYQQFLRHYLENYPIAPGRIQELEERRRRFVEACRAREAAFDAEYQRNPHRVDLDILTFTIALTASEVINPLIEELGCDKFINRE

SEQ ID NO: 27582 - protein, 161 aa, Homo sapiens
  Payload ID: 5439
  Gene Symbol: EID2B
  Gene Name: EP300 interacting inhibitor of differentiation 2B
  Uniprot ID: Q96D98
  ENSP ID: ENSP00000317564
MAEPTGLLEMSELPGDSSVPQVGTASGVSDVLRGAVGGGVRVQEAREGPVAEAARSMARMPGPVPGPIPSSVPGLASAPDPHQQLAFLEINRQLLFREYLDGSSMIPVRLLRDFEERRRLFVEGCKAREAAFDADPPQMDFAAVAFTVALTASEALSPLAD

SEQ ID NO: 27583 - protein, 333 aa, Homo sapiens
  Payload ID: 5440
  Gene Symbol: EID3
  Gene Name: EP300 interacting inhibitor of differentiation 3
  Uniprot ID: Q8N140
  ENSP ID: ENSP00000435619
MKMDVSVRAAGCSDDLSSGEADVDPKLLELTADEEKCRSIRRQYRQLMYCVRQNREDIVSSANNSLTEALEEANVLFDGVSRTREAALDARFLVMASDLGKEKAKQLNSDMNFFNQLAFCDFLFLFVGLNWMEGDPDKLSDCDDSIALSFWKAIEKEATSWMVKAETFHFVFGSFKLERSAPKPRLEHQKKVRKMEENGNMPTKLQKLDLSSYPEATEKNVERILGLLQTYFRKYPDTPVSYFEFVIDPNSFSRTVENIFYVSFIVRDGFARIRLDEDRLPILEPMNVNQMGEGNDSSCHGRKQGVISLTLQEWKNIVAAFEISEAMITYSSY

SEQ ID NO: 27584 - protein, 430 aa, Homo sapiens
  Payload ID: 5441
  Gene Symbol: EP400NL
  Gene Name: EP400 N-terminal like
  Uniprot ID: Q6ZTU2
  ENSP ID: ENSP00000328997
MQHVSSSQSSQRHVQWPGACPGAGEEQPACSQPSLPLTLPSPSHQLQQLMQVQTQSPTQPSPGPGQALQNVRAGAPGPGLGLCSSSPTGDFVDASVLVRQISLSPSSGGHFVFQDGSGLTQIAQGAQVQLQHPGTPITVRERRPSQPHTQSGGTIHHLGPQSPAAAGGAGLQPLASPSHITTANLPPQISSIIQGQLVQQQQVLQGPPLPRPLGFERTPGVLLPGAGGAAGFGMTSPPPPTSPSRTAVPPGLSSLPLTSVGNTGMKKVPKKLEEIPPASPEMAQMRKQCLDYHHQEMQALKEVFKEYLIELFFLQHFQGNMMDFLAFKERLYGPLQAYLRQNDLDIEEEEEEHFEVINDEVKVVARKHGQPGTPVAIATQLPPRTSAAFPAQQQPLQPLAPTTVLSVSADWNALLQRPNKYIWGLQYLEM

SEQ ID NO: 27585 - protein, 419 aa, Homo sapiens [sequence omitted]

SEQ ID NO: 27586 - protein, 356 aa, Homo sapiens
  Payload ID: 5441
  Gene Symbol: EP400NL
  Gene Name: EP400 N-terminal like
  Uniprot ID: Q6ZTU2
  ENSP ID: ENSP00000376163
MQHVSSSQSSQRHVQWPGACPGAGEEQPACSQPSLPLTLPSPSHQLQQLMDGSGLTQIAQGAQVQLQHPGTPITVRERRPSQPHTQSGGTIHHLGPQSPAAAGGAGLQPLASPSHITTANLPPQISSIIQGQLVQQQQVLQGPPLPRPLGFERTPGVLLPGAGGAAGFGMTSPPPPTSPSRTAVPPGLSSLPLTSVGNTGMKKVPKKLEEIPPASPEMAQMRKQCLDYHHQEMQALKEVFKEYLIELFFLQHFQGNMMDFLAFKERLYGPLQAYLRQNDLDIEEEEEEHFEVINDEVKVVARKHGQPGTPVAIATQLPPRTSAAFPAQQQPLQVLSDGSTVQLPRLSSLGFEDSMC

SEQ ID NO: 27587 - protein, 217 aa, Homo sapiens
  Payload ID: 5441
  Gene Symbol: EP400NL
  Gene Name: EP400 N-terminal like
  ENSP ID: ENSP00000385626
MQHVSSSQSSQRHVQWPGACPGAGEEQPACSQPSLPLTLPSPSHQLQQLMDGSGLTQIAQGAQVQLQHPGTPITVRERRPSQPHTQSGGTIHHLGPQSPAAAGGAGLQPLASPSHITTANLPPQISSIIQGQLVQQQQVLQGPPLPRPLGFERTPGVLLPGAGGAAGFGMTSPPPPTSPSRTAVPPGLSSLPLTSVGNTGMKKVPKKLEEIPPASPE

SEQ ID NO: 27588 - protein, 488 aa, Homo sapiens
  Payload ID: 5441
  Gene Symbol: EP400NL
  Gene Name: EP400 N-terminal like
  Uniprot ID: Q6ZTU2
  ENSP ID: ENSP00000396499
MQHVSSSQSSQRHVQWPGACPGAGEEQPACSQPSLPLTLPSPSHQLQQLMVRGGPAGGQNMNVDLQGVGPGLQGSPQVTLAPLPLPSPTSPGFQFSAQPRRFEHGSPSYIQVTSPLSQQVQTQSPTQPSPGPGQALQNVRAGAPGPGLGLCSSSPTGDFVDASVLVRQISLSPSSGGHFVFQDGSGLTQIAQGAQVQLQHPGTPITVRERRPSQPHTQSGGTIHHLGPQSPAAAGGAGLQPLASPSHITTANLPPQISSIIQGQLVQQQQVLQGPPLPRPLGFERTPGVLLPGAGGAAGFGMTSPPPPTSPSRTAVPPGLSSLPLTSVGNTGMKKVPKKLEEIPPASPEMAQMRKQCLDYHHQEMQALKEVFKEYLIELFFLQHFQGNMMDFLAFKERLYGPLQAYLRQNDLDIEEEEEEHFEVINDEVKVVARKHGQPGTPVAIATQLPPRTSAAFPAQQQPLQQIHMGTPVPGDVNSIKMEASKRQ

SEQ ID NO: 27589 - protein, 223 aa, Homo sapiens
  Payload ID: 5441
  Gene Symbol: EP400NL
  Gene Name: EP400 N-terminal like
  ENSP ID: ENSP00000402806
MQHVSSSQSSQRHVQWPGACPGAGEEQPACSQPSLPLTLPSPSHQLQQLMVQTQSPTQPSPGPGQALQNVRAGAPGPGLGLCSSSPTGDFVDASVLVRQISLSPSSGGHFVFQDGSGLTQIAQGAQVQLQHPGTPITVRERRPSQPHTQSGGTIHHLGPQSPAAAGGAGLQPLASPSHITTANLPPQISSIIQGQLVQQQQVLQGPPLPRPLGFERTPGVLLP

SEQ ID NO: 27590 - protein, 356 aa, Homo sapiens; identical to SEQ ID NO: 27586
  Payload ID: 5441
  Gene Symbol: EP400NL
  Gene Name: EP400 N-terminal like
  Uniprot ID: Q6ZTU2
  ENSP ID: ENSP00000404338

SEQ ID NO: 27591 - protein, 156 aa, Homo sapiens
  Payload ID: 5441
  Gene Symbol: EP400NL
  Gene Name: EP400 N-terminal like
  ENSP ID: ENSP00000441814
MQHVSSSQSSQRHVQWPGACPGAGEEQPACSQPSLPLTLPSPSHQLQQLMVQTQSPTQPSPGPGQALQNVRAGAPGPGLGLCSSSPTGDFVDASVLVRQISLSPSSGGHFVFQDGSGLTQIAQGAQVQLQHPGTPITVRERRPSQPHTQSGGTIHH

SEQ ID NO: 27592 - protein, 224 aa, Homo sapiens
  Payload ID: 5442
  Gene Symbol: EPDR1
  Gene Name: ependymin related 1
  Uniprot ID: Q9UM22
  ENSP ID: ENSP00000199448
MPGRAPLRTVPGALGAWLLGGLWAWTLCGLCSLGAVGAPRPCQAPQQWEGRQVMYQQSSGRNSRALLSYDGLNQRVRVLDERKALIPCKRLFEYILLYKDGVMFQIDQATKQCSKMTLTQPWDPLDIPQNSTFEDQYSIGGPQEQITVQEWSDRKSARSYETWIGIYTVKDCYPVQETFTINYSVILSTRFFDIQLGIKDPSVFTPPSTCQMAQLEKMSEDCSW

SEQ ID NO: 27593 - protein, 90 aa, Homo sapiens
  Payload ID: 5442
  Gene Symbol: EPDR1
  Gene Name: ependymin related 1
  Uniprot ID: Q9UM22
  ENSP ID: ENSP00000409211
MPGRAPLRTVPGALGAWLLGGLWAWTLCGLCSLGAVGAPRPCQAPQQWEGRQVMYQQSSGRNSRALLSYDGLNQRVRVLDERKALIPCKR

SEQ ID NO: 27594 - protein, 163 aa, Homo sapiens
  Payload ID: 5442
  Gene Symbol: EPDR1
  Gene Name: ependymin related 1
  Uniprot ID: Q9UM22
  ENSP ID: ENSP00000413359
MVRDWEGRCAHRGRPAGGGLSNTQRGGGRLFEYILLYKDGVMFQIDQATKQCSKMTLTQPWDPLDIPQNSTFEDQYSIGGPQEQITVQEWSDRKSARSYETWIGIYTVKDCYPVQETFTINYSVILSTRFFDIQLGIKDPSVFTPPSTCQMAQLEKMSEDCSW

SEQ ID NO: 27595 - protein, 122 aa, Homo sapiens
  Payload ID: 5442
  Gene Symbol: EPDR1
  Gene Name: ependymin related 1
  ENSP ID: ENSP00000425858
MFQIDQATKQCSKMTLTQPWDPLDIPQNSTFEDQYSIGGPQEQITVQEWSDRKSARSYETWIGIYTVKDCYPVQETFTINYSVILSTRFFDIQLGIKDPSVFTPPSTCQMAQLEKMSEDCSW

SEQ ID NO: 27596 - protein, 976 aa, Homo sapiens
  Payload ID: 5443
  Gene Symbol: EPHA1
  Gene Name: EPH receptor A1
  Uniprot ID: P21709
  ENSP ID: ENSP00000275815
MERRWPLGLGLVLLLCAPLPPGARAKEVTLMDTSKAQGELGWLLDPPKDGWSEQQQILNGTPLYMYQDCPMQGRRDTDHWLRSNWIYRGEEASRVHVELQFTVRDCKSFPGGAGPLGCKETFNLLYMESDQDVGIQLRRPLFQKVTTVAADQSFTIRDLVSGSVKLNVERCSLGRLTRRGLYLAFHNPGACVALVSVRVFYQRCPETLNGLAQFPDTLPGPAGLVEVAGTCLPHARASPRPSGAPRMHCSPDGEWLVPVGRCHCEPGYEEGGSGEACVACPSGSYRMDMDTPHCLTCPQQSTAESEGATICTCESGHYRAPGEGPQVACTGPPSAPRNLSFSASGTQLSLRWEPPADTGGRQDVRYSVRCSQCQGTAQDGGPCQPCGVGVHFSPGARGLTTPAVHVNGLEPYANYTFNVEAQNGVSGLGSSGHASTSVSISMGHAESLSGLSLRLVKKEPRQLELTWAGSRPRSPGANLTYELHVLNQDEERYQMVLEPRVLLTELQPDTTYIVRVRMLTPLGPGPFSPDHEFRTSPPVSRGLTGGEIVAVIFGLLLGAALLLGILVFRSRRAQRQRQQRQRDRATDVDREDKLWLKPYVDLQAYEDPAQGALDFTRELDPAWLMVDTVIGEGEFGEVYRGTLRLPSQDCKTVAIKTLKDTSPGGQWWNFLREATIMGQFSHPHILHLEGVVTKRKPIMIITEFMENGALDAFLREREDQLVPGQLVAMLQGIASGMNYLSNHNYVHRDLAARNILVNQNLCCKVSDFGLTRLLDDFDGTYETQGGKIPIRWTAPEAIAHRIFTTASDVWSFGIVMWEVLSFGDKPYGEMSNQEVMKSIEDGYRLPPPVDCPAPLYELMKNCWAYDRARRPHFQKLQAHLEQLLANPHSLRTIANFDPRMTLRLPSLSGSDGIPYRTVSEWLESIRMKRYILHFHSAGLDTMECVLELTAEDLTQMGITLPGHQKRILCSIQGFKD

SEQ ID NO: 27597 - protein, 295 aa, Homo sapiens
  Payload ID: 5444
  Gene Symbol: EPHA10
  Gene Name: EPH receptor A10
  Uniprot ID: Q5JZY3
  ENSP ID: ENSP00000316395
METCAGPHPLRLFLCRMQLCLALLLGPWRPGTAEEVILLDSKASQAELGWTALPSNGWEEISGVDEHDRPIRTYQVCNVLEPNQDNWLQTGWISRGRGQRIFVELQFTLRDCSSIPGAAGTCKETFNVYYLETEADLGRGRPRLGGSRPRKIDTIAADESFTQGDLGERKMKLNTEVREIGPLSRRGFHLAFQDVGACVALVSVRVYYKQCRATVRGLATFPATAAESAFSTLVEVAGTCVAHSEGEPGSPPRMHCGADGEWLVPVGRCSCSAGFQERGDFCEGIQLAGGRGVGV

SEQ ID NO: 27598 - protein, 1008 aa, Homo sapiens
  Payload ID: 5444
  Gene Symbol: EPHA10
  Gene Name: EPH receptor A10
  Uniprot ID: Q5JZY3
  ENSP ID: ENSP00000362139
METCAGPHPLRLFLCRMQLCLALLLGPWRPGTAEEVILLDSKASQAELGWTALPSNGWEEISGVDEHDRPIRTYQVCNVLEPNQDNWLQTGWISRGRGQRIFVELQFTLRDCSSIPGAAGTCKETFNVYYLETEADLGRGRPRLGGSRPRKIDTIAADESFTQGDLGERKMKLNTEVREIGPLSRRGFHLAFQDVGACVALVSVRVYYKQCRATVRGLATFPATAAESAFSTLVEVAGTCVAHSEGEPGSPPRMHCGADGEWLVPVGRCSCSAGFQERGDFCEACPPGFYKVSPRRPLCSPCPEHSRALENASTFCVCQDSYARSPTDPPSASCTRPPSAPRDLQYSLSRSPLVLRLRWLPPADSGGRSDVTYSLLCLRCGREGPAGACEPCGPRVAFLPRQAGLRERAATLLHLRPGARYTVRVAALNGVSGPAAAAGTTYAQVTVSTGPGAPWEEDEIRRDRVEPQSVSLSWREPIPAGAPGANDTEYEIRYYEKGQSEQTYSMVKTGAPTVTVTNLKPATRYVFQIRAASPGPSWEAQSFNPSIEVQTLGEAASGSRDQSPAIVVTVVTISALLVLGSVMSVLAIWRRPCSYGKGGGDAHDEEELYFHFKVPTRRTFLDPQSCGDLLQAVHLFAKELDAKSVTLERSLGGGRFGELCCGCLQLPGRQELLVAVHMLRDSASDSQRLGFLAEALTLGQFDHSHIVRLEGVVTRGSTLMIVTEYMSHGALDGFLRRHEGQLVAGQLMGLLPGLASAMKYLSEMGYVHRGLAARHVLVSSDLVCKISGFGRGPRDRSEAVYTTMSGRSPALWAAPETLQFGHFSSASDVWSFGIIMWEVMAFGERPYWDMSGQDVIKAVEDGFRLPPPRNCPNLLHRLMLDCWQKDPGERPRFSQIHSILSKMVQDPEPPKCALTTCPRPPTPLADRAFSTFPSFGSVGAWLEALDLCRYKDSFAAAGYGSLEAVAEMTAQDLVSLGISLAEHREALLSGISALQARVLQLQGQGVQV

SEQ ID NO: 27599 - protein, 1014 aa, Homo sapiens
  Payload ID: 5444
  Gene Symbol: EPHA10
  Gene Name: EPH receptor A10
  ENSP ID: ENSP00000397746
METCAGPHPLRLFLCRMQLCLALLLGPWRPGTAEEVILLDSKASQAELGWTALPSNGWEEISGVDEHDRPIRTYQVCNVLEPNQDNWLQTGWISRGRGQRIFVELQFTLRDCSSIPGAAGTCKETFNVYYLETEADLGRGRPRLGGSRPRKIDTIAADESFTQGDLGERKMKLNTEVREIGPLSRRGFHLAFQDVGACVALVSVRVYYKQCRATVRGLATFPATAAESAFSTLVEVAGTCVAHSEGEPGSPPRMHCGADGEWLVPVGRCSCSAGFQERGDFCEACPPGFYKVSPRRPLCSPCPEHSRALENASTFCVCQDSYARSPTDPPSASCTRPPSAPRDLQYSLSRSPLVLRLRWLPPADSGGRSDVTYSLLCLRCGREGPAGACEPCGPRVAFLPRQAGLRERAATLLHLRPGARYTVRVAALNGVSGPAAAAGTTYAQVTVSTGPGAPWEEDEIRRDRVEPQSVSLSWREPIPAGAPGANDTEYEIRYYEKGQSEQTYSMVKTGAPTVTVTNLKPATRYVFQIRAASPGPSWEAQSFNPSIEVQTLGEAASGSRDQSPAIVVTVVTISALLVLGSVMSVLAIWRRPCSYGKGGGDAHDEEELYFHFKVPTRRTFLDPQSCGDLLQAVHLFAKELDAKSVTLERSLGGGRFGELCCGCLQLPGRQELLVAVHMLRDSASDSQRLGFLAEALTLGQFDHSHIVRLEGVVTRGSTLMIVTEYMSHGALDGFLRRHEGQLVAGQLMGLLPGLASAMKYLSEMGYVHRGLAARHVLVSSDLVCKISGFGRGPRDRSEAVYTTMSGRSPALWAAPETLQFGHFSSASDVWSFGIIMWEVMAFGERPYWDMSGQDVIKAVEDGFRLPPPRNCPNLLHRLMLDCWQKDPGERPRFSQIHSILSKMVQDPEPPKCALTTCPRPPTPLADRAFSTFPSFGSVGAWLEALDLCRYKDSFAAAGYGSLEAVAEMTAQDLVSLGISLAEHREALLSGISALQARVLQLQGQGVQVIIKTCL

SEQ ID NO: 27600 - protein, 392 aa, Homo sapiens
  Payload ID: 5444
  Gene Symbol: EPHA10
  Gene Name: EPH receptor A10
  ENSP ID: ENSP00000431389
EQTYSMVKTGAPTVTVTNLKPATRYVFQIRAASPGPSWEAQSFNPSIEVQTLGEAASGSRDQSPAIVVTVVTISALLVLGSVMSVLAIWRRPCSYGKGGGDAHDEEELYFHFKVPTRRTFLDPQSCGDLLQAVHLFAKELDAKSVTLERSLGGGRFGELCCGCLQLPGRQELLVAVHMLRDSASDSQRLGFLAEALTLGQFDHSHIVRLEGVVTRGSTLMIVTEYMSHGALDGFLRRHEGQLVAGQLMGLLPGLASAMKYLSEMGYVHRGLAARHVLVSSDLVCKISGFGRGPRDRSEAVYTTMSGRSPALWAAPETLQFGHFSSASDVWSFGIIMWEVMAFGERPYWDMSGQDVIKAVEDGFRLPPPRNCPNLLHRLMLDCWQKDPGLPPH

SEQ ID NO: 27601 - protein, 218 aa, Homo sapiens
  Payload ID: 5444
  Gene Symbol: EPHA10
  Gene Name: EPH receptor A10
  ENSP ID: ENSP00000432693
AQVTVSTGPGAPWEEDEIRRDRVEPQSVSLSWREPIPAGAPGANDTEYEIRYYEKGQSEQTYSMVKTGAPTVTVTNLKPATRYVFQIRAASPGPSWEAQSFNPSIEVQTLGEAASGSRDQSPAIVVTVVTISALLVLGSVMSVLAIWRRPCSYGKGGGDAHDEEELYFHFKVPTRRTFLDPQSCGDLLQAVHLFAKELDAKSVTLERSLGGGLETSPH

SEQ ID NO: 27602 - protein, 92 aa, Homo sapiens
  Payload ID: 5444
  Gene Symbol: EPHA10
  Gene Name: EPH receptor A10
  ENSP ID: ENSP00000436288
  MOD_RES (1)..(1): Any amino acid
XHLRPGARYTVRVAALNGVSGPAAAAGTTYAQVTVSTGPGAPWEEDEIRRDRVEPQSVSLSWREPIPAGAPGANDTEYEIRYYEKDTCADFC

SEQ ID NO: 27603 - protein, 217 aa, Homo sapiens
  Payload ID: 5444
  Gene Symbol: EPHA10
  Gene Name: EPH receptor A10
  ENSP ID: ENSP00000436425
  MOD_RES (1)..(1): Any amino acid
XQIRAASPGPSWEAQSFNPSIEVQTLGEAASGSRDQSPAIVVTVVTISALLVLGSVMSVLAIWRRPCSYGKGGGDAHDEEELYFHFKVPTRRTFLDPQSCGDLLQAVHLFAKELDAKSVTLERSLGGGLCSCLEALPPHQAHPPPRKSLACLIIGKRMAEGSVTLSWSSRAVWGAVLWLLAAPRSPGAARSRAYAEGQRLRLTEARLPGRGPHAGPV

SEQ ID NO: 27604 - protein, 155 aa, Homo sapiens
  Payload ID: 5444
  Gene Symbol: EPHA10
  Gene Name: EPH receptor A10
  ENSP ID: ENSP00000441822
MVKTGAPTVTVTNLKPATRYVFQIRAASPGPSWEAQSFNPSIEVQTLGEAASGSRDQSPAIVVTVVTISALLVLGSVMSVLAIWRRPCSYGKGGGDAHDEEELYFHFKVPTRRTFLDPQSCGDLLQAVHLFAKELDAKSVTLERSLGGGLETSPH

SEQ ID NO: 27605 - protein, 976 aa, Homo sapiens
  Payload ID: 5445
  Gene Symbol: EPHA2
  Gene Name: EPH receptor A2
  Uniprot ID: P29317
  ENSP ID: ENSP00000351209
MELQAARACFALLWGCALAAAAAAQGKEVVLLDFAAAGGELGWLTHPYGKGWDLMQNIMNDMPIYMYSVCNVMSGDQDNWLRTNWVYRGEAERIFIELKFTVRDCNSFPGGASSCKETFNLYYAESDLDYGTNFQKRLFTKIDTIAPDEITVSSDFEARHVKLNVEERSVGPLTRKGFYLAFQDIGACVALLSVRVYYKKCPELLQGLAHFPETIAGSDAPSLATVAGTCVDHAVVPPGGEEPRMHCAVDGEWLVPIGQCLCQAGYEKVEDACQACSPGFFKFEASESPCLECPEHTLPSPEGATSCECEEGFFRAPQDPASMPCTRPPSAPHYLTAVGMGAKVELRWTPPQDSGGREDIVYSVTCEQCWPESGECGPCEASVRYSEPPHGLTRTSVTVSDLEPHMNYTFTVEARNGVSGLVTSRSFRTASVSINQTEPPKVRLEGRSTTSLSVSWSIPPPQQSRVWKYEVTYRKKGDSNSYNVRRTEGFSVTLDDLAPDTTYLVQVQALTQEGQGAGSKVHEFQTLSPEGSGNLAVIGGVAVGVVLLLVLAGVGFFIHRRRKNQRARQSPEDVYFSKSEQLKPLKTYVDPHTYEDPNQAVLKFTTEIHPSCVTRQKVIGAGEFGEVYKGMLKTSSGKKEVPVAIKTLKAGYTEKQRVDFLGEAGIMGQFSHHNIIRLEGVISKYKPMMIITEYMENGALDKFLREKDGEFSVLQLVGMLRGIAAGMKYLANMNYVHRDLAARNILVNSNLVCKVSDFGLSRVLEDDPEATYTTSGGKIPIRWTAPEAISYRKFTSASDVWSFGIVMWEVMTYGERPYWELSNHEVMKAINDGFRLPTPMDCPSAIYQLMMQCWQQERARRPKFADIVSILDKLIRAPDSLKTLADFDPRVSIRLPSTSGSEGVPFRTVSEWLESIKMQQYTEHFMAAGYTAIEKVVQMTNDDIKRIGVRLPGHQKRIAYSLLGLKDQVNTVGIPI

SEQ ID NO: 27606 - protein, 983 aa, Homo sapiens
  Payload ID: 5446
  Gene Symbol: EPHA3
  Gene Name: EPH receptor A3
  Uniprot ID: P29320
  ENSP ID: ENSP00000337451
MDCQLSILLLLSCSVLDSFGELIPQPSNEVNLLDSKTIQGELGWISYPSHGWEEISGVDEHYTPIRTYQVCNVMDHSQNNWLRTNWVPRNSAQKIYVELKFTLRDCNSIPLVLGTCKETFNLYYMESDDDHGVKFREHQFTKIDTIAADESFTQMDLGDRILKLNTEIREVGPVNKKGFYLAFQDVGACVALVSVRVYFKKCPFTVKNLAMFPDTVPMDSQSLVEVRGSCVNNSKEEDPPRMYCSTEGEWLVPIGKCSCNAGYEERGFMCQACRPGFYKALDGNMKCAKCPPHSSTQEDGSMNCRCENNYFRADKDPPSMACTRPPSSPRNVISNINETSVILDWSWPLDTGGRKDVTFNIICKKCGWNIKQCEPCSPNVRFLPRQFGLTNTTVTVTDLLAHTNYTFEIDAVNGVSELSSPPRQFAAVSITTNQAAPSPVLTIKKDRTSRNSISLSWQEPEHPNGIILDYEVKYYEKQEQETSYTILRARGTNVTISSLKPDTIYVFQIRARTAAGYGTNSRKFEFETSPDSFSISGESSQVVMIAISAAVAIILLTVVIYVLIGRFCGYKSKHGADEKRLHFGNGHLKLPGLRTYVDPHTYEDPTQAVHEFAKELDATNISIDKVVGAGEFGEVCSGRLKLPSKKEISVAIKTLKVGYTEKQRRDFLGEASIMGQFDHPNIIRLEGVVTKSKPVMIVTEYMENGSLDSFLRKHDAQFTVIQLVGMLRGIASGMKYLSDMGYVHRDLAARNILINSNLVCKVSDFGLSRVLEDDPEAAYTTRGGKIPIRWTSPEAIAYRKFTSASDVWSYGIVLWEVMSYGERPYWEMSNQDVIKAVDEGYRLPPPMDCPAALYQLMLDCWQKDRNNRPKFEQIVSILDKLIRNPGSLKIITSAAARPSNLLLDQSNVDITTFRTTGDWLNGVWTAHCKEIFTGVEYSSCDTIAKISTDDMKKVGVTVVGPQKKIISSIKALETQSKNGPVPV

SEQ ID NO: 27607 - protein, 539 aa, Homo sapiens
  Payload ID: 5446
  Gene Symbol: EPHA3
  Gene Name: EPH receptor A3
  Uniprot ID: P29320
  ENSP ID: ENSP00000399926
MDCQLSILLLLSCSVLDSFGELIPQPSNEVNLLDSKTIQGELGWISYPSHGWEEISGVDEHYTPIRTYQVCNVMDHSQNNWLRTNWVPRNSAQKIYVELKFTLRDCNSIPLVLGTCKETFNLYYMESDDDHGVKFREHQFTKIDTIAADESFTQMDLGDRILKLNTEIREVGPVNKKGFYLAFQDVGACVALVSVRVYFKKCPFTVKNLAMFPDTVPMDSQSLVEVRGSCVNNSKEEDPPRMYCSTEGEWLVPIGKCSCNAGYEERGFMCQACRPGFYKALDGNMKCAKCPPHSSTQEDGSMNCRCENNYFRADKDPPSMACTRPPSSPRNVISNINETSVILDWSWPLDTGGRKDVTFNIICKKCGWNIKQCEPCSPNVRFLPRQFGLTNTTVTVTDLLAHTNYTFEIDAVNGVSELSSPPRQFAAVSITTNQAAPSPVLTIKKDRTSRNSISLSWQEPEHPNGIILDYEVKYYEKQEQETSYTILRARGTNVTISSLKPDTIYVFQIRARTAAGYGTNSRKFEFETSPDCMYYFNAV

SEQ ID NO: 27608 - protein, 918 aa, Homo sapiens
  Payload ID: 5446
  Gene Symbol: EPHA3
  Gene Name: EPH receptor A3
  ENSP ID: ENSP00000419190
MDCQLSILLLLSCSVLDSFGELIPQPSNEVNLLDSKTIQGELGWISYPSHGWEEISGVDEHYTPIRTYQVCNVMDHSQNNWLRTNWVPRNSAQKIYVELKFTLRDCNSIPLVLGTCKETFNLYYMESDDDHGVKFREHQFTKIDTIAADESFTQMDLGDRILKLNTEIREVGPVNKKGFYLAFQDVGACVALVSVRVYFKKCPFTVKNLAMFPDTVPMDSQSLVEVRGSCVNNSKEEDPPRMYCSTEGEWLVPIGKCSCNAGYEERGFMCQACRPGFYKALDGNMKCAKCPPHSSTQEDGSMNCRCENNYFRADKDPPSMACTRPPSSPRNVISNINETSVILDWSWPLDTGGRKDVTFNIICKKCGWNIKQCEPCSPNVRFLPRQFGLTNTTVTVTDLLAHTNYTFEIDAVNGVSELSSPPRQFAAVSITTNQAAPSPVLTIKKDRTSRNSISLSWQEPEHPNGIILDYEVKYYEKQEQETSYTILRARGTNVTISSLKPDTIYVFQIRARTAAGYGTNSRKFEFETSPDSFSISGESSQVVMIAISAAVAIILLTVVIYVLIGRFCGYKSKHGADEKRLHFGNGHLKLPGLRTYVDPHTYEDPTQAVHEFAKELDATNISIDKVVGAGEFGEVCSGRLKLPSKKEISVAIKTLKVGYTEKQRRDFLGEASIMGQFDHPNIIRLEGVVTKSKPVMIVTEYMENGSLDSFLRKHDAQFTVIQLVGMLRGIASGMKYLSDMGYVHRDLAARNILINSNLVCKVSDFGLSRVLEDDPEAAYTTRGGKIPIRWTSPEAIAYRKFTSASDVWSYGIVLWEVMSYGERPYWEMSNQDVIKAVDEGYRLPPPMDCPAALYQLMLDCWQKDRNNRPKFEQIVSILDKLIRNPGSLKIITSAAARPSNLLLDQSNVDITTFRTTVT

SEQ ID NO: 27609 - protein, 986 aa, Homo sapiens
  Payload ID: 5447
  Gene Symbol: EPHA4
  Gene Name: EPH receptor A4
  Uniprot ID: P54764
  ENSP ID: ENSP00000281821
MAGIFYFALFSCLFGICDAVTGSRVYPANEVTLLDSRSVQGELGWIASPLEGGWEEVSIMDEKNTPIRTYQVCNVMEPSQNNWLRTDWITREGAQRVYIEIKFTLRDCNSLPGVMGTCKETFNLYYYESDNDKERFIRENQFVKIDTIAADESFTQVDIGDRIMKLNTEIRDVGPLSKKGFYLAFQDVGACIALVSVRVFYKKCPLTVRNLAQFPDTITGADTSSLVEVRGSCVNNSEEKDVPKMYCGADGEWLVPIGNCLCNAGHEERSGECQACKIGYYKALSTDATCAKCPPHSYSVWEGATSCTCDRGFFRADNDAASMPCTRPPSAPLNLISNVNETSVNLEWSSPQNTGGRQDISYNVVCKKCGAGDPSKCRPCGSGVHYTPQQNGLKTTKVSITDLLAHTNYTFEIWAVNGVSKYNPNPDQSVSVTVTTNQAAPSSIALVQAKEVTRYSVALAWLEPDRPNGVILEYEVKYYEKDQNERSYRIVRTAARNTDIKGLNPLTSYVFHVRARTAAGYGDFSEPLEVTTNTVPSRIIGDGANSTVLLVSVSGSVVLVVILIAAFVISRRRSKYSKAKQEADEEKHLNQGVRTYVDPFTYEDPNQAVREFAKEIDASCIKIEKVIGVGEFGEVCSGRLKVPGKREICVAIKTLKAGYTDKQRRDFLSEASIMGQFDHPNIIHLEGVVTKCKPVMIITEYMENGSLDAFLRKNDGRFTVIQLVGMLRGIGSGMKYLSDMSYVHRDLAARNILVNSNLVCKVSDFGMSRVLEDDPEAAYTTRGGKIPIRWTAPEAIAYRKFTSASDVWSYGIVMWEVMSYGERPYWDMSNQDVIKAIEEGYRLPPPMDCPIALHQLMLDCWQKERSDRPKFGQIVNMLDKLIRNPNSLKRTGTESSRPNTALLDPSSPEFSAVVSVGDWLQAIKMDRYKDNFTAAGYTTLEAVVHVNQEDLARIGITAITHQNKILSSVQAMRTQMQQMHGRMVPV

SEQ ID NO: 27610 - protein, 949 aa, Homo sapiens
  Payload ID: 5447
  Gene Symbol: EPHA4
  Gene Name: EPH receptor A4
  ENSP ID: ENSP00000386276
MAGIFYFALFSCLFGICDAVTGSRVYPANEVTLLDSRSVQGELGWIASPLEGGWEEVSIMDEKNTPIRTYQVCNVMEPSQNNWLRTDWITREGAQRVYIEIKFTLRDCNSLPGVMGTCKETFNLYYYESDNDKERFIRENQFVKIDTIAADESFTQVDIGDRIMKLNTEIRDVGPLSKKGFYLAFQDVGACIALVSVRVFYKKCPLTVRNLAQFPDTITGADTSSLVEVRGSCVNNSEEKDVPKMYCGADGEWLVPIGNCLCNAGHEERSGECQACKIGYYKALSTDATCAKCPPHSYSVWEGATSCTCDRGFFRADNDAASMPCTRPPSAPLNLISNVNETSVNLEWSSPQNTGGRQDISYNVVCKKCGAGDPSKCRPCGSGVHYTPQQNGLKTTKVSITDLLAHTNYTFEIWAVNGVSKYNPNPDQSVSVTVTTNQAAPSSIALVQAKEVTRYSVALAWLEPDRPNGVILEYEVKYYEKDQNERSYRIVRTAARNTDIKGLNPLTSYVFHVRARTAAGYGDFSEPLEVTTNTVPSRIIGDGANSTVLLVSVSGSVVLVVILIAAFVISRRRSKYSKAKQEADEEKHLNQGVRTYVDPFTYEDPNQAVREFAKEIDASCIKIEKVIGVGEFGEVCSGRLKVPGKREICVAIKTLKAGYTDKQRRDFLSEASIMGQFDHPNIIHLEGVVTKCKPVMIITEYMENGSLDAFLRKNDGRFTVIQLVGMLRGIGSGMKYLSDMSYVHRDLAARNILVNSNLVCKVSDFGMSRVLEDDPEAAYTTRGGKIPIRWTAPEAIAYRKFTSASDVWSYGIVMWEVMSYGERPYWDMSNQDVIKAIEEGYRLPPPMDCPIALHQLMLDCWQKERSDRPKFGQIVNMLDKLIRNPNSLKRTGTESSRPNTALLDPSSPEFSAVVSVGDWLQAIKMDRYKDNFTAAGYTTLEAVVHVNQE

SEQ ID NO: 27611 - protein, 986 aa, Homo sapiens; identical to SEQ ID NO: 27609
  Payload ID: 5447
  Gene Symbol: EPHA4
  Gene Name: EPH receptor A4
  Uniprot ID: P54764
  ENSP ID: ENSP00000386829

SEQ ID NO: 27612 - protein, 38 aa, Homo sapiens
  Payload ID: 5447
  Gene Symbol: EPHA4
  Gene Name: EPH receptor A4
  ENSP ID: ENSP00000391517
MAGIFYFALFSCLFGICDAVTGSRVYPANEVGGSEYHG

SEQ ID NO: 27613 - protein, 177 aa, Homo sapiens
  Payload ID: 5447
  Gene Symbol: EPHA4
  Gene Name: EPH receptor A4
  ENSP ID: ENSP00000395917
MAGIFYFALFSCLFGICDAVTGSRVYPANEGPPSAPLNLISNVNETSVNLEWSSPQNTGGRQDISYNVVCKKCGAGDPSKCRPCGSGVHYTPQQNGLKTTKVSITDLLAHTNYTFEIWAVNGVSKYNPNPDQSVSVTVTTNQAAPSSIALVQAKEVTRYSVALAWLEPDRPNGVILE

SEQ ID NO: 27614 - protein, 188 aa, Homo sapiens
  Payload ID: 5447
  Gene Symbol: EPHA4
  Gene Name: EPH receptor A4
  ENSP ID: ENSP00000401405
  MOD_RES (1)..(1): Any amino acid
XFHGSLSSTHFTCKIGYYKALSTDATCAKCPPHSYSVWEGATSCTCDRGFFRADNDAASMPCTRPPSAPLNLISNVNETSVNLEWSSPQNTGGRQDISYNVVCKKCGAGDPSKCRPCGSGVHYTPQQNGLKTTKVSITDLLAHTNYTFEIWAVNGVSKYNPNPDQSVSVTVTTNQAAPSSIALVQAKE

SEQ ID NO: 27615 - protein, 91 aa, Homo sapiens
  Payload ID: 5447
  Gene Symbol: EPHA4
  Gene Name: EPH receptor A4
  ENSP ID: ENSP00000404089
MAGIFYFALFSCLFGICDAVTGSRVYPANEVTLLDSRSVQGELGWIASPLEGGWEEVSIMDEKNTPIRTYQVCNVMEPSQNNWLRTDWITR

SEQ ID NO: 27616 - protein, 37 aa, Homo sapiens
  Payload ID: 5447
  Gene Symbol: EPHA4
  Gene Name: EPH receptor A4
  ENSP ID: ENSP00000408145
AYRKFTSASDVWSYGIVMWEVMSYGERPYWDMSNQDT

SEQ ID NO: 27617 - protein, 126 aa, Homo sapiens
  Payload ID: 5447
  Gene Symbol: EPHA4
  Gene Name: EPH receptor A4
  ENSP ID: ENSP00000410158
MDEKNTPIRTYQVCNVMEPSQNNWLRTDWITREGAQRVYIEIKFTLRDCNSLPGVMGTCKETFNLYYYESDNDKERFIRENQFVKIDTIAADESFTQVDIGDRIMKLNTEIRDVGPLSKKGFYLAF

SEQ ID NO: 27618 - protein, 149 aa, Homo sapiens
  Payload ID: 5447
  Gene Symbol: EPHA4
  Gene Name: EPH receptor A4
  ENSP ID: ENSP00000444085
MAGIFYFALFSCLFGICDAVTGSRVYPANEVTLLDSRSVQGELGWIASPLEGGWEEVSIMDEKNTPIRTYQVCNVMEPSQNNWLRTDWITREGAQRVYIEIKFTLRDCNSLPGVMGTCKETFNLYYYESDNDKERFIRENQFVKIDTIA

SEQ ID NO: 27619 - protein, 1037 aa, Homo sapiens
  Payload ID: 5448
  Gene Symbol: EPHA5
  Gene Name: EPH receptor A5
  Uniprot ID: P54756
  ENSP ID: ENSP00000273854
MRGSGPRGAGRRRPPSGGGDTPITPASLAGCYSAPRRAPLWTCLLLCAALRTLLASPSNEVNLLDSRTVMGDLGWIAFPKNGWEEIGEVDENYAPIHTYQVCKVMEQNQNNWLLTSWISNEGASRIFIELKFTLRDCNSLPGGLGTCKETFNMYYFESDDQNGRNIKENQYIKIDTIAADESFTELDLGDRVMKLNTEVRDVGPLSKKGFYLAFQDVGACIALVSVRVYYKKCPSVVRHLAVFPDTITGADSSQLLEVSGSCVNHSVTDEPPKMHCSAEGEWLVPIGKCMCKAGYEEKNGTCQVCRPGFFKASPHIQSCGKCPPHSYTHEEASTSCVCEKDYFRRESDPPTMACTRPPSAPRNAISNVNETSVFLEWIPPADTGGRKDVSYYIACKKCNSHAGVCEECGGHVRYLPRQSGLKNTSVMMVDLLAHTNYTFEIEAVNGVSDLSPGARQYVSVNVTTNQAAPSPVTNVKKGKIAKNSISLSWQEPDRPNGIILEYEIKYFEKDQETSYTIIKSKETTITAEGLKPASVYVFQIRARTAAGYGVFSRRFEFETTPVFAASSDQSQIPVIAVSVTVGVILLAVVIGVLLSGSCCECGCGRASSLCAVAHPSLIWRCGYSKAKQDPEEEKMHFHNGHIKLPGVRTYIDPHTYEDPNQAVHEFAKEIEASCITIERVIGAGEFGEVCSGRLKLPGKRELPVAIKTLKVGYTEKQRRDFLGEASIMGQFDHPNIIHLEGVVTKSKPVMIVTEYMENGSLDTFLKKNDGQFTVIQLVGMLRGISAGMKYLSDMGYVHRDLAARNILINSNLVCKVSDFGLSRVLEDDPEAAYTTRGGKIPIRWTAPEAIAFRKFTSASDVWSYGIVMWEVVSYGERPYWEMTNQDVIKAVEEGYRLPSPMDCPAALYQLMLDCWQKERNSRPKFDEIVNMLDKLIRNPSSLKTLVNASCRVSNLLAEHSPLGSGAYRSVGEWLEAIKMGRYTEIFMENGYSSMDAVAQVTLEDLRRLGVTLVGHQKKIMNSLQEMKVQLVNGMVPL

SEQ ID NO: 27620 - protein, 1015 aa, Homo sapiens
  Payload ID: 5448
  Gene Symbol: EPHA5
  Gene Name: EPH receptor A5
  Uniprot ID: P54756
  ENSP ID: ENSP00000346899
MRGSGPRGAGRRRPPSGGGDTPITPASLAGCYSAPRRAPLWTCLLLCAALRTLLASPSNEVNLLDSRTVMGDLGWIAFPKNGWEEIGEVDENYAPIHTYQVCKVMEQNQNNWLLTSWISNEGASRIFIELKFTLRDCNSLPGGLGTCKETFNMYYFESDDQNGRNIKENQYIKIDTIAADESFTELDLGDRVMKLNTEVRDVGPLSKKGFYLAFQDVGACIALVSVRVYYKKCPSVVRHLAVFPDTITGADSSQLLEVSGSCVNHSVTDEPPKMHCSAEGEWLVPIGKCMCKAGYEEKNGTCQVCRPGFFKASPHIQSCGKCPPHSYTHEEASTSCVCEKDYFRRESDPPTMACTRPPSAPRNAISNVNETSVFLEWIPPADTGGRKDVSYYIACKKCNSHAGVCEECGGHVRYLPRQSGLKNTSVMMVDLLAHTNYTFEIEAVNGVSDLSPGARQYVSVNVTTNQAAPSPVTNVKKGKIAKNSISLSWQEPDRPNGIILEYEIKYFEKDQETSYTIIKSKETTITAEGLKPASVYVFQIRARTAAGYGVFSRRFEFETTPVFAASSDQSQIPVIAVSVTVGVILLAVVIGVLLSGRRCGYSKAKQDPEEEKMHFHNGHIKLPGVRTYIDPHTYEDPNQAVHEFAKEIEASCITIERVIGAGEFGEVCSGRLKLPGKRELPVAIKTLKVGYTEKQRRDFLGEASIMGQFDHPNIIHLEGVVTKSKPVMIVTEYMENGSLDTFLKKNDGQFTVIQLVGMLRGISAGMKYLSDMGYVHRDLAARNILINSNLVCKVSDFGLSRVLEDDPEAAYTTRGGKIPIRWTAPEAIAFRKFTSASDVWSYGIVMWEVVSYGERPYWEMTNQDVIKAVEEGYRLPSPMDCPAALYQLMLDCWQKERNSRPKFDEIVNMLDKLIRNPSSLKTLVNASCRVSNLLAEHSPLGSGAYRSVGEWLEAIKMGRYTEIFMENGYSSMDAVAQVTLEDLRRLGVTLVGHQKKIMNSLQEMKVQLVNGMVPL

SEQ ID NO: 27621 - protein, 874 aa, Homo sapiens
  Payload ID: 5448
  Gene Symbol: EPHA5
  Gene Name: EPH receptor A5
  ENSP ID: ENSP00000389208
MRGSGPRGAGRRRPPSGGGDTPITPASLAGCYSAPRRAPLWTCLLLCAALRTLLASPSNEVNLLDSRTVMGDLGWIAFPKNGWEEIGEVDENYAPIHTYQVCKVMEQNQNNWLLTSWISNEGASRIFIELKFTLRDCNSLPGGLGTCKETFNMYYFESDDQNGRNIKENQYIKIDTIAADESFTELDLGDRVMKLNTEVRDVGPLSKKGFYLAFQDVGACIALVSVRVYYKKCPSVVRHLAVFPDTITGADSSQLLEVSGSCVNHSVTDEPPKMHCSAEGEWLVPIGKCMCKAGYEEKNGTCQAPSPVTNVKKGKIAKNSISLSWQEPDRPNGIILEYEIKYFEKDQETSYTIIKSKETTITAEGLKPASVYVFQIRARTAAGYGVFSRRFEFETTPVSVAASSDQSQIPVIAVSVTVGVILLAVVIGVLLSGSCCECGCGRASSLCAVAHPSLIWRCGYSKAKQDPEEEKMHFHNGHIKLPGVRTYIDPHTYEDPNQAVHEFAKEIEASCITIERVIGAGEFGEVCSGRLKLPGKRELPVAIKTLKVGYTEKQRRDFLGEASIMGQFDHPNIIHLEGVVTKSKPVMIVTEYMENGSLDTFLKKNDGQFTVIQLVGMLRGISAGMKYLSDMGYVHRDLAARNILINSNLVCKVSDFGLSRVLEDDPEAAYTTRGGKIPIRWTAPEAIAFRKFTSASDVWSYGIVMWEVVSYGERPYWEMTNQDVIKAVEEGYRLPSPMDCPAALYQLMLDCWQKERNSRPKFDEIVNMLDKLIRNPSSLKTLVNASCRVSNLLAEHSPLGSGAYRSVGEWLEAIKMGRYTEIFMENGYSSMDAVAQVTLEDLRRLGVTLVGHQKKIMNSLQEMKVQLVNGMVPL

SEQ ID NO: 27622 - protein, 1004 aa, Homo sapiens
  Payload ID: 5448
  Gene Symbol: EPHA5
  Gene Name: EPH receptor A5
  ENSP ID: ENSP00000427638
MRGSGPRGAGRRRPPSGGGDTPITPASLAGCYSAPRRAPLWTCLLLCAALRTLLASPSNEVNLLDSRTVMGDLGWIAFPKNGWEEIGEVDENYAPIHTYQVCKVMEQNQNNWLLTSWISNEGASRIFIELKFTLRDCNSLPGGLGTCKETFNMYYFESDDQNGRNIKENQYIKIDTIAADESFTELDLGDRVMKLNTEVRDVGPLSKKGFYLAFQDVGACIALVSVRVYYKKCPSVVRHLAVFPDTITGADSSQLLEVSGSCVNHSVTDEPPKMHCSAEGEWLVPIGKCMCKAGYEEKNGTCQVCRPGFFKASPHIQSCGKCPPHSYTHEEASTSCVCEKDYFRRESDPPTMACTRPPSAPRNAISNVNETSVFLEWIPPADTGGRKDVSYYIACKKCNSHAGVCEECGGHVRYLPRQSGLKNTSVMMVDLLAHTNYTFEIEAVNGVSDLSPGARQYVSVNVTTNQAAPSPVTNVKKGKIAKNSISLSWQEPDRPNGIILEYEIKYFEKDQETSYTIIKSKETTITAEGLKPASVYVFQIRARTAAGYGVFSRRFEFETTPVSVAASSDQSQIPVIAVSVTVGVILLAVVIGVLLSGSCCECGCGRASSLCAVAHPSLIWRCGYSKAKQDPEEEKMHFHNGHIKLPGVRTYIDPHTYEDPNQAVHEFAKEIEASCITIERVIGAGEFGEVCSGRLKLPGKRELPVAIKTLKVGYTEKQRRDFLGEASIMGQFDHPNIIHLEGVVTKSKPVMIVTEYMENGSLDTFLKKNDGQFTVIQLVGMLRGISAGMKYLSDMGYVHRDLAARNILINSNLVCKVSDFGLSRVLEDDPEAAYTTRGGKIPIRWTAPEAIAFRKFTSASDVWSYGIVMWEVVSYGERPYWEMTNQDVIKAVEEGYRLPSPMDCPAALYQLMLDCWQKERNSRPKFDEIVNMLDKLIRNPSSLKTLVNASCRVSNLLAEHSPLGSGAYRSVGEWLEAIKMGRYTEIFMENGYSSMDAVAQVTLE

SEQ ID NO: 27623 - protein, 1016 aa, Homo sapiens
  Payload ID: 5448
  Gene Symbol: EPHA5
  Gene Name: EPH receptor A5
  ENSP ID: ENSP00000478537
MRGSGPRGAGRRRPPSGGGDTPITPASLAGCYSAPRRAPLWTCLLLCAALRTLLASPSNEVNLLDSRTVMGDLGWIAFPKNGWEEIGEVDENYAPIHTYQVCKVMEQNQNNWLLTSWISNEGASRIFIELKFTLRDCNSLPGGLGTCKETFNMYYFESDDQNGRNIKENQYIKIDTIAADESFTELDLGDRVMKLNTEVRDVGPLSKKGFYLAFQDVGACIALVSVRVYYKKCPSVVRHLAVFPDTITGADSSQLLEVSGSCVNHSVTDEPPKMHCSAEGEWLVPIGKCMCKAGYEEKNGTCQVCRPGFFKASPHIQSCGKCPPHSYTHEEASTSCVCEKDYFRRESDPPTMACTRPPSAPRNAISNVNETSVFLEWIPPADTGGRKDVSYYIACKKCNSHAGVCEECGGHVRYLPRQSGLKNTSVMMVDLLAHTNYTFEIEAVNGVSDLSPGARQYVSVNVTTNQAAPSPVTNVKKGKIAKNSISLSWQEPDRPNGIILEYEIKYFEKDQETSYTIIKSKETTITAEGLKPASVYVFQIRARTAAGYGVFSRRFEFETTPVSVAASSDQSQIPVIAVSVTVGVILLAVVIGVLLSGRRCGYSKAKQDPEEEKMHFHNGHIKLPGVRTYIDPHTYEDPNQAVHEFAKEIEASCITIERVIGAGEFGEVCSGRLKLPGKRELPVAIKTLKVGYTEKQRRDFLGEASIMGQFDHPNIIHLEGVVTKSKPVMIVTEYMENGSLDTFLKKNDGQFTVIQLVGMLRGISAGMKYLSDMGYVHRDLAARNILINSNLVCKVSDFGLSRVLEDDPEAAYTTRGGKIPIRWTAPEAIAFRKFTSASDVWSYGIVMWEVVSYGERPYWEMTNQDVIKAVEEGYRLPSPMDCPAALYQLMLDCWQKERNSRPKFDEIVNMLDKLIRNPSSLKTLVNASCRVSNLLAEHSPLGSGAYRSVGEWLEAIKMGRYTEIFMENGYSSMDAVAQVTLEDLRRLGVTLVGHQKKIMNSLQEMKVQLVNGMVPL

SEQ ID NO: 27624 - protein, 1038 aa, Homo sapiens
  Payload ID: 5448
  Gene Symbol: EPHA5
  Gene Name: EPH receptor A5
  ENSP ID: ENSP00000480763
MRGSGPRGAGRRRPPSGGGDTPITPASLAGCYSAPRRAPLWTCLLLCAALRTLLASPSNEVNLLDSRTVMGDLGWIAFPKNGWEEIGEVDENYAPIHTYQVCKVMEQNQNNWLLTSWISNEGASRIFIELKFTLRDCNSLPGGLGTCKETFNMYYFESDDQNGRNIKENQYIKIDTIAADESFTELDLGDRVMKLNTEVRDVGPLSKKGFYLAFQDVGACIALVSVRVYYKKCPSVVRHLAVFPDTITGADSSQLLEVSGSCVNHSVTDEPPKMHCSAEGEWLVPIGKCMCKAGYEEKNGTCQVCRPGFFKASPHIQSCGKCPPHSYTHEEASTSCVCEKDYFRRESDPPTMACTRPPSAPRNAISNVNETSVFLEWIPPADTGGRKDVSYYIACKKCNSHAGVCEECGGHVRYLPRQSGLKNTSVMMVDLLAHTNYTFEIEAVNGVSDLSPGARQYVSVNVTTNQAAPSPVTNVKKGKIAKNSISLSWQEPDRPNGIILEYEIKYFEKDQETSYTIIKSKETTITAEGLKPASVYVFQIRARTAAGYGVFSRRFEFETTPVSVAASSDQSQIPVIAVSVTVGVILLAVVIGVLLSGSCCECGCGRASSLCAVAHPSLIWRCGYSKAKQDPEEEKMHFHNGHIKLPGVRTYIDPHTYEDPNQAVHEFAKEIEASCITIERVIGAGEFGEVCSGRLKLPGKRELPVAIKTLKVGYTEKQRRDFLGEASIMGQFDHPNIIHLEGVVTKSKPVMIVTEYMENGSLDTFLKKNDGQFTVIQLVGMLRGISAGMKYLSDMGYVHRDLAARNILINSNLVCKVSDFGLSRVLEDDPEAAYTTRGGKIPIRWTAPEAIAFRKFTSASDVWSYGIVMWEVVSYGERPYWEMTNQDVIKAVEEGYRLPSPMDCPAALYQLMLDCWQKERNSRPKFDEIVNMLDKLIRNPSSLKTLVNASCRVSNLLAEHSPLGSGAYRSVGEWLEAIKMGRYTEIFMENGYSSMDAVAQVTLEDLRRLGVTLVGHQKKIMNSLQEMKVQLVNGMVPL

SEQ ID NO: 27625 - protein, 1130 aa, Homo sapiens
  Payload ID: 5449
  Gene Symbol: EPHA6
  Gene Name: EPH receptor A6
  ENSP ID: ENSP00000374323
MQFPSPPAARSSPAPQAASSSEAAAPATGQPGPSCPVPGTSRRGRPGTPPAGRVEEEEEEEEEDVDKDPHPTQNTCLRCRHFSLRERKREPRRTMGGCEVREFLLQFGFFLPLLTAWPGDCSHVSNNQVVLLDTTTVLGELGWKTYPLNGWDAITEMDEHNRPIHTYQVCNVMEPNQNNWLRTNWISRDAAQKIYVEMKFTLRDCNSIPWVLGTCKETFNLFYMESDESHGIKFKPNQYTKIDTIAADESFTQMDLGDRILKLNTEIREVGPIERKGFYLAFQDIGACIALVSVRVFYKKCPFTVRNLAMFPDTIPRVDSSSLVEVRGSCVKSAEERDTPKLYCGADGDWLVPLGRCICSTGYEEIEGSCHACRPGFYKAFAGNTKCSKCPPHSLTYMEATSVCQCEKGYFRAEKDPPSMACTRPPSAPRNVVFNINETALILEWSPPSDTGGRKDLTYSVICKKCGLDTSQCEDCGGGLRFIPRHTGLINNSVIVLDFVSHVNYTFEIEAMNGVSELSFSPKPFTAITVTTDQDAPSLIGVVRKDWASQNSIALSWQAPAFSNGAILDYEIKYYEKEHEQLTYSSTRSKAPSVIITGLKPATKYVFHIRVRTATGYSGYSQKFEFETGDETSDMAAEQGQILVIATAAVGGFTLLVILTLFFLITGRCQWYIKAKMKSEEKRRNHLQNGHLRFPGIKTYIDPDTYEDPSLAVHEFAKEIDPSRIRIERVIGAGEFGEVCSGRLKTPGKREIPVAIKTLKGGHMDRQRRDFLREASIMGQFDHPNIIRLEGVVTKRSFPAIGVEAFCPSFLRAGFLNSIQAPHPVPGGGSLPPRIPAGRPVMIVVEYMENGSLDSFLRKHDGHFTVIQLVGMLRGIASGMKYLSDMGYVHRDLAARNILVNSNLVCKVSDFGLSRVLEDDPEAAYTTTGGKIPIRWTAPEAIAYRKFSSASDAWSYGIVMWEVMSYGERPYWEMSNQDVILSIEEGYRLPAPMGCPASLHQLMLHCWQKERNHRPKFTDIVSFLDKLIRNPSALHTLVEDILVMPESPGEVPEYPLFVTVGDWLDSIKMGQYKNNFVAAGFTTFDLISRMSIDDIRRIGVILIGHQRRIVSSIQTLRLHMMHIQEKGFHV

SEQ ID NO: 27626 - protein, 373 aa, Homo sapiens
  Payload ID: 5449
  Gene Symbol: EPHA6
  Gene Name: EPH receptor A6
  ENSP ID: ENSP00000419470
MAAEQGQILVIATAAVGGFTLLVILTLFFLITGRCQWYIKAKMKSEEKRRNHLQNGHLRFPGIKTYIDPDTYEDPSLAVHEFAKEIDPSRIRIERVIGAGEFGEVCSGRLKTPGKREIPVAIKTLKGGHMDRQRRDFLREASIMGQFDHPNIIRLEGVVTKSRPVMIVVEYMENGSLDSFLRKHDGHFTVIQLVGMLRGIASGMKYLSDMGYVHRDLAARNILVNSNLVCKVSDFGLSRVLEDDPEAAYTTTGGKIPIRWTAPEAIAYRKFSSASDAWSYGIVMWEVMSYGERPYWEMSNQDVILSIEEGYRLPAPMGCPASLHQLMLHCWQKERNHRPKFTDIVSFLDKLIRNPSALHTLVEDILVSNHESF

SEQ ID NO: 27627 - protein, 547 aa, Homo sapiens
  Payload ID: 5449
  Gene Symbol: EPHA6
  Gene Name: EPH receptor A6
  ENSP ID: ENSP00000420598
MQFPSPPAARSSPAPQAASSSEAAAPATGQPGPSCPVPGTSRRGRPGTPPAGRVEEEEEEEEEDVDKDPHPTQNTCLRCRHFSLRERKREPRRTMGGCEVREFLLQFGFFLPLLTAWPGDCSHVSNNQVVLLDTTTVLGELGWKTYPLNGWDAITEMDEHNRPIHTYQVCNVMEPNQNNWLRTNWISRDAAQKIYVEMKFTLRDCNSIPWVLGTCKETFNLFYMESDESHGIKFKPNQYTKIDTIAADESFTQMDLGDRILKLNTEIREVGPIERKGFYLAFQDIGACIALVSVRVFYKKCPFTVRNLAMFPDTIPRVDSSSLVEVRGSCVKSAEERDTPKLYCGADGDWLVPLGRCICSTGYEEIEGSCHACRPGFYKAFAGNTKCSKCPPHSLTYMEATSVCQCEKGYFRAEKDPPSMACTRPPSAPRNVVFNINETALILEWSPPSDTGGRKDLTYSVICKKCGLDTSQCEDCGGGLRFIPRHTGLINNSVIVLDFVSHVNYTFEIEAMNGVSELSFSPKPFTAITVTTDQDGKFHCCSLKTDP

SEQ ID NO: 27628 - protein, 208 aa, Homo sapiens
  Payload ID: 5449
  Gene Symbol: EPHA6
  Gene Name: EPH receptor A6
  ENSP ID: ENSP00000421260
MKDSPFQVTKLYWLNEKWDFIASASDMAAEQGQILVIATAAVGGFTLLVILTLFFLITGRCQWYIKAKMKSEEKRRNHLQNGHLRFPGIKTYIDPDTYEDPSLAVHEFAKEIDPSRIRIERVIGAGEFGEVCSGRLKTPGKREIPVAIKTLKGGHMDRQRRDFLREASIMGQFDHPNIIRLEGVVTKKPLEMMTYILRAKGEAGFLKK

SEQ ID NO: 27629 - protein, 55 aa, Homo sapiens
  Payload ID: 5449
  Gene Symbol: EPHA6
  Gene Name: EPH receptor A6
  ENSP ID: ENSP00000421353
FVAAGFTTFDLISRMSIDDIRRIGVILIGHQRRIVSSIQTLRLHMMHIQEKGFHV

SEQ ID NO: 27630 - protein, 398 aa, Homo sapiens
  Payload ID: 5449
  Gene Symbol: EPHA6
  Gene Name: EPH receptor A6
  Uniprot ID: Q9UF33
  ENSP ID: ENSP00000421711
MKDSPFQVTKLYWLNEKWDFIASASDMAAEQGQILVIATAAVGGFTLLVILTLFFLITGRCQWYIKAKMKSEEKRRNHLQNGHLRFPGIKTYIDPDTYEDPSLAVHEFAKEIDPSRIRIERVIGAGEFGEVCSGRLKTPGKREIPVAIKTLKGGHMDRQRRDFLREASIMGQFDHPNIIRLEGVVTKRSFPAIGVEAFCPSFLRAGFLNSIQAPHPVPGGGSLPPRIPAGRPVMIVVEYMENGSLDSFLRKHDGHFTVIQLVGMLRGIASGMKYLSDMGYVHRDLAARNILVNSNLVCKVSDFGLSRVLEDDPEAAYTTTRPTNHNKEQSELVKEDGLESLCEQCESSSGYGTGLVLMWKRNRRAMGASGQTRKQCDKRDNPPTDLFQTLTLNLCYSA

SEQ ID NO: 27631 - protein, 334 aa, Homo sapiens
  Payload ID: 5449
  Gene Symbol: EPHA6
  Gene Name: EPH receptor A6
  Uniprot ID: Q9UF33
  ENSP ID: ENSP00000423950
MKDSPFQVTKLYWLNEKWDFIASASDMAAEQGQILVIATAAVGGFTLLVILTLFFLITGRCQWYIKAKMKSEEKRRNHLQNGHLRFPGIKTYIDPDTYEDPSLAVHEFAKEIDPSRIRIERVIGAGEFGEVCSGRLKTPGKREIPVAIKTLKGGHMDRQRRDFLREASIMGQFDHPNIIRLEGVVTKRSFPAIGVEAFCPSFLRAGFLNSIQAPHPVPGGGSLPPRIPAGRPVMIVVEYMENGSLDSFLRKHDGHFTVIQLVGMLRGIASGMKYLSDMGYVHRDLAARNILVNSNLVCKVSDFGLSRVLEDDPEAAYTTTDLFQTLTLNLCYSA

SEQ ID NO: 27632 - protein, 241 aa, Homo sapiens
  Payload ID: 5449
  Gene Symbol: EPHA6
  Gene Name: EPH receptor A6
  ENSP ID: ENSP00000424638
MAAEQGQILVIATAAVGGFTLLVILTLFFLITGRCQWYIKAKMKSEEKRRNHLQNGHLRFPGIKTYIDPDTYEDPSLAVHEFAKEIDPSRIRIERVIGAGEFGEVCSGRLKTPGKREIPVAIKTLKGGHMDRQRRDFLREASIMGQFDHPNIIRLEGVVTKRSFPAIGVEAFCPSFLRAGFLNSIQAPHPVPGGGSLPPRIPAGRPVMIVVEYMENGSLDSFLRLYPKAEYNGKQCSRYSI

SEQ ID NO: 27633 - protein, 324 aa, Homo sapiens
  Payload ID: 5449
  Gene Symbol: EPHA6
  Gene Name: EPH receptor A6
  ENSP ID: ENSP00000425132
  MOD_RES (1)..(1): Any amino acid
XEEEEEEEDVDKDPHPTQNTCLRCRHFSLRERKREPRRTMGGCEVREFLLQFGFFLPLLTAWPGDCSHVSNNQVVLLDTTTVLGELGWKTYPLNGWDAITEMDEHNRPIHTYQVCNVMEPNQNNWLRTNWISRDAAQKIYVEMKFTLRDCNSIPWVLGTCKETFNLFYMESDESHGIKFKPNQYTKIDTIAADESFTQMDLGDRILKLNTEIREVGPIERKGFYLAFQDIGACIALVSVRVFYKKCPFTVRNLAMFPDTIPRVDSSSLVEVRGSCVKSAEERDTPKLYCGADGDWLVPLGRCICSTGYEEIEGSCHGASKGRCF

SEQ ID NO: 27634 - protein, 279 aa, Homo sapiens
  Payload ID: 5450
  Gene Symbol: EPHA7
  Gene Name: EPH receptor A7
  Uniprot ID: Q15375
  ENSP ID: ENSP00000358303
MVFQTRYPSWIILCYIWLLRFAHTGEAQAAKEVLLLDSKAQQTELEWISSPPNGWEEISGLDENYTPIRTYQVCQVMEPNQNNWLRTNWISKGNAQRIFVELKFTLRDCNSLPGVLGTCKETFNLYYYETDYDTGRNIRENLYVKIDTIAADESFTQGDLGERKMKLNTEVREIGPLSKKGFYLAFQDVGACIALVSVKVYYKKCWSIIENLAIFPDTVTGSEFSSLVEVRGTCVSSAEEEAENAPRMHCSAEGEWLVPIGKCICKAGYQQKGDTCERK

SEQ ID NO: 27635 - protein, 998 aa, Homo sapiens
  Payload ID: 5450
  Gene Symbol: EPHA7
  Gene Name: EPH receptor A7
  Uniprot ID: Q15375
  ENSP ID: ENSP00000358309
MVFQTRYPSWIILCYIWLLRFAHTGEAQAAKEVLLLDSKAQQTELEWISSPPNGWEEISGLDENYTPIRTYQVCQVMEPNQNNWLRTNWISKGNAQRIFVELKFTLRDCNSLPGVLGTCKETFNLYYYETDYDTGRNIRENLYVKIDTIAADESFTQGDLGERKMKLNTEVREIGPLSKKGFYLAFQDVGACIALVSVKVYYKKCWSIIENLAIFPDTVTGSEFSSLVEVRGTCVSSAEEEAENAPRMHCSAEGEWLVPIGKCICKAGYQQKGDTCEPCGRGFYKSSSQDLQCSRCPTHSFSDKEGSSRCECEDGYYRAPSDPPYVACTRPPSAPQNLIFNINQTTVSLEWSPPADNGGRNDVTYRILCKRCSWEQGECVPCGSNIGYMPQQTGLEDNYVTVMDLLAHANYTFEVEAVNGVSDLSRSQRLFAAVSITTGQAAPSQVSGVMKERVLQRSVELSWQEPEHPNGVITEYEIKYYEKDQRERTYSTVKTKSTSASINNLKPGTVYVFQIRAFTAAGYGNYSPRLDVATLEEATGKMFEATAVSSEQNPVIIIAVVAVAGTIILVFMVFGFIIGRRHCGYSKADQEGDEELYFHFKFPGTKTYIDPETYEDPNRAVHQFAKELDASCIKIERVIGAGEFGEVCSGRLKLPGKRDVAVAIKTLKVGYTEKQRRDFLCEASIMGQFDHPNVVHLEGVVTRGKPVMIVIEFMENGALDAFLRKHDGQFTVIQLVGMLRGIAAGMRYLADMGYVHRDLAARNILVNSNLVCKVSDFGLSRVIEDDPEAVYTTTGGKIPVRWTAPEAIQYRKFTSASDVWSYGIVMWEVMSYGERPYWDMSNQDVIKAIEEGYRLPAPMDCPAGLHQLMLDCWQKERAERPKFEQIVGILDKMIRNPNSLKTPLGTCSRPISPLLDQNTPDFTTFCSVGEWLQAIKMERYKDNFTAAGYNSLESVARMTIEDVMSLGITLVGHQKKIMSSIQTMRAQMLHLHGTGIQV

SEQ ID NO: 27636 - protein, 1005 aa, Homo sapiens
  Payload ID: 5451
  Gene Symbol: EPHA8
  Gene Name: EPH receptor A8
  Uniprot ID: P29322
  ENSP ID: ENSP00000166244
MAPARGRLPPALWVVTAAAAAATCVSAARGEVNLLDTSTIHGDWGWLTYPAHGWDSINEVDESFQPIHTYQVCNVMSPNQNNWLRTSWVPRDGARRVYAEIKFTLRDCNSMPGVLGTCKETFNLYYLESDRDLGASTQESQFLKIDTIAADESFTGADLGVRRLKLNTEVRSVGPLSKRGFYLAFQDIGACLAILSLRIYYKKCPAMVRNLAAFSEAVTGADSSSLVEVRGQCVRHSEERDTPKMYCSAEGEWLVPIGKCVCSAGYEERRDACVACELGFYKSAPGDQLCARCPPHSHSAAPAAQACHCDLSYYRAALDPPSSACTRPPSAPVNLISSVNGTSVTLEWAPPLDPGGRSDITYNAVCRRCPWALSRCEACGSGTRFVPQQTSLVQASLLVANLLAHMNYSFWIEAVNGVSDLSPEPRRAAVVNITTNQAAPSQVVVIRQERAGQTSVSLLWQEPEQPNGIILEYEIKYYEKDKEMQSYSTLKAVTTRATVSGLKPGTRYVFQVRARTSAGCGRFSQAMEVETGKPRPRYDTRTIVWICLTLITGLVVLLLLLICKKRHCGYSKAFQDSDEEKMHYQNGQAPPPVFLPLHHPPGKLPEPQFYAEPHTYEEPGRAGRSFTREIEASRIHIEKIIGSGDSGEVCYGRLRVPGQRDVPVAIKALKAGYTERQRRDFLSEASIMGQFDHPNIIRLEGVVTRGRLAMIVTEYMENGSLDTFLRTHDGQFTIMQLVGMLRGVGAGMRYLSDLGYVHRDLAARNVLVDSNLVCKVSDFGLSRVLEDDPDAAYTTTGGKIPIRWTAPEAIAFRTFSSASDVWSFGVVMWEVLAYGERPYWNMTNRDVISSVEEGYRLPAPMGCPHALHQLMLDCWHKDRAQRPRFSQIVSVLDALIRSPESLRATATVSRCPPPAFVRSCFDLRGGSGGGGGLTVGDWLDSIRMGRYRDHFAAGGYSSLGMVLRMNAQDVRALGITLMGHQKKILGSIQTMRAQLTSTQGPRRHL

SEQ ID NO: 27637 - protein, 495 aa, Homo sapiens
  Payload ID: 5451
  Gene Symbol: EPHA8
  Gene Name: EPH receptor A8
  Uniprot ID: P29322
  ENSP ID: ENSP00000363775
MAPARGRLPPALWVVTAAAAAATCVSAARGEVNLLDTSTIHGDWGWLTYPAHGWDSINEVDESFQPIHTYQVCNVMSPNQNNWLRTSWVPRDGARRVYAEIKFTLRDCNSMPGVLGTCKETFNLYYLESDRDLGASTQESQFLKIDTIAADESFTGADLGVRRLKLNTEVRSVGPLSKRGFYLAFQDIGACLAILSLRIYYKKCPAMVRNLAAFSEAVTGADSSSLVEVRGQCVRHSEERDTPKMYCSAEGEWLVPIGKCVCSAGYEERRDACVACELGFYKSAPGDQLCARCPPHSHSAAPAAQACHCDLSYYRAALDPPSSACTRPPSAPVNLISSVNGTSVTLEWAPPLDPGGRSDITYNAVCRRCPWALSRCEACGSGTRFVPQQTSLVQASLLVANLLAHMNYSFWIEAVNGVSDLSPEPRRAAVVNITTNQAGRRRNSVPQRPGPPASPASDPSRDQSSAGDVLWAFRQVPLWPCAPHQDPELEALHCL

SEQ ID NO: 27638 - protein, 495 aa, Homo sapiens; identical to SEQ ID NO: 27637
  Payload ID: 5451
  Gene Symbol: EPHA8
  Gene Name: EPH receptor A8
  Uniprot ID: P29322
  ENSP ID: ENSP00000440274

SEQ ID NO: 27639 - protein, 984 aa, Homo sapiens
  Payload ID: 5452
  Gene Symbol: EPHB1
  Gene Name: EPH receptor B1
  Uniprot ID: P54762
  ENSP ID: ENSP00000381097
MALDYLLLLLLASAVAAMEETLMDTRTATAELGWTANPASGWEEVSGYDENLNTIRTYQVCNVFEPNQNNWLLTTFINRRGAHRIYTEMRFTVRDCSSLPNVPGSCKETFNLYYYETDSVIATKKSAFWSEAPYLKVDTIAADESFSQVDFGGRLMKVNTEVRSFGPLTRNGFYLAFQDYGACMSLLSVRVFFKKCPSIVQNFAVFPETMTGAESTSLVIARGTCIPNAEEVDVPIKLYCNGDGEWMVPIGRCTCKPGYEPENSVACKACPAGTFKASQEAEGCSHCPSNSRSPAEASPICTCRTGYYRADFDPPEVACTSVPSGPRNVISIVNETSIILEWHPPRETGGRDDVTYNIICKKCRADRRSCSRCDDNVEFVPRQLGLTECRVSISSLWAHTPYTFDIQAINGVSSKSPFPPQHVSVNITTNQAAPSTVPIMHQVSATMRSITLSWPQPEQPNGIILDYEIRYYEKEHNEFNSSMARSQTNTARIDGLRPGMVYVVQVRARTVAGYGKFSGKMCFQTLTDDDYKSELREQLPLIAGSAAAGVVFVVSLVAISIVCSRKRAYSKEAVYSDKLQHYSTGRGSPGMKIYIDPFTYEDPNEAVREFAKEIDVSFVKIEEVIGAGEFGEVYKGRLKLPGKREIYVAIKTLKAGYSEKQRRDFLSEASIMGQFDHPNIIRLEGVVTKSRPVMIITEFMENGALDSFLRQNDGQFTVIQLVGMLRGIAAGMKYLAEMNYVHRDLAARNILVNSNLVCKVSDFGLSRYLQDDTSDPTYTSSLGGKIPVRWTAPEAIAYRKFTSASDVWSYGIVMWEVMSFGERPYWDMSNQDVINAIEQDYRLPPPMDCPAALHQLMLDCWQKDRNSRPRFAEIVNTLDKMIRNPASLKTVATITAVPSQPLLDRSIPDFTAFTTVDDWLSAIKMVQYRDSFLTAGFTSLQLVTQMTSEDLLRIGITLAGHQKKILNSIHSMRVQISQSPTAMA

SEQ ID NO: 27640 - protein, 102 aa, Homo sapiens
  Payload ID: 5452
  Gene Symbol: EPHB1
  Gene Name: EPH receptor B1
  ENSP ID: ENSP00000417216
MDTRTATAELGWTANPASGWEEVSGYDENLNTIRTYQVCNVFEPNQNNWLLTTFINRRGAHRIYTEMRFTVRDCSSLPNVPGSCKETFNLYYYETDSVIATK

SEQ ID NO: 27641 - protein, 112 aa, Homo sapiens
  Payload ID: 5452
  Gene Symbol: EPHB1
  Gene Name: EPH receptor B1
  ENSP ID: ENSP00000417435
MDTRTATAELGWTANPASGWEEVSGYDENLNTIRTYQVCNVFEPNQNNWLLTTFINRRGAHRIYTEMRFTVRDCSSLPNVPGSCKETFNLYYYETDSVIATKKSAFWSEAPY

SEQ ID NO: 27642 - protein, 149 aa, Homo sapiens
  Payload ID: 5452
  Gene Symbol: EPHB1
  Gene Name: EPH receptor B1
  ENSP ID: ENSP00000418352
MDTRTATAELGWTANPASGWEEVSGYDENLNTIRTYQVCNVFEPNQNNWLLTTFINRRGAHRIYTEMRFTVRDCSSLPNVPGSCKETFNLYYYETDSVIATKKSAFWSEAPYLKVDTIAADESFSQVDFGGRLMKVNTEVRSFGPLTRN

SEQ ID NO: 27643 - protein, 545 aa, Homo sapiens
  Payload ID: 5452
  Gene Symbol: EPHB1
  Gene Name: EPH receptor B1
  Uniprot ID: P54762
  ENSP ID: ENSP00000419574
MHQVSATMRSITLSWPQPEQPNGIILDYEIRYYEKEHNEFNSSMARSQTNTARIDGLRPGMVYVVQVRARTVAGYGKFSGKMCFQTLTDDDYKSELREQLPLIAGSAAAGVVFVVSLVAISIVCSRKRAYSKEAVYSDKLQHYSTGRGSPGMKIYIDPFTYEDPNEAVREFAKEIDVSFVKIEEVIGAGEFGEVYKGRLKLPGKREIYVAIKTLKAGYSEKQRRDFLSEASIMGQFDHPNIIRLEGVVTKSRPVMIITEFMENGALDSFLRQNDGQFTVIQLVGMLRGIAAGMKYLAEMNYVHRDLAARNILVNSNLVCKVSDFGLSRYLQDDTSDPTYTSSLGGKIPVRWTAPEAIAYRKFTSASDVWSYGIVMWEVMSFGERPYWDMSNQDVINAIEQDYRLPPPMDCPAALHQLMLDCWQKDRNSRPRFAEIVNTLDKMIRNPASLKTVATITAVPSQPLLDRSIPDFTAFTTVDDWLSAIKMVQYRDSFLTAGFTSLQLVTQMTSEDLLRIGITLAGHQKKILNSIHSMRVQISQSPTAMA

SEQ ID NO: 27644 - protein, 42 aa, Homo sapiens
  Payload ID: 5452
  Gene Symbol: EPHB1
  Gene Name: EPH receptor B1
  ENSP ID: ENSP00000419688
MDTRTATAELGWTANPASGWEEVSGYDENLNTIRTYQVCNVF

SEQ ID NO: 27645 - protein, 281 aa, Homo sapiens
  Payload ID: 5452
  Gene Symbol: EPHB1
  Gene Name: EPH receptor B1
  ENSP ID: ENSP00000420338
MALDYLLLLLLASAVAAMEETLMDTRTATAELGWTANPASGWEEVSGYDENLNTIRTYQVCNVFEPNQNNWLLTTFINRRGAHRIYTEMRFTVRDCSSLPNVPGSCKETFNLYYYETDSVIATKKSAFWSEAPYLKVDTIAADESFSQVDFGGRLMKVNTEVRSFGPLTRNGFYLAFQDYGACMSLLSVRVFFKKCPSIVQNFAVFPETMTGAESTSLVIARGTCIPNAEEVDVPIKLYCNGDGEWMVPIGRCTCKPGYEPENSVACKVSRPFWRILRQQD

SEQ ID NO: 27646 - protein, 946 aa, Homo sapiens
  Payload ID: 5453
  Gene Symbol: EPHB2
  Gene Name: EPH receptor B2
  ENSP ID: ENSP00000363758
MWVPVLALPVCTYAETLMDSTTATAELGWMVHPPSGWEEVSGYDENMNTIRTYQVCNVFESSQNNWLRTKFIRRRGAHRIHVEMKFSVRDCSSIPSVPGSCKETFNLYYYEADFDSATKTFPNWMENPWVKVDTIAADESFSQVDLGGRVMKINTEVRSFGPVSRSGFYLAFQDYGGCMSLIAVRVFYRKCPRIIQNGAIFQETLSGAESTSLVAARGSCIANAEEVDVPIKLYCNGDGEWLVPIGRCMCKAGFEAVENGTVCRGCPSGTFKANQGDEACTHCPINSRTTSEGATNCVCRNGYYRADLDPLDMPCTTIPSAPQAVISSVNETSLMLEWTPPRDSGGREDLVYNIICKSCGSGRGACTRCGDNVQYAPRQLGLTEPRIYISDLLAHTQYTFEIQAVNGVTDQSPFSPQFASVNITTNQAAPSAVSIMHQVSRTVDSITLSWSQPDQPNGVILDYELQYYEKQELSEYNATAIKSPTNTVTVQGLKAGAIYVFQVRARTVAGYGRYSGKMYFQTMTEAEYQTSIQEKLPLIIGSSAAGLVFLIAVVVIAIVCNRRGFERADSEYTDKLQHYTSGHMTPGMKIYIDPFTYEDPNEAVREFAKEIDISCVKIEQVIGAGEFGEVCSGHLKLPGKREIFVAIKTLKSGYTEKQRRDFLSEASIMGQFDHPNVIHLEGVVTKSTPVMIITEFMENGSLDSFLRQNDGQFTVIQLVGMLRGIAAGMKYLADMNYVHRDLAARNILVNSNLVCKVSDFGLSRFLEDDTSDPTYTSALGGKIPIRWTAPEAIQYRKFTSASDVWSYGIVMWEVMSYGERPYWDMTNQDVINAIEQDYRLPPPMDCPSALHQLMLDCWQKDRNHRPKFGQIVNTLDKMIRNPNSLKAMAPLSSGINLPLLDRTIPDYTSFNTVDEWLEAIKMGQYKESFANAGFTSFDVVSQMMME

SEQ ID NO: 27647 - protein, 986 aa, Homo sapiens
  Payload ID: 5453
  Gene Symbol: EPHB2
  Gene Name: EPH receptor B2
  Uniprot ID: P29323
  ENSP ID: ENSP00000363761
MALRRLGAALLLLPLLAAVEETLMDSTTATAELGWMVHPPSGWEEVSGYDENMNTIRTYQVCNVFESSQNNWLRTKFIRRRGAHRIHVEMKFSVRDCSSIPSVPGSCKETFNLYYYEADFDSATKTFPNWMENPWVKVDTIAADESFSQVDLGGRVMKINTEVRSFGPVSRSGFYLAFQDYGGCMSLIAVRVFYRKCPRIIQNGAIFQETLSGAESTSLVAARGSCIANAEEVDVPIKLYCNGDGEWLVPIGRCMCKAGFEAVENGTVCRGCPSGTFKANQGDEACTHCPINSRTTSEGATNCVCRNGYYRADLDPLDMPCTTIPSAPQAVISSVNETSLMLEWTPPRDSGGREDLVYNIICKSCGSGRGACTRCGDNVQYAPRQLGLTEPRIYISDLLAHTQYTFEIQAVNGVTDQSPFSPQFASVNITTNQAAPSAVSIMHQVSRTVDSITLSWSQPDQPNGVILDYELQYYEKELSEYNATAIKSPTNTVTVQGLKAGAIYVFQVRARTVAGYGRYSGKMYFQTMTEAEYQTSIQEKLPLIIGSSAAGLVFLIAVVVIAIVCNRRGFERADSEYTDKLQHYTSGHMTPGMKIYIDPFTYEDPNEAVREFAKEIDISCVKIEQVIGAGEFGEVCSGHLKLPGKREIFVAIKTLKSGYTEKQRRDFLSEASIMGQFDHPNVIHLEGVVTKSTPVMIITEFMENGSLDSFLRQNDGQFTVIQLVGMLRGIAAGMKYLADMNYVHRDLAARNILVNSNLVCKVSDFGLSRFLEDDTSDPTYTSALGGKIPIRWTAPEAIQYRKFTSASDVWSYGIVMWEVMSYGERPYWDMTNQDVINAIEQDYRLPPPMDCPSALHQLMLDCWQKDRNHRPKFGQIVNTLDKMIRNPNSLKAMAPLSSGINLPLLDRTIPDYTSFNTVDEWLEAIKMGQYKESFANAGFTSFDVVSQMMMEDILRVGVTLAGHQKKILNSIQVMRAQMNQIQSVEV

SEQ ID NO: 27648 - protein, 987 aa, Homo sapiens
  Payload ID: 5453
  Gene Symbol: EPHB2
  Gene Name: EPH receptor B2
  Uniprot ID: P29323
  ENSP ID: ENSP00000363763
MALRRLGAALLLLPLLAAVEETLMDSTTATAELGWMVHPPSGWEEVSGYDENMNTIRTYQVCNVFESSQNNWLRTKFIRRRGAHRIHVEMKFSVRDCSSIPSVPGSCKETFNLYYYEADFDSATKTFPNWMENPWVKVDTIAADESFSQVDLGGRVMKINTEVRSFGPVSRSGFYLAFQDYGGCMSLIAVRVFYRKCPRIIQNGAIFQETLSGAESTSLVAARGSCIANAEEVDVPIKLYCNGDGEWLVPIGRCMCKAGFEAVENGTVCRGCPSGTFKANQGDEACTHCPINSRTTSEGATNCVCRNGYYRADLDPLDMPCTTIPSAPQAVISSVNETSLMLEWTPPRDSGGREDLVYNIICKSCGSGRGACTRCGDNVQYAPRQLGLTEPRIYISDLLAHTQYTFEIQAVNGVTDQSPFSPQFASVNITTNQAAPSAVSIMHQVSRTVDSITLSWSQPDQPNGVILDYELQYYEKELSEYNATAIKSPTNTVTVQGLKAGAIYVFQVRARTVAGYGRYSGKMYFQTMTEAEYQTSIQEKLPLIIGSSAAGLVFLIAVVVIAIVCNRRRGFERADSEYTDKLQHYTSGHMTPGMKIYIDPFTYEDPNEAVREFAKEIDISCVKIEQVIGAGEFGEVCSGHLKLPGKREIFVAIKTLKSGYTEKQRRDFLSEASIMGQFDHPNVIHLEGVVTKSTPVMIITEFMENGSLDSFLRQNDGQFTVIQLVGMLRGIAAGMKYLADMNYVHRDLAARNILVNSNLVCKVSDFGLSRFLEDDTSDPTYTSALGGKIPIRWTAPEAIQYRKFTSASDVWSYGIVMWEVMSYGERPYWDMTNQDVINAIEQDYRLPPPMDCPSALHQLMLDCWQKDRNHRPKFGQIVNTLDKMIRNPNSLKAMAPLSSGINLPLLDRTIPDYTSFNTVDEWLEAIKMGQYKESFANAGFTSFDVVSQMMMEDILRVGVTLAGHQKKILNSIQVMRAQMNQIQSVEV

SEQ ID NO: 27649 - protein, 1055 aa, Homo sapiens
  Payload ID: 5453
  Gene Symbol: EPHB2
  Gene Name: EPH receptor B2
  Uniprot ID: P29323
  ENSP ID: ENSP00000383053
MALRRLGAALLLLPLLAAVEETLMDSTTATAELGWMVHPPSGWEEVSGYDENMNTIRTYQVCNVFESSQNNWLRTKFIRRRGAHRIHVEMKFSVRDCSSIPSVPGSCKETFNLYYYEADFDSATKTFPNWMENPWVKVDTIAADESFSQVDLGGRVMKINTEVRSFGPVSRSGFYLAFQDYGGCMSLIAVRVFYRKCPRIIQNGAIFQETLSGAESTSLVAARGSCIANAEEVDVPIKLYCNGDGEWLVPIGRCMCKAGFEAVENGTVCRGCPSGTFKANQGDEACTHCPINSRTTSEGATNCVCRNGYYRADLDPLDMPCTTIPSAPQAVISSVNETSLMLEWTPPRDSGGREDLVYNIICKSCGSGRGACTRCGDNVQYAPRQLGLTEPRIYISDLLAHTQYTFEIQAVNGVTDQSPFSPQFASVNITTNQAAPSAVSIMHQVSRTVDSITLSWSQPDQPNGVILDYELQYYEKELSEYNATAIKSPTNTVTVQGLKAGAIYVFQVRARTVAGYGRYSGKMYFQTMTEAEYQTSIQEKLPLIIGSSAAGLVFLIAVVVIAIVCNRRGFERADSEYTDKLQHYTSGHMTPGMKIYIDPFTYEDPNEAVREFAKEIDISCVKIEQVIGAGEFGEVCSGHLKLPGKREIFVAIKTLKSGYTEKQRRDFLSEASIMGQFDHPNVIHLEGVVTKSTPVMIITEFMENGSLDSFLRQNDGQFTVIQLVGMLRGIAAGMKYLADMNYVHRDLAARNILVNSNLVCKVSDFGLSRFLEDDTSDPTYTSALGGKIPIRWTAPEAIQYRKFTSASDVWSYGIVMWEVMSYGERPYWDMTNQDVINAIEQDYRLPPPMDCPSALHQLMLDCWQKDRNHRPKFGQIVNTLDKMIRNPNSLKAMAPLSSGINLPLLDRTIPDYTSFNTVDEWLEAIKMGQYKESFANAGFTSFDVVSQMMMEDILRVGVTLAGHQKKILNSIQVMRAQMNQIQSVEGQPLARRPRATGRTKRCQPRDVTKKTCNSNDGKKKGMGKKKTDPGRGREIQGIFFKEDSHKESNDCSCGG

SEQ ID NO: 27650 - protein, 482 aa, Homo sapiens
  Payload ID: 5453
  Gene Symbol: EPHB2
  Gene Name: EPH receptor B2
  ENSP ID: ENSP00000444174
MALRRLGAALLLLPLLAAVEETLMDSTTATAELGWMVHPPSGWEEVSGYDENMNTIRTYQVCNVFESSQNNWLRTKFIRRRGAHRIHVEMKFSVRDCSSIPSVPGSCKETFNLYYYEADFDSATKTFPNWMENPWVKVDTIAADESFSQVDLGGRVMKINTEVRSFGPVSRSGFYLAFQDYGGCMSLIAVRVFYRKCPRIIQNGAIFQETLSGAESTSLVAARGSCIANAEEVDVPIKLYCNGDGEWLVPIGRCMCKAGFEAVENGTVCRGCPSGTFKANQGDEACTHCPINSRTTSEGATNCVCRNGYYRADLDPLDMPCTTIPSAPQAVISSVNETSLMLEWTPPRDSGGREDLVYNIICKSCGSGRGACTRCGDNVQYAPRQLGLTEPRIYISDLLAHTQYTFEIQAVNGVTDQSPFSPQFASVNITTNQAAPSAVSIMHQVSRTVDSITLSWSQPDQPNGVILDYELQYYEKMKTQRS

SEQ ID NO: 27651 - protein, 998 aa, Homo sapiens
  Payload ID: 5454
  Gene Symbol: EPHB3
  Gene Name: EPH receptor B3
  Uniprot ID: P54753
  ENSP ID: ENSP00000332118
MARARPPPPPSPPPGLLPLLPPLLLLPLLLLPAGCRALEETLMDTKWVTSELAWTSHPESGWEEVSGYDEAMNPIRTYQVCNVRESSQNNWLRTGFIWRRDVQRVYVELKFTVRDCNSIPNIPGSCKETFNLFYYEADSDVASASSPFWMENPYVKVDTIAPDESFSRLDAGRVNTKVRSFGPLSKAGFYLAFQDQGACMSLISVRAFYKKCASTTAGFALFPETLTGAEPTSLVIAPGTCIPNAVEVSVPLKLYCNGDGEWMVPVGACTCATGHEPAAKESQCRPCPPGSYKAKQGEGPCLPCPPNSRTTSPAASICTCHNNFYRADSDSADSACTTVPSPPRGVISNVNETSLILEWSEPRDLGGRDDLLYNVICKKCHGAGGASACSRCDDNVEFVPRQLGLTERRVHISHLLAHTRYTFEVQAVNGVSGKSPLPPRYAAVNITTNQAAPSEVPTLRLHSSSGSSLTLSWAPPERPNGVILDYEMKYFEKSEGIASTVTSQMNSVQLDGLRPDARYVVQVRARTVAGYGQYSRPAEFETTSERGSGAQQLQEQLPLIVGSATAGLVFVVAVVVIAIVCLRKQRHGSDSEYTEKLQQYIAPGMKVYIDPFTYEDPNEAVREFAKEIDVSCVKIEEVIGAGEFGEVCRGRLKQPGRREVFVAIKTLKVGYTERQRRDFLSEASIMGQFDHPNIIRLEGVVTKSRPVMILTEFMENCALDSFLRLNDGQFTVIQLVGMLRGIAAGMKYLSEMNYVHRDLAARNILVNSNLVCKVSDFGLSRFLEDDPSDPTYTSSLGGKIPIRWTAPEAIAYRKFTSASDVWSYGIVMWEVMSYGERPYWDMSNQDVINAVEQDYRLPPPMDCPTALHQLMLDCWVRDRNLRPKFSQIVNTLDKLIRNAASLKVIASAQSGMSQPLLDRTVPDYTTFTTVGDWLDAIKMGRYKESFVSAGFASFDLVAQMTAEDLLRIGVTLAGHQKKILSSIQDMRLQMNQTLPVQV

SEQ ID NO: 27652 - protein, 987 aa, Homo sapiens
  Payload ID: 5455
  Gene Symbol: EPHB4
  Gene Name: EPH receptor B4
  Uniprot ID: P54760
  ENSP ID: ENSP00000350896
MELRVLLCWASLAAALEETLLNTKLETADLKWVTFPQVDGQWEELSGLDEEQHSVRTYEVCDVQRAPGQAHWLRTGWVPRRGAVHVYATLRFTMLECLSLPRAGRSCKETFTVFYYESDADTATALTPAWMENPYIKVDTVAAEHLTRKRPGAEATGKVNVKTLRLGPLSKAGFYLAFQDQGACMALLSLHLFYKKCAQLTVNLTRFPETVPRELVVPVAGSCVVDAVPAPGPSPSLYCREDGQWAEQPVTGCSCAPGFEAAEGNTKCRACAQGTFKPLSGEGSCQPCPANSHSNTIGSAVCQCRVGYFRARTDPRGAPCTTPPSAPRSVVSRLNGSSLHLEWSAPLESGGREDLTYALRCRECRPGGSCAPCGGDLTFDPGPRDLVEPWVVVRGLRPDFTYTFEVTALNGVSSLATGPVPFEPVNVTTDREVPPAVSDIRVTRSSPSSLSLAWAVPRAPSGAVLDYEVKYHEKGAEGPSSVRFLKTSENRAELRGLKRGASYLVQVRARSEAGYGPFGQEHHSQTQLDESEGWREQLALIAGTAVVGVVLVLVVIVVAVLCLRKQSNGREAEYSDKHGQYLIGHGTKVYIDPFTYEDPNEAVREFAKEIDVSYVKIEEVIGAGEFGEVCRGRLKAPGKKESCVAIKTLKGGYTERQRREFLSEASIMGQFEHPNIIRLEGVVTNSMPVMILTEFMENGALDSFLRLNDGQFTVIQLVGMLRGIASGMRYLAEMSYVHRDLAARNILVNSNLVCKVSDFGLSRFLEENSSDPTYTSSLGGKIPIRWTAPEAIAFRKFTSASDAWSYGIVMWEVMSFGERPYWDMSNQDVINAIEQDYRLPPPPDCPTSLHQLMLDCWQKDRNARPRFPQVVSALDKMIRNPASLKIVARENGGASHPLLDQRQPHYSAFGSVGEWLRAIKMGRYEESFAAAGFGSFELVSQISAEDLLRIGVTLAGHQKKILASVQHMKSQAKPGTPGGTGGPAPQY

SEQ ID NO: 27653 - protein, 935 aa, Homo sapiens
  Payload ID: 5455
  Gene Symbol: EPHB4
  Gene Name: EPH receptor B4
  ENSP ID: ENSP00000353833
MELRVLLCWASLAAALEETLLNTKLETADLKWVTFPQVDGQWEELSGLDEEQHSVRTYEVCDVQRAPGQAHWLRTGWVPRRGAVHVYATLRFTMLECLSLPRAGRSCKETFTVFYYESDADTATALTPAWMENPYIKVDTVAAEHLTRKRPGAEATGKVNVKTLRLGPLSKAGFYLAFQDQGACMALLSLHLFYKKCAQLTVNLTRFPETVPRELVVPVAGSCVVDAVPAPGPSPSLYCREDGQWAEQPVTGCSCAPGFEAAEGNTKCRACAQGTFKPLSGEGSCQPCPANSHSNTIGSAVCQCRVGYFRARTDPRGAPCTTPPSAPRSVVSRLNGSSLHLEWSAPLESGGREDLTYALRCRECRPGGSCAPCGGDLTFDPGPRDLVEPWVVVRGLRPDFTYTFEVTALNGVSSLATGPVPFEPVNVTTDREVPPAVSDIRVTRSSPSSLSLAWAVPRAPSGAVLDYEVKYHEKGAEGPSSVRFLKTSENRAELRGLKRGASYLVQVRARSEAGYGPFGQEHHSQTQLDESEGWREQLALIAGTAVVGVVLVLVVIVVAVLCLRKQSNGREAEYSDKHGQYLIGHGTKVYIDPFTYEDPNEAVREFAKEIDVSYVKIEEVIGAGEFGEVCRGRLKAPGKKESCVAIKTLKGGYTERQRREFLSEASIMGQFEHPNIIRLEGVVTNSMPVMILTEFMENGALDSFLRLNDGQFTVIQLVGMLRGIASGMRYLAEMSYVHRDLAARNILVNSNLVCKVSDFGLSRFLEENSSDPTYTSSLGGKIPIRWTAPEAIAFRKFTSASDAWSYGIVMWEVMSFGERPYWDMSNQDVINAIEQDYRLPPPPDCPTSLHQLMLDCWQKDRNARPRFPQVVSALDKMIRNPASLKIVARENGGDLLRIGVTLAGHQKKILASVQHMKSQAKPGTPGGTGGPAPQY

SEQ ID NO: 27654 - protein, 306 aa, Homo sapiens
  Payload ID: 5455
  Gene Symbol: EPHB4
  Gene Name: EPH receptor B4
  Uniprot ID: P54760
  ENSP ID: ENSP00000482702
MELRVLLCWASLAAALEETLLNTKLETADLKWVTFPQVDGQWEELSGLDEEQHSVRTYEVCDVQRAPGQAHWLRTGWVPRRGAVHVYATLRFTMLECLSLPRAGRSCKETFTVFYYESDADTATALTPAWMENPYIKVDTVAAEHLTRKRPGAEATGKVNVKTLRLGPLSKAGFYLAFQDQGACMALLSLHLFYKKCAQLTVNLTRFPETVPRELVVPVAGSCVVDAVPAPGPSPSLYCREDGQWAEQPVTGCSCAPGFEAAEGNTKCRGRRGSQQRAVPEDVRKPGRAAGAEAGSQLPGAGTGAL

SEQ ID NO: 27655 - protein, 1022 aa, Homo sapiens
  Payload ID: 5456
  Gene Symbol: EPHB6
  Gene Name: EPH receptor B6
  ENSP ID: ENSP00000404786
MATEGAAQLGNRVAGMVCSLWVLLLVSSVLALEEVLLDTTGETSEIGWLTYPPGGWDEVSVLDDQRRLTRTFEACHVAGAPPGTGQDNWLQTHFVERRGAQRAHIRLHFSVRACSSLGVSGGTCRETFTLYYRQAEEPDSPDSVSSWHLKRWTKVDTIAADESFPSSSSSSSSSSSSAAWAVGPHGAGQRAGLQLNVKERSFGPLTQRGFYVAFQDTGACLALVAVRLFSYTCPAVLRSFASFPETQASGAGGASLVAAVGTCVAHAEPEEDGVGGQAGGSPPRLHCNGEGKWMVAVGGCRCQPGYQPARGDKACQACPRGLYKASAGNAPCSPCPARSHAPNPAAPVCPCLEGFYRASSDPPEAPCTGPPSAPQELWFEVQGSALMLHWRLPRELGGRGDLLFNVVCKECEGRQEPASGGGGTCHRCRDEVHFDPRQRGLTESRVLVGGLRAHVPYILEVQAVNGVSELSPDPPQAAAINVSTSHEVPSAVPVVHQVSRASNSITVSWPQPDQTNGNILDYQLRYYDQAEDESHSFTLTSETNTATVTQLSPGHIYGFQVRARTAAGHGPYGGKVYFQTLPQGELSSQLPERLSLVIGSILGALAFLLLAAITVLAVVFQRKRRGTGYTEQLQQYSSPGLGVKYYIDPSTYEDPCQAIRELAREVDPAYIKIEEVIGTGSFGEVRQGRLQPRGRREQTVAIQALWAGGAESLQMTFLGRAAVLGQFQHPNILRLEGVVTKSRPLMVLTEFMELGPLDSFLRQREGQFSSLQLVAMQRGVAAAMQYLSSFAFVHRSLSAHSVLVNSHLVCKVARLGHSPQGPSCLLRWAAPEVIAHGKHTTSSDVWSFGILMWEVMSYGERPYWDMSEQEVLNAIEQEFRLPPPPGCPPGLHLLMLDTWQKDRARRPHFDQLVAAFDKMIRKPDTLQAGGDPGERPSQALLTPVALDFPCLDSPQAWLSAIGLECYQDNFSKFGLCTFSDVAQLSLEDLPALGITLAGHQKKLLHHIQLLQQHLRQQGSVEV

SEQ ID NO: 27656 - protein, 729 aa, Homo sapiens
  Payload ID: 5456
  Gene Symbol: EPHB6
  Gene Name: EPH receptor B6
  ENSP ID: ENSP00000409061
MVAVGGCRCQPGYQPARGDKACQACPRGLYKASAGNAPCSPCPARSHAPNPAAPVCPCLEGFYRASSDPPEAPCTGPPSAPQELWFEVQGSALMLHWRLPRELGGRGDLLFNVVCKECEGRQEPASGGGGTCHRCRDEVHFDPRQRGLTESRVLVGGLRAHVPYILEVQAVNGVSELSPDPPQAAAINVSTSHEVPSAVPVVHQVSRASNSITVSWPQPDQTNGNILDYQLRYYDQAEDESHSFTLTSETNTATVTQLSPGHIYGFQVRARTAAGHGPYGGKVYFQTLPQGELSSQLPERLSLVIGSILGALAFLLLAAITVLAVVFQRKRRGTGYTEQLQQYSSPGLGVKYYIDPSTYEDPCQAIRELAREVDPAYIKIEEVIGTGSFGEVRQGRLQPRGRREQTVAIQALWAGGAESLQMTFLGRAAVLGQFQHPNILRLEGVVTKSRPLMVLTEFMELGPLDSFLRQREGQFSSLQLVAMQRGVAAAMQYLSSFAFVHRSLSAHSVLVNSHLVCKVARLGHSPQGPSCLLRWAAPEVIAHGKHTTSSDVWSFGILMWEVMSYGERPYWDMSEQEVLNAIEQEFRLPPPPGCPPGLHLLMLDTWQKDRARRPHFDQLVAAFDKMIRKPDTLQAGGDPGERPSQALLTPVALDFPCLDSPQAWLSAIGLECYQDNFSKFGLCTFSDVAQLSLEDLPALGITLAGHQKKLLHHIQLLQQHLRQQGSVEV

SEQ ID NO: 27657 - protein, 183 aa, Homo sapiens
  Payload ID: 5456
  Gene Symbol: EPHB6
  Gene Name: EPH receptor B6
  ENSP ID: ENSP00000477807
MATEGAAQLGNRVAGMVCSLWVLLLVSSVLALEEVLLDTTGETSEIGWLTYPPGGWDEVSVLDDQRRLTRTFEACHVAGAPPGTGQDNWLQTHFVERRGAQRAHIRLHFSVRACSSLGVSGGTCRETFTLYYRQAEEPDSPDSVSSWHLKRWTKRRRPVGLGGPPWWQLWAPVWLMQSQRRME

SEQ ID NO: 27658 - protein, 729 aa, Homo sapiens
  Payload ID: 5456
  Gene Symbol: EPHB6
  Gene Name: EPH receptor B6
  ENSP ID: ENSP00000481087
MVAVGGCRCQPGYQPARGDKACQACPRGLYKSSAGNAPCSPCPARSHAPNPAAPVCPCLEGFYRASSDPPEAPCTGPPSAPQELWFEVQGSALMLHWRLPRELGGRGDLLFNVVCKECEGRQEPASGGGGTCHRCRDEVHFDPRQRGLTESRVLVGGLRAHVPYILEVQAVNGVSELSPDPPQAAAINVSTSHEVPSAVPVVHQVSRASNSITVSWPQPDQTNGNILDYQLRYYDQAEDESHSFTLTSETNTATVTQLSPGHIYGFQVRARTAAGHGPYGGKVYFQTLPQGELSSQLPERLSLVIGSILGALAFLLLAAITVLAVVFQRKRRGTGYTEQLQQYSSPGLGVKYYIDPSTYEDPCQAIRELAREVDPAYIKIEEVIGTGSFGEVRQGRLQPRGRREQTVAIQALWAGGAESLQMTFLGRAAVLGQFQHPNILRLEGVVTKSRPLMVLTEFMELGPLDSFLRQREGQFSSLQLVAMQRGVAAAMQYLSSFAFVHRSLSAHSVLVNSHLVCKVARLGHSPQGPSCLLRWAAPEVIAHGKHTTSSDVWSFGILMWEVMSYGERPYWDMSEQEVLNAIEQEFRLPPPPGCPPGLHLLMLDTWQKDRARRPHFDQLVAAFDKMIRKPDTLQAGGDPGERPSQALLTPVALDFPCLDSPQAWLSAIGLECYQDNFSKFGLCTFSDVAQLSLEDLPALGITLAGHQKKLLHHIQLLQQHLRQQGSVEV

SEQ ID NO: 27659 - protein, 1022 aa, Homo sapiens
  Payload ID: 5456
  Gene Symbol: EPHB6
  Gene Name: EPH receptor B6
  ENSP ID: ENSP00000481418
MATEGAAQLGNRVAGMVCSLWVLLLVSSVLALEEVLLDTTGETSEIGWLTYPPGGWDEVSVLDDQRRLTRTFEACHVAGAPPGTGQDNWLQTHFVERRGAQRAHIRLHFSVRACSSLGVSGGTCRETFTLYYRQAEEPDSPDSVSSWHLKRWTKVDTIAADESFPSSSSSSSSSSSSAAWAVGPHGAGQRAGLQLNVKERSFGPLTQRGFYVAFQDTGACLALVAVRLFSYTCPAVLRSFASFPETQASGAGGASLVAAVGTCVAHAEPEEDGVGGQAGGSPPRLHCNGEGKWMVAVGGCRCQPGYQPARGDKACQACPRGLYKSSAGNAPCSPCPARSHAPNPAAPVCPCLEGFYRASSDPPEAPCTGPPSAPQELWFEVQGSALMLHWRLPRELGGRGDLLFNVVCKECEGRQEPASGGGGTCHRCRDEVHFDPRQRGLTESRVLVGGLRAHVPYILEVQAVNGVSELSPDPPQAAAINVSTSHEVPSAVPVVHQVSRASNSITVSWPQPDQTNGNILDYQLRYYDQAEDESHSFTLTSETNTATVTQLSPGHIYGFQVRARTAAGHGPYGGKVYFQTLPQGELSSQLPERLSLVIGSILGALAFLLLAAITVLAVVFQRKRRGTGYTEQLQQYSSPGLGVKYYIDPSTYEDPCQAIRELAREVDPAYIKIEEVIGTGSFGEVRQGRLQPRGRREQTVAIQALWAGGAESLQMTFLGRAAVLGQFQHPNILRLEGVVTKSRPLMVLTEFMELGPLDSFLRQREGQFSSLQLVAMQRGVAAAMQYLSSFAFVHRSLSAHSVLVNSHLVCKVARLGHSPQGPSCLLRWAAPEVIAHGKHTTSSDVWSFGILMWEVMSYGERPYWDMSEQEVLNAIEQEFRLPPPPGCPPGLHLLMLDTWQKDRARRPHFDQLVAAFDKMIRKPDTLQAGGDPGERPSQALLTPVALDFPCLDSPQAWLSAIGLECYQDNFSKFGLCTFSDVAQLSLEDLPALGITLAGHQKKLLHHIQLLQQHLRQQGSVEV

SEQ ID NO: 27660 - protein, 1022 aa, Homo sapiens; identical to SEQ ID NO: 27655
  Payload ID: 5456
  Gene Symbol: EPHB6
  Gene Name: EPH receptor B6
  ENSP ID: ENSP00000481994

SEQ ID NO: 27661 - protein, 112 aa, Homo sapiens
  Payload ID: 5456
  Gene Symbol: EPHB6
  Gene Name: EPH receptor B6
  ENSP ID: ENSP00000481996
GERPYWDMSEQEVLNAIEQEFRLPPPPGCPPGLHLLMLDTWQKDRARRPHFDQLVAAFDKMIRKPDTLQAGGDPGERDLPALGITLAGHQKKLLHHIQLLQQHLRQQGSVEV

SEQ ID NO: 27662 - protein, 50 aa, Homo sapiens
  Payload ID: 5456
  Gene Symbol: EPHB6
  Gene Name: EPH receptor B6
  ENSP ID: ENSP00000482735
MATEGAAQLGNRVAGMVCSLWVLLLVSSVLALEVGRGECSGRPATPDSDL

SEQ ID NO: 27663 - protein, 1022 aa, Homo sapiens; identical to SEQ ID NO: 27659
  Payload ID: 5456
  Gene Symbol: EPHB6
  Gene Name: EPH receptor B6
  ENSP ID: ENSP00000487627

SEQ ID NO: 27664 - protein, 50 aa, Homo sapiens; identical to SEQ ID NO: 27662
  Payload ID: 5456
  Gene Symbol: EPHB6
  Gene Name: EPH receptor B6
  ENSP ID: ENSP00000487720

SEQ ID NO: 27665 - protein, 112 aa, Homo sapiens; identical to SEQ ID NO: 27661
  Payload ID: 5456
  Gene Symbol: EPHB6
  Gene Name: EPH receptor B6
  ENSP ID: ENSP00000488271

SEQ ID NO: 27666 - protein, 118 aa, Homo sapiens
  Payload ID: 5456
  Gene Symbol: EPHB6
  Gene Name: EPH receptor B6
  ENSP ID: ENSP00000488389
FGILMWEVMSYGERPYWDMSEQEVLNAIEQEFRLPPPPGCPPGLHLLMLDTWQKDRARRPHFDQLVAAFDKMIRKPDTLQAGGDPGERPGFQPLDWSATRTTSPSLASVPSVMWLSSA

SEQ ID NO: 27667 - protein, 183 aa, Homo sapiens; identical to SEQ ID NO: 27657
  Payload ID: 5456
  Gene Symbol: EPHB6
  Gene Name: EPH receptor B6
  ENSP ID: ENSP00000488531

SEQ ID NO: 27668 - protein, 183 aa, Homo sapiens
  Payload ID: 5457
  Gene Symbol: EFNA1
  Gene Name: ephrin-A1
  Uniprot ID: P20827
  ENSP ID: ENSP00000357391
MEFLWAPLLGLCCSLAAADRHTVFWNSSNPKFRNEDYTIHVQLNDYVDIICPHYEDHSVADAAMEQYILYLVEHEEYQLCQPQSKDQVRWQCNRPSAKHGPEKLSEKFQRFTPFTLGKEFKEGHSYYYISHSPQAHDNPQEKRLAADDPEVRVLHSIGHSAAPRLFPLAWTVLLLPLLLLQTP

SEQ ID NO: 27669 - protein, 205 aa, Homo sapiens
  Payload ID: 5457
  Gene Symbol: EFNA1
  Gene Name: ephrin-A1
  Uniprot ID: P20827
  ENSP ID: ENSP00000357392
MEFLWAPLLGLCCSLAAADRHTVFWNSSNPKFRNEDYTIHVQLNDYVDIICPHYEDHSVADAAMEQYILYLVEHEEYQLCQPQSKDQVRWQCNRPSAKHGPEKLSEKFQRFTPFTLGKEFKEGHSYYYISKPIHQHEDRCLRLKVTVSGKITHSPQAHDNPQEKRLAADDPEVRVLHSIGHSAAPRLFPLAWTVLLLPLLLLQTP

SEQ ID NO: 27670 - protein, 213 aa, Homo sapiens
  Payload ID: 5458
  Gene Symbol: EFNA2
  Gene Name: ephrin-A2
  Uniprot ID: O43921
  ENSP ID: ENSP00000215368
MAPAQRPLLPLLLLLLPLPPPPFARAEDAARANSDRYAVYWNRSNPRFHAGAGDDGGGYTVEVSINDYLDIYCPHYGAPLPPAERMEHYVLYMVNGEGHASCDHRQRGFKRWECNRPAAPGGPLKFSEKFQLFTPFSLGFEFRPGHEYYYISATPPNAVDRPCLRLKVYVRPTNETLYEAPEPIFTSNNSCSSPGGCRLFLSTIPVLWTLLGS

SEQ ID NO: 27671 - protein, 238 aa, Homo sapiens
  Payload ID: 5459
  Gene Symbol: EFNA3
  Gene Name: ephrin-A3
  Uniprot ID: P52797
  ENSP ID: ENSP00000357393
MAAAPLLLLLLLVPVPLLPLLAQGPGGALGNRHAVYWNSSNQHLRREGYTVQVNVNDYLDIYCPHYNSSGVGPGAGPGPGGGAEQYVLYMVSRNGYRTCNASQGFKRWECNRPHAPHSPIKFSEKFQRYSAFSLGYEFHAGHEYYYISTPTHNLHWKCLRMKVFVCCASTSHSGEKPVPTLPQFTMGPNVKINVLEDFEGENPQVPKLEKSISGTSPKREHLPLAVGIAFFLMTFLAS

SEQ ID NO: 27672 - protein, 193 aa, Homo sapiens
  Payload ID: 5460
  Gene Symbol: EFNA4
  Gene Name: ephrin-A4
  Uniprot ID: P52798
  ENSP ID: ENSP00000352789
MRLLPLLRTVLWAAFLGSPLRGGSSLRHVVYWNSSNPRLLRGDAVVELGLNDYLDIVCPHYEGPGPPEGPETFALYMVDWPGYESCQAEGPRAYKRWVCSLPFGHVQFSEKIQRFTPFSLGFEFLPGETYYYISVPTPESSGQCLRLQVSVCCKERNLPSHPKEPESSQDPLEEEGSLLPALGVPIQTDKMEH

SEQ ID NO: 27673 - protein, 201 aa, Homo sapiens
  Payload ID: 5460
  Gene Symbol: EFNA4
  Gene Name: ephrin-A4
  Uniprot ID: P52798
  ENSP ID: ENSP00000357394
MRLLPLLRTVLWAAFLGSPLRGGSSLRHVVYWNSSNPRLLRGDAVVELGLNDYLDIVCPHYEGPGPPEGPETFALYMVDWPGYESCQAEGPRAYKRWVCSLPFGHVQFSEKIQRFTPFSLGFEFLPGETYYYISVPTPESSGQCLRLQVSVCCKERKSESAHPVGSPGESGTSGWRGGDTPSPLCLLLLLLLLILRLLRIL

SEQ ID NO: 27674 - protein, 207 aa, Homo sapiens
  Payload ID: 5460
  Gene Symbol: EFNA4
  Gene Name: ephrin-A4
  Uniprot ID: P52798
  ENSP ID: ENSP00000414378
MRLLPLLRTVLWAAFLGSPLRGGSSLRHVVYWNSSNPRLLRGDAVVELGLNDYLDIVCPHYEGPGPPEGPETFALYMVDWPGYESCQAEGPRAYKRWVCSLPFGHVQFSEKIQRFTPFSLGFEFLPGETYYYISVPTPESSGQCLRLQVSVCCKERRARVLPRSPGGGGIPAACTGGANSDRQDGALMGEIRGSEVTLAGACPLITG

SEQ ID NO: 27675 - protein, 228 aa, Homo sapiens
  Payload ID: 5461
  Gene Symbol: EFNA5
  Gene Name: ephrin-A5
  Uniprot ID: P52803
  ENSP ID: ENSP00000328777
MLHVEMLTLVFLVLWMCVFSQDPGSKAVADRYAVYWNSSNPRFQRGDYHIDVCINDYLDVFCPHYEDSVPEDKTERYVLYMVNFDGYSACDHTSKGFKRWECNRPHSPNGPLKFSEKFQLFTPFSLGFEFRPGREYFYISSAIPDNGRRSCLKLKVFVRPTNSCMKTIGVHDRVFDVNDKVENSLEPADDTVHESAEPSRGENAAQTPRIPSRLLAILLFLLAMLLTL

SEQ ID NO: 27676 - protein, 201 aa, Homo sapiens
  Payload ID: 5461
  Gene Symbol: EFNA5
  Gene Name: ephrin-A5
  ENSP ID: ENSP00000426989
MLHVEMLTLVFLVLWMCVFSQDPGSKAVADRYAVYWNSSNPRFQRGDYHIDVCINDYLDVFCPHYEDSVPEDKTERYVLYMVNFDGYSACDHTSKGFKRWECNRPHSPNGPLKFSEKFQLFTPFSLGFEFRPGREYFYISSAIPDNGRRSCLKLKVFVRPTNDTVHESAEPSRGENAAQTPRIPSRLLAILLFLLAMLLTL

SEQ ID NO: 27677 - protein, 188 aa, Homo sapiens [sequence omitted]

SEQ ID NO: 27678 - protein, 346 aa, Homo sapiens
  Payload ID: 5462
  Gene Symbol: EFNB1
  Gene Name: ephrin-B1
  Uniprot ID: P98172
  ENSP ID: ENSP00000204961
MARPGQRWLGKWLVAMVVWALCRLATPLAKNLEPVSWSSLNPKFLSGKGLVIYPKIGDKLDIICPRAEAGRPYEYYKLYLVRPEQAAACSTVLDPNVLVTCNRPEQEIRFTIKFQEFSPNYMGLEFKKHHDYYITSTSNGSLEGLENREGGVCRTRTMKIIMKVGQDPNAVTPEQLTTSRPSKEADNTVKMATQAPGSRGSLGDSDGKHETVNQEEKSGPGASGGSSGDPDGFFNSKVALFAAVGAGCVIFLLIIIFLTVLLLKLRKRHRKHTQQRAAALSLSTLASPKGGSGTAGTEPSDIIIPLRTTENNYCPHYEKVSGDYGHPVYIVQEMPPQSPANIYYKV

SEQ ID NO: 27679 - protein, 333 aa, Homo sapiens
  Payload ID: 5463
  Gene Symbol: EFNB2
  Gene Name: ephrin-B2
  Uniprot ID: P52799
  ENSP ID: ENSP00000245323
MAVRRDSVWKYCWGVLMVLCRTAISKSIVLEPIYWNSSNSKFLPGQGLVLYPQIGDKLDIICPKVDSKTVGQYEYYKVYMVDKDQADRCTIKKENTPLLNCAKPDQDIKFTIKFQEFSPNLWGLEFQKNKDYYIISTSNGSLEGLDNQEGGVCQTRAMKILMKVGQDASSAGSTRNKDPTRRPELEAGTNGRSSTTSPFVKPNPGSSTDGNSAGHSGNNILGSEVALFAGIASGCIIFIVIIITLVVLLLKYRRRHRKHSPQHTTTLSLSTLATPKRSGNNNGSEPSDIIIPLRTADSVFCPHYEKVSGDYGHPVYIVQEMPPQSPANIYYKV

SEQ ID NO: 27680 - protein, 340 aa, Homo sapiens
  Payload ID: 5464
  Gene Symbol: EFNB3
  Gene Name: ephrin-B3
  Uniprot ID: Q15768
  ENSP ID: ENSP00000226091
MGPPHSGPGGVRVGALLLLGVLGLVSGLSLEPVYWNSANKRFQAEGGYVLYPQIGDRLDLLCPRARPPGPHSSPNYEFYKLYLVGGAQGRRCEAPPAPNLLLTCDRPDLDLRFTIKFQEYSPNLWGHEFRSHHDYYIIATSDGTREGLESLQGGVCLTRGMKVLLRVGQSPRGGAVPRKPVSEMPMERDRGAAHSLEPGKENLPGDPTSNATSRGAEGPLPPPSMPAVAGAAGGLALLLLGVAGAGGAMCWRRRRAKPSESRHPGPGSFGRGGSLGLGGGGGMGPREAEPGELGIALRGGGAADPPFCPHYEKVSGDYGHPVYIVQDGPPQSPPNIYYKV

SEQ ID NO: 27681 - protein, 1207 aa, Homo sapiens
  Payload ID: 5465
  Gene Symbol: EGF
  Gene Name: epidermal growth factor
  Uniprot ID: P01133
  ENSP ID: ENSP00000265171
MLLTLIILLPVVSKFSFVSLSAPQHWSCPEGTLAGNGNSTCVGPAPFLIFSHGNSIFRIDTEGTNYEQLVVDAGVSVIMDFHYNEKRIYWVDLERQLLQRVFLNGSRQERVCNIEKNVSGMAINWINEEVIWSNQQEGIITVTDMKGNNSHILLSALKYPANVAVDPVERFIFWSSEVAGSLYRADLDGVGVKALLETSEKITAVSLDVLDKRLFWIQYNREGSNSLICSCDYDGGSVHISKHPTQHNLFAMSLFGDRIFYSTWKMKTIWIANKHTGKDMVRINLHSSFVPLGELKVVHPLAQPKAEDDTWEPEQKLCKLRKGNCSSTVCGQDLQSHLCMCAEGYALSRDRKYCEDVNECAFWNHGCTLGCKNTPGSYYCTCPVGFVLLPDGKRCHQLVSCPRNVSECSHDCVLTSEGPLCFCPEGSVLERDGKTCSGCSSPDNGGCSQLCVPLSPVSWECDCFPGYDLQLDEKSCAASGPQPFLLFANSQDIRHMHFDGTDYGTLLSQQMGMVYALDHDPVENKIYFAHTALKWIERANMDGSQRERLIEEGVDVPEGLAVDWIGRRFYWTDRGKSLIGRSDLNGKRSKIITKENISQPRGIAVHPMAKRLFWTDTGINPRIESSSLQGLGRLVIASSDLIWPSGITIDFLTDKLYWCDAKQSVIEMANLDGSKRRRLTQNDVGHPFAVAVFEDYVWFSDWAMPSVMRVNKRTGKDRVRLQGSMLKPSSLVVVHPLAKPGADPCLYQNGGCEHICKKRLGTAWCSCREGFMKASDGKTCLALDGHQLLAGGEVDLKNQVTPLDILSKTRVSEDNITESQHMLVAEIMVSDQDDCAPVGCSMYARCISEGEDATCQCLKGFAGDGKLCSDIDECEMGVPVCPPASSKCINTEGGYVCRCSEGYQGDGIHCLDIDECQLGEHSCGENASCTNTEGGYTCMCAGRLSEPGLICPDSTPPPHLREDDHHYSVRNSDSECPLSHDGYCLHDGVCMYIEALDKYACNCVVGYIGERCQYRDLKWWELRHAGHGQQQKVIVVAVCVVVLVMLLLLSLWGAHYYRTQKLLSKNPKNPYEESSRDVRSRRPADTEDGMSSCPQPWFVVIKEHQDLKNGGQPVAGEDGQAADGSMQPTSWRQEPQLCGMGTEQGCWIPVSSDKGSCPQVMERSFHMPSYGTQTLEGGVEKPHSLLSANPLWQQRALDPPHQMELTQ

SEQ ID NO: 27682 - protein, 1166 aa, Homo sapiens
  Payload ID: 5465
  Gene Symbol: EGF
  Gene Name: epidermal growth factor
  Uniprot ID: P01133
  ENSP ID: ENSP00000421384
MLLTLIILLPVVSKFSFVSLSAPQHWSCPEGTLAGNGNSTCVGPAPFLIFSHGNSIFRIDTEGTNYEQLVVDAGVSVIMDFHYNEKRIYWVDLERQLLQRVFLNGSRQERVCNIEKNVSGMAINWINEEVIWSNQQEGIITVTDMKGNNSHILLSALKYPANVAVDPVERFIFWSSEVAGSLYRADLDGVGVKALLETSEKITAVSLDVLDKRLFWIQYNREGSNSLICSCDYDGGSVHISKHPTQHNLFAMSLFGDRIFYSTWKMKTIWIANKHTGKDMVRINLHSSFVPLGELKVVHPLAQPKAEDDTWEPEQKLCKLRKGNCSSTVCGQDLQSHLCMCAEGYALSRDRKYCEDVNECAFWNHGCTLGCKNTPGSYYCTCPVGFVLLPDGKRCHQLVSCPRNVSECSHDCVLTSEGPLCFCPEGSVLERDGKTCSGCSSPDNGGCSQLCVPLSPVSWECDCFPGYDLQLDEKSCAASGPQPFLLFANSQDIRHMHFDGTDYGTLLSQQMGMVYALDHDPVENKIYFAHTALKWIERANMDGSQRERLIEEGVDVPEGLAVDWIGRRFYWTDRGKSLIGRSDLNGKRSKIITKENISQPRGIAVHPMAKRLFWTDTGINPRIESSSLQGLGRLVIASSDLIWPSGITIDFLTDKLYWCDAKQSVIEMANLDGSKRRRLTQNDVGHPFAVAVFEDYVWFSDWAMPSVMRVNKRTGKDRVRLQGSMLKPSSLVVVHPLAKPGADPCLYQNGGCEHICKKRLGTAWCSCREGFMKASDGKTCLALDGHQLLAGGEVDLKNQVTPLDILSKTRVSEDNITESQHMLVAEIMVSDQDDCAPVGCSMYARCISEGEDATCQCLKGFAGDGKLCSDIDECEMGVPVCPPASSKCINTEGGYVCRCSEGYQGDGIHCLDSTPPPHLREDDHHYSVRNSDSECPLSHDGYCLHDGVCMYIEALDKYACNCVVGYIGERCQYRDLKWWELRHAGHGQQQKVIVVAVCVVVLVMLLLLSLWGAHYYRTQKLLSKNPKNPYEESSRDVRSRRPADTEDGMSSCPQPWFVVIKEHQDLKNGGQPVAGEDGQAADGSMQPTSWRQEPQLCGMGTEQGCWIPVSSDKGSCPQVMERSFHMPSYGTQTLEGGVEKPHSLLSANPLWQQRALDPPHQMELTQ

SEQ ID NO: 27683 - protein, 1165 aa, Homo sapiens
  Payload ID: 5465
  Gene Symbol: EGF
  Gene Name: epidermal growth factor
  Uniprot ID: P01133
  ENSP ID: ENSP00000424316
MLLTLIILLPVVSKFSFVSLSAPQHWSCPEGTLAGNGNSTCVGPAPFLIFSHGNSIFRIDTEGTNYEQLVVDAGVSVIMDFHYNEKRIYWVDLERQLLQRVFLNGSRQERVCNIEKNVSGMAINWINEEVIWSNQQEGIITVTDMKGNNSHILLSALKYPANVAVDPVERFIFWSSEVAGSLYRADLDGVGVKALLETSEKITAVSLDVLDKRLFWIQYNREGSNSLICSCDYDGGSVHISKHPTQHNLFAMSLFGDRIFYSTWKMKTIWIANKHTGKDMVRINLHSSFVPLGELKVVHPLAQPKAEDDTWEPDVNECAFWNHGCTLGCKNTPGSYYCTCPVGFVLLPDGKRCHQLVSCPRNVSECSHDCVLTSEGPLCFCPEGSVLERDGKTCSGCSSPDNGGCSQLCVPLSPVSWECDCFPGYDLQLDEKSCAASGPQPFLLFANSQDIRHMHFDGTDYGTLLSQQMGMVYALDHDPVENKIYFAHTALKWIERANMDGSQRERLIEEGVDVPEGLAVDWIGRRFYWTDRGKSLIGRSDLNGKRSKIITKENISQPRGIAVHPMAKRLFWTDTGINPRIESSSLQGLGRLVIASSDLIWPSGITIDFLTDKLYWCDAKQSVIEMANLDGSKRRRLTQNDVGHPFAVAVFEDYVWFSDWAMPSVMRVNKRTGKDRVRLQGSMLKPSSLVVVHPLAKPGADPCLYQNGGCEHICKKRLGTAWCSCREGFMKASDGKTCLALDGHQLLAGGEVDLKNQVTPLDILSKTRVSEDNITESQHMLVAEIMVSDQDDCAPVGCSMYARCISEGEDATCQCLKGFAGDGKLCSDIDECEMGVPVCPPASSKCINTEGGYVCRCSEGYQGDGIHCLDIDECQLGEHSCGENASCTNTEGGYTCMCAGRLSEPGLICPDSTPPPHLREDDHHYSVRNSDSECPLSHDGYCLHDGVCMYIEALDKYACNCVVGYIGERCQYRDLKWWELRHAGHGQQQKVIVVAVCVVVLVMLLLLSLWGAHYYRTQKLLSKNPKNPYEESSRDVRSRRPADTEDGMSSCPQPWFVVIKEHQDLKNGGQPVAGEDGQAADGSMQPTSWRQEPQLCGMGTEQGCWIPVSSDKGSCPQVMERSFHMPSYGTQTLEGGVEKPHSLLSANPLWQQRALDPPHQMELTQ

SEQ ID NO: 27684 - protein, 1210 aa, Homo sapiens [sequence omitted]

SEQ ID NO: 27685 - protein, 628 aa, Homo sapiens
  Payload ID: 5466
  Gene Symbol: EGFR
  Gene Name: epidermal growth factor receptor
  Uniprot ID: P00533
  ENSP ID: ENSP00000342376
MRPSGTAGAALLALLAALCPASRALEEKKVCQGTSNKLTQLGTFEDHFLSLQRMFNNCEVVLGNLEITYVQRNYDLSFLKTIQEVAGYVLIALNTVERIPLENLQIIRGNMYYENSYALAVLSNYDANKTGLKELPMRNLQEILHGAVRFSNNPALCNVESIQWRDIVSSDFLSNMSMDFQNHLGSCQKCDPSCPNGSCWGAGEENCQKLTKIICAQQCSGRCRGKSPSDCCHNQCAAGCTGPRESDCLVCRKFRDEATCKDTCPPLMLYNPTTYQMDVNPEGKYSFGATCVKKCPRNYVVTDHGSCVRACGADSYEMEEDGVRKCKKCEGPCRKVCNGIGIGEFKDSLSINATNIKHFKNCTSISGDLHILPVAFRGDSFTHTPPLDPQELDILKTVKEITGFLLIQAWPENRTDLHAFENLEIIRGRTKQHGQFSLAVVSLNITSLGLRSLKEISDGDVIISGNKNLCYANTINWKKLFGTSGQKTKIISNRGENSCKATGQVCHALCSPEGCWGPEPRDCVSCRNVSRGRECVDKCNLLEGEPREFVENSECIQCHPECLPQAMNITCTGRGPDNCIQCAHYIDGPHCVKTCPAGVMGENNTLVWKYADAGHVCHLCHPNCTYGS

SEQ ID NO: 27686 - protein, 705 aa, Homo sapiens
  Payload ID: 5466
  Gene Symbol: EGFR
  Gene Name: epidermal growth factor receptor
  Uniprot ID: P00533
  ENSP ID: ENSP00000345973
MRPSGTAGAALLALLAALCPASRALEEKKVCQGTSNKLTQLGTFEDHFLSLQRMFNNCEVVLGNLEITYVQRNYDLSFLKTIQEVAGYVLIALNTVERIPLENLQIIRGNMYYENSYALAVLSNYDANKTGLKELPMRNLQEILHGAVRFSNNPALCNVESIQWRDIVSSDFLSNMSMDFQNHLGSCQKCDPSCPNGSCWGAGEENCQKLTKIICAQQCSGRCRGKSPSDCCHNQCAAGCTGPRESDCLVCRKFRDEATCKDTCPPLMLYNPTTYQMDVNPEGKYSFGATCVKKCPRNYVVTDHGSCVRACGADSYEMEEDGVRKCKKCEGPCRKVCNGIGIGEFKDSLSINATNIKHFKNCTSISGDLHILPVAFRGDSFTHTPPLDPQELDILKTVKEITGFLLIQAWPENRTDLHAFENLEIIRGRTKQHGQFSLAVVSLNITSLGLRSLKEISDGDVIISGNKNLCYANTINWKKLFGTSGQKTKIISNRGENSCKATGQVCHALCSPEGCWGPEPRDCVSCRNVSRGRECVDKCNLLEGEPREFVENSECIQCHPECLPQAMNITCTGRGPDNCIQCAHYIDGPHCVKTCPAGVMGENNTLVWKYADAGHVCHLCHPNCTYGPGNESLKAMLFCLFKLSSCNQSNDGSVSHQSGSPAAQESCLGWIPSLLPSEFQLGWGGCSHLHAWPSASVIITASSCH

SEQ ID NO: 27687 - protein, 1165 aa, Homo sapiens
  Payload ID: 5466
  Gene Symbol: EGFR
  Gene Name: epidermal growth factor receptor
  ENSP ID: ENSP00000395243
MRPSGTAGAALLALLAALCPASRALEEKKVCQGTSNKLTQLGTFEDHFLSLQRMFNNCEVVLGNLEITYVQRNYDLSFLKTIQEVAGYVLIALNTVERIPLENLQIIRGNMYYENSYALAVLSNYDANKTGLKELPMRNLQGQKCDPSCPNGSCWGAGEENCQKLTKIICAQQCSGRCRGKSPSDCCHNQCAAGCTGPRESDCLVCRKFRDEATCKDTCPPLMLYNPTTYQMDVNPEGKYSFGATCVKKCPRNYVVTDHGSCVRACGADSYEMEEDGVRKCKKCEGPCRKVCNGIGIGEFKDSLSINATNIKHFKNCTSISGDLHILPVAFRGDSFTHTPPLDPQELDILKTVKEITGFLLIQAWPENRTDLHAFENLEIIRGRTKQHGQFSLAVVSLNITSLGLRSLKEISDGDVIISGNKNLCYANTINWKKLFGTSGQKTKIISNRGENSCKATGQVCHALCSPEGCWGPEPRDCVSCRNVSRGRECVDKCNLLEGEPREFVENSECIQCHPECLPQAMNITCTGRGPDNCIQCAHYIDGPHCVKTCPAGVMGENNTLVWKYADAGHVCHLCHPNCTYGCTGPGLEGCPTNGPKIPSIATGMVGALLLLLVVALGIGLFMRRRHIVRKRTLRRLLQERELVEPLTPSGEAPNQALLRILKETEFKKIKVLGSGAFGTVYKGLWIPEGEKVKIPVAIKELREATSPKANKEILDEAYVMASVDNPHVCRLLGICLTSTVQLITQLMPFGCLLDYVREHKDNIGSQYLLNWCVQIAKGMNYLEDRRLVHRDLAARNVLVKTPQHVKITDFGLAKLLGAEEKEYHAEGGKVPIKWMALESILHRIYTHQSDVWSYGVTVWELMTFGSKPYDGIPASEISSILEKGERLPQPPICTIDVYMIMVKCWMIDADSRPKFRELIIEFSKMARDPQRYLVIQGDERMHLPSPTDSNFYRALMDEEDMDDVVDADEYLIPQQGFFSSPSTSRTPLLSSLSATSNNSTVACIDRNGLQSCPIKEDSFLQRYSSDPTGALTEDSIDDTFLPVPEYINQSVPKRPAGSVQNPVYHNQPLNPAPSRDPHYQDPHSTAVGNPEYLNTVQPTCVNSTFDSPAHWAQKGSHQISLDNPDYQQDFFPKEAKPNGIFKGSTAENAEYLRVAPQSSEFIGA

SEQ ID NO: 27688 - protein, 657 aa, Homo sapiens
  Payload ID: 5466
  Gene Symbol: EGFR
  Gene Name: epidermal growth factor receptor
  ENSP ID: ENSP00000410031
MRPSGTAGAALLALLAALCPASRALEEKKVCQGTSNKLTQLGTFEDHFLSLQRMFNNCEVVLGNLEITYVQRNYDLSFLKTIQEVAGYVLIALNTVERIPLENLQIIRGNMYYENSYALAVLSNYDANKTGLKELPMRNLQEILHGAVRFSNNPALCNVESIQWRDIVSSDFLSNMSMDFQNHLGSCQKCDPSCPNGSCWGAGEENCQKLTKIICAQQCSGRCRGKSPSDCCHNQCAAGCTGPRESDCLVCRKFRDEATCKDTCPPLMLYNPTTYQMDVNPEGKYSFGATCVKKCPRNYVVTDHGSCVRACGADSYEMEEDGVRKCKKCEGPCRKVCNGIGIGEFKDSLSINATNIKHFKNCTSISGDLHILPVAFRGDSFTHTPPLDPQELDILKTVKEITGFLLIQAWPENRTDLHAFENLEIIRGRTKQHGQFSLAVVSLNITSLGLRSLKEISDGDVIISGNKNLCYANTINWKKLFGTSGQKTKIISNRGENSCKATGQVCHALCSPEGCWGPEPRDCVSCRNVSRGRECVDKCNLLEGEPREFVENSECIQCHPECLPQAMNITCTGRGPDNCIQCAHYIDGPHCVKTCPAGVMGENNTLVWKYADAGHVCHLCHPNCTYGCTGPGLEGCPTNGSYIVSHFPRSFYKMSVH

SEQ ID NO: 27689 - protein, 128 aa, Homo sapiens
  Payload ID: 5466
  Gene Symbol: EGFR
  Gene Name: epidermal growth factor receptor
  ENSP ID: ENSP00000413354
MFNNCEVVLGNLEITYVQRNYDLSFLKTIQEVAGYVLIALNTVERIPLENLQIIRGNMYYENSYALAVLSNYDANKTGLKELPMRNLQEILHGAVRFSNNPALCNVESIQWRDIVSSDFLSNMSMDFQ

SEQ ID NO: 27690 - protein, 405 aa, Homo sapiens
  Payload ID: 5466
  Gene Symbol: EGFR
  Gene Name: epidermal growth factor receptor
  Uniprot ID: P00533
  ENSP ID: ENSP00000413843
MRPSGTAGAALLALLAALCPASRALEEKKVCQGTSNKLTQLGTFEDHFLSLQRMFNNCEVVLGNLEITYVQRNYDLSFLKTIQEVAGYVLIALNTVERIPLENLQIIRGNMYYENSYALAVLSNYDANKTGLKELPMRNLQEILHGAVRFSNNPALCNVESIQWRDIVSSDFLSNMSMDFQNHLGSCQKCDPSCPNGSCWGAGEENCQKLTKIICAQQCSGRCRGKSPSDCCHNQCAAGCTGPRESDCLVCRKFRDEATCKDTCPPLMLYNPTTYQMDVNPEGKYSFGATCVKKCPRNYVVTDHGSCVRACGADSYEMEEDGVRKCKKCEGPCRKVCNGIGIGEFKDSLSINATNIKHFKNCTSISGDLHILPVAFRGDSFTHTPPLDPQELDILKTVKEITGLS

SEQ ID NO: 27691 - protein, 1091 aa, Homo sapiens
  Payload ID: 5466
  Gene Symbol: EGFR
  Gene Name: epidermal growth factor receptor
  ENSP ID: ENSP00000415559
MRPSGTAGAALLALLAALCPASRALEEKKVCQGTSNKLTQLGTFEDHFLSLQRMFNNCEVVLGNLEITYVQRNYDLSFLKTIQEVAGYVLIALNTVERIPLENLQIIRGNMYYENSYALAVLSNYDANKTGLKELPMRNLQGQKCDPSCPNGSCWGAGEENCQKLTKIICAQQCSGRCRGKSPSDCCHNQCAAGCTGPRESDCLVCRKFRDEATCKDTCPPLMLYNPTTYQMDVNPEGKYSFGATCVKKCPRNYVVTDHGSCVRACGADSYEMEEDGVRKCKKCEGPCRKVCNGIGIGEFKDSLSINATNIKHFKNCTSISGDLHILPVAFRGDSFTHTPPLDPQELDILKTVKEITGFLLIQAWPENRTDLHAFENLEIIRGRTKQHGQFSLAVVSLNITSLGLRSLKEISDGDVIISGNKNLCYANTINWKKLFGTSGQKTKIISNRGENSCKATGQVCHALCSPEGCWGPEPRDCVSCRNVSRGRECVDKCNLLEGEPREFVENSECIQCHPECLPQAMNITCTGRGPDNCIQCAHYIDGPHCVKTCPAGVMGENNTLVWKYADAGHVCHLCHPNCTYGCTGPGLEGCPTNGPKIPSIATGMVGALLLLLVVALGIGLFMRRRHIVRKRTLRRLLQERELVEPLTPSGEAPNQALLRILKETEFKKIKVLGSGAFGTVYKGLWIPEGEKVKIPVAIKELREATSPKANKEILDEAYVMASVDNPHVCRLLGICLTSTVQLITQLMPFGCLLDYVREHKDNIGSQYLLNWCVQIAKGMNYLEDRRLVHRDLAARNVLVKTPQHVKITDFGLAKLLGAEEKEYHAEGGKVPIKWMALESILHRIYTHQSDVWSYGVTVWELMTFGSKPYDGIPASEISSILEKGERLPQPPICTIDVYMIMVKCWMIDADSRPKFRELIIEFSKMARDPQRYLVIQGDERMHLPSPTDSNFYRALMDEEDMDDVVDADEYLIPQQGFFSSPSTSRTPLLSSLSATSNNSTVACIDRNGLQSCPIKEDSFLQRYSSDPTGALTEDSIDDTFLPVPGEWLVWKQSCSSTSSTHSAAASLQCPSQVLPPASPEGETVADLQTQ

SEQ ID NO: 27692 - protein, 762 aa, Homo sapiens
  Payload ID: 5467
  Gene Symbol: EPS15
  Gene Name: epidermal growth factor receptor pathway substrate 15
  ENSP ID: ENSP00000360795
MAAAAQLSLTQLSSGNPVYEKYYRQVDTGNTGRVLASDAAAFLKKSGLPDLILGKIWDLADTDGKGILNKQEFFVALRLVACAQNGLEVSLSSLNLAVPPPRFHDTSSPLLISGTSAAELPWAVKPEDKAKYDAIFDSLSPVNGFLSGDKVKPVLLNSKLPVDILGRVWELSDIDHDGMLDRDEFAVAMFLVYCALEKEPVPMSLPPALVPPSKRKTWVVSPAEKAKYDEIFLKTDKDMDGFVSGLEVREIFLKTGLPSTLLAHIWSLCDTKDCGKLSKDQFALAFHLISQKLIKGIDPPHVLTPEMIPPSDRASLQKNIIGSSPVADFSAIKELDTLNNEIVDLQREKNNVEQDLKEKEDTIKQRTSEVQDLQDEVQRENTNLQKLQAQKQQVQELLDELDEQKAQLEEQLKEVRKKCAEEAQLARSSPELLPSGVTDENEVTTAVTEKVCSELDNNRHSKEEDPFNVDSSSLTGPVADTNLDFFQSDPFVGSDPFKDDPFGKIDPFGGDPFKGSDPFASDCFFRQSTDPFATSSTDPFSAANNSSITSVETLKHNDPFAPGGTVVAASDSATDPFASVFGNESFGGGFADFSTLSKVNNEDPFRSATSSSVSNVVITKNVFEETSVKSEDEPPALPPKIGTPTRPCPLPPGKRSINKLDSPDPFKLNDPFQPFPGNDSPKEKDPEIFCDPFTSATTTTNKEADPSNFANFSAYPSEEDMIEWAKRESEREEEQRLARLNQQEQEDLELAIALSKSEISEA

SEQ ID NO: 27693 - protein, 896 aa, Homo sapiens
  Payload ID: 5467
  Gene Symbol: EPS15
  Gene Name: epidermal growth factor receptor pathway substrate 15
  Uniprot ID: P42566
  ENSP ID: ENSP00000360798
MAAAAQLSLTQLSSGNPVYEKYYRQVDTGNTGRVLASDAAAFLKKSGLPDLILGKIWDLADTDGKGILNKQEFFVALRLVACAQNGLEVSLSSLNLAVPPPRFHDTSSPLLISGTSAAELPWAVKPEDKAKYDAIFDSLSPVNGFLSGDKVKPVLLNSKLPVDILGRVWELSDIDHDGMLDRDEFAVAMFLVYCALEKEPVPMSLPPALVPPSKRKTWVVSPAEKAKYDEIFLKTDKDMDGFVSGLEVREIFLKTGLPSTLLAHIWSLCDTKDCGKLSKDQFALAFHLISQKLIKGIDPPHVLTPEMIPPSDRASLQKNIIGSSPVADFSAIKELDTLNNEIVDLQREKNNVEQDLKEKEDTIKQRTSEVQDLQDEVQRENTNLQKLQAQKQQVQELLDELDEQKAQLEEQLKEVRKKCAEEAQLISSLKAELTSQESQISTYEEELAKAREELSRLQQETAELEESVESGKAQLEPLQQHLQDSQQEISSMQMKLMEMKDLENHNSQLNWCSSPHSILVNGATDYCSLSTSSSETANLNEHVEGQSNLESEPIHQESPARSSPELLPSGVTDENEVTTAVTEKVCSELDNNRHSKEEDPFNVDSSSLTGPVADTNLDFFQSDPFVGSDPFKDDPFGKIDPFGGDPFKGSDPFASDCFFRQSTDPFATSSTDPFSAANNSSITSVETLKHNDPFAPGGTVVAASDSATDPFASVFGNESFGGGFADFSTLSKVNNEDPFRSATSSSVSNVVITKNVFEETSVKSEDEPPALPPKIGTPTRPCPLPPGKRSINKLDSPDPFKLNDPFQPFPGNDSPKEKDPEIFCDPFTSATTTTNKEADPSNFANFSAYPSEEDMIEWAKRESEREEEQRLARLNQQEQEDLELAIALSKSEISEA

SEQ ID NO: 27694 - protein, 90 aa, Homo sapiens
  Payload ID: 5467
  Gene Symbol: EPS15
  Gene Name: epidermal growth factor receptor pathway substrate 15
  ENSP ID: ENSP00000474739
  MOD_RES (1)..(1): Any amino acid
XAAAQLSLTQLSSGNPVYEKYYRQVDTGNTGRVLASDAAAFLKKSGLPDLILGKIWDLADTDGKGILNKQHDTSSPLLISGTSAAELPWA

SEQ ID NO: 27695 - protein, 864 aa, Homo sapiens
  Payload ID: 5468
  Gene Symbol: EPS15L1
  Gene Name: epidermal growth factor receptor pathway substrate 15-like 1
  Uniprot ID: Q9UBC2
  ENSP ID: ENSP00000248070
MAAPLIPLSQQIPTGNSLYESYYKQVDPAYTGRVGASEAALFLKKSGLSDIILGKIWDLADPEGKGFLDKQGFYVALRLVACAQSGHEVTLSNLNLSMPPPKFHDTSSPLMVTPPSAEAHWAVRVEEKAKFDGIFESLLPINGLLSGDKVKPVLMNSKLPLDVLGRVWDLSDIDKDGHLDRDEFAVAMHLVYRALEKEPVPSALPPSLIPPSKRKKTVFPGAVPVLPASPPPKDSLRSTPSHGSVSSLNSTGSLSPKHSLKQTQPTVNWVVPVADKMRFDEIFLKTDLDLDGYVSGQEVKEIFMHSGLTQNLLAHIWALADTRQTGKLSKDQFALAMYFIQQKVSKGIDPPQVLSPDMVPPSERGTPGPDSSGSLGSGEFTGVKELDDISQEIAQLQREKYSLEQDIREKEEAIRQKTSEVQELQNDLDRETSSLQELEAQKQDAQDRLDEMDQQKAKLRDMLSDVRQKCQDETQMISSLKTQIQSQESDLKSQEDDLNRAKSELNRLQQEETQLEQSIQAGRVQLETIIKSLKSTQDEINQARSKLSQLHESRQEAHRSLEQYDQVLDGAHGASLTDLANLSEGVSLAERGSFGAMDDPFKNKALLFSNNTQELHPDPFQTEDPFKSDPFKGADPFKGDPFQNDPFAEQQTTSTDPFGGDPFKESDPFRGSATDDFFKKQTKNDPFTSDPFTKNPSLPSKLDPFESSDPFSSSSVSSKGSDPFGTLDPFGSGSFNSAEGFADFSQMSKPPPSGPFTSSLGGAGFSDDPFKSKQDTPALPPKKPAPPRPKPPSGKSTPVSQLGSADFPEAPDPFQPLGADSGDPFQSKKGFGDPFSGKDPFVPSSAAKPSKASASGFADFTSVS

SEQ ID NO: 27696 - protein, 910 aa, Homo sapiens
  Payload ID: 5468
  Gene Symbol: EPS15L1
  Gene Name: epidermal growth factor receptor pathway substrate 15-like 1
  Uniprot ID: Q9UBC2
  ENSP ID: ENSP00000393313
MAAPLIPLSQQIPTGNSLYESYYKQVDPAYTGRVGASEAALFLKKSGLSDIILGKIWDLADPEGKGFLDKQGFYVALRLVACAQSGHEVTLSNLNLSMPPPKFHDTSSPLMVTPPSAEAHWAVRVEEKAKFDGIFESLLPINGLLSGDKVKPVLMNSKLPLDVLGRVWDLSDIDKDGHLDRDEFAVAMHLVYRALEKEPVPSALPPSLIPPSKRKKTVFPGAVPVLPASPPPKDSLRSTPSHGSVSSLNSTGSLSPKHSLKQTQPTVNWVVPVADKMRFDEIFLKTDLDLDGYVSGQEVKEIFMHSGLTQNLLAHIWALADTRQTGKLSKDQFALAMYFIQQKVSKGIDPPQVLSPDMVPPSERGTPGPDSSGSLGSGEFTGVKELDDISQEIAQLQREKYSLEQDIREKEEAIRQKTSEVQELQNDLDRETSSLQELEAQKQDAQDRLDEMDQQKAKLRDMLSDVRQKCQDETQMISSLKTQIQSQESDLKSQEDDLNRAKSELNRLQQEETQLEQSIQAGRVQLETIIKSLKSTQDEINQARSKLSQLHESRQEAHRSLEQYDQVLDGAHGASLTDLANLSEGVSLAERGSFGAMDDPFKNKALLFSNNTQELHPDPFQTEDPFKSDPFKGADPFKGDPFQNDPFAEQQTTSTDPFGGDPFKESDPFRGSATDDFFKKQTKNDPFTSDPFTKNPSLPSKLDPFESSDPFSSSSVSSKGSDPFGTLDPFGSGSFNSAEGFADFSQMSKPPPSGPFTSSLGGAGFSDDPFKSKQDTPALPPKKPAPPRPKPPSGKSTPVSQLGSADFPEAPDPFQPLGADSGDPFQSKKGFGDPFSGKDPFVPSSAAKPSKASASGFADFTSFGNEEQQLAWAKRESEKAEQERLARLRRQEQEDLELAIALSKADMPAA

SEQ ID NO: 27697 - protein, 754 aa, Homo sapiens
  Payload ID: 5468
  Gene Symbol: EPS15L1
  Gene Name: epidermal growth factor receptor pathway substrate 15-like 1
  Uniprot ID: Q9UBC2
  ENSP ID: ENSP00000440103
MAAPLIPLSQQIPTGNSLYESYYKQVDPAYTGRVGASEAALFLKKSGLSDIILGKIWDLADPEGKGFLDKQGFYVALRLVACAQSGHEVTLSNLNLSMPPPKFHDTSSPLMVTPPSAEAHWAVRVEEKAKFDGIFESLLPINGLLSGDKVKPVLMNSKLPLDVLGRVWDLSDIDKDGHLDRDEFAVAMHLVYRALEKEPVPSALPPSLIPPSKRKKTVFPGAVPVLPASPPPKDSLRSTPSHGSVSSLNSTGSLSPKHSLKQTQPTVNWVVPVADKMRFDEIFLKTDLDLDGYVSGQEVKEIFMHSGLTQNLLAHIWALADTRQTGKLSKDQFALAMYFIQQKVSKGIDPPQVLSPDMVPPSERGTPGPDSSGSLGSGEFTGVKELDDISQEIAQLQREKYSLEQDIREKEEAIRQKTSEVQELQNDLDRETSSLQELEAQKQDAQDRLDEMDQQKAKLRDMLSDVRQKCQDETQMISSLKTQIQSQESDLKSQEDDLNRAKSELNRLQQEETQLEQSIQAGRVQLETIIKSLKSTQDEINQARSKLSQLHESRQEAHRSLEQYDQVLDGAHGASLTDLANLSEGVSLAERGSFGAMDDPFKNKALLFSNNTQELHPDPFQTEDPFKSDPFKGADPFKGDPFQNDPFAEQQTTSTDPFGGDPFKESDPFRGSATDDFFKKQTKNDPFTSDPFTKNPSLPSKLDPFESSDPFSSSSVSSKGSDPFGTLDPFGSGSFNSAEGFADFSQMSKVKVHL

SEQ ID NO: 27698 - protein, 79 aa, Homo sapiens
  Payload ID: 5468
  Gene Symbol: EPS15L1
  Gene Name: epidermal growth factor receptor pathway substrate 15-like 1
  ENSP ID: ENSP00000465286
MAAPLIPLSQQIPTGNSLYESYYKQVDPAYTGRVGASEAALFLKKSGLSDIILGKIWDLADPEGFLCCTETGGLCTEWP

SEQ ID NO: 27699 - protein, 90 aa, Homo sapiens
  Payload ID: 5468
  Gene Symbol: EPS15L1
  Gene Name: epidermal growth factor receptor pathway substrate 15-like 1
  ENSP ID: ENSP00000468866
  MOD_RES (1)..(1): Any amino acid
XAAPLIPLSQQIPTGNSLYESYYKQVDPAYTGRVGASEAALFLKKSGLSDIILGKIWDLADPEGKGFLDKQVYTHVHRANGGAGQSPQAG

SEQ ID NO: 27700 - protein, 71 aa, Homo sapiens
  Payload ID: 5468
  Gene Symbol: EPS15L1
  Gene Name: epidermal growth factor receptor pathway substrate 15-like 1
  ENSP ID: ENSP00000469495
  MOD_RES (1)..(1): Any amino acid
XQTFPRPPIHSSHSGLTAATRSKFGNEEQQLAWAKRESEKAEQERLARLRRQEQEDLELAIALSKADMPAA

SEQ ID NO: 27701 - protein, 756 aa, Homo sapiens
  Payload ID: 5468
  Gene Symbol: EPS15L1
  Gene Name: epidermal growth factor receptor pathway substrate 15-like 1
  ENSP ID: ENSP00000471662
MAAPLIPLSQQIPTGNSLYESYYKQVDPAYTGRVGASEAALFLKKSGLSDIILGKIWDLADPEGKGFLDKQGFYVALRLVACAQSGHEVTLSNLNLSMPPPKFHDTSSPLMVTPPSAEAHWAVRVEEKAKFDGIFESLLPINGLLSGDKVKPVLMNSKLPLDVLGRVWDLSDIDKDGHLDRDEFAVAMHLVYRALEKEPVPSALPPSLIPPSKRKKTVFPGAVPVLPASPPPKDSLRSTPSHGSVSSLNSTGSLSPKHSLKQTQPTVNWVVPVADKMRFDEIFLKTDLDLDGYVSGQEVKEIFMHSGLTQNLLAHIWALADTRQTGKLSKDQFALAMYFIQQKVSKGIDPPQVLSPDMVPPSERGTPGPDSSGSLGSGEFTGVKELDDISQEIAQLQREKYSLEQDIREKEEAIRQKTSEVQELQNDLDRETSSLQELEAQKQDAQDRLDEMDQQKAKLRDMLSDVRQKCQDETQMISSLKTQIQSQESDLKSQEDDLNRAKSELNRLQQEETQLEQSIQAGRVQLETIIKSLKSTQDEINQARSKLSQLHESRQEAHRSLEQYDQVLDGAHGASLTDLANLSEGVSLAERGSFGAMVKDDPFKNKALLFSNNTQELHPDPFQTEDPFKSDPFKGADPFKGDPFQNDPFAEQQTTSTDPFGGDPFKESDPFRGSATDDFFKKQTKNDPFTSDPFTKNPSLPSKLDPFESSDPFSSSSVSSKGSDPFGTLDPFGSGSFNSAEGFADFSQMSKVKVHL

SEQ ID NO: 27702 - protein, 754 aa, Homo sapiens; identical to SEQ ID NO: 27697
  Payload ID: 5468
  Gene Symbol: EPS15L1
  Gene Name: epidermal growth factor receptor pathway substrate 15-like 1
  Uniprot ID: Q9UBC2
  ENSP ID: ENSP00000471981

SEQ ID NO: 27703 - protein, 110 aa, Homo sapiens
  Payload ID: 5468
  Gene Symbol: EPS15L1
  Gene Name: epidermal growth factor receptor pathway substrate 15-like 1
  ENSP ID: ENSP00000472135
MAAPLIPLSQQIPTGNSLYESYYKQVDPAYTGRVGASEAALFLKKSGLSDIILGKIWDLADPEGKGFLDKQGFYVALRLVACAQSGHEVTLSNLNLSMPPPKFQTHPPMI

SEQ ID NO: 27704 - protein, 601 aa, Homo sapiens
  Payload ID: 5468
  Gene Symbol: EPS15L1
  Gene Name: epidermal growth factor receptor pathway substrate 15-like 1
  Uniprot ID: Q9UBC2
  ENSP ID: ENSP00000472267
MAAPLIPLSQQIPTGNSLYESYYKQVDPAYTGRVGASEAALFLKKSGLSDIILGKIWDLADPEGKGFLDKQGFYVALRLVACAQSGHEVTLSNLNLSMPPPKFHDTSSPLMVTPPSAEAHWAVRVEEKAKFDGIFESLLPINGLLSGDKVKPVLMNSKLPLDVLGRVWDLSDIDKDGHLDRDEFAVAMHLVYRALEKEPVPSALPPSLIPPSKRKKTVFPGAVPVLPASPPPKDSLRSTPSHGSVSSLNSTGSLSPKHSLKQTQPTVNWVVPVADKMRFDEIFLKTDLDLDGYVSGQEVKEIFMHSGLTQNLLAHIWALADTRQTGKLSKDQFALAMYFIQQKVSKGIDPPQVLSPDMVPPSERGTPGPDSSGSLGSGEFTGVKELDDISQEIAQLQREKYSLEQDIREKEEAIRQKTSEVQELQNDLDRETSSLQELEAQKQDAQDRLDEMDQQKAKLRDMLSDVRQKCQDETQMISSLKTQIQSQESDLKSQEDDLNRAKSELNRLQQEETQLEQSIQAGRVQLETIIKSLKSTQDEINQARSKLSQLHESRQEAHRSLEQYDQVLDGAHGASLTDLANLSEGVSLAERGSFGAMVKVE

SEQ ID NO: 27705 - protein, 447 aa, Homo sapiens
  Payload ID: 5468
  Gene Symbol: EPS15L1
  Gene Name: epidermal growth factor receptor pathway substrate 15-like 1
  ENSP ID: ENSP00000472771
MNSKLPLDVLGRVWDLSDIDKDGHLDRDEFAVAMHLVYRALEKEPVPSALPPSLIPPSKRKKTVFPGAVPVLPASPPPKDSLRSTPSHGSVSSLNSTGSLSPKHSLKQTQPTVNWVVPVADKMRFDEIFLKTDLDLDGYVSGQEVKEIFMHSGLTQNLLAHIWALADTRQTGKLSKDQFALAMYFIQQKVSKGIDPPQVLSPDMVPPSERGTPGPDSSGSLGSGEFTGVKELDDISQEIAQLQREKYSLEQDIREKEEAIRQKTSEVQELQNDLDRETSSLQELEAQKQDAQDRLDEMDQQKAKLRDMLSDVRQKCQDETQMISSLKTQIQSQESDLKSQEDDLNRAKSELNRLQQEETQLEQSIQAGRVQLETIIKSLKSTQDEINQARSKLSQLHESRQEAHRSLEQYDQVLDGAHGASLTDLANLSEGVSLAERGSFGAMVKVE

SEQ ID NO: 27706 - protein, 83 aa, Homo sapiens
  Payload ID: 5468
  Gene Symbol: EPS15L1
  Gene Name: epidermal growth factor receptor pathway substrate 15-like 1
  ENSP ID: ENSP00000472958
MAAPLIPLSQQIPTGNSLYESYYKQVDPAYTGRVGASEAALFLKKSGLSDIILGKKRPNLMGFLKASCPSMVCSLETKSSQSS

SEQ ID NO: 27707 - protein, 213 aa, Homo sapiens
  Payload ID: 5468
  Gene Symbol: EPS15L1
  Gene Name: epidermal growth factor receptor pathway substrate 15-like 1
  ENSP ID: ENSP00000473242
  MOD_RES (1)..(1): Any amino acid
XEINQARSKLSQLHESRQEAHRSLEQYDQVLDGAHGASLTDLANLSEGVSLAERGSFGAMDDPFKNKALLFSNNTQELHPDPFQTEDPFKSDPFKGADPFKGDPFQNDPFAEQQTTSTDPFGGDPFKESDPFRGSATDDFFKKQTKNDPFTSDPFTKNPSLPSKLDPFESSDPFSSSSVSSKGSDPFGTLDPFGSGSFNSAEGFADFSQMSKE

SEQ ID NO: 27708 - protein, 822 aa, Homo sapiens
  Payload ID: 5469
  Gene Symbol: EPS8
  Gene Name: epidermal growth factor receptor pathway substrate 8
  Uniprot ID: Q12929
  ENSP ID: ENSP00000281172
MNGHISNHPSSFGMYPSQMNGYGSSPTFSQTDREHGSKTSAKALYEQRKNYARDSVSSVSDISQYRVEHLTTFVLDRKDAMITVDDGIRKLKLLDAKGKVWTQDMILQVDDRAVSLIDLESKNELENFPLNTIQHCQAVMHSCSYDSVLALVCKEPTQNKPDLHLFQCDEVKANLISEDIESAISDSKGGKQKRRPDALRMISNADPSIPPPPRAPAPAPPGTVTQVDVRSRVAAWSAWAADQGDFEKPRQYHEQEETPEMMAARIDRDVQILNHILDDIEFFITKLQKAAEAFSELSKRKKNKKGKRKGPGEGVLTLRAKPPPPDEFLDCFQKFKHGFNLLAKLKSHIQNPSAADLVHFLFTPLNMVVQATGGPELASSVLSPLLNKDTIDFLNYTVNGDERQLWMSLGGTWMKARAEWPKEQFIPPYVPRFRNGWEPPMLNFMGATMEQDLYQLAESVANVAEHQRKQEIKRLSTEHSSVSEYHPADGYAFSSNIYTRGSHLDQGEAAVAFKPTSNRHIDRNYEPLKTQPKKYAKSKYDFVARNNSELSVLKDDILEILDDRKQWWKVRNASGDSGFVPNNILDIVRPPESGLGRADPPYTHTIQKQRMEYGPRPADTPPAPSPPPTPAPVPVPLPPSTPAPVPVSKVPANITRQNSSSSDSGGSIVRDSQRHKQLPVDRRKSQMEEVQDELIHRLTIGRSAAQKKFHVPRQNVPVINITYDSTPEDVKTWLQSKGFNPVTVNSLGVLNGAQLFSLNKDELRTVCPEGARVYSQITVQKAALEDSSGSSELQEIMRRRQEKISAAASDSGVESFDEGSSH

SEQ ID NO: 27709 - protein, 562 aa, Homo sapiens
  Payload ID: 5469
  Gene Symbol: EPS8
  Gene Name: epidermal growth factor receptor pathway substrate 8
  Uniprot ID: Q12929
  ENSP ID: ENSP00000437806
MMAARIDRDVQILNHILDDIEFFITKLQKAAEAFSELSKRKKNKKGKRKGPGEGVLTLRAKPPPPDEFLDCFQKFKHGFNLLAKLKSHIQNPSAADLVHFLFTPLNMVVQATGGPELASSVLSPLLNKDTIDFLNYTVNGDERQLWMSLGGTWMKARAEWPKEQFIPPYVPRFRNGWEPPMLNFMGATMEQDLYQLAESVANVAEHQRKQEIKRLSTEHSSVSEYHPADGYAFSSNIYTRGSHLDQGEAAVAFKPTSNRHIDRNYEPLKTQPKKYAKSKYDFVARNNSELSVLKDDILEILDDRKQWWKVRNASGDSGFVPNNILDIVRPPESGLGRADPPYTHTIQKQRMEYGPRPADTPPAPSPPPTPAPVPVPLPPSTPAPVPVSKVPANITRQNSSSSDSGGSIVRDSQRHKQLPVDRRKSQMEEVQDELIHRLTIGRSAAQKKFHVPRQNVPVINITYDSTPEDVKTWLQSKGFNPVTVNSLGVLNGAQLFSLNKDELRTVCPEGARVYSQITVQKAALEDSSGSSELQEIMRRRQEKISAAASDSGVESFDEGSSH

SEQ ID NO: 27710 - protein, 68 aa, Homo sapiens
  Payload ID: 5469
  Gene Symbol: EPS8
  Gene Name: epidermal growth factor receptor pathway substrate 8
  ENSP ID: ENSP00000438490
  MOD_RES (1)..(1): Any amino acid
XDIESAISDSKGGKQKRRPDALRMISNADPSIPPPPRAPAPAPPGTVTQVDVRSRVAAWSAWAADQGD

SEQ ID NO: 27711 - protein, 68 aa, Homo sapiens
  Payload ID: 5469
  Gene Symbol: EPS8
  Gene Name: epidermal growth factor receptor pathway substrate 8
  ENSP ID: ENSP00000438668
MNGHISNHPSSFGMYPSQMNGYGSSPTFSQTDREHGSKTSAKALYEQRKNYARDSVSSVSDISQYRVE

SEQ ID NO: 27712 - protein, 120 aa, Homo sapiens
  Payload ID: 5469
  Gene Symbol: EPS8
  Gene Name: epidermal growth factor receptor pathway substrate 8
  ENSP ID: ENSP00000440591
MNGHISNHPSSFGMYPSQMNGYGSSPTFSQTDREHGSKTSAKALYEQRKNYARDSVSSVSDISQYRVEHLTTFVLDRKDAMITVDDGIRKLKLLDAKGKVWTQDMILQVDDRAVSLIDLE

SEQ ID NO: 27713 - protein, 822 aa, Homo sapiens; identical to SEQ ID NO: 27708
  Payload ID: 5469
  Gene Symbol: EPS8
  Gene Name: epidermal growth factor receptor pathway substrate 8
  Uniprot ID: Q12929
  ENSP ID: ENSP00000441867

SEQ ID NO: 27714 - protein, 562 aa, Homo sapiens; identical to SEQ ID NO: 27709
  Payload ID: 5469
  Gene Symbol: EPS8
  Gene Name: epidermal growth factor receptor pathway substrate 8
  Uniprot ID: Q12929
  ENSP ID: ENSP00000441888

SEQ ID NO: 27715 - protein, 822 aa, Homo sapiens; identical to SEQ ID NO: 27708
  Payload ID: 5469
  Gene Symbol: EPS8
  Gene Name: epidermal growth factor receptor pathway substrate 8
  Uniprot ID: Q12929
  ENSP ID: ENSP00000442388

SEQ ID NO: 27716 - protein, 41 aa, Homo sapiens
  Payload ID: 5469
  Gene Symbol: EPS8
  Gene Name: epidermal growth factor receptor pathway substrate 8
  ENSP ID: ENSP00000442883
MNGHISNHPSSFGMYPSQMKTKEELCTGQCQQCVRYISIPC

SEQ ID NO: 27717 - protein, 68 aa, Homo sapiens; identical to SEQ ID NO: 27711
  Payload ID: 5469
  Gene Symbol: EPS8
  Gene Name: epidermal growth factor receptor pathway substrate 8
  ENSP ID: ENSP00000444613

SEQ ID NO: 27718 - protein, 128 aa, Homo sapiens
  Payload ID: 5469
  Gene Symbol: EPS8
  Gene Name: epidermal growth factor receptor pathway substrate 8
  ENSP ID: ENSP00000445235
MNGHISNHPSSFGMYPSQMNGYGSSPTFSQTDREHGSKTSAKALYEQRKNYARDSVSSVSDISQYRVEHLTTFVLDRKDAMITVDDGIRKLKLLDAKGKVWTQDMILQVDDRAVSLIDLESKNELENF

SEQ ID NO: 27719 - protein, 67 aa, Homo sapiens
  Payload ID: 5469
  Gene Symbol: EPS8
  Gene Name: epidermal growth factor receptor pathway substrate 8
  ENSP ID: ENSP00000445815
MNGHISNHPSSFGMYPSQMNGYGSSPTFSQTDREHGSKTSAKALYEQRKNYARDSVSSVSDISQYRV

SEQ ID NO: 27720 - protein, 200 aa, Homo sapiens
  Payload ID: 5469
  Gene Symbol: EPS8
  Gene Name: epidermal growth factor receptor pathway substrate 8
  ENSP ID: ENSP00000445985
MNGHISNHPSSFGMYPSQMNGYGSSPTFSQTDREHGSKTSAKALYEQRKNYARDSVSSVSDISQYRVEHLTTFVLDRKDAMITVDDGIRKLKLLDAKGKVWTQDMILQVDDRAVSLIDLESKNELENFPLNTIQHCQAVMHSCSYDSVLALVCKEPTQNKPDLHLFQCDEVKANLISEDIESAISDSKGGKQKRRPDALS

SEQ ID NO: 27721 - protein, 117 aa, Homo sapiens
  Payload ID: 5470
  Gene Symbol: EPPIN
  Gene Name: epididymal peptidase inhibitor
  Uniprot ID: O95925
  ENSP ID: ENSP00000338114
MLSKAHGCKTALSLGRCPKIREECEFQERDVCTKDRQCQDNKKCCVFSCGKKCLDLKQDVCEMPKETGPCLAYFLHWWYDKKDNTCSMFVYGGCQGNNNNFQSKANCLNTCKNKRFP

SEQ ID NO: 27722 - protein, 133 aa, Homo sapiens
  Payload ID: 5470
  Gene Symbol: EPPIN
  Gene Name: epididymal peptidase inhibitor
  Uniprot ID: O95925
  ENSP ID: ENSP00000361746
MGSSGLLSLLVLFVLLANVQGPGLTDWLFPRRCPKIREECEFQERDVCTKDRQCQDNKKCCVFSCGKKCLDLKQDVCEMPKETGPCLAYFLHWWYDKKDNTCSMFVYGGCQGNNNNFQSKANCLNTCKNKRFP

SEQ ID NO: 27723 - protein, 77 aa, Homo sapiens
  Payload ID: 5470
  Gene Symbol: EPPIN
  Gene Name: epididymal peptidase inhibitor
  ENSP ID: ENSP00000387153
MGSSGLLSLLVLFVLLANVQGPGLTDWLFPRRCPKIREECEFQERDVCTKDRQCQDNKKCCVFSCGKKCLDLKQGKQ

SEQ ID NO: 27724 - protein, 147 aa, Homo sapiens
  Payload ID: 5471
  Gene Symbol: EDDM3A
  Gene Name: epididymal protein 3A
  Uniprot ID: Q14507
  ENSP ID: ENSP00000315098
MTSSLKIWGILLALLCILCRLCVYSNNIYWREFIKLHYLSPSREFKEYKCDVLMREKEALKGKSFHMFIYSLWFKIQRACINEKGSDRYRNAYVWAPGALKVLECHWEKYNNRYTESRSFSYIEFHCGVDGYVDNIEDLRIIEPISN

SEQ ID NO: 27725 - protein, 147 aa, Homo sapiens
  Payload ID: 5471
  Gene Symbol: EDDM3A
  Gene Name: epididymal protein 3A
  ENSP ID: ENSP00000479026
MASSLKIWGSPLALLCILCRLLVHSKDVSWREFIKLHYLSPSREFKEYKCDVLMREKEALKGKSFHMFIYSLWFKIQRACINEKGSDRYRNAYVWAPGALKVLECHWEKYNNRYTESRSFSYIEFHCGVDGYVDNIEDLRIIEPISN

SEQ ID NO: 27726 - protein, 147 aa, Homo sapiens
  Payload ID: 5472
  Gene Symbol: EDDM3B
  Gene Name: epididymal protein 3B
  Uniprot ID: P56851
  ENSP ID: ENSP00000314810
MASSLKIWGTLLALLCILCTLLVQSKEVSWREFMKQHYLSPSREFREYKCDVLMRENEALKDKSSHMFIYISWYKIEHICTSDNWMDRFRNAYVWVQNPLKVLKCHQENSKNSYTESRSFNYIEFHCSMDGYVDSIEDLKMVEPIGN

SEQ ID NO: 27727 - protein, 223 aa, Homo sapiens [sequence omitted]

SEQ ID NO: 27728 - protein, 76 aa, Homo sapiens
  Payload ID: 5473
  Gene Symbol: ELSPBP1
  Gene Name: epididymal sperm binding protein 1
  ENSP ID: ENSP00000470551
SNKLWCPTTENMDKDGKWSFCADTRISALVPGFPCHFPFNYKNKNYFNCTNEGSKENLVWCATSYNYDQDHTWVYC

SEQ ID NO: 27729 - protein, 150 aa, Homo sapiens
  Payload ID: 5473
  Gene Symbol: ELSPBP1
  Gene Name: epididymal sperm binding protein 1
  ENSP ID: ENSP00000470903
MTRWSSYLLGWTTFLLYSYESSGDYPRCIFPFIYRGKAYNSCISQGSFLGSLWCSVTSVFDEKQQWKFCETNEYGGNSLRKPCIFPSIYRNNVVSDCMEDESNKLWCPTTENMDKDGKWSFCADTRISALVPGFPCHFPFNYKNKNYFNC

SEQ ID NO: 27730 - protein, 75 aa, Homo sapiens
  Payload ID: 5473
  Gene Symbol: ELSPBP1
  Gene Name: epididymal sperm binding protein 1
  ENSP ID: ENSP00000471690
MTRWSSYLLGWTTFLLYSYESSGGISALVPGFPCHFPFNYKNKNYFNCTNEGSKENLVWCATSYNYDQDHTWVYC

SEQ ID NO: 27731 - protein, 154 aa, Homo sapiens
  Payload ID: 5473
  Gene Symbol: ELSPBP1
  Gene Name: epididymal sperm binding protein 1
  ENSP ID: ENSP00000472960
  MOD_RES (1)..(1): Any amino acid
XYPRCIFPFIYRGKAYNSCISQGSFLGSLWCSVTSVFDEKQQWKFCETNEYGGNSLRKPCIFPSIYRNNVVSDCMEDESNKLWCPTTENMDKDGKWSFCADTRISALVPGFPCHFPFNYKNKNYFNCTNEGSKENLVWCATSYNYDQDHTWVYC

SEQ ID NO: 27732 - protein, 220 aa, Homo sapiens
  Payload ID: 5473
  Gene Symbol: ELSPBP1
  Gene Name: epididymal sperm binding protein 1
  ENSP ID: ENSP00000481506
MVQLPVGWTTFLLYSYESSGGMHEECVFPFTYKGSVYFTCTHIHSLSPWCATRAVYNGQWKYCQSEDYPRCIFPFIYRGKAYNSCISQGSFLGSLWCSVTSVFDEKQQWKFCETNEYGGNSLRKPCIFPSIYRNNVVSDCMEDESNKLWCPTTENMDKDGKWSFCADTRISALVPGFPCHFPFNYKNKNYFNCTNEGSKENLVWCATSYNYDQDHTWVYC

SEQ ID NO: 27733 - protein, 331 aa, Homo sapiens
  Payload ID: 5474
  Gene Symbol: EPM2A
  Gene Name: epilepsy, progressive myoclonus type 2A, Lafora disease (laforin)
  Uniprot ID: O95278
  ENSP ID: ENSP00000356489
MRFRFGVVVPPAVAGARPELLVVGSRPELGRWEPRGAVRLRPAGTAAGDGALALQEPGLWLGEVELAAEEAAQDGAEPGRVDTFWYKFLKREPGGELSWEGNGPHHDRCCTYNENNLVDGVYCLPIGHWIEATGHTNEMKHTTDFYFNIAGHQAMHYSRILPNIWLGSCPRQVEHVTIKLKHELGITAVMNFQTEWDIVQNSSGCNRYPEPMTPDTMIKLYREEGLAYIWMPTPDMSTEGRVQMLPQAVCLLHALLEKGHIVYVHCNAGVGRSTAAVCGWLQYVMGWNLRKVQYFLMAKRPAVYIDEEALARAQEDFFQKFGKVRSSVCSL

SEQ ID NO: 27734 - protein, 237 aa, Homo sapiens
  Payload ID: 5474
  Gene Symbol: EPM2A
  Gene Name: epilepsy, progressive myoclonus type 2A, Lafora disease (laforin)
  ENSP ID: ENSP00000405913
  MOD_RES (1)..(1): Any amino acid
XDTFWYKFLKREPGGELSWEGNGPHHDRCCTYNENNLVDGVYCLPIGHWIEATGHTNEMKHTTDFYFNIAGHQAMHYSRILPNIWLGSCPRQVEHVTIKLKHELGITAVMNFQTEWDIVQNSSGCNRYPEPMTPDTMIKLYREEGLAYIWMPTPDMSTEGRVQMLPQAVCLLHALLEKGHIVYVHCNAGVGRSTAAVCGWLQYVMGWNLRKVQYFLMAKRPAVYIDEEAASQDTFPL

SEQ ID NO: 27735 - protein, 170 aa, Homo sapiens
  Payload ID: 5474
  Gene Symbol: EPM2A
  Gene Name: epilepsy, progressive myoclonus type 2A, Lafora disease (laforin)
  ENSP ID: ENSP00000414900
  MOD_RES (1)..(1): Any amino acid
XNGPHHDRCCTYNENNLVDGVYCLPIGHWIEATGHTNEMKHTTDFYFNIAGHQAMHYSRILPNIWLGSCPRQVEHVTIKLKHELGITAVMNFQTEWDIVQNSSGCNRYPEPMTPDTMIKLYREEGLAYIWMPTPDMSTEDEKRTADMCCSGMWEETADFGLGILDYLKQK

SEQ ID NO: 27736 - protein, 193 aa, Homo sapiens
  Payload ID: 5474
  Gene Symbol: EPM2A
  Gene Name: epilepsy, progressive myoclonus type 2A, Lafora disease (laforin)
  Uniprot ID: O95278
  ENSP ID: ENSP00000480268
MKHTTDFYFNIAGHQAMHYSRILPNIWLGSCPRQVEHVTIKLKHELGITAVMNFQTEWDIVQNSSGCNRYPEPMTPDTMIKLYREEGLAYIWMPTPDMSTEGRVQMLPQAVCLLHALLEKGHIVYVHCNAGVGRSTAAVCGWLQYVMGWNLRKVQYFLMAKRPAVYIDEEALARAQEDFFQKFGKVRSSVCSL

SEQ ID NO: 27737 - protein, 317 aa, Homo sapiens
  Payload ID: 5474
  Gene Symbol: EPM2A
  Gene Name: epilepsy, progressive myoclonus type 2A, Lafora disease (laforin)
  Uniprot ID: O95278
  ENSP ID: ENSP00000480339
MRFRFGVVVPPAVAGARPELLVVGSRPELGRWEPRGAVRLRPAGTAAGDGALALQEPGLWLGEVELAAEEAAQDGAEPGRVDTFWYKFLKREPGGELSWEGNGPHHDRCCTYNENNLVDGVYCLPIGHWIEATGHTNEMKHTTDFYFNIAGHQAMHYSRILPNIWLGSCPRQVEHVTIKLKHELGITAVMNFQTEWDIVQNSSGCNRYPEPMTPDTMIKLYREEGLAYIWMPTPDMSTEGRVQMLPQAVCLLHALLEKGHIVYVHCNAGVGRSTAAVCGWLQYVMGWNLRKVQYFLMAKRPAVYIDEEAASQDTFPL

SEQ ID NO: 27738 - protein, 322 aa, Homo sapiens
  Payload ID: 5475
  Gene Symbol: EPYC
  Gene Name: epiphycan
  Uniprot ID: Q99645
  ENSP ID: ENSP00000261172
MKTLAGLVLGLVIFDAAVTAPTLESINYDSETYDATLEDLDNLYNYENIPVDKVEIEIATVMPSGNRELLTPPPQPEKAQEEEEEEESTPRLIDGSSPQEPEFTGVLGPHTNEDFPTCLLCTCISTTVYCDDHELDAIPPLPKNTAYFYSRFNRIKKINKNDFASLSDLKRIDLTSNLISEIDEDAFRKLPQLRELVLRDNKIRQLPELPTTLTFIDISNNRLGRKGIKQEAFKDMYDLHHLYLTDNNLDHIPLPLPENLRALHLQNNNILEMHEDTFCNVKNLTYIRKALEDIRLDGNPINLSKTPQAYMCLPRLPVGSLV

SEQ ID NO: 27739 - protein, 234 aa, Homo sapiens
  Payload ID: 5475
  Gene Symbol: EPYC
  Gene Name: epiphycan
  ENSP ID: ENSP00000448272
MKTLAGLVLGLVIFDAAVTAPTLESINYDSETYDATLEDLDNLYNYENIPVDKVEIEIATVMPSGNRELLTPPPQPEKAQEEEEEEESTPRLIDGSSPQEPEFTGVLGPHTNEDFPTCLLCTCISTTVYCDDHELDAIPPLPKNTAYFYSRFNRIKKINKNDFASLSDLKRIDLTSNLISEIDEDAFRKLPQLRELVLRDNKIRQLPELPTTLTFIDISNNRLGRKGIKQEAFK

SEQ ID NO: 27740 - protein, 5063 aa, Homo sapiens
  Payload ID: 5476
  Gene Symbol: EPPK1
  Gene Name: epiplakin 1
  ENSP ID: ENSP00000456124
MAATLGAGTPPRPQARSIAGVYVEASGQAQSVYAAMEQGLLPAGLGQALLEAQAATGGLVDLARGQLLPVSKALQQGLVGLELKEKLLAAERATTGYPDPYGGEKLALFQAIGKEVVDRALGQSWLEVQLATGGLVDPAQGVLVAPEPACHQGLLDRETWHKLSELEPGTGDLRFLDPNTLERLTYHQLLERCVRAPGSGLALLPLKITFRSMGGAVSAAELLEVGILDEQAVQGLREGRLAAVDVSARAEVRRYLEGTGSVAGVVLLPEGHKKSFFQAATEHLLPMGTALPLLEAQAATHTLVDPITGQRLWVDEAVRAGLVSPELHEQLLVAEQAVTGHHDPFSGSQIPLFQAMKKGLVDRPLALRLLDAQLATGGLVCPARRLRLPLEAALRCGCLDEDTQRQLSQAGSFSDGTHGGLRYEQLLALCVTDPETGLAFLPLSGGPRGGEPQGPPFIKYSTRQALSTATATVSVGKFRGRPVSLWELLFSEAISSEQRAMLAQQYQEGTLSVEKLAAKLSATLEQAAATARVTFSGLRDTVTPGELLKAEIIDQDLYERLEHGQATAKDVGSLASVQRYLQGTGCIAGLLLPGSQERLSIYEARCKGLLRPGTALILLEAQAATGFIIDPKANKGHSVEEALRAAVIGPDVFAKLLSAERAVTGYTDPYTGQQISLFQAMQKGLIVREHGIRLLEAQIATGGVIDPVHSHRVPVDVAYRRGYFDQMLNLILLDPSDDTKGFFDPNTHENLTYLQLLERCVRDPETGLYLLPLSSTQSPLVDSATQQAFQNLLLSVKYGRFQGQRVSAWELINSEYFSEGRRRQLLRRYRQREVTLGQVAKLLEAETQRQADIMLPALRSRVTVHQLLEAGIIDQQLLDQVLAGTISPEALLLMDGVRRYLCGLGAVGGVRLLPSGQRLSLYQAMRQKLLGPRVALALLEAQAATGTIMDPHSPESLSVDEAVRRGVVGPELYGRLKRAEGAIAGFRDPFSGKQVSVFQAMKKGLIPWEQAARLLEAQVATGGIIDPTSHHHLPMPVAIQRGYVDQEMETALSSSSETFPTPDGQGRTSYAQLLEECPRDETSGLHLLPLPESAPALPTEEQVQRSLQAVPGAKDGTSLWDLLSSCHFTEEQRRGLLEDVQEGRTTVPQLLASVQRWVQETKLLAQARVMVPGPRGEVPAVWLLDAGIITQETLEALAQGTQSPAQVAEQPAVKACLWGTGCVAGVLLQPSGAKASIAQAVRDGLLPTGLGQRLLEAQVASGFLVDPLNNQRLSVEDAVKVGLVGRELSEQLGQAERAAAGYPDPYSRASLSLWQAMEKGLVPQNEGLPLLQVQLATGGVVDPVHGVHLPQAAACRLGLLDTQTSQVLTAVDKDNKFFFDPSARDQVTYQQLRERCVCDSETGLLLLPLPSDTVLEVDDHTAVALRAMKVPVSTGRFKGCSVSLWDLLLSEYVGADKRRELVALCRSGRAAALRQVVSAVTTLVEAAERQPLQATFRGLRKQVSARDLFRAQLISRKTLDELSQGTTTVKEVAEMDSVKRSLEGGNFIAGVLIQGTQERMSIPEALRRHILRPGTALVLLEAQAATGFIIDPVENRKLTVEEAFKAGMFGKETYVKLLSAERAVTGYTDPYTGQQISLFQAMQKDLIVREHGIRLLEAQIATGGIIDPVHSHRVPVDVAYRCGYFDEEMNRILADPSDDTKGFFDPNTHENLTYLQLLERCVEDPETGLYLLQIIKKGENYVYINEATRHVLQSRTAKMRVGRFADQVVSFWDLLSSPYFTEDRKRELIQEYGAQSGGLEKLLEIITTTIEETETQNQGIKVAAIRGEVTAADLFNSRVIDQKTLHTLRVGRTGGQALSTLECVKPYLEGSGCIAGVTVPSTREVMSLHEASRKELIPAAFATWLLEAQAATGFLLDPCTRQKLSVDEAVDVGLVNEELRERLLKAERAATGYRDPATGDTIPLFQAMQKQLIEKAEALRLLEVQVATGGVIDPQHHHRLPLETAYRRGCLHKDIYALISDQKHMRKRFVDPNTQEKVSYRELQERCRPQEDTGWLLFPVNKAARDSEHIDDETRRALEAEQVEITVGRFRGQKPTLWALLNSEYVTEEKKLQLVRMYRTHTRRALQTVAQLILELIEKQETSNKHLWFQGIRRQITASELLSSAIITEEMLQDLETGRSTTQELMEDDRVKRYLEGTSCIAGVLVPAKDQPGRQEKMSIYQAMWKGVLRPGTALVLLEAQAATGFVIDPVRNLRLSVEEAVAAGVVGGEIQEKLLSAERAVTGYTDPYTGQQISLFQAMQKDLIVREHGIRLLEAQIATGGVIDPVHSHRVPVDVAYRRGYFDEEMNRVLADPSDDTKGFFDPNTHENLTYVQLLRRCVPDPDTGLYMLQLAGRGSAVHQLSEELRCALRDARVTPGSGALQGQSVSVWELLFYREVSEDRRQDLLSRYRAGTLTVEELGATLTSLLAQAQAQARAEAEAGSPRPDPREALRAATMEVKVGRLRGRAVPVWDVLASGYVSRAAREELLAEFGSGTLDLPALTRRLTAIIEEAEEAPGARPQLQDAWRGPREPGPAGRGDGDSGRSQREGQGEGETQEAAAAAAAAAARRQEQTLRDATMEVQRGQFQGRPVSVWDVLFSSYLSEARRDELLAQHAAGALGLPDLVAVLTRVIEETEERLSKVSFRGLRRQVSASELHTSGILGPETLRDLAQGTKTLQEVTEMDSVKRYLEGTSCIAGVLVPAKDQPGRQEKMSIYQAMWKGVLRPGTALVLLEAQAATGFVIDPVRNLRLSVEEAVAAGVVGGEIQEKLLSAERAVTGYTDPYTGQQISLFQAMQKDLIVREHGIRLLEAQIATGGVIDPVHSHRVPVDVAYQRGYFDEEMNRVLADPSDDTKGFFDPNTHENLTYVQLLRRCVPDPDTGLYMLQLAGRGSAVHQLSEELRCALRDARVTPGSGALQGQSVSVWELLFYREVSEDRRQDLLSRYRAGTLTVEELGATLTSLLAQAQAQARAEAEAGSPRPDPREALRAATMEVKVGRLRGRAVPVWDVLASGYVSRAAREELLAEFGSGTLDLPALTRRLTAIIEEAEEAPGARPQLQDAWRGPREPGPAGRGDGDSGRSQREGQGEGETQEAAAAARRQEQTLRDATMEVQRGQFQGRPVSVWDVLFSSYLSEARRDELLAQHAAGALGLPDLVAVLTRVIEETEERLSKVSFRGLRCQVSASELHTSGILGPETLRDLAQGTKTLQEVTEMDSVKRYLEGTSCIAGVLVPAKDQPGRQEKMSIYQAMWKGVLRPGTALVLLEAQAATGFVIDPVRNLRLSVEEAVAAGVVGGEIQEKLLSAERAVTGYTDPYTGQQISLFQAMQKDLIVREHGIRLLEAQIATGGVIDPVHSHRVPVDVAYRRGYFDEEMNRVLADPSDDTKGFFDPNTHENLTYVQLLRRCVPDPDTGLYMLQLAGRGSAVHQLSEELRCALRDARVTPGSGALQGQSVSVWELLFYREVSEDRRQDLLSRYRAGTLTVEELGATLTSLLAQAQAQARAEAEAGSPRPDPREALRAATMEVKVGRLRGRAVPVWDVLASGYVSRAAREELLAEFGSGTLDLPALTRRLTAIIEEAEEAPGARPQLQDAWRGPREPGPAGRGDGDSGRSQREGQGEGETQEAAAATAAARRQEQTLRDATMEVQRGQFQGRPVSVWDVLFSSYLSEARRDELLAQHAAGALGLPDLVAVLTRVIEETEERLSKVSFRGLRRQVSASELHTSGILGPETLRDLAQGTKTLQEVTEMDSVKRYLEGTSCIAGVLVPAKDQPGRQEKMSIYQAMWKGVLRPGTALVLLEAQAATGFVIDPVRNLRLSVEEAVAAGVVGGEIQEKLLSAERAVTGYTDPYTGQQISLFQAMQKDLIVREHGIRLLEAQIATGGVIDPVHSHRVPVDVAYRRGYFDEEMNRVLADPSDDTKGFFDPNTHENLTYVQLLRRCVPDPDTGLYMLQLAGRGSAVHQLSEELRCALRDARVTPGSGALQGQSVSVWELLFYREVSEDRRQDLLSRYRAGTLTVEELGATLTSLLAQAQAQARAEAEAGSPRPDPREALRAATMEVKVGRLRGRAVPVWDVLASGYVSRAAREELLAEFGSGTLDLPALTRRLTAIIEEAEEAPGARPQLQDAWRGPREPGPAGRGDGDSGRSQREGQGEGETQEAAAATAAARRQEQTLRDATMEVQRGQFQGRPVSVWDVLFSSYLSEARRDELLAQHAAGALGLPDLVAVLTRVIEETEERLSKVSFRGLRRQVSASELHTSGILGPETLRDLAQGTKTLQEVTEMDSVKRYLEGTSCIAGVLVPAKDQPGHQEKMSIYQAMWKGVLRPGTALVLLEAQAATGFVIDPVRNLRLSVEEAVAAGVVGGEIQEKLLSAERAVTGYTDPYTGQQISLFQAMQKDLIVREHGIRLLEAQIATGGVIDPVHSHRVPVDVAYRRGYFDEEMNRVLAHPSDDTKGFFDPNTHENLTYVQLLRRCVPDPDTGLYMLQLAGRGSAVHQLSEELRCALRDARVMPGSGALQGQSVSVWELLFYREVSEDRRQDLLSRYRAGTLTVEELGATLTSLLAQAQAQARAEAEAEAGSPRPDPREALRAATMEVKVGRLRGRAVPVWDVLASGYVSGAAREELLAEFGSGTLDLPALTRRLTAIIEEAEEAPGARPQLQDAWRGPREPGPAGRGDGDSGRSQREGQGEGETQEAAAAARRQEQTLRDATMEVQRGQFQGRPVSVWDVLFSSYLSEAHRDELLAQHAAGALGLPDLVAVLTRVIEETEERLSKVSFRGLRRQVSASELHTSGILGPETLRDLAQGTKTLQEVTEMDSVKRYLEGTSCIAGVLVPAKDQPGRQEKMSIYQAMWKGVLRPGTALVLLEAQAATGFVIDPVRNLRLSVEEAVAAGVVGGEIQEKLLSAERAVTGYTDPYTGQQISLFQAMQKDLIVREHGIRLLEAQIATGGVIDPVHSHRVPVDVAYRRGYFDEEMNRVLADPSDDTKGFFDPNTHENLTYLQLLQRATLDPETGLLFLSLSLQ

SEQ ID NO: 27741 - protein, 5088 aa, Homo sapiens
  Payload ID: 5476
  Gene Symbol: EPPK1
  Gene Name: epiplakin 1
  ENSP ID: ENSP00000484472
MSGHTLPPLPVPGTNSTEQASVPRAMAATLGAGTPPRPQARSIAGVYVEASGQAQSVYAAMEQGLLPAGLGQALLEAQAATGGLVDLARGQLLPVSKALQQGLVGLELKEKLLAAERATTGYPDPYGGEKLALFQAIGKEVVDRALGQSWLEVQLATGGLVDPAQGVLVAPEPACHQGLLDRETWHKLSELEPGTGDLRFLDPNTLERLTYHQLLERCVRAPGSGLALLPLKITFRSMGGAVSAAELLEVGILDEQAVQGLREGRLAAVDVSARAEVRRYLEGTGSVAGVVLLPEGHKKSFFQAATEHLLPMGTALPLLEAQAATHTLVDPITGQRLWVDEAVRAGLVSPELHEQLLVAEQAVTGHHDPFSGSQIPLFQAMKKGLVDRPLALRLLDAQLATGGLVCPARRLRLPLEAALRCGCLDEDTQRQLSQAGSFSDGTHGGLRYEQLLALCVTDPETGLAFLPLSGGPRGGEPQGPPFIKYSTRQALSTATATVSVGKFRGRPVSLWELLFSEAISSEQRAMLAQQYQEGTLSVEKLAAKLSATLEQAAATARVTFSGLRDTVTPGELLKAEIIDQDLYERLEHGQATAKDVGSLASVQRYLQGTGCIAGLLLPGSQERLSIYEARCKGLLRPGTALILLEAQAATGFIIDPKANKGHSVEEALRAAVIGPDVFAKLLSAERAVTGYTDPYTGQQISLFQAMQKGLIVREHGIRLLEAQIATGGVIDPVHSHRVPVDVAYRRGYFDQMLNLILLDPSDDTKGFFDPNTHENLTYLQLLERCVRDPETGLYLLPLSSTQSPLVDSATQQAFQNLLLSVKYGRFQGQRVSAWELINSEYFSEGRRRQLLRRYRQREVTLGQVAKLLEAETQRQADIMLPALRSRVTVHQLLEAGIIDQQLLDQVLAGTISPEALLLMDGVRRYLCGLGAVGGVRLLPSGQRLSLYQAMRQKLLGPRVALALLEAQAATGTIMDPHSPESLSVDEAVRRGVVGPELYGRLKRAEGAIAGFRDPFSGKQVSVFQAMKKGLIPWEQAARLLEAQVATGGIIDPTSHHHLPMPVAIQRGYVDQEMETALSSSSETFPTPDGQGRTSYAQLLEECPRDETSGLHLLPLPESAPALPTEEQVQRSLQAVPGAKDGTSLWDLLSSCHFTEEQRRGLLEDVQEGRTTVPQLLASVQRWVQETKLLAQARVMVPGPRGEVPAVWLLDAGIITQETLEALAQGTQSPAQVAEQPAVKACLWGTGCVAGVLLQPSGAKASIAQAVRDGLLPTGLGQRLLEAQVASGFLVDPLNNQRLSVEDAVKVGLVGRELSEQLGQAERAAAGYPDPYSRASLSLWQAMEKGLVPQNEGLPLLQVQLATGGVVDPVHGVHLPQAAACRLGLLDTQTSQVLTAVDKDNKFFFDPSARDQVTYQQLRERCVCDSETGLLLLPLPSDTVLEVDDHTAVALRAMKVPVSTGRFKGCSVSLWDLLLSEYVGADKRRELVALCRSGRAAALRQVVSAVTTLVEAAERQPLQATFRGLRKQVSARDLFRAQLISRKTLDELSQGTTTVKEVAEMDSVKRSLEGGNFIAGVLIQGTQERMSIPEALRRHILRPGTALVLLEAQAATGFIIDPVENRKLTVEEAFKAGMFGKETYVKLLSAERAVTGYTDPYTGQQISLFQAMQKDLIVREHGIRLLEAQIATGGIIDPVHSHRVPVDVAYRCGYFDEEMNRILADPSDDTKGFFDPNTHENLTYLQLLERCVEDPETGLYLLQIIKKGENYVYINEATRHVLQSRTAKMRVGRFADQVVSFWDLLSSPYFTEDRKRELIQEYGAQSGGLEKLLEIITTTIEETETQNQGIKVAAIRGEVTAADLFNSRVIDQKTLHTLRVGRTGGQALSTLECVKPYLEGSGCIAGVTVPSTREVMSLHEASRKELIPAAFATWLLEAQAATGFLLDPCTRQKLSVDEAVDVGLVNEELRERLLKAERAATGYRDPATGDTIPLFQAMQKQLIEKAEALRLLEVQVATGGVIDPQHHHRLPLETAYRRGCLHKDIYALISDQKHMRKRFVDPNTQEKVSYRELQERCRPQEDTGWLLFPVNKAARDSEHIDDETRRALEAEQVEITVGRFRGQKPTLWALLNSEYVTEEKKLQLVRMYRTHTRRALQTVAQLILELIEKQETSNKHLWFQGIRRQITASELLSSAIITEEMLQDLETGRSTTQELMEDDRVKRYLEGTSCIAGVLVPAKDQPGRQEKMSIYQAMWKGVLRPGTALVLLEAQAATGFVIDPVRNLRLSVEEAVAAGVVGGEIQEKLLSAERAVTGYTDPYTGQQISLFQAMQKDLIVREHGIRLLEAQIATGGVIDPVHSHRVPVDVAYRRGYFDEEMNRVLADPSDDTKGFFDPNTHENLTYVQLLRRCVPDPDTGLYMLQLAGRGSAVHQLSEELRCALRDARVTPGSGALQGQSVSVWELLFYREVSEDRRQDLLSRYRAGTLTVEELGATLTSLLAQAQAQARAEAEAGSPRPDPREALRAATMEVKVGRLRGRAVPVWDVLASGYVSRAAREELLAEFGSGTLDLPALTRRLTAIIEEAEEAPGARPQLQDAWRGPREPGPAGRGDGDSGRSQREGQGEGETQEAAAAAAAAAARRQEQTLRDATMEVQRGQFQGRPVSVWDVLFSSYLSEARRDELLAQHAAGALGLPDLVAVLTRVIEETEERLSKVSFRGLRRQVSASELHTSGILGPETLRDLAQGTKTLQEVTEMDSVKRYLEGTSCIAGVLVPAKDQPGRQEKMSIYQAMWKGVLRPGTALVLLEAQAATGFVIDPVRNLRLSVEEAVAAGVVGGEIQEKLLSAERAVTGYTDPYTGQQISLFQAMQKDLIVREHGIRLLEAQIATGGVIDPVHSHRVPVDVAYQRGYFDEEMNRVLADPSDDTKGFFDPNTHENLTYVQLLRRCVPDPDTGLYMLQLAGRGSAVHQLSEELRCALRDARVTPGSGALQGQSVSVWELLFYREVSEDRRQDLLSRYRAGTLTVEELGATLTSLLAQAQAQARAEAEAGSPRPDPREALRAATMEVKVGRLRGRAVPVWDVLASGYVSRAAREELLAEFGSGTLDLPALTRRLTAIIEEAEEAPGARPQLQDAWRGPREPGPAGRGDGDSGRSQREGQGEGETQEAAAAARRQEQTLRDATMEVQRGQFQGRPVSVWDVLFSSYLSEARRDELLAQHAAGALGLPDLVAVLTRVIEETEERLSKVSFRGLRCQVSASELHTSGILGPETLRDLAQGTKTLQEVTEMDSVKRYLEGTSCIAGVLVPAKDQPGRQEKMSIYQAMWKGVLRPGTALVLLEAQAATGFVIDPVRNLRLSVEEAVAAGVVGGEIQEKLLSAERAVTGYTDPYTGQQISLFQAMQKDLIVREHGIRLLEAQIATGGVIDPVHSHRVPVDVAYRRGYFDEEMNRVLADPSDDTKGFFDPNTHENLTYVQLLRRCVPDPDTGLYMLQLAGRGSAVHQLSEELRCALRDARVTPGSGALQGQSVSVWELLFYREVSEDRRQDLLSRYRAGTLTVEELGATLTSLLAQAQAQARAEAEAGSPRPDPREALRAATMEVKVGRLRGRAVPVWDVLASGYVSRAAREELLAEFGSGTLDLPALTRRLTAIIEEAEEAPGARPQLQDAWRGPREPGPAGRGDGDSGRSQREGQGEGETQEAAAATAAARRQEQTLRDATMEVQRGQFQGRPVSVWDVLFSSYLSEARRDELLAQHAAGALGLPDLVAVLTRVIEETEERLSKVSFRGLRRQVSASELHTSGILGPETLRDLAQGTKTLQEVTEMDSVKRYLEGTSCIAGVLVPAKDQPGRQEKMSIYQAMWKGVLRPGTALVLLEAQAATGFVIDPVRNLRLSVEEAVAAGVVGGEIQEKLLSAERAVTGYTDPYTGQQISLFQAMQKDLIVREHGIRLLEAQIATGGVIDPVHSHRVPVDVAYRRGYFDEEMNRVLADPSDDTKGFFDPNTHENLTYVQLLRRCVPDPDTGLYMLQLAGRGSAVHQLSEELRCALRDARVTPGSGALQGQSVSVWELLFYREVSEDRRQDLLSRYRAGTLTVEELGATLTSLLAQAQAQARAEAEAGSPRPDPREALRAATMEVKVGRLRGRAVPVWDVLASGYVSRAAREELLAEFGSGTLDLPALTRRLTAIIEEAEEAPGARPQLQDAWRGPREPGPAGRGDGDSGRSQREGQGEGETQEAAAATAAARRQEQTLRDATMEVQRGQFQGRPVSVWDVLFSSYLSEARRDELLAQHAAGALGLPDLVAVLTRVIEETEERLSKVSFRGLRRQVSASELHTSGILGPETLRDLAQGTKTLQEVTEMDSVKRYLEGTSCIAGVLVPAKDQPGHQEKMSIYQAMWKGVLRPGTALVLLEAQAATGFVIDPVRNLRLSVEEAVAAGVVGGEIQEKLLSAERAVTGYTDPYTGQQISLFQAMQKDLIVREHGIRLLEAQIATGGVIDPVHSHRVPVDVAYRRGYFDEEMNRVLAHPSDDTKGFFDPNTHENLTYVQLLRRCVPDPDTGLYMLQLAGRGSAVHQLSEELRCALRDARVMPGSGALQGQSVSVWELLFYREVSEDRRQDLLSRYRAGTLTVEELGATLTSLLAQAQAQARAEAEAEAGSPRPDPREALRAATMEVKVGRLRGRAVPVWDVLASGYVSGAAREELLAEFGSGTLDLPALTRRLTAIIEEAEEAPGARPQLQDAWRGPREPGPAGRGDGDSGRSQREGQGEGETQEAAAAARRQEQTLRDATMEVQRGQFQGRPVSVWDVLFSSYLSEAHRDELLAQHAAGALGLPDLVAVLTRVIEETEERLSKVSFRGLRRQVSASELHTSGILGPETLRDLAQGTKTLQEVTEMDSVKRYLEGTSCIAGVLVPAKDQPGRQEKMSIYQAMWKGVLRPGTALVLLEAQAATGFVIDPVRNLRLSVEEAVAAGVVGGEIQEKLLSAERAVTGYTDPYTGQQISLFQAMQKDLIVREHGIRLLEAQIATGGVIDPVHSHRVPVDVAYRRGYFDEEMNRVLADPSDDTKGFFDPNTHENLTYLQLLQRATLDPETGLLFLSLSLQ

SEQ ID NO: 27742 - protein, 169 aa, Homo sapiens
  Payload ID: 5477
  Gene Symbol: EREG
  Gene Name: epiregulin
  Uniprot ID: O14944
  ENSP ID: ENSP00000244869
MTAGRRMEMLCAGRVPALLLCLGFHLLQAVLSTTVIPSCIPGESSDNCTALVQTEDNPRVAQVSITKCSSDMNGYCLHGQCIYLVDMSQNYCRCEVGYTGVRCEHFFLTVHQPLSKEYVALTVILIILFLITVVGSTYYFCRWYRNRKSKEPKKEYERVTSGDPELPQV

SEQ ID NO: 27743 - protein, 314 aa, Homo sapiens
  Payload ID: 5478
  Gene Symbol: EPCAM
  Gene Name: epithelial cell adhesion molecule
  Uniprot ID: P16422
  ENSP ID: ENSP00000263735
MAPPQVLAFGLLLAAATATFAAAQEECVCENYKLAVNCFVNNNRQCQCTSVGAQNTVICSKLAAKCLVMKAEMNGSKLGRRAKPEGALQNNDGLYDPDCDESGLFKAKQCNGTSMCWCVNTAGVRRTDKDTEITCSERVRTYWIIIELKHKAREKPYDSKSLRTALQKEITTRYQLDPKFITSILYENNVITIDLVQNSSQKTQNDVDIADVAYYFEKDVKGESLFHSKKMDLTVNGEQLDLDPGQTLIYYVDEKAPEFSMQGLKAGVIAVIVVVVIAVVAGIVVLVISRKKRMAKYEKAEIKEMGEMHRELNA

SEQ ID NO: 27744 - protein, 342 aa, Homo sapiens
  Payload ID: 5478
  Gene Symbol: EPCAM
  Gene Name: epithelial cell adhesion molecule
  ENSP ID: ENSP00000385476
METKHLGRGGAGRAGPHLWRGPRPNCSAGAGGGEPTHSPNSRAVTHQRAPAARECVCENYKLAVNCFVNNNRQCQCTSVGAQNTVICSKLAAKCLVMKAEMNGSKLGRRAKPEGALQNNDGLYDPDCDESGLFKAKQCNGTSMCWCVNTAGVRRTDKDTEITCSERVRTYWIIIELKHKAREKPYDSKSLRTALQKEITTRYQLDPKFITSILYENNVITIDLVQNSSQKTQNDVDIADVAYYFEKDVKGESLFHSKKMDLTVNGEQLDLDPGQTLIYYVDEKAPEFSMQGLKAGVIAVIVVVVIAVVAGIVVLVISRKKRMAKYEKAEIKEMGEMHRELNA

SEQ ID NO: 27745 - protein, 199 aa, Homo sapiens
  Payload ID: 5478
  Gene Symbol: EPCAM
  Gene Name: epithelial cell adhesion molecule
  ENSP ID: ENSP00000389028
MAPPQVLAFGLLLAAATATFAAAQEGEARIGAELWSWAGLGGSGPRPSAPETGIIGRGPRGRAFQRGDRTVRPCSGSGPPRGRKRRGPSRGAASLRSFARLECVCENYKLAVNCFVNNNRQCQCTSVGAQNTVICSKLAAKCLVMKAEMNGSKLGRRAKPEGALQNNDGLYDPDCDESGLFKAKQCNGTSMCWCVNTAG

SEQ ID NO: 27746 - protein, 342 aa, Homo sapiens; identical to SEQ ID NO: 27744
  Payload ID: 5478
  Gene Symbol: EPCAM
  Gene Name: epithelial cell adhesion molecule
  ENSP ID: ENSP00000410675

SEQ ID NO: 27747 - protein, 883 aa, Homo sapiens
  Payload ID: 5479
  Gene Symbol: ECT2
  Gene Name: epithelial cell transforming 2
  Uniprot ID: Q9H8V3
  ENSP ID: ENSP00000232458
MAENSVLTSTTGRTSLADSSIFDSKVTEISKENLLIGSTSYVEEEMPQIETRVILVQEAGKQEELIKALKDIKVGFVKMESVEEFEGLDSPEFENVFVVTDFQDSVFNDLYKADCRVIGPPVVLNCSQKGEPLPFSCRPLYCTSMMNLVLCFTGFRKKEELVRLVTLVHHMGGVIRKDFNSKVTHLVANCTQGEKFRVAVSLGTPIMKPEWIYKAWERRNEQDFYAAVDDFRNEFKVPPFQDCILSFLGFSDEEKTNMEEMTEMQGGKYLPLGDERCTHLVVEENIVKDLPFEPSKKLYVVKQEWFWGSIQMDARAGETMYLYEKANTPELKKSVSMLSLNTPNSNRKRRRLKETLAQLSRETDVSPFPPRKRPSAEHSLSIGSLLDISNTPESSINYGDTPKSCTKSSKSSTPVPSKQSARWQVAKELYQTESNYVNILATIIQLFQVPLEEEGQRGGPILAPEEIKTIFGSIPDIFDVHTKIKDDLEDLIVNWDESKSIGDIFLKYSKDLVKTYPPFVNFFEMSKETIIKCEKQKPRFHAFLKINQAKPECGRQSLVELLIRPVQRLPSVALLLNDLKKHTADENPDKSTLEKAIGSLKEVMTHINEDKRKTEAQKQIFDVVYEVDGCPANLLSSHRSLVQRVETISLGEHPCDRGEQVTLFLFNDCLEIARKRHKVIGTFRSPHGQTRPPASLKHIHLMPLSQIKKVLDIRETEDCHNAFALLVRPPTEQANVLLSFQMTSDELPKENWLKMLCRHVANTICKADAENLIYTADPESFEVNTKDMDSTLSRASRAIKKTSKKVTRAFSFSKTPKRALRRALMTSHGSVEGRSPSSNDKHVMSRLSSTSSLAGIPSPSLVSLPSFFERRSHTLSRSTTHLI

SEQ ID NO: 27748 - protein, 914 aa, Homo sapiens
  Payload ID: 5479
  Gene Symbol: ECT2
  Gene Name: epithelial cell transforming 2
  Uniprot ID: Q9H8V3
  ENSP ID: ENSP00000376457
MAENSVLTSTTGRTSLADSSIFDSKVTEISKENLLIGSTSYVEEEMPQIETRVILVQEAGKQEELIKALKTIKIMEVPVIKIKESCPGKSDEKLIKSVINMDIKVGFVKMESVEEFEGLDSPEFENVFVVTDFQDSVFNDLYKADCRVIGPPVVLNCSQKGEPLPFSCRPLYCTSMMNLVLCFTGFRKKEELVRLVTLVHHMGGVIRKDFNSKVTHLVANCTQGEKFRVAVSLGTPIMKPEWIYKAWERRNEQDFYAAVDDFRNEFKVPPFQDCILSFLGFSDEEKTNMEEMTEMQGGKYLPLGDERCTHLVVEENIVKDLPFEPSKKLYVVKQEWFWGSIQMDARAGETMYLYEKANTPELKKSVSMLSLNTPNSNRKRRRLKETLAQLSRETDVSPFPPRKRPSAEHSLSIGSLLDISNTPESSINYGDTPKSCTKSSKSSTPVPSKQSARWQVAKELYQTESNYVNILATIIQLFQVPLEEEGQRGGPILAPEEIKTIFGSIPDIFDVHTKIKDDLEDLIVNWDESKSIGDIFLKYSKDLVKTYPPFVNFFEMSKETIIKCEKQKPRFHAFLKINQAKPECGRQSLVELLIRPVQRLPSVALLLNDLKKHTADENPDKSTLEKAIGSLKEVMTHINEDKRKTEAQKQIFDVVYEVDGCPANLLSSHRSLVQRVETISLGEHPCDRGEQVTLFLFNDCLEIARKRHKVIGTFRSPHGQTRPPASLKHIHLMPLSQIKKVLDIRETEDCHNAFALLVRPPTEQANVLLSFQMTSDELPKENWLKMLCRHVANTICKADAENLIYTADPESFEVNTKDMDSTLSRASRAIKKTSKKVTRAFSFSKTPKRALRRALMTSHGSVEGRSPSSNDKHVMSRLSSTSSLAGIPSPSLVSLPSFFERRSHTLSRSTTHLI

SEQ ID NO: 27749 - protein, 150 aa, Homo sapiens
  Payload ID: 5479
  Gene Symbol: ECT2
  Gene Name: epithelial cell transforming 2
  ENSP ID: ENSP00000389108
MAENSVLTSTTGRTSLADSSIFDSKVTEISKENLLIGSTSYVEEEMPQIETRVILVQEAGKQEELIKALKTIKIMEVPVIKIKESCPGKSDEKLIKSVINMDIKVGFVKMESVEEFEGLDSPEFENVFVVTDFQDSVFNDLYKADCRVIG

SEQ ID NO: 27750 - protein, 18 aa, Homo sapiens
  Payload ID: 5479
  Gene Symbol: ECT2
  Gene Name: epithelial cell transforming 2
  ENSP ID: ENSP00000391695
MAENSVLTSTTGRTSLAD

SEQ ID NO: 27751 - protein, 298 aa, Homo sapiens
  Payload ID: 5479
  Gene Symbol: ECT2
  Gene Name: epithelial cell transforming 2
  ENSP ID: ENSP00000397788
  MOD_RES (1)..(1): Any amino acid
XPANLLSSHRSLVQRVETISLGEHPCDRGEQVTLFLFNDCLEIARKRHKVIGTFRSPHGQTRPPASLKHIHLMPLSQIKKVLDIRETEDCHNAFALLVRPPTEQANVLLSFQMTSDELPKENWLKMLCRHVANTICKADAENLIYTADPESFEVNTKDMDSTLSRASRAIKKTSKKVTRAFSFSKTPKRALRRALMTSHGSVEGRSPSSNDKHVMSRLSSTSSLAITHSVSTSNVIGFTKHVYVQRLNSTGGRSQYSWFQSVRHSAFRASFSEILEGNTDFSNFKKVLSKSSLTFVKN

SEQ ID NO: 27752 - protein, 110 aa, Homo sapiens
  Payload ID: 5479
  Gene Symbol: ECT2
  Gene Name: epithelial cell transforming 2
  ENSP ID: ENSP00000403446
MAENSVLTSTTGRTSLADSSIFDSKVTEISKENLLIGSTSYVEEEMPQIETRVILVQEAGKQEELIKALKTIKIMEVPVIKIKESCPGKSDEKLIKSVINMDIKVGFVKM

SEQ ID NO: 27753 - protein, 204 aa, Homo sapiens
  Payload ID: 5479
  Gene Symbol: ECT2
  Gene Name: epithelial cell transforming 2
  ENSP ID: ENSP00000403501
MAENSVLTSTTGRTSLADSSIFDSKVTEISKENLLIGSTSYVEEMPQIETRVILVQEAGKQEELIKALKDIKVGFVKMESVEEFEGLDSPEFENVFVVTDFQDSVFNDLYKADCRVIGPPVVLNCSQKGEPLPFSCRPLYCTSMMNLVLCFTGFRKKEELVRLVTLVHHMGGVIRKDFNSKVTHLVANCTQGEKFRVAVSLGTP

SEQ ID NO: 27754 - protein, 209 aa, Homo sapiens
  Payload ID: 5479
  Gene Symbol: ECT2
  Gene Name: epithelial cell transforming 2
  ENSP ID: ENSP00000411674
  MOD_RES (1)..(1): Any amino acid
XYVVKQEWFWGSIQMDARAGETMYLYEKANTPELKKSVSMLSLNTPNSNRKRRRLKETLAQLSRETDVSPFPPHTPKSCTKSSKSSTPVPSKQSARWQVAKELYQTESNYVNILATIIQLFQVPLEEEGQRGGPILAPEEIKTIFGSIPDIFDVHTKIKDDLEDLIVNWDESKSIGDIFLKYSKDLVKTYPPFVNFFEMSKETIIKCEK

SEQ ID NO: 27755 - protein, 159 aa, Homo sapiens
  Payload ID: 5479
  Gene Symbol: ECT2
  Gene Name: epithelial cell transforming 2
  ENSP ID: ENSP00000412028
MAENSVLTSTTGRTSLADSSIFDSKVTEISKENLLIGSTSYVEEEMPQIETRVILVQEAGKQEELIKALKDIKVGFVKMESVEEFEGLDSPEFENVFVVTDFQDSVFNDLYKADCRVIGPPVVLNCSQKGEPLPFSCRPLYCTSMMNLVLCFTGFRKKE

SEQ ID NO: 27756 - protein, 883 aa, Homo sapiens; identical to SEQ ID NO: 27747
  Payload ID: 5479
  Gene Symbol: ECT2
  Gene Name: epithelial cell transforming 2
  Uniprot ID: Q9H8V3
  ENSP ID: ENSP00000412259

SEQ ID NO: 27757 - protein, 106 aa, Homo sapiens
  Payload ID: 5479
  Gene Symbol: ECT2
  Gene Name: epithelial cell transforming 2
  ENSP ID: ENSP00000412331
MAENSVLTSTTGRTSLADSSIFDSKVTEISKENLLIGSTSYVEEEMPQIETRVILVQEAGKQEELIKALKDIKVGFVKMESVEEFEGLDSPEFENVFVVTDFQDSV

SEQ ID NO: 27758 - protein, 882 aa, Homo sapiens
  Payload ID: 5479
  Gene Symbol: ECT2
  Gene Name: epithelial cell transforming 2
  Uniprot ID: Q9H8V3
  ENSP ID: ENSP00000415876
MAENSVLTSTTGRTSLADSSIFDSKVTEISKENLLIGSTSYVEEMPQIETRVILVQEAGKQEELIKALKDIKVGFVKMESVEEFEGLDSPEFENVFVVTDFQDSVFNDLYKADCRVIGPPVVLNCSQKGEPLPFSCRPLYCTSMMNLVLCFTGFRKKEELVRLVTLVHHMGGVIRKDFNSKVTHLVANCTQGEKFRVAVSLGTPIMKPEWIYKAWERRNEQDFYAAVDDFRNEFKVPPFQDCILSFLGFSDEEKTNMEEMTEMQGGKYLPLGDERCTHLVVEENIVKDLPFEPSKKLYVVKQEWFWGSIQMDARAGETMYLYEKANTPELKKSVSMLSLNTPNSNRKRRRLKETLAQLSRETDVSPFPPRKRPSAEHSLSIGSLLDISNTPESSINYGDTPKSCTKSSKSSTPVPSKQSARWQVAKELYQTESNYVNILATIIQLFQVPLEEEGQRGGPILAPEEIKTIFGSIPDIFDVHTKIKDDLEDLIVNWDESKSIGDIFLKYSKDLVKTYPPFVNFFEMSKETIIKCEKQKPRFHAFLKINQAKPECGRQSLVELLIRPVQRLPSVALLLNDLKKHTADENPDKSTLEKAIGSLKEVMTHINEDKRKTEAQKQIFDVVYEVDGCPANLLSSHRSLVQRVETISLGEHPCDRGEQVTLFLFNDCLEIARKRHKVIGTFRSPHGQTRPPASLKHIHLMPLSQIKKVLDIRETEDCHNAFALLVRPPTEQANVLLSFQMTSDELPKENWLKMLCRHVANTICKADAENLIYTADPESFEVNTKDMDSTLSRASRAIKKTSKKVTRAFSFSKTPKRALRRALMTSHGSVEGRSPSSNDKHVMSRLSSTSSLAGIPSPSLVSLPSFFERRSHTLSRSTTHLI

SEQ ID NO: 27759 - protein, 883 aa, Homo sapiens; identical to SEQ ID NO: 27747
  Payload ID: 5479
  Gene Symbol: ECT2
  Gene Name: epithelial cell transforming 2
  Uniprot ID: Q9H8V3
  ENSP ID: ENSP00000443160

SEQ ID NO: 27760 - protein, 904 aa, Homo sapiens
  Payload ID: 5480
  Gene Symbol: ECT2L
  Gene Name: epithelial cell transforming 2 like
  Uniprot ID: Q008S8
  ENSP ID: ENSP00000356655
MESFHTRFSAWTPFSNKSLNRQLFQERVALISHWFDLWTNKQRQEFLFAIFLRCTKSQLRFVQDWFSERMQVAKVDFSTVLPRFISLYIFSFLSPKDLCAAAQVSWPWKFLTEQDCLWMPKCVKFGWFLPYTPTDNEYGAWKRHYIACVSHLDWLTPREAAATYGTLNEPKTEDEELLERQREKCLRKRIWEKIALRKKELFKVRPPWVSGTCCSSVLKPRCQPRLSQTVRERVGLHEALEKQLVLTSLETLPKRSNISGSHSYPLLSKKNWHGVHKNDDRSSYALRPHFMLISSRIPAYEMVMESVKAGVVSVVYEHSVTLESLLYLIEKALDGQKAQSIGIFSDGDSREINLLQGYKIGVKNLLRPEVRDFWEKLGSYVATEEEGGHVDFFVPLGASEAGIEVLSQLSQLTGTFFTAPTGIATGSYQHILSDWLGSQWGKAPSSIYFCESKLQTWSSFTDFLEETLKTVRKQLYPFFKELQKSISGRMIGQFMFDTMGMTNILNNQDTAQALADGLMELSKEDSERNVVEDNSWDTKSRLSKNDLNFEALINLERILQKDSAEKRARVVRELLQSERKYVQILEIVRDVYVAPLKAALSSNRAILSAANIQIIFCDILQILSLNRQFLDNLRDRLQEWGPAHCVGEIVTKFGSQLNTYTNFFNNYPVILKTIEKCREMIPAFRTFLKRHDKTIVTKMLSLPELLLYPSRRFEEYLNLLYAVRLHTPAEHVDRGDLTTAIDQIKKYKGYIDQMKQNITMKDHLSDIQRIIWGCPTLSEVNRYLIRVQDVAQLHCCDEEISFSLRLYEHIHDLSLFLFNDALLVSSRGTSHTPFERTSKTTYQFIASVALHRLLIENIPDSKYVKNAFILQGPKYKWICATEIEDDKFLWLSVLRNAIKSSMEK

SEQ ID NO: 27761 - protein, 77 aa, Homo sapiens
  Payload ID: 5480
  Gene Symbol: ECT2L
  Gene Name: epithelial cell transforming 2 like
  ENSP ID: ENSP00000385187
MESFHTRFSAWTPFSNKSLNRQLFQERVALISHWFDLWTNKQRQEFLFAIFLRCTKSQLRFVQDWFSERMQVAKVDF

SEQ ID NO: 27762 - protein, 904 aa, Homo sapiens; identical to SEQ ID NO: 27760
  Payload ID: 5480
  Gene Symbol: ECT2L
  Gene Name: epithelial cell transforming 2 like
  Uniprot ID: Q008S8
  ENSP ID: ENSP00000387388

SEQ ID NO: 27763 - protein, 904 aa, Homo sapiens; identical to SEQ ID NO: 27760
  Payload ID: 5480
  Gene Symbol: ECT2L
  Gene Name: epithelial cell transforming 2 like
  Uniprot ID: Q008S8
  ENSP ID: ENSP00000442307

SEQ ID NO: 27764 - protein, 157 aa, Homo sapiens
  Payload ID: 5481
  Gene Symbol: EMP1
  Gene Name: epithelial membrane protein 1
  Uniprot ID: P54849
  ENSP ID: ENSP00000256951
MLVLLAGIFVVHIATVIMLFVSTIANVWLVSNTVDASVGLWKNCTNISCSDSLSYASEDALKTVQAFMILSIIFCVIALLVFVFQLFTMEKGNRFFLSGATTLVCWLCILVGVSIYTSHYANRDGTQYHHGYSYILGWICFCFSFIIGVLYLVLRKK

SEQ ID NO: 27765 - protein, 141 aa, Homo sapiens
  Payload ID: 5481
  Gene Symbol: EMP1
  Gene Name: epithelial membrane protein 1
  Uniprot ID: P54849
  ENSP ID: ENSP00000379595
MLVLLAGIFVVHIATVIMLFVSTIANVWLVSNTVDASVGLWKNCTNISCSDSLSYASEDALKTVQAFMILSIIFCVIALLVFVFQLFTMEKGNRFFLSGATTLVCFIMRIVMERSITTAIPTSWAGSASASASSSAFSIWS

SEQ ID NO: 27766 - protein, 90 aa, Homo sapiens
  Payload ID: 5481
  Gene Symbol: EMP1
  Gene Name: epithelial membrane protein 1
  ENSP ID: ENSP00000410755
MILSIIFCVIALLVFVFQLFTMEKGNRFFLSGATTLVCWLCILVGVSIYTSHYANRDGTQYHHGYSYILGWICFCFSFIIGVLYLVLRKK

SEQ ID NO: 27767 - protein, 146 aa, Homo sapiens
  Payload ID: 5481
  Gene Symbol: EMP1
  Gene Name: epithelial membrane protein 1
  ENSP ID: ENSP00000441223
MLVLLAGIFVVHIATVIMLFVSTIANVWLVSNTVDASVGLWKNCTNISCSDSLSYASEDALKTVQAFMILSIIFCVIALLVFVFQLFTMEKGNRFFLSGATTLVCCEYLMGRLQFTLLSPSYHGCFWQLEQISTWFSETSLCNFLL

SEQ ID NO: 27768 - protein, 69 aa, Homo sapiens
  Payload ID: 5481
  Gene Symbol: EMP1
  Gene Name: epithelial membrane protein 1
  ENSP ID: ENSP00000445319
MLVLLAGIFVVHIATVIMLFVSTIANVWLVSNTVDASVGLWKNCTNISCSDSLSYASEDELCHYDFIIT

SEQ ID NO: 27769 - protein, 94 aa, Homo sapiens
  Payload ID: 5481
  Gene Symbol: EMP1
  Gene Name: epithelial membrane protein 1
  ENSP ID: ENSP00000445497
MILSIIFCVIALLVFVFQLFTMEKGNRFFLSGATTLVCCEYLMGRLQFTLLSPSYHGCFWQLEQISTWFSETSLCNFLLWLFVLLWRTLDCCLG

SEQ ID NO: 27770 - protein, 3 aa, Homo sapiens
  Payload ID: 5481
  Gene Symbol: EMP1
  Gene Name: epithelial membrane protein 1
  ENSP ID: ENSP00000445553
MLV

SEQ ID NO: 27771 - protein, 167 aa, Homo sapiens
  Payload ID: 5482
  Gene Symbol: EMP2
  Gene Name: epithelial membrane protein 2
  Uniprot ID: P54851
  ENSP ID: ENSP00000352540
MLVLLAFIIAFHITSAALLFIATVDNAWWVGDEFFADVWRICTNNTNCTVINDSFQEYSTLQAVQATMILSTILCCIAFFIFVLQLFRLKQGERFVLTSIIQLMSCLCVMIAASIYTDRREDIHDKNAKFYPVTREGSYGYSYILAWVAFACTFISGMMYLILRKRK

SEQ ID NO: 27772 - protein, 167 aa, Homo sapiens; identical to SEQ ID NO: 27771
  Payload ID: 5482
  Gene Symbol: EMP2
  Gene Name: epithelial membrane protein 2
  Uniprot ID: P54851
  ENSP ID: ENSP00000445712

SEQ ID NO: 27773 - protein, 163 aa, Homo sapiens
  Payload ID: 5483
  Gene Symbol: EMP3
  Gene Name: epithelial membrane protein 3
  Uniprot ID: P54852
  ENSP ID: ENSP00000270221
MSLLLLVVSALHILILILLFVATLDKSWWTLPGKESLNLWYDCTWNNDTKTWACSNVSENGWLKAVQVLMVLSLILCCLSFILFMFQLYTMRRGGLFYATGLCQLCTSVAVFTGALIYAIHAEEILEKHPRGGSFGYCFALAWVAFPLALVSGIIYIHLRKRE

SEQ ID NO: 27774 - protein, 163 aa, Homo sapiens; identical to SEQ ID NO: 27773
  Payload ID: 5483
  Gene Symbol: EMP3
  Gene Name: epithelial membrane protein 3
  Uniprot ID: P54852
  ENSP ID: ENSP00000469194

SEQ ID NO: 27775 - protein, 161 aa, Homo sapiens
  Payload ID: 5483
  Gene Symbol: EMP3
  Gene Name: epithelial membrane protein 3
  ENSP ID: ENSP00000469275
MSLLLLVVSALHILILILLFVATLDKSWWTLPGKESLNLWLAEGGAGPHGALPHSLLSLLHPVHVPALHHATRRSLLCHRPLPALHQRGGVYWRLDLCHSRRGDPGEAPARGQLRILLRPGLGGLPPRPGQRHHLHPPTEAGVSAPPRSAAPAPSRPPSPR

SEQ ID NO: 27776 - protein, 94 aa, Homo sapiens
  Payload ID: 5483
  Gene Symbol: EMP3
  Gene Name: epithelial membrane protein 3
  ENSP ID: ENSP00000469341
MVLSLILCCLSFILFMFQLYTMRRGGLFYATGLCQLCTSVAVFTGALIYAIHAEEILEKHPRGGSFGYCFALAWVAFPLALVSGIIYIHLRKRE

SEQ ID NO: 27777 - protein, 89 aa, Homo sapiens
  Payload ID: 5483
  Gene Symbol: EMP3
  Gene Name: epithelial membrane protein 3
  ENSP ID: ENSP00000470331
MSLLLLVVSALHILILILLFVATLDKSWWTLPGKESLNLWYDCTWNNDTKTWACSNVSENGWLKAVQVLMVLSLILCCLSFILFMFQLY

SEQ ID NO: 27778 - protein, 63 aa, Homo sapiens
  Payload ID: 5483
  Gene Symbol: EMP3
  Gene Name: epithelial membrane protein 3
  ENSP ID: ENSP00000471592
MSLLLLVVSALHILILILLFVATLDKSWWTLPGKESLNLWYDCTWNNDTKTWACSNVSENGEG

SEQ ID NO: 27779 - protein, 56 aa, Homo sapiens
  Payload ID: 5483
  Gene Symbol: EMP3
  Gene Name: epithelial membrane protein 3
  ENSP ID: ENSP00000471964
MVLSLILCCLSFILFMFQLYTMRRGGLFYATGLCQLCTSVAVFTGALIYAIHAEEI

SEQ ID NO: 27780 - protein, 133 aa, Homo sapiens
  Payload ID: 5484
  Gene Symbol: EPGN
  Gene Name: epithelial mitogen
  Uniprot ID: Q6UW88
  ENSP ID: ENSP00000330375
MALGVPISVYLLFNAMTALTEEAAVTVTPPITAQQADNIEGPIALKFSHLCLEDHNSYCINGACAFHHELEKAICRCFTGYTGERCEHLTLTSYAVDSYEKYIAIGIGVGLLLSGFLVIFYCYIRKRYEKDKI

SEQ ID NO: 27781 - protein, 130 aa, Homo sapiens
  Payload ID: 5484
  Gene Symbol: EPGN
  Gene Name: epithelial mitogen
  ENSP ID: ENSP00000398415
  MOD_RES (1)..(1): Any amino acid
XTALTEEAAVTVTPPITAQQADNIEGPIALKFSHLCLEDHNSYCINGACAFHHELEKAICRCFTGYTGERCEHLTLTSYAVDSYEKYIAIGIGVGLLLSGFLVIFYCYIRKRCLKLKSPYNVCSGERRPL

SEQ ID NO: 27782 - protein, 154 aa, Homo sapiens
  Payload ID: 5484
  Gene Symbol: EPGN
  Gene Name: epithelial mitogen
  Uniprot ID: Q6UW88
  ENSP ID: ENSP00000411898
MALGVPISVYLLFNAMTALTEEAAVTVTPPITAQQGNWTVNKTEADNIEGPIALKFSHLCLEDHNSYCINGACAFHHELEKAICRCFTGYTGERCEHLTLTSYAVDSYEKYIAIGIGVGLLLSGFLVIFYCYIRKRCLKLKSPYNVCSGERRPL

SEQ ID NO: 27783 - protein, 94 aa, Homo sapiens
  Payload ID: 5484
  Gene Symbol: EPGN
  Gene Name: epithelial mitogen
  ENSP ID: ENSP00000423090
MALGVPISVYLLFNAMTALTEEAAVTVTPPITAQQGNWTVNKTEADNIEGPIALKFSHLCLEDHNSYCINGACAFHHELEKAICRCFTGYTGER

SEQ ID NO: 27784 - protein, 94 aa, Homo sapiens
  Payload ID: 5484
  Gene Symbol: EPGN
  Gene Name: epithelial mitogen
  Uniprot ID: Q6UW88
  ENSP ID: ENSP00000424392
MALGVPISVYLLFNAMTALTEEAAVTVTPPITAQQADNIEGPIALKFSHLCLEDHNSYCINGACAFHHELEKAICRCLKLKSPYNVCSGERRPL

SEQ ID NO: 27785 - protein, 112 aa, Homo sapiens
  Payload ID: 5484
  Gene Symbol: EPGN
  Gene Name: epithelial mitogen
  Uniprot ID: Q6UW88
  ENSP ID: ENSP00000425890
MALGVPISVYLLFNAMTALTEEAAVTVTPPITAQQGNWTVNKTEADNIEGPIALKFSHLCLEDHNSYCINGACAFHHELEKAICRCFTGYTGERCLKLKSPYNVCSGERRPL

SEQ ID NO: 27786 - protein, 103 aa, Homo sapiens
  Payload ID: 5484
  Gene Symbol: EPGN
  Gene Name: epithelial mitogen
  Uniprot ID: Q6UW88
  ENSP ID: ENSP00000426550
MALGVPISVYLLFNAMTALTEEAAVTVTPPITAQQADNIEGPIALKFSHLCLEDHNSYCINGACAFHHELEKAICRCFTGYTGERCLKLKSPYNVCSGERRPL

SEQ ID NO: 27787 - protein, 73 aa, Homo sapiens
  Payload ID: 5484
  Gene Symbol: EPGN
  Gene Name: epithelial mitogen
  Uniprot ID: Q6UW88
  ENSP ID: ENSP00000426630
MALGVPISVYLLFNADNIEGPIALKFSHLCLEDHNSYCINGACAFHHELEKAICRCLKLKSPYNVCSGERRPL

SEQ ID NO: 27788 - protein, 103 aa, Homo sapiens
  Payload ID: 5484
  Gene Symbol: EPGN
  Gene Name: epithelial mitogen
  Uniprot ID: Q6UW88
  ENSP ID: ENSP00000426678
MALGVPISVYLLFNAMTALTEEAAVTVTPPITAQQGNWTVNKTEADNIEGPIALKFSHLCLEDHNSYCINGACAFHHELEKAICRCLKLKSPYNVCSGERRPL

SEQ ID NO: 27789 - protein, 677 aa, Homo sapiens
  Payload ID: 5485
  Gene Symbol: ESRP1
  Gene Name: epithelial splicing regulatory protein 1
  Uniprot ID: Q6NXG1
  ENSP ID: ENSP00000351168
MTASPDYLVVLFGITAGATGAKLGSDEKELILLFWKVVDLANKKVGQLHEVLVRPDQLELTEDCKEETKIDVESLSSASQLDQALRQFNQSVSNELNIGVGTSFCLCTDGQLHVRQILHPEASKKNVLLPECFYSFFDLRKEFKKCCPGSPDIDKLDVATMTEYLNFEKSSSVSRYGASQVEDMGNIILAMISEPYNHRFSDPERVNYKFESGTCSKMELIDDNTVVRARGLPWQSSDQDIARFFKGLNIAKGGAALCLNAQGRRNGEALVRFVSEEHRDLALQRHKHHMGTRYIEVYKATGEDFLKIAGGTSNEVAQFLSKENQVIVRMRGLPFTATAEEVVAFFGQHCPITGGKEGILFVTYPDGRPTGDAFVLFACEEYAQNALRKHKDLLGKRYIELFRSTAAEVQQVLNRFSSAPLIPLPTPPIIPVLPQQFVPPTNVRDCIRLRGLPYAATIEDILDFLGEFATDIRTHGVHMVLNHQGRPSGDAFIQMKSADRAFMAAQKCHKKNMKDRYVEVFQCSAEEMNFVLMGGTLNRNGLSPPPCLSPPSYTFPAPAAVIPTEAAIYQPSVILNPRALQPSTAYYPAGTQLFMNYTAYYPSPPGSPNSLGYFPTAANLSGVPPQPGTVVRMQGLAYNTGVKEILNFFQGYQYATEDGLIHTNDQARTLPKEWVCI

SEQ ID NO: 27790 - protein, 608 aa, Homo sapiens
  Payload ID: 5485
  Gene Symbol: ESRP1
  Gene Name: epithelial splicing regulatory protein 1
  Uniprot ID: Q6NXG1
  ENSP ID: ENSP00000402766
MTASPDYLVVLFGITAGATGAKLGSDEKELILLFWKVVDLANKKVGQLHEVLVRPDQLELTEDCKEETKIDVESLSSASQLDQALRQFNQSVSNELNIGVGTSFCLCTDGQLHVRQILHPEASKKNVLLPECFYSFFDLRKEFKKCCPGSPDIDKLDVATMTEYLNFEKSSSVSRYGASQVEDMGNIILAMISEPYNHRFSDPERVNYKFESGTCSKMELIDDNTVVRARGLPWQSSDQDIARFFKGLNIAKGGAALCLNAQGRRNGEALVRFVSEEHRDLALQRHKHHMGTRYIEVYKATGEDFLKIAGGTSNEVAQFLSKENQVIVRMRGLPFTATAEEVVAFFGQHCPITGGKEGILFVTYPDGRPTGDAFVLFACEEYAQNALRKHKDLLGKRYIELFRSTAAEVQQVLNRFSSAPLIPLPTPPIIPVLPQQFVPPTNVRDCIRLRGLPYAATIEDILDFLGEFATDIRTHGVHMVLNHQGRPSGDAFIQMKSADRAFMAAQKCHKKNMKDRYVEVFQCSAEEMNFVLMGGTLNRNGLSPPPCKLPCLSPPSYTFPAPAAVIPTEAAIYQPSVILNPRALQPSTAYYPAGTQLFMNYTAYYPSV

SEQ ID NO: 27791 - protein, 681 aa, Homo sapiens
  Payload ID: 5485
  Gene Symbol: ESRP1
  Gene Name: epithelial splicing regulatory protein 1
  Uniprot ID: Q6NXG1
  ENSP ID: ENSP00000405738
MTASPDYLVVLFGITAGATGAKLGSDEKELILLFWKVVDLANKKVGQLHEVLVRPDQLELTEDCKEETKIDVESLSSASQLDQALRQFNQSVSNELNIGVGTSFCLCTDGQLHVRQILHPEASKKNVLLPECFYSFFDLRKEFKKCCPGSPDIDKLDVATMTEYLNFEKSSSVSRYGASQVEDMGNIILAMISEPYNHRFSDPERVNYKFESGTCSKMELIDDNTVVRARGLPWQSSDQDIARFFKGLNIAKGGAALCLNAQGRRNGEALVRFVSEEHRDLALQRHKHHMGTRYIEVYKATGEDFLKIAGGTSNEVAQFLSKENQVIVRMRGLPFTATAEEVVAFFGQHCPITGGKEGILFVTYPDGRPTGDAFVLFACEEYAQNALRKHKDLLGKRYIELFRSTAAEVQQVLNRFSSAPLIPLPTPPIIPVLPQQFVPPTNVRDCIRLRGLPYAATIEDILDFLGEFATDIRTHGVHMVLNHQGRPSGDAFIQMKSADRAFMAAQKCHKKNMKDRYVEVFQCSAEEMNFVLMGGTLNRNGLSPPPCKLPCLSPPSYTFPAPAAVIPTEAAIYQPSVILNPRALQPSTAYYPAGTQLFMNYTAYYPSPPGSPNSLGYFPTAANLSGVPPQPGTVVRMQGLAYNTGVKEILNFFQGYQYATEDGLIHTNDQARTLPKEWVCI

SEQ ID NO: 27792 - protein, 659 aa, Homo sapiens
  Payload ID: 5485
  Gene Symbol: ESRP1
  Gene Name: epithelial splicing regulatory protein 1
  Uniprot ID: Q6NXG1
  ENSP ID: ENSP00000407349
MTASPDYLVVLFGITAGATGAKLGSDEKELILLFWKVVDLANKKVGQLHEVLVRPDQLELTEDCKEETKIDVESLSSASQLDQALRQFNQSVSNELNIGVGTSFCLCTDGQLHVRQILHPEASKKNVLLPECFYSFFDLRKEFKKCCPGSPDIDKLDVATMTEYLNFEKSSSVSRYGASQVEDMGNIILAMISEPYNHRFSDPERVNYKFESGTCSKMELIDDNTVVRARGLPWQSSDQDIARFFKGLNIAKGGAALCLNAQGRRNGEALVRFVSEEHRDLALQRHKHHMGTRYIEVYKATGEDFLKIAGGTSNEVAQFLSKENQVIVRMRGLPFTATAEEVVAFFGQHCPITGGKEGILFVTYPDGRPTGDAFVLFACEEYAQNALRKHKDLLGKRYIELFRSTAAEVQQVLNRFSSAPLIPLPTPPIIPVLPQQFVPPTNVRDCIRLRGLPYAATIEDILDFLGEFATDIRTHGVHMVLNHQGRPSGDAFIQMKSADRAFMAAQKCHKKNMKDRYVEVFQCSAEEMNFVLMGGTLNRNGLSPPPCLSPPSYTFPAPAAVIPTEAAIYQPSVILNPRALQPSTAYYPAGTQLFMNYTAYYPSPPGSPNSLGYFPTAANLSGVPPQPGTVVRMQGLAYNTGVKEILNFFQGYQCLKDVW

SEQ ID NO: 27793 - protein, 94 aa, Homo sapiens
  Payload ID: 5485
  Gene Symbol: ESRP1
  Gene Name: epithelial splicing regulatory protein 1
  ENSP ID: ENSP00000428490
MELIDDNTVVRARGLPWQSSDQDIARFFKGLNIAKGGAALCLNAQGRRNGEALVRFVSEEHRDLALQRHKHHMGTRYIEVYKATGEDFLKIAGG

SEQ ID NO: 27794 - protein, 522 aa, Homo sapiens
  Payload ID: 5485
  Gene Symbol: ESRP1
  Gene Name: epithelial splicing regulatory protein 1
  ENSP ID: ENSP00000429125
EFKKCCPGSPDIDKLDVATMTEYLNFEKSSSVSRYGASQVEDMGNIILAMISEPYNHRFSDPERVNYKFESGTCSKMELIDDNTVVRARGLPWQSSDQDIARFFKGLNIAKGGAALCLNAQGRRNGEALVRFVSEEHRDLALQRHKHHMGTRYIEVYKATGEDFLKIAGGTSNEVAQFLSKENQVIVRMRGLPFTATAEEVVAFFGQHCPITGGKEGILFVTYPDGRPTGDAFVLFACEEYAQNALRKHKDLLGKRYIELFRSTAAEVQQVLNRFSSAPLIPLPTPPIIPVLPQQFVPPTNVRDCIRLRGLPYAATIEDILDFLGEFATDIRTHGVHMVLNHQGRPSGDAFIQMKSADRAFMAAQKCHKKNMKDRYVEVFQCSAEEMNFVLMGGTLNRNGLSPPPCKLPCLSPPSYTFPAPAAVIPTEAAIYQPSVILNPRALQPSTAYYPAGTQLFMNYTAYYPSPPGSPNSLGYFPTAANLSGVPPQPGTVVRMQGLAYNTGVKEILNFFQGYQCLKDVW

SEQ ID NO: 27795 - protein, 502 aa, Homo sapiens
  Payload ID: 5485
  Gene Symbol: ESRP1
  Gene Name: epithelial splicing regulatory protein 1
  ENSP ID: ENSP00000430118
  MOD_RES (1)..(1): Any amino acid
XFFDLRKEFKKCCPGSPDIDKLDVATMTEYLNFEKSSSVSRYGASQVEDMGNIILAMISEPYNHRFSDPERVNYKFESGTCSKMELIDDNTVVRARGLPWQSSDQDIARFFKGLNIAKGGAALCLNAQGRRNGEALVRFVSEEHRDLALQRHKHHMGTRYIEVYKATGEDFLKIAGGTSNEVAQFLSKENQVIVRMRGLPFTATAEEVVAFFGQHCPITGGKEGILFVTYPDGRPTGDAFVLFACEEYAQNALRKHKDLLGKRYIELFRSTAAEVQQVLNRFSSAPLIPLPTPPIIPVLPQQFVPPTNVRDCIRLRGLPYAATIEDILDFLGEFATDIRTHGVHMVLNHQGRPSGDAFIQMKSADRAFMAAQKCHKKNMKDRYVEVFQCSAEEMNFVLMGGTLNRNGLSPPPCKLPCLSPPSYTFPAPAAVIPTEAAIYQPSVILNPRALQPSTAYYPAGTQLFMNYTAYYPSMQPRMDLYTQMTRPGLYPKNGFVFKGPSS

SEQ ID NO: 27796 - protein, 24 aa, Homo sapiens
  Payload ID: 5485
  Gene Symbol: ESRP1
  Gene Name: epithelial splicing regulatory protein 1
  ENSP ID: ENSP00000430207
MTEYLNFEKSSSVSRYGASQVEDM

SEQ ID NO: 27797 - protein, 717 aa, Homo sapiens
  Payload ID: 5486
  Gene Symbol: ESRP2
  Gene Name: epithelial splicing regulatory protein 2
  Uniprot ID: Q9H6T0
  ENSP ID: ENSP00000418748
MTPPPPPPPPPGPDPAADPAADPCPWPGSLVVLFGATAGALGRDLGSDETDLILLVWQVVEPRSRQVGTLHKSLVRAEAAALSTQCREASGLSADSLARAEPLDKVLQQFSQLVNGDVALLGGGPYMLCTDGQQLLRQVLHPEASRKNLVLPDMFFSFYDLRREFHMQHPSTCPARDLTVATMAQGLGLETDATEDDFGVWEVKTMVAVILHLLKEPSSQLFSKPEVIKQKYETGPCSKADVVDSETVVRARGLPWQSSDQDVARFFKGLNVARGGVALCLNAQGRRNGEALIRFVDSEQRDLALQRHKHHMGVRYIEVYKATGEEFVKIAGGTSLEVARFLSREDQVILRLRGLPFSAGPTDVLGFLGPECPVTGGTEGLLFVRHPDGRPTGDAFALFACEELAQAALRRHKGMLGKRYIELFRSTAAEVQQVLNRYASGPLLPTLTAPLLPIPFPLAPGTGRDCVRLRGLPYTATIEDILSFLGEAAADIRPHGVHMVLNQQGRPSGDAFIQMTSAERALAAAQRCHKKVMKERYVEVVPCSTEEMSRVLMGGTLGRSGMSPPPCKLPCLSPPTYTTFQATPTLIPTETAALYPSSALLPAARVPAAPTPVAYYPGPATQLYLNYTAYYPSPPVSPTTVGYLTTPTAALASAPTSVLSQSGALVRMQGVPYTAGMKDLLSVFQAYQLPADDYTSLMPVGDPPRTVLQAPKEWVCL

SEQ ID NO: 27798 - protein, 727 aa, Homo sapiens
  Payload ID: 5486
  Gene Symbol: ESRP2
  Gene Name: epithelial splicing regulatory protein 2
  Uniprot ID: Q9H6T0
  ENSP ID: ENSP00000454554
MTPPPPPPPPPGPDPAADPAADPCPWPGSLVVLFGATAGALGRDLGSDETDLILLVWQVVEPRSRQVGTLHKSLVRAEAAALSTQCREASGLSADSLARAEPLDKVLQQFSQLVNGDVALLGGGPYMLCTDGQQLLRQVLHPEASRKNLVLPDMFFSFYDLRREFHMQHPSTCPARDLTVATMAQGLGLETDATEDDFGVWEVKTMVAVILHLLKEPSSQLFSKPEVIKQKYETGPCSDSTVPCPYSSKADVVDSETVVRARGLPWQSSDQDVARFFKGLNVARGGVALCLNAQGRRNGEALIRFVDSEQRDLALQRHKHHMGVRYIEVYKATGEEFVKIAGGTSLEVARFLSREDQVILRLRGLPFSAGPTDVLGFLGPECPVTGGTEGLLFVRHPDGRPTGDAFALFACEELAQAALRRHKGMLGKRYIELFRSTAAEVQQVLNRYASGPLLPTLTAPLLPIPFPLAPGTGRDCVRLRGLPYTATIEDILSFLGEAAADIRPHGVHMVLNQQGRPSGDAFIQMTSAERALAAAQRCHKKVMKERYVEVVPCSTEEMSRVLMGGTLGRSGMSPPPCKLPCLSPPTYTTFQATPTLIPTETAALYPSSALLPAARVPAAPTPVAYYPGPATQLYLNYTAYYPSPPVSPTTVGYLTTPTAALASAPTSVLSQSGALVRMQGVPYTAGMKDLLSVFQAYQLPADDYTSLMPVGDPPRTVLQAPKEWVCL

SEQ ID NO: 27799 - protein, 43 aa, Homo sapiens
  Payload ID: 5486
  Gene Symbol: ESRP2
  Gene Name: epithelial splicing regulatory protein 2
  ENSP ID: ENSP00000461970
MLCTDGQQLLRQVLHPEASRKNLVLPDMFFSFYDLRREFHMQH

SEQ ID NO: 27800 - protein, 65 aa, Homo sapiens
  Payload ID: 5486
  Gene Symbol: ESRP2
  Gene Name: epithelial splicing regulatory protein 2
  ENSP ID: ENSP00000463237
  MOD_RES (1)..(1): Any amino acid
XQLFSKPEVIKQKYETGPCSKADVVDSETVVRARGLPWQSSDQDVARFFKGLNVARCIKRQGRSL

SEQ ID NO: 27801 - protein, 82 aa, Homo sapiens
  Payload ID: 5486
  Gene Symbol: ESRP2
  Gene Name: epithelial splicing regulatory protein 2
  ENSP ID: ENSP00000463770
MLCTDGQQLLRQVLHPEASRKNLVLPDMFFSFYDLRREFHMQHPSTCPARDLTVATMAQGLGLETDATEDDFGVWEVKTMVA

SEQ ID NO: 27802 - protein, 307 aa, Homo sapiens
  Payload ID: 5487
  Gene Symbol: EPSTI1
  Gene Name: epithelial stromal interaction 1 (breast)
  Uniprot ID: Q96J88
  ENSP ID: ENSP00000318643
MNTRNRVVNSGLGASPASRPTRDPQDPSGRQGELSPVEDQREGLEAAPKGPSRESVVHAGQRRTSAYTLIAPNINRRNEIQRIAEQELANLEKWKEQNRAKPVHLVPRRLGGSQSETEVRQKQQLQLMQSKYKQKLKREESVRIKKEAEEAELQKMKAIQREKSNKLEEKKRLQENLRREAFREHQQYKTAEFLSKLNTESPDRSACQSAVCGPQSSTWARSWAYRDSLKAEENRKLQKMKDEQHQKSELLELKRQQQEQERAKIHQTEHRRVNNAFLDRLQGKSQPGGLEQSGGCWNMNSGNSWGI

SEQ ID NO: 27803 - protein, 410 aa, Homo sapiens
  Payload ID: 5487
  Gene Symbol: EPSTI1
  Gene Name: epithelial stromal interaction 1 (breast)
  Uniprot ID: Q96J88
  ENSP ID: ENSP00000318982
MNTRNRVVNSGLGASPASRPTRDPQDPSGRQGELSPVEDQREGLEAAPKGPSRESVVHAGQRRTSAYTLIAPNINRRNEIQRIAEQELANLEKWKEQNRAKPVHLVPRRLGGSQSETEVRQKQQLQLMQSKYKQKLKREESVRIKKEAEEAELQKMKAIQREKSNKLEEKKRLQENLRREAFREHQQYKTAEFLSKLNTESPDRSACQSAVCGPQSSTWKLPILPRDHSWARSWAYRDSLKAEENRKLQKMKDEQHQKSELLELKRQQQEQERAKIHQTEHRRVNNAFLDRLQGKSQPGGLEQSGGCWNMNSGNSWGSLLVFSRHLRVYEKILTPIWPSSTDLEKPHEMLFLNVILFSLTVFTLISTAHTLDRAVRSDWLLLVLIYACLEELIPELIFNLYCQGNATLFF

SEQ ID NO: 27804 - protein, 318 aa, Homo sapiens
  Payload ID: 5487
  Gene Symbol: EPSTI1
  Gene Name: epithelial stromal interaction 1 (breast)
  Uniprot ID: Q96J88
  ENSP ID: ENSP00000381746
MNTRNRVVNSGLGASPASRPTRDPQDPSGRQGELSPVEDQREGLEAAPKGPSRESVVHAGQRRTSAYTLIAPNINRRNEIQRIAEQELANLEKWKEQNRAKPVHLVPRRLGGSQSETEVRQKQQLQLMQSKYKQKLKREESVRIKKEAEEAELQKMKAIQREKSNKLEEKKRLQENLRREAFREHQQYKTAEFLSKLNTESPDRSACQSAVCGPQSSTWKLPILPRDHSWARSWAYRDSLKAEENRKLQKMKDEQHQKSELLELKRQQQEQERAKIHQTEHRRVNNAFLDRLQGKSQPGGLEQSGGCWNMNSGNSWGI

SEQ ID NO: 27805 - protein, 78 aa, Homo sapiens
  Payload ID: 5487
  Gene Symbol: EPSTI1
  Gene Name: epithelial stromal interaction 1 (breast)
  ENSP ID: ENSP00000442662
MQSKYKQKLKREESVRIKKEAEEAELQKMKAIQREKSNKLEEKKRLQENLRREAFREHQQYKTAEFLSKLNTESPDRS

SEQ ID NO: 27806 - protein, 80 aa, Homo sapiens
  Payload ID: 5487
  Gene Symbol: EPSTI1
  Gene Name: epithelial stromal interaction 1 (breast)
  ENSP ID: ENSP00000444923
MNTRNRVVNSGLGASPASRPTRDPQDPSGRQGELSPVEDQREGLEAAPKGPSRESVVHAGQRRCGAGAGQPGEVEGAEQS

SEQ ID NO: 27807 - protein, 607 aa, Homo sapiens
  Payload ID: 5488
  Gene Symbol: EPM2AIP1
  Gene Name: EPM2A (laforin) interacting protein 1
  Uniprot ID: Q7L775
  ENSP ID: ENSP00000406027
MWMTPKRSKMEVDEALVFRPEWTQRYLVVEPPEGDGALCLVCRRLIVATRERDVRRHYEAEHEYYERYVADGERAALVERLRQGDLPVASFTPEERAARAGLGLCRLLALKGRGWGEGDFVYQCMEVLLREVLPEHVSVLQGVDLSPDITRQRILSIDRNLRNQLFNRARDFKAYSLALDDQAFVAYENYLLVFIRGVGPELEVQEDLLTIINLTHHFSVGALMSAILESLQTAGLSLQRMVGLTTTHTLRMIGENSGLVSYMREKAVSPNCWNVIHYSGFLHLELLSSYDVDVNQIINTISEWIVLIKTRGVRRPEFQTLLTESESEHGERVNGRCLNNWLRRGKTLKLIFSLRKEMEAFLVSVGATTVHFSDKQWLCDFGFLVDIMEHLRELSEELRVSKVFAAAAFDHICTFEVKLNLFQRHIEEKNLTDFPALREVVDELKQQNKEDEKIFDPDRYQMVICRLQKEFERHFKDLRFIKKDLELFSNPFNFKPEYAPISVRVELTKLQANTNLWNEYRIKDLGQFYAGLSAESYPIIKGVACKVASLFDSNQICEKAFSYLTRNQHTLSQPLTDEHLQALFRVATTEMEPGWDDLVRERNESNP

SEQ ID NO: 27808 - protein, 139 aa, Homo sapiens
  Payload ID: 5488
  Gene Symbol: EPM2AIP1
  Gene Name: EPM2A (laforin) interacting protein 1
  ENSP ID: ENSP00000485091
  MOD_RES (1)..(1): Any amino acid
XNCWNVIHYSGFLHLELLSSYDVDVNQIINTISEWIVLIKTRGVRRPEFQTLLTESESEHGERVNGRCLNNWLRRGKTLKLIFSLRKEMEAFLVSVGATTVHFSDKQWLCDFGFLVDIMEHLRELSEELRTQVWPYQKR

SEQ ID NO: 27809 - protein, 42 aa, Homo sapiens
  Payload ID: 5488
  Gene Symbol: EPM2AIP1
  Gene Name: EPM2A (laforin) interacting protein 1
  ENSP ID: ENSP00000485489
  MOD_RES (1)..(1): Any amino acid
XVATRERDVRRHYEAEHEYYERHKFGPIKNDEEKRLHSRIRR

SEQ ID NO: 27810 - protein, 455 aa, Homo sapiens
  Payload ID: 5489
  Gene Symbol: EPHX1
  Gene Name: epoxide hydrolase 1, microsomal (xenobiotic)
  Uniprot ID: P07099
  ENSP ID: ENSP00000272167
MWLEILLTSVLGFAIYWFISRDKEETLPLEDGWWGPGTRSAAREDDSIRPFKVETSDEEIHDLHQRIDKFRFTPPLEDSCFHYGFNSNYLKKVISYWRNEFDWKKQVEILNRYPHFKTKIEGLDIHFIHVKPPQLPAGHTPKPLLMVHGWPGSFYEFYKIIPLLTDPKNHGLSDEHVFEVICPSIPGYGFSEASSKKGFNSVATARIFYKLMLRLGFQEFYIQGGDWGSLICTNMAQLVPSHVKGLHLNMALVLSNFSTLTLLLGQRFGRFLGLTERDVELLYPVKEKVFYSLMRESGYMHIQCTKPDTVGSALNDSPVGLAAYILEKFSTWTNTEFRYLEDGGLERKFSLDDLLTNVMLYWTTGTIISSQRFYKENLGQGWMTQKHERMKVYVPTGFSAFPFELLHTPEKWVRFKYPKLISYSYMVRGGHFAAFEEPELLAQDIRKFLSVLERQ

SEQ ID NO: 27811 - protein, 455 aa, Homo sapiens; identical to SEQ ID NO: 27810
  Payload ID: 5489
  Gene Symbol: EPHX1
  Gene Name: epoxide hydrolase 1, microsomal (xenobiotic)
  Uniprot ID: P07099
  ENSP ID: ENSP00000355802

SEQ ID NO: 27812 - protein, 161 aa, Homo sapiens
  Payload ID: 5489
  Gene Symbol: EPHX1
  Gene Name: epoxide hydrolase 1, microsomal (xenobiotic)
  ENSP ID: ENSP00000398491
MWLEILLTSVLGFAIYWFISRDKEETLPLEDGWWGPGTRSAAREDDSIRPFKVETSDEEIHDLHQRIDKFRFTPPLEDSCFHYGFNSNYLKKVISYWRNEFDWKKQVEILNRYPHFKTKIEGLDIHFIHVKPPQLPAGHTPKPLLMVHGWPGSFYEFYKII

SEQ ID NO: 27813 - protein, 136 aa, Homo sapiens
  Payload ID: 5489
  Gene Symbol: EPHX1
  Gene Name: epoxide hydrolase 1, microsomal (xenobiotic)
  ENSP ID: ENSP00000408469
MWLEILLTSVLGFAIYWFISRDKEETLPLEDGWWGPGTRSAAREDDSIRPFKVETSDEEIHDLHQRIDKFRFTPPLEDSCFHYGFNSNYLKKVISYWRNEFDWKKQVEILNRYPHFKTKIEGLDIHFIHVKPPQLP

SEQ ID NO: 27814 - protein, 455 aa, Homo sapiens; identical to SEQ ID NO: 27810
  Payload ID: 5489
  Gene Symbol: EPHX1
  Gene Name: epoxide hydrolase 1, microsomal (xenobiotic)
  Uniprot ID: P07099
  ENSP ID: ENSP00000480004

SEQ ID NO: 27815 - protein, 502 aa, Homo sapiens
  Payload ID: 5490
  Gene Symbol: EPHX2
  Gene Name: epoxide hydrolase 2, cytoplasmic
  Uniprot ID: P34913
  ENSP ID: ENSP00000369843
MKGEITLSQWIPLMEENCRKCSETAKVCLPKNFSIKEIFDKAISARKINRPMLQAALMLRKKGFTTAILTNTWLDDRAERDGLAQLMCELKMHFDFLIESCQVGMVKPEPQIYKFLLDTLKASPSEVVFLDDIGANLKPARDLGMVTILVQDTDTALKELEKVTGIQLLNTPAPLPTSCNPSDMSHGYVTVKPRVRLHFVELGSGPAVCLCHGFPESWYSWRYQIPALAQAGYRVLAMDMKGYGESSAPPEIEEYCMEVLCKEMVTFLDKLGLSQAVFIGHDWGGMLVWYMALFYPERVRAVASLNTPFIPANPNMSPLESIKANPVFDYQLYFQEPGVAEAELEQNLSRTFKSLFRASDESVLSMHKVCEAGGLFVNSPEEPSLSRMVTEEEIQFYVQQFKKSGFRGPLNWYRNMERNWKWACKSLGRKILIPALMVTAEKDFVLVPQMSQHMEDWIPHLKRGHIEDCGHWTQMDKPTEVNQILIKWLDSDARNPPVVSKM

SEQ ID NO: 27816 - protein, 523 aa, Homo sapiens
  Payload ID: 5490
  Gene Symbol: EPHX2
  Gene Name: epoxide hydrolase 2, cytoplasmic
  ENSP ID: ENSP00000427956
MTLRAAVFDLDGVLALPAVFGVLGRTEEALALPRGLLNDAFQKGGPEGATTRLMKGEITLSQWIPLMEENCRKCSETAKVCLPKNFSIKEIFDKAISARKINRPMLQAALMLRKKGFTTAILTNTWLDDRAERDGLAQLMCELKMHFDFLIESCQVGMVKPEPQIYKFLLDTLKASPSEVVFLDDIGANLKPARDLGMVTILVQDTDTALKELEKVTGIQLLNTPAPLPTSCNPSDMSHGYVTVKIPALAQAGYRVLAMDMKGYGESSAPPEIEEYCMEVLCKEMVTFLDKLGLSQAVFIGHDWGGMLVWYMALFYPERVRAVASLNTPFIPANPNMSPLESIKANPVFDYQLYFQEPGVAEAELEQNLSRTFKSLFRASDESVLSMHKVCEAGGLFVNSPEEPSLSRMVTEEEIQFYVQQFKKSGFRGPLNWYRNMERNWKWACKSLGRKILIPALMVTAEKDFVLVPQMSQHMEDWIPHLKRGHIEDCGHWTQMDKPTEVNQILIKWLDSDARNPPVVSKM

SEQ ID NO: 27817 - protein, 312 aa, Homo sapiens
  Payload ID: 5490
  Gene Symbol: EPHX2
  Gene Name: epoxide hydrolase 2, cytoplasmic
  ENSP ID: ENSP00000428191
  MOD_RES (1)..(1): Any amino acid
XTLRAAVFDLDGVLALPAVFGVLGRTEEALALPRGLLNDAFQKGGPEGATTRLMKGEITLSQWIPLMEENCRKCSETAKVCLPKNFSIKEIFDKAISARKINRPMLQAALMLRKKGFTTAILTNTWLDDRAERDGLAQLMCELKMHFDFLIESCQVGMVKPEPQIYKFLLDTLKASPSELLNTPAPLPTSCNPSDMSHGYVTVKPRVRLHFVELGSGPAVCLCHGFPESWYSWRYQIPALAQAGYRVLAMDMKGYGESSAPPEIEEYCMEVLCKEMVTFLDKLGLSQAVFIGHDWGGMLVWYMALFYPERVR

SEQ ID NO: 27818 - protein, 372 aa, Homo sapiens
  Payload ID: 5490
  Gene Symbol: EPHX2
  Gene Name: epoxide hydrolase 2, cytoplasmic
  ENSP ID: ENSP00000428875
MTLRAAVFDLDGVLALPAVFGVLGRTEEALALPRGLLNDAFQKGGPEGATTRLMKGEITLSQPRVRLHFVELGSGPAVCLCHGFPESWYSWRYQIPALAQAGYRVLAMDMKGYGESSAPPEIEEYCMEVLCKEMVTFLDKLGLSQAVFIGHDWGGMLVWYMALFYPERVRAVASLNTPFIPANPNMSPLESIKANPVFDYQLYFQEPGVAEAELEQNLSRTFKSLFRASDESVLSMHKVCEAGGLFVNSPEEPSLSRMVTEEEIQFYVQQFKKSGFRGPLNWYRNMERNWKWACKSLGRKILIPALMVTAEKDFVLVPQMSQHMEDWIPHLKRGHIEDCGHWTQMDKPTEVNQILIKWLDSDARNPPVVSKM

SEQ ID NO: 27819 - protein, 555 aa, Homo sapiens
  Payload ID: 5490
  Gene Symbol: EPHX2
  Gene Name: epoxide hydrolase 2, cytoplasmic
  Uniprot ID: P34913
  ENSP ID: ENSP00000430269
MTLRAAVFDLDGVLALPAVFGVLGRTEEALALPRGLLNDAFQKGGPEGATTRLMKGEITLSQWIPLMEENCRKCSETAKVCLPKNFSIKEIFDKAISARKINRPMLQAALMLRKKGFTTAILTNTWLDDRAERDGLAQLMCELKMHFDFLIESCQVGMVKPEPQIYKFLLDTLKASPSEVVFLDDIGANLKPARDLGMVTILVQDTDTALKELEKVTGIQLLNTPAPLPTSCNPSDMSHGYVTVKPRVRLHFVELGSGPAVCLCHGFPESWYSWRYQIPALAQAGYRVLAMDMKGYGESSAPPEIEEYCMEVLCKEMVTFLDKLGLSQAVFIGHDWGGMLVWYMALFYPERVRAVASLNTPFIPANPNMSPLESIKANPVFDYQLYFQEPGVAEAELEQNLSRTFKSLFRASDESVLSMHKVCEAGGLFVNSPEEPSLSRMVTEEEIQFYVQQFKKSGFRGPLNWYRNMERNWKWACKSLGRKILIPALMVTAEKDFVLVPQMSQHMEDWIPHLKRGHIEDCGHWTQMDKPTEVNQILIKWLDSDARNPPVVSKM

SEQ ID NO: 27820 - protein, 489 aa, Homo sapiens
  Payload ID: 5490
  Gene Symbol: EPHX2
  Gene Name: epoxide hydrolase 2, cytoplasmic
  Uniprot ID: P34913
  ENSP ID: ENSP00000430302
MEENCRKCSETAKVCLPKNFSIKEIFDKAISARKINRPMLQAALMLRKKGFTTAILTNTWLDDRAERDGLAQLMCELKMHFDFLIESCQVGMVKPEPQIYKFLLDTLKASPSEVVFLDDIGANLKPARDLGMVTILVQDTDTALKELEKVTGIQLLNTPAPLPTSCNPSDMSHGYVTVKPRVRLHFVELGSGPAVCLCHGFPESWYSWRYQIPALAQAGYRVLAMDMKGYGESSAPPEIEEYCMEVLCKEMVTFLDKLGLSQAVFIGHDWGGMLVWYMALFYPERVRAVASLNTPFIPANPNMSPLESIKANPVFDYQLYFQEPGVAEAELEQNLSRTFKSLFRASDESVLSMHKVCEAGGLFVNSPEEPSLSRMVTEEEIQFYVQQFKKSGFRGPLNWYRNMERNWKWACKSLGRKILIPALMVTAEKDFVLVPQMSQHMEDWIPHLKRGHIEDCGHWTQMDKPTEVNQILIKWLDSDARNPPVVSKM

SEQ ID NO: 27821 - protein, 158 aa, Homo sapiens
  Payload ID: 5490
  Gene Symbol: EPHX2
  Gene Name: epoxide hydrolase 2, cytoplasmic
  ENSP ID: ENSP00000430779
MTLRAAVFDLDGVLALPAVFGVLGRTEEALALPRGLLNDAFQKGGPEGATTRLMKGEITLSQWIPLMEENCRKCSETAKVCLPKNFSIKEIFDKAISARKINRPMLQAALMLRKKGFTTAILTNTWLDDRAERDGLAQLMCELKMHFDFLIESCQVGM

SEQ ID NO: 27822 - protein, 360 aa, Homo sapiens
  Payload ID: 5491
  Gene Symbol: EPHX3
  Gene Name: epoxide hydrolase 3
  Uniprot ID: Q9H6B9
  ENSP ID: ENSP00000221730
MPELVVTALLAPSRLSLKLLRAFMWSLVFSVALVAAAVYGCIALTHVLCRPRRGCCGRRRSASPACLSDPSLGEHGFLNLKSSGLRLHYVSAGRGNGPLMLFLHGFPENWFSWRYQLREFQSRFHVVAVDLRGYGPSDAPRDVDCYTIDLLLVDIKDVILGLGYSKCILVAHDWGALLAWHFSIYYPSLVERMVVVSGAPMSVYQDYSLHHISQFFRSHYMFLFQLPWLPEKLLSMSDFQILKTTLTHRKTGIPCLTPSELEAFLYNFSQPGGLTGPLNYYRNLFRNFPLEPQELTTPTLLLWGEKDTYLELGLVEAIGSRFVPGRLEAHILPGIGHWIPQSNPQEMHQYMWAFLQDLLD

SEQ ID NO: 27823 - protein, 360 aa, Homo sapiens; identical to SEQ ID NO: 27822
  Payload ID: 5491
  Gene Symbol: EPHX3
  Gene Name: epoxide hydrolase 3
  Uniprot ID: Q9H6B9
  ENSP ID: ENSP00000410323

SEQ ID NO: 27824 - protein, 125 aa, Homo sapiens
  Payload ID: 5491
  Gene Symbol: EPHX3
  Gene Name: epoxide hydrolase 3
  ENSP ID: ENSP00000468895
MPELVVTALLAPSRLSLKLLRAFMWSLVFSVALVAAAVYGCIALTHVLCRPRRGCCGRRRSASPACLSDPSLGEHGFLNLKSSGLRLHYVSAGRGNGPLMLFLHGFPENWFSWRYQLREFQSRFH

SEQ ID NO: 27825 - protein, 360 aa, Homo sapiens; identical to SEQ ID NO: 27822
  Payload ID: 5491
  Gene Symbol: EPHX3
  Gene Name: epoxide hydrolase 3
  Uniprot ID: Q9H6B9
  ENSP ID: ENSP00000469345

SEQ ID NO: 27826 - protein, 362 aa, Homo sapiens
  Payload ID: 5492
  Gene Symbol: EPHX4
  Gene Name: epoxide hydrolase 4
  Uniprot ID: Q8IUS5
  ENSP ID: ENSP00000359410
MARLRDCLPRLMLTLRSLLFWSLVYCYCGLCASIHLLKLLWSLGKGPAQTFRRPAREHPPACLSDPSLGTHCYVRIKDSGLRFHYVAAGERGKPLMLLLHGFPEFWYSWRYQLREFKSEYRVVALDLRGYGETDAPIHRQNYKLDCLITDIKDILDSLGYSKCVLIGHDWGGMIAWLIAICYPEMVMKLIVINFPHPNVFTEYILRHPAQLLKSSYYYFFQIPWFPEFMFSINDFKVLKHLFTSHSTGIGRKGCQLTTEDLEAYIYVFSQPGALSGPINHYRNIFSCLPLKHHMVTTPTLLLWGENDAFMEVEMAEVTKIYVKNYFRLTILSEASHWLQQDQPDIVNKLIWTFLKEETRKKD

SEQ ID NO: 27827 - protein, 179 aa, Homo sapiens
  Payload ID: 5493
  Gene Symbol: EPPIN-WFDC6
  Gene Name: EPPIN-WFDC6 readthrough
  Uniprot ID: O95925
  ENSP ID: ENSP00000424176
MGSSGLLSLLVLFVLLANVQGPGLTDWLFPRRCPKIREECEFQERDVCTKDRQCQDNKKCCVFSCGKKCLDLKQDVCEMPKETGPCLAYFLHWWYDKKDNTCSMFVYGGCQGNNNNFQSKANCLNTCKNKQPCPKIKVECEVEEIDQCTKPRDCPENMKCCPFSRGKKCLDFRKASLST

SEQ ID NO: 27828 - protein, 723 aa, Homo sapiens
  Payload ID: 5494
  Gene Symbol: EPS8L1
  Gene Name: EPS8-like 1
  Uniprot ID: Q8TE68
  ENSP ID: ENSP00000201647
MSTATGPEAAPKPSAKSIYEQRKRYSTVVMADVSQYPVNHLVTFCLGEDDGVHTVEDASRKLAVMDSQGRVWAQEMLLRVSPDHVTLLDPASKEELESYPLGAIVRCDAVMPPGRSRSLLLLVCQEPERAQPDVHFFQGLRLGAELIREDIQGALHNYRSGRGERRAAALRATQEELQRDRSPAAETPPLQRRPSVRAVISTVERGAGRGRPQAKPIPEAEEAQRPEPVGTSSNADSASPDLGPRGPDLAVLQAEREVDILNHVFDDVESFVSRLQKSAEAARVLEHRERGRRSRRRAAGEGLLTLRAKPPSEAEYTDVLQKIKYAFSLLARLRGNIADPSSPELLHFLFGPLQMIVNTSGGPEFASSVRRPHLTSDAVALLRDNVTPRENELWTSLGDSWTRPGLELSPEEGPPYRPEFFSGWEPPVTDPQSRAWEDPVEKQLQHERRRRQQSAPQVAVNGHRDLEPESEPQLESETAGKWVLCNYDFQARNSSELSVKQRDVLEVLDDSRKWWKVRDPAGQEGYVPYNILTPYPGPRLHHSQSPARSLNSTPPPPPAPAPAPPPALARPRWDRPRWDSCDSLNGLDPSEKEKFSQMLIVNEELQARLAQGRSGPSRAVPGPRAPEPQLSPGSDASEVRAWLQAKGFSSGTVDALGVLTGAQLFSLQKEELRAVSPEEGARVYSQVTVQRSLLEDKEKVSELEAVMEKQKKKVEGEVEMEVI

SEQ ID NO: 27829 - protein, 596 aa, Homo sapiens
  Payload ID: 5494
  Gene Symbol: EPS8L1
  Gene Name: EPS8-like 1
  Uniprot ID: Q8TE68
  ENSP ID: ENSP00000245618
MNRTWPRRIWGSSQDEAELIREDIQGALHNYRSGRGERRAAALRATQEELQRDRSPAAETPPLQRRPSVRAVISTVERGAGRGRPQAKPIPEAEEAQRPEPVGTSSNADSASPDLGPRGPDLAVLQAEREVDILNHVFDDVESFVSRLQKSAEAARVLEHRERGRRSRRRAAGEGLLTLRAKPPSEAEYTDVLQKIKYAFSLLARLRGNIADPSSPELLHFLFGPLQMIVNTSGGPEFASSVRRPHLTSDAVALLRDNVTPRENELWTSLGDSWTRPGLELSPEEGPPYRPEFFSGWEPPVTDPQSRAWEDPVEKQLQHERRRRQQSAPQVAVNGHRDLEPESEPQLESETAGKWVLCNYDFQARNSSELSVKQRDVLEVLDDSRKWWKVRDPAGQEGYVPYNILTPYPGPRLHHSQSPARSLNSTPPPPPAPAPAPPPALARPRWDRPRWDSCDSLNGLDPSEKEKFSQMLIVNEELQARLAQGRSGPSRAVPGPRAPEPQLSPGSDASEVRAWLQAKGFSSGTVDALGVLTGAQLFSLQKEELRAVSPEEGARVYSQVTVQRSLLEDKEKVSELEAVMEKQKKKVEGEVEMEVI

SEQ ID NO: 27830 - protein, 659 aa, Homo sapiens
  Payload ID: 5494
  Gene Symbol: EPS8L1
  Gene Name: EPS8-like 1
  ENSP ID: ENSP00000437541
MDSQGRVWAQEMLLRVSPDHVTLLDPASKEELESYPLGAIVRCDAVMPPGRSRSLLLLVCQEPERAQPDVHFFQGLRLGAELIREDIQGALHNYRSGRGERRAAALRATQEELQRDRSPAAETPPLQRRPSVRAVISTVERGAGRGRPQAKPIPEAEEAQRPEPVGTSSNADSASPDLGPRGPDLAVLQAEREVDILNHVFDDVESFVSRLQKSAEAARVLEHRERGRRSRRRAAGEGLLTLRAKPPSEAEYTDVLQKIKYAFSLLARLRGNIADPSSPELLHFLFGPLQMIVNTSGGPEFASSVRRPHLTSDAVALLRDNVTPRENELWTSLGDSWTRPGLELSPEEGPPYRPEFFSGWEPPVTDPQSRAWEDPVEKQLQHERRRRQQSAPQVAVNGHRDLEPESEPQLESETAGKWVLCNYDFQARNSSELSVKQRDVLEVLDDSRKWWKVRDPAGQEGYVPYNILTPYPGPRLHHSQSPARSLNSTPPPPPAPAPAPPPALARPRWDRPRWDSCDSLNGLDPSEKEKFSQMLIVNEELQARLAQGRSGPSRAVPGPRAPEPQLSPGSDASEVRAWLQAKGFSSGTVDALGVLTGAQLFSLQKEELRAVSPEEGARVYSQVTVQRSLLEDKEKVSELEAVMEKQKKKVEGEVEMEVI

SEQ ID NO: 27831 - protein, 428 aa, Homo sapiens
  Payload ID: 5494
  Gene Symbol: EPS8L1
  Gene Name: EPS8-like 1
  ENSP ID: ENSP00000465830
MHLVTFCLGEDDGVHTVEDASRKLAVMDSQGRVWAQEMLLRVSPDHVTLLDPASKEELESYPLGAIVRCDAVMPPGRSRSLLLLVCQEPERAQPDVHFFQGLRLGAELIREDIQGALHNYRSGRGERRAAALRATQEELQRDRSPAAETPPLQRRPSVRAVISTVERGAGRGRPQAKPIPEAEEAQRPEPVGTSSNADSASPDLGPRGPDLAVLQAEREVDILNHVFDDVESFVSRLQKSAEAARVLEHRERGRRSRRRAAGEGLLTLRAKPPSEAEYTDVLQKIKYAFSLLARLRGNIADPSSPELLHFLFGPLQMIVNTSGGPEFASSVRRPHLTSDAVALLRDNVTPRENELWTSLGDSWTRPGLELSPEEGPPYRPEFFSGWEPPVTDPQSRAWEDPVEKQLQHERRRRQQSAPQVAVNGWVRW

SEQ ID NO: 27832 - protein, 409 aa, Homo sapiens
  Payload ID: 5494
  Gene Symbol: EPS8L1
  Gene Name: EPS8-like 1
  ENSP ID: ENSP00000466245
MNRTWPRRIWGSSQDEVGFASSVRRPHLTSDAVALLRDNVTPRENELWTSLGDSWTRPGLELSPEEGPPYRPEFFSGWEPPVTDPQSRAWEDPVEKQLQHERRRRQVTQATQQGRGWEVRGRGRSAWPRLTRLSYFLQQSAPQVAVNGHRDLEPESEPQLESETAGKWVLCNYDFQARNSSELSVKQRDVLEVLDDSRKWWKVRDPAGQEGYVPYNILTPYPGPRLHHSQSPARSLNSTPPPPPAPAPAPPPALARPRWDRPRWDSCDSLNGLDPSEKEKFSQMLIVNEELQARLAQGRSGPSRAVPGPRAPEPQLSPGSDASEVRAWLQAKGFSSGTVDALGVLTGAQLFSLQKEELRAVSPEEGARVYSQVTVQRSLLEDKEKVSELEAVMEKQKKKVEGEVEMEVI

SEQ ID NO: 27833 - protein, 548 aa, Homo sapiens
  Payload ID: 5494
  Gene Symbol: EPS8L1
  Gene Name: EPS8-like 1
  ENSP ID: ENSP00000466828
MGRKAIVLAIANTSLAFPLCQHLVTFCLGEDDGVHTVEDASRKLAVMDSQGRVWAQEMLLRVSPDHVTLLDPASKEELESYPLGAIVRCDAVMPPGRSRSLLLLVCQEPERAQPDVHFFQGLRLGAELIREDIQGALHNYRSGRGERRAAALRATQEELQRDRSPAAETPPLQRRPSVRAVISTVERGAGRGRPQAKPIPEAEEAQRPEPVGTSSNADSASPDLGPRGPDLAVLQAEREVDILNHVFDDVESFVSRLQKSAEAARVLEHRERGRRSRRRAAGEGLLTLRAKPPSEAEYTDVLQKIKYAFSLLARLRGNIADPSSPELLHFLFGPLQMIVNTSGGPEFASSVRRPHLTSDAVALLRDNVTPRENELWTSLGDSWTRPGLELSPEEGPPYRPEFFSGWEPPVTDPQSRAWEDPVEKQLQHERRRRQVTQATQQGRGWEVRGRGRSAWPRLTRLSYFLQQSAPQVAVNGHRDLEPESEPQLESETAGKWVLCNYDFQARNSSELSVKQRDVLEDKEKVSELEAVMEKQKKKVEGEVEMEVI

SEQ ID NO: 27834 - protein, 715 aa, Homo sapiens
  Payload ID: 5495
  Gene Symbol: EPS8L2
  Gene Name: EPS8-like 2
  Uniprot ID: Q9H6S3
  ENSP ID: ENSP00000320828
MSQSGAVSCCPGATNGSLGRSDGVAKMSPKDLFEQRKKYSNSNVIMHETSQYHVQHLATFIMDKSEAITSVDDAIRKLVQLSSKEKIWTQEMLLQVNDQSLRLLDIESQEELEDFPLPTVQRSQTVLNQLRYPSVLLLVCQDSEQSKPDVHFFHCDEVEAELVHEDIESALADCRLGKKMRPQTLKGHQEKIRQRQSILPPPQGPAPIPFQHRGGDSPEAKNRVGPQVPLSEPGFRRRESQEEPRAVLAQKIEKETQILNCALDDIEWFVARLQKAAEAFKQLNQRKKGKKKGKKAPAEGVLTLRARPPSEGEFIDCFQKIKLAINLLAKLQKHIQNPSAAELVHFLFGPLDLIVNTCSGPDIARSVSCPLLSRDAVDFLRGHLVPKEMSLWESLGESWMRPRSEWPREPQVPLYVPKFHSGWEPPVDVLQEAPWEVEGLASAPIEEVSPVSRQSIRNSQKHSPTSEPTPPGDALPPVSSPHTHRGYQPTPAMAKYVKILYDFTARNANELSVLKDEVLEVLEDGRQWWKLRSRSGQAGYVPCNILGEARPEDAGAPFEQAGQKYWGPASPTHKLPPSFPGNKDELMQHMDEVNDELIRKISNIRAQPQRHFRVERSQPVSQPLTYESGPDEVRAWLEAKAFSPRIVENLGILTGPQLFSLNKEELKKVCGEEGVRVYSQLTMQKAFLEKQQSGSELEELMNKFHSMNQRRGEDS

SEQ ID NO: 27835 - protein, 95 aa, Homo sapiens
  Payload ID: 5495
  Gene Symbol: EPS8L2
  Gene Name: EPS8-like 2
  ENSP ID: ENSP00000432765
MSQSGAVSCCPGATNGSLGRSDGVAKMSPKDLFEQRKKYSNSNVIMHETSQYHVQHLATFIMDKSEAITSVDDAIRKLVQLSSKEKIWTQEMLLQ

SEQ ID NO: 27836 - protein, 79 aa, Homo sapiens
  Payload ID: 5495
  Gene Symbol: EPS8L2
  Gene Name: EPS8-like 2
  ENSP ID: ENSP00000432923
MSQSGAVSCCPGATNGSLGRSDGVAKMSPKDLFEQRKKYSNSNVIMHETSQYHVQHLATFIMDKSEAITSVDDAIRKLV

SEQ ID NO: 27837 - protein, 139 aa, Homo sapiens
  Payload ID: 5495
  Gene Symbol: EPS8L2
  Gene Name: EPS8-like 2
  ENSP ID: ENSP00000433057
  MOD_RES (1)..(1): Any amino acid
XQRQSILPPPQGPAPIPFQHRGGDSPEAKNRVGPQVPLSEPGFRRRESQEEPRAVLAQKIEKETQILNCALDDIEWFVARLQKAAEAFKQLNQRKKGKKKGKKAPADRQHLQWPRHRTLRLLPTALPRCRGLPARPPGP

SEQ ID NO: 27838 - protein, 35 aa, Homo sapiens
  Payload ID: 5495
  Gene Symbol: EPS8L2
  Gene Name: EPS8-like 2
  ENSP ID: ENSP00000433173
MSQSGAVSCCPGATNGSLGRSDGVAKMSPKDLFGE

SEQ ID NO: 27839 - protein, 83 aa, Homo sapiens
  Payload ID: 5495
  Gene Symbol: EPS8L2
  Gene Name: EPS8-like 2
  ENSP ID: ENSP00000433223
MSQSGAVSCCPGATNGSLGRSDGVAKMSPKDLFEQRKKYSNSNVIMHETSQYHVQHLATFIMDKSEAITSVDDAIRKLVQLSS

SEQ ID NO: 27840 - protein, 105 aa, Homo sapiens
  Payload ID: 5495
  Gene Symbol: EPS8L2
  Gene Name: EPS8-like 2
  ENSP ID: ENSP00000435128
MSQSGAVSCCPGATNGSLGRSDGVAKMSPKDLFEQRKKYSNSNVIMHETSQYHVQHLATFIMDKSEAITSVDDAIRKLVQLSSKEKIWTQEMLLQVNDQSLRLLD

SEQ ID NO: 27841 - protein, 715 aa, Homo sapiens; identical to SEQ ID NO: 27834
  Payload ID: 5495
  Gene Symbol: EPS8L2
  Gene Name: EPS8-like 2
  Uniprot ID: Q9H6S3
  ENSP ID: ENSP00000435585

SEQ ID NO: 27842 - protein, 715 aa, Homo sapiens; identical to SEQ ID NO: 27834
  Payload ID: 5495
  Gene Symbol: EPS8L2
  Gene Name: EPS8-like 2
  Uniprot ID: Q9H6S3
  ENSP ID: ENSP00000436035

SEQ ID NO: 27843 - protein, 731 aa, Homo sapiens
  Payload ID: 5495
  Gene Symbol: EPS8L2
  Gene Name: EPS8-like 2
  Uniprot ID: Q9H6S3
  ENSP ID: ENSP00000436230
MSQSGAVSCCPGATNGSLGRSDGVAKMSPKDLFEQRKKYSNSNVIMHETSQYHVQHLATFIMDKSEAITSVDDAIRKLVQLSSKEKIWTQEMLLQVNDQSLRLLDIESQSAQTPGASRVRAMYPQEELEDFPLPTVQRSQTVLNQLRYPSVLLLVCQDSEQSKPDVHFFHCDEVEAELVHEDIESALADCRLGKKMRPQTLKGHQEKIRQRQSILPPPQGPAPIPFQHRGGDSPEAKNRVGPQVPLSEPGFRRRESQEEPRAVLAQKIEKETQILNCALDDIEWFVARLQKAAEAFKQLNQRKKGKKKGKKAPAEGVLTLRARPPSEGEFIDCFQKIKLAINLLAKLQKHIQNPSAAELVHFLFGPLDLIVNTCSGPDIARSVSCPLLSRDAVDFLRGHLVPKEMSLWESLGESWMRPRSEWPREPQVPLYVPKFHSGWEPPVDVLQEAPWEVEGLASAPIEEVSPVSRQSIRNSQKHSPTSEPTPPGDALPPVSSPHTHRGYQPTPAMAKYVKILYDFTARNANELSVLKDEVLEVLEDGRQWWKLRSRSGQAGYVPCNILGEARPEDAGAPFEQAGQKYWGPASPTHKLPPSFPGNKDELMQHMDEVNDELIRKISNIRAQPQRHFRVERSQPVSQPLTYESGPDEVRAWLEAKAFSPRIVENLGILTGPQLFSLNKEELKKVCGEEGVRVYSQLTMQKAFLEKQQSGSELEELMNKFHSMNQRRGEDS

SEQ ID NO: 27844 - protein, 25 aa, Homo sapiens
  Payload ID: 5495
  Gene Symbol: EPS8L2
  Gene Name: EPS8-like 2
  ENSP ID: ENSP00000437085
MSQSGAVSCCPGATNGSLGRSDGVA

SEQ ID NO: 27845 - protein, 167 aa, Homo sapiens
  Payload ID: 5495
  Gene Symbol: EPS8L2
  Gene Name: EPS8-like 2
  ENSP ID: ENSP00000437145
  MOD_RES (1)..(1): Any amino acid
XKIRQRQSILPPPQGPAPIPFQHRGGDSPEAKNRVGPQVPLSEPGFRRRESQEEPRAVLAQKIEKETQILNCALDDIEWFVARLQKAAEAFKQLNQRKKGKKKGKKAPAGKAAEAHPEPQRRGARALPLRASGPDRQHLQWPRHRTLRLLPTALPRCRGLPARPPGP

SEQ ID NO: 27846 - protein, 731 aa, Homo sapiens; identical to SEQ ID NO: 27843
  Payload ID: 5495
  Gene Symbol: EPS8L2
  Gene Name: EPS8-like 2
  Uniprot ID: Q9H6S3
  ENSP ID: ENSP00000480201

SEQ ID NO: 27847 - protein, 232 aa, Homo sapiens [sequence omitted]

SEQ ID NO: 27848 - protein, 563 aa, Homo sapiens
  Payload ID: 5496
  Gene Symbol: EPS8L3
  Gene Name: EPS8-like 3
  Uniprot ID: Q8TE67
  ENSP ID: ENSP00000354551
MSRPSSRAIYLHRKEYSQNLTSEPTLLQHRVEHLMTCKQGSQRVQGPEDALQKLFEMDAQGRVWSQDLILQVRDGWLQLLDIETKEELDSYRLDSIQAMNVALNTCSYNSILSITVQEPGLPGTSTLLFQCQEVGAERLKTSLQKALEEELEQRPRLGGLQPGQDRWRGPAMERPLPMEQARYLEPGIPPEQPHQRTLEHSLPPSPRPLPRHTSAREPSAFTLPPPRRSSSPEDPERDEEVLNHVLRDIELFMGKLEKAQAKTSRKKKFGKKNKDQGGLTQAQYIDCFQKIKHSFNLLGRLATWLKETSAPELVHILFKSLNFILARCPEAGLAAQVISPLLTPKAINLLQSCLSPPESNLWMGLGPAWTTSRADWTGDEPLPYQPTFSDDWQLPEPSSQAPLGYQDPVSLRPSSPKPAQPALKMQVLYEFEARNPRELTVVQGEKLEVLDHSKRWWLVKNEAGRSGYIPSNILEPLQPGTPGTQGQSPSRVPMLRLSSRPEEVTDWLQAENFSTATVRTLGSLTGSQLLRIRPGELQMLCPQEAPRILSRLEAVRRMLGISP

SEQ ID NO: 27849 - protein, 593 aa, Homo sapiens
  Payload ID: 5496
  Gene Symbol: EPS8L3
  Gene Name: EPS8-like 3
  Uniprot ID: Q8TE67
  ENSP ID: ENSP00000355255
MSRPSSRAIYLHRKEYSQNLTSEPTLLQHRVEHLMTCKQGSQRVQGPEDALQKLFEMDAQGRVWSQDLILQVRDGWLQLLDIETKEELDSYRLDSIQAMNVALNTCSYNSILSITVQEPGLPGTSTLLFQCQEVGAERLKTSLQKALEEELEQRPRLGGLQPGQDRWRGPAMERPLPMEQARYLEPGIPPEQPHQRTLEHSLPPSPRPLPRHTSAREPSAFTLPPPRRSSSPEDPERDEEVLNHVLRDIELFMGKLEKAQAKTSRKKKFGKKNKDQGGLTQAQYIDCFQKIKHSFNLLGRLATWLKETSAPELVHILFKSLNFILARCPEAGLAAQVISPLLTPKAINLLQSCLSPPESNLWMGLGPAWTTSRADWTGDEPLPYQPTFSDDWQLPEPSSQAPLGYQDPVSLRRGSHRLGSTSHFPQEKTHNHDPQPGDPNSRPSSPKPAQPALKMQVLYEFEARNPRELTVVQGEKLEVLDHSKRWWLVKNEAGRSGYIPSNILEPLQPGTPGTQGQSPSRVPMLRLSSRPEEVTDWLQAENFSTATVRTLGSLTGSQLLRIRPGELQMLCPQEAPRILSRLEAVRRMLGISP

SEQ ID NO: 27850 - protein, 594 aa, Homo sapiens
  Payload ID: 5496
  Gene Symbol: EPS8L3
  Gene Name: EPS8-like 3
  Uniprot ID: Q8TE67
  ENSP ID: ENSP00000358820
MSRPSSRAIYLHRKEYSQNLTSEPTLLQHRVEHLMTCKQGSQRVQGPEDALQKLFEMDAQGRVWSQDLILQVRDGWLQLLDIETKEELDSYRLDSIQAMNVALNTCSYNSILSITVQEPGLPGTSTLLFQCQEVGAERLKTSLQKALEEELEQSRPRLGGLQPGQDRWRGPAMERPLPMEQARYLEPGIPPEQPHQRTLEHSLPPSPRPLPRHTSAREPSAFTLPPPRRSSSPEDPERDEEVLNHVLRDIELFMGKLEKAQAKTSRKKKFGKKNKDQGGLTQAQYIDCFQKIKHSFNLLGRLATWLKETSAPELVHILFKSLNFILARCPEAGLAAQVISPLLTPKAINLLQSCLSPPESNLWMGLGPAWTTSRADWTGDEPLPYQPTFSDDWQLPEPSSQAPLGYQDPVSLRRGSHRLGSTSHFPQEKTHNHDPQPGDPNSRPSSPKPAQPALKMQVLYEFEARNPRELTVVQGEKLEVLDHSKRWWLVKNEAGRSGYIPSNILEPLQPGTPGTQGQSPSRVPMLRLSSRPEEVTDWLQAENFSTATVRTLGSLTGSQLLRIRPGELQMLCPQEAPRILSRLEAVRRMLGISP

SEQ ID NO: 27851 - protein, 39 aa, Homo sapiens
  Payload ID: 5496
  Gene Symbol: EPS8L3
  Gene Name: EPS8-like 3
  ENSP ID: ENSP00000483789
MSRPSSRAIYLHRKEYSQNLTSEPTLLQHRVEHACGPPL

SEQ ID NO: 27852 - protein, 550 aa, Homo sapiens
  Payload ID: 5497
  Gene Symbol: EPN1
  Gene Name: epsin 1
  Uniprot ID: Q9Y6I3
  ENSP ID: ENSP00000085079
MSTSSLRRQMKNIVHNYSEAEIKVREATSNDPWGPSSSLMSEIADLTYNVVAFSEIMSMIWKRLNDHGKNWRHVYKAMTLMEYLIKTGSERVSQQCKENMYAVQTLKDFQYVDRDGKDQGVNVREKAKQLVALLRDEDRLREERAHALKTKEKLAQTATASSAAVGSGPPPEAEQAWPQSSGEEELQLQLALAMSKEEADQEERIRRGDDLRLQMAIEESKRETGGKEESSLMDLADVFTAPAPAPTTDPWGGPAPMAAAVPTAAPTSDPWGGPPVPPAADPWGGPAPTPASGDPWRPAAPAGPSVDPWGGTPAPAAGEGPTPDPWGSSDGGVPVSGPSASDPWTPAPAFSDPWGGSPAKPSTNGTTAGGFDTEPDEFSDFDRLRTALPTSGSSAGELELLAGEVPARSPGAFDMSGVRGSLAEAVGSPPPAATPTPTPPTRKTPESFLGPNAALVDLDSLVSRPGPTPPGAKASNPFLPGGGPATGPSVTNPFQPAPPATLTLNQLRLSPVPPVPGAPPTYISPLGGGPGLPPMMPPGPPAPNTNPFLL

SEQ ID NO: 27853 - protein, 576 aa, Homo sapiens
  Payload ID: 5497
  Gene Symbol: EPN1
  Gene Name: epsin 1
  Uniprot ID: Q9Y6I3
  ENSP ID: ENSP00000270460
MSTSSLRRQMKNIVHNYSEAEIKVREATSNDPWGPSSSLMSEIADLTYNVVAFSEIMSMIWKRLNDHGKNWRHVYKAMTLMEYLIKTGSERVSQQCKENMYAVQTLKDFQYVDRDGKDQGVNVREKAKQLVALLRDEDRLREERAHALKTKEKLAQTATASSAAVGSGPPPEAEQAWPQSSGEEELQLQLALAMSKEEADQPPSCGPEDDAQLQLALSLSREEHDKEERIRRGDDLRLQMAIEESKRETGGKEESSLMDLADVFTAPAPAPTTDPWGGPAPMAAAVPTAAPTSDPWGGPPVPPAADPWGGPAPTPASGDPWRPAAPAGPSVDPWGGTPAPAAGEGPTPDPWGSSDGGVPVSGPSASDPWTPAPAFSDPWGGSPAKPSTNGTTAAGGFDTEPDEFSDFDRLRTALPTSGSSAGELELLAGEVPARSPGAFDMSGVRGSLAEAVGSPPPAATPTPTPPTRKTPESFLGPNAALVDLDSLVSRPGPTPPGAKASNPFLPGGGPATGPSVTNPFQPAPPATLTLNQLRLSPVPPVPGAPPTYISPLGGGPGLPPMMPPGPPAPNTNPFLL

SEQ ID NO: 27854 - protein, 662 aa, Homo sapiens
  Payload ID: 5497
  Gene Symbol: EPN1
  Gene Name: epsin 1
  Uniprot ID: Q9Y6I3
  ENSP ID: ENSP00000406209
MGDQSWLWNQAAPGVRSPVFACSVEKGNVPLVLSEHLAHSRDPGSGAVRFLISPEPWASAILGTSGLLASPVLPAALDAVTCQHLPQPSSGSRPISPRIGALCPLLLQPGTMSTSSLRRQMKNIVHNYSEAEIKVREATSNDPWGPSSSLMSEIADLTYNVVAFSEIMSMIWKRLNDHGKNWRHVYKAMTLMEYLIKTGSERVSQQCKENMYAVQTLKDFQYVDRDGKDQGVNVREKAKQLVALLRDEDRLREERAHALKTKEKLAQTATASSAAVGSGPPPEAEQAWPQSSGEEELQLQLALAMSKEEADQEERIRRGDDLRLQMAIEESKRETGGKEESSLMDLADVFTAPAPAPTTDPWGGPAPMAAAVPTAAPTSDPWGGPPVPPAADPWGGPAPTPASGDPWRPAAPAGPSVDPWGGTPAPAAGEGPTPDPWGSSDGGVPVSGPSASDPWTPAPAFSDPWGGSPAKPSTNGTTAAGGFDTEPDEFSDFDRLRTALPTSGSSAGELELLAGEVPARSPGAFDMSGVRGSLAEAVGSPPPAATPTPTPPTRKTPESFLGPNAALVDLDSLVSRPGPTPPGAKASNPFLPGGGPATGPSVTNPFQPAPPATLTLNQLRLSPVPPVPGAPPTYISPLGGGPGLPPMMPPGPPAPNTNPFLL

SEQ ID NO: 27855 - protein, 60 aa, Homo sapiens
  Payload ID: 5497
  Gene Symbol: EPN1
  Gene Name: epsin 1
  ENSP ID: ENSP00000466593
  MOD_RES (1)..(1): Any amino acid
XKPSTNGTTAAGGFDTEPDEFSDFDRLRTALPTSGSSAAYWTRLPPGFYSLNSYRSCFIR

SEQ ID NO: 27856 - protein, 584 aa, Homo sapiens
  Payload ID: 5498
  Gene Symbol: EPN2
  Gene Name: epsin 2
  Uniprot ID: O95208
  ENSP ID: ENSP00000261495
MTTSSIRRQMKNIVNNYSEAEIKVREATSNDPWGPSSSLMTEIADLTYNVVAFSEIMSMVWKRLNDHGKNWRHVYKALTLLDYLIKTGSERVAQQCRENIFAIQTLKDFQYIDRDGKDQGINVREKSKQLVALLKDEERLKAERAQALKTKERMAQVATGMGSNQITFGRGSSQPNLSTSHSEQEYGKAGGSPASYHGSTSPRVSSELEQARPQTSGEEELQLQLALAMSREVAEQEERLRRGDDLRLQMALEESRRDTVKIPKKKEHGSLPQQTTLLDLMDALPSSGPAAQKAEPWGPSASTNQTNPWGGPAAPASTSDPWPSFGTKPAASIDPWGVPTGATVQSVPKNSDPWAASQQPASSAGKRASDAWGAVSTTKPVSVSGSFELFSNLNGTIKDDFSEFDNLRTSKKTAESVTSLPSQNNGTTSPDPFESQPLTVASSKPSSARKTPESFLGPNAALVNLDSLVTRPAPPAQSLNPFLAPGAPATSAPVNPFQVNQPQPLTLNQLRGSPVLGTSTSFGPGPGVESMAVASMTSAAPQPALGATGSSLTPLGPAMMNMVGSVGIPPSAAQATGTTNPFLL

SEQ ID NO: 27857 - protein, 641 aa, Homo sapiens
  Payload ID: 5498
  Gene Symbol: EPN2
  Gene Name: epsin 2
  Uniprot ID: O95208
  ENSP ID: ENSP00000320543
MTTSSIRRQMKNIVNNYSEAEIKVREATSNDPWGPSSSLMTEIADLTYNVVAFSEIMSMVWKRLNDHGKNWRHVYKALTLLDYLIKTGSERVAQQCRENIFAIQTLKDFQYIDRDGKDQGINVREKSKQLVALLKDEERLKAERAQALKTKERMAQVATGMGSNQITFGRGSSQPNLSTSHSEQEYGKAGGSPASYHGSPEASLCPQHRTGAPLGQSEELQPLSQRHPFLPHLGLASRPNGDWSQPCLTCDRAARATSPRVSSELEQARPQTSGEEELQLQLALAMSREVAEQEERLRRGDDLRLQMALEESRRDTVKIPKKKEHGSLPQQTTLLDLMDALPSSGPAAQKAEPWGPSASTNQTNPWGGPAAPASTSDPWPSFGTKPAASIDPWGVPTGATVQSVPKNSDPWAASQQPASSAGKRASDAWGAVSTTKPVSVSGSFELFSNLNGTIKDDFSEFDNLRTSKKTAESVTSLPSQNNGTTSPDPFESQPLTVASSKPSSARKTPESFLGPNAALVNLDSLVTRPAPPAQSLNPFLAPGAPATSAPVNPFQVNQPQPLTLNQLRGSPVLGTSTSFGPGPGVESMAVASMTSAAPQPALGATGSSLTPLGPAMMNMVGSVGIPPSAAQATGTTNPFLL

SEQ ID NO: 27858 - protein, 356 aa, Homo sapiens
  Payload ID: 5498
  Gene Symbol: EPN2
  Gene Name: epsin 2
  Uniprot ID: O95208
  ENSP ID: ENSP00000378980
MSREVAEQEERLRRGDDLRLQMALEESRRDTVKIPKKKEHGSLPQQTTLLDLMDALPSSGPAAQKAEPWGPSASTNQTNPWGGPAAPASTSDPWPSFGTKPAASIDPWGVPTGATVQSVPKNSDPWAASQQPASSAGKRASDAWGAVSTTKPVSVSGSFELFSNLNGTIKDDFSEFDNLRTSKKTAESVTSLPSQNNGTTSPDPFESQPLTVASSKPSSARKTPESFLGPNAALVNLDSLVTRPAPPAQSLNPFLAPGAPATSAPVNPFQVNQPQPLTLNQLRGSPVLGTSTSFGPGPGVESMAVASMTSAAPQPALGATGSSLTPLGPAMMNMVGSVGIPPSAAQATGTTNPFLL

SEQ ID NO: 27859 - protein, 584 aa, Homo sapiens; identical to SEQ ID NO: 27856
  Payload ID: 5498
  Gene Symbol: EPN2
  Gene Name: epsin 2
  Uniprot ID: O95208
  ENSP ID: ENSP00000378982

SEQ ID NO: 27860 - protein, 484 aa, Homo sapiens
  Payload ID: 5498
  Gene Symbol: EPN2
  Gene Name: epsin 2
  ENSP ID: ENSP00000378988
MTTSSIRRQMKNIVNNYSEAEIKVREATSNDPWGPSSSLMTEIADLTYNVVAFSEIMSMVWKRLNDHGKNWRHVYKALTLLDYLIKTGSERVAQQCRENIFAIQTLKDFQYIDRDGKDQGINVREKSKQLVALLKDEERLKAERAQALKTKERMAQVATGMGSNQITFGRGSSQPNLSTSHSEQEYGKAGGSPASYHGSPEASLCPQHRTGAPLGQSEELQPLSQRHPFLPHLGLASRPNGDWSQPCLTCDRAARATSPRVSSELEQARPQTSGEEELQLQLALAMSREVAEQEERLRRGDDLRLQMALEESRRDTVKIPKKKEHGSLPQQTTLLDLMDALPSSGPAAQKAEPWGPSASTNQTNPWGGPAAPASTSDPWPSFGTKPAASIDPWGVPTGATVQSVPKNSDPWAASQQPASSAGKRASDAWGAVSTTKPVSVSGSFELFSNLNGTIKDDFSEFDNLRTSKKTGMQGLTGLLFTMEI

SEQ ID NO: 27861 - protein, 409 aa, Homo sapiens
  Payload ID: 5498
  Gene Symbol: EPN2
  Gene Name: epsin 2
  ENSP ID: ENSP00000378990
MTTSSIRRQMKNIVNNYSEAEIKVREATSNDPWGPSSSLMTEIADLTYNVVAFSEIMSMVWKRLNDHGKNWRHVYKALTLLDYLIKTGSERVAQQCRENIFAIQTLKDFQYIDRDGKDQGINVREKSKQLVALLKDEERLKAERAQALKTKERMAQVATGMGSNQITFGRGSSQPNLSTSHSEQEYGKAGGSPASYHGSTSPRVSSELEQARPQTSGEEELQLQLALAMSREVAEQEERLRRGDDLRLQMALEESRRDTVKIPKKKEHGSLPQQTTLLDLMDALPSSGPAAQKAEPWGPSASTNQTNPWGGPAAPASTSDPWPSFGTKPAASIDPWGVPTGATVQSVPKNSDPWAASQQPASSAGKRASDAWGAVSTTKPVSVSGSFELFSNLNGTIKDDFSEFDNLRT

SEQ ID NO: 27862 - protein, 577 aa, Homo sapiens
  Payload ID: 5498
  Gene Symbol: EPN2
  Gene Name: epsin 2
  ENSP ID: ENSP00000459542
MTTSSIRRQMKNIVNNYSEAEIKVREATSNDPWGPSSSLMTEIADLTYNVVAFSEIMSMVWKRLNDHGKNWRHVYKALTLLDYLIKTGSERVAQQCRENIFAIQTLKDFQYIDRDGKDQGINVREKSKQLVALLKDEERLKAERAQALKTKERMAQVATGMGSNQITFGRGSSQPNLSTSHSEQEYGKAGGSPASYHGSTSPRVSSELEQARPQTSGEEELQLQLALAMSREVAEQEERLRRGDDLRLQMALEESRRDTVKIPKKKETTLLDLMDALPSSGPAAQKAEPWGPSASTNQTNPWGGPAAPASTSDPWPSFGTKPAASIDPWGVPTGATVQSVPKNSDPWAASQQPASSAGKRASDAWGAVSTTKPVSVSGSFELFSNLNGTIKDDFSEFDNLRTSKKTAESVTSLPSQNNGTTSPDPFESQPLTVASSKPSSARKTPESFLGPNAALVNLDSLVTRPAPPAQSLNPFLAPGAPATSAPVNPFQVNQPQPLTLNQLRGSPVLGTSTSFGPGPGVESMAVASMTSAAPQPALGATGSSLTPLGPAMMNMVGSVGIPPSAAQATGTTNPFLL

SEQ ID NO: 27863 - protein, 349 aa, Homo sapiens
  Payload ID: 5498
  Gene Symbol: EPN2
  Gene Name: epsin 2
  ENSP ID: ENSP00000459678
MSREVAEQEERLRRGDDLRLQMALEESRRDTVKIPKKKETTLLDLMDALPSSGPAAQKAEPWGPSASTNQTNPWGGPAAPASTSDPWPSFGTKPAASIDPWGVPTGATVQSVPKNSDPWAASQQPASSAGKRASDAWGAVSTTKPVSVSGSFELFSNLNGTIKDDFSEFDNLRTSKKTAESVTSLPSQNNGTTSPDPFESQPLTVASSKPSSARKTPESFLGPNAALVNLDSLVTRPAPPAQSLNPFLAPGAPATSAPVNPFQVNQPQPLTLNQLRGSPVLGTSTSFGPGPGVESMAVASMTSAAPQPALGATGSSLTPLGPAMMNMVGSVGIPPSAAQATGTTNPFLL

SEQ ID NO: 27864 - protein, 251 aa, Homo sapiens
  Payload ID: 5498
  Gene Symbol: EPN2
  Gene Name: epsin 2
  ENSP ID: ENSP00000460193
MSREVAEQEERLRRGDDLRLQMALEESRRDTVKIPKKKEQTTLLDLMDALPSSGPAAQKAEPWGPSASTNQTNPWGGPAAPASTSDPWPSFGTKPAASIDPWGVPTGATVQSVPKNSDPWAASQQPASSAGKRASDAWGAVSTTKPVSVSGSFELFSNLNGTIKDDFSEFDNLRTSKKTAESVTSLPSQNNGTTSPDPFESQPLTVASSKPSSARKTPESFLGPNAALVNLDSLVTRPAPPAQSLNPFLAP

SEQ ID NO: 27865 - protein, 62 aa, Homo sapiens
  Payload ID: 5498
  Gene Symbol: EPN2
  Gene Name: epsin 2
  ENSP ID: ENSP00000462392
MTTSSIRRQMKNIVNNYSEAEIKVREATSNDPWGPSSSLMTEIADLTYNVVAFSEIMSMVWK

SEQ ID NO: 27866 - protein, 75 aa, Homo sapiens
  Payload ID: 5498
  Gene Symbol: EPN2
  Gene Name: epsin 2
  ENSP ID: ENSP00000462426
MTTSSIRRQMKNIVNNYSEAEIKVREATSNDPWGPSSSLMTEIADLTYNVVAFSEIMSMVWKRLNDHGKNWRHVY

SEQ ID NO: 27867 - protein, 32 aa, Homo sapiens
  Payload ID: 5498
  Gene Symbol: EPN2
  Gene Name: epsin 2
  ENSP ID: ENSP00000462465
MTTSSIRRQMKNIVNNYSEAEIKVREATSNDP

SEQ ID NO: 27868 - protein, 20 aa, Homo sapiens
  Payload ID: 5498
  Gene Symbol: EPN2
  Gene Name: epsin 2
  ENSP ID: ENSP00000462606
MTTSSIRRQMKNIVNNYSEA

SEQ ID NO: 27869 - protein, 38 aa, Homo sapiens
  Payload ID: 5498
  Gene Symbol: EPN2
  Gene Name: epsin 2
  ENSP ID: ENSP00000462958
MTTSSIRRQMKNIVNNYSEAEIKVREATSNDPWGPSSS

SEQ ID NO: 27870 - protein, 22 aa, Homo sapiens
  Payload ID: 5498
  Gene Symbol: EPN2
  Gene Name: epsin 2
  ENSP ID: ENSP00000463141
MTTSSIRRQMKNIVNNYSEAEI

SEQ ID NO: 27871 - protein, 95 aa, Homo sapiens
  Payload ID: 5498
  Gene Symbol: EPN2
  Gene Name: epsin 2
  ENSP ID: ENSP00000463627
MTTSSIRRQMKNIVNNYSEAEIKVREATSNDPWGPSSSLMTEIADLTYNVVAFSEIMSMVWKRLNDHGKNWRHVYKALTLLDYLIKTGSERVAQQ

SEQ ID NO: 27872 - protein, 36 aa, Homo sapiens
  Payload ID: 5498
  Gene Symbol: EPN2
  Gene Name: epsin 2
  ENSP ID: ENSP00000463769
MTSDYRWPWKKAEGTQLKFQKRKSMALSHSRLRCWI

SEQ ID NO: 27873 - protein, 632 aa, Homo sapiens
  Payload ID: 5499
  Gene Symbol: EPN3
  Gene Name: epsin 3
  Uniprot ID: Q9H201
  ENSP ID: ENSP00000268933
MTTSALRRQVKNIVHNYSEAEIKVREATSNDPWGPPSSLMSEIADLTFNTVAFTEVMGMLWRRLNDSGKNWRHVYKALTLLDYLLKTGSERVAHQCRENLYTIQTLKDFQYIDRDGKDQGVNVREKVKQVMALLKDEERLRQERTHALKTKERMALEGIGIGSGQLGFSRRYGEDYSRSRGSPSSYNSSSSSPRYTSDLEQARPQTSGEEELQLQLALAMSREEAEKPVPPASHRDEDLQLQLALRLSRQEHEKEVRSWQGDGSPMANGAGAVVHHQRDREPEREERKEEEKLKTSQSSILDLADIFVPALAPPSTHCSADPWDIPGFRPNTEASGSSWGPSADPWSPIPSGTVLSRSQPWDLTPMLSSSEPWGRTPVLPAGPPTTDPWALNSPHHKLPSTGADPWGASLETSDTPGGASTFDPFAKPPESTETKEGLEQALPSGKPSSPVELDLFGDPSPSSKQNGTKEPDALDLGILGEALTQPSKEARACRTPESFLGPSASSLVNLDSLVKAPQVAKTRNPFLTGLSAPSPTNPFGAGEPGRPTLNQMRTGSPALGLAGGPVGAPLGSMTYSASLPLPLSSVPAGLTLPASVSVFPQAGAFAPQPLLPTPSSAGPRPPPPQTGTNPFL

SEQ ID NO: 27874 - protein, 136 aa, Homo sapiens
  Payload ID: 5499
  Gene Symbol: EPN3
  Gene Name: epsin 3
  ENSP ID: ENSP00000421515
MTTSALRRQVKNIVHNYSEAEIKVREATSNDPWGPPSSLMSEIADLTFNTVAFTEVMGMLWRRLNDSGKNWRHVYKALTLLDYLLKTGSERVAHQCRENLYTIQTLKDFQYIDRDGKDQGVNVREKVKQVMALLKD

SEQ ID NO: 27875 - protein, 208 aa, Homo sapiens
  Payload ID: 5499
  Gene Symbol: EPN3
  Gene Name: epsin 3
  Uniprot ID: Q9H201
  ENSP ID: ENSP00000421933
MTTSALRRQVKNIVHNYSEAEIKVREATSNDPWGPPSSLMSEIADLTFNTVAFTEVMGMLWRRLNDSGKNWRHVYKALTLLDYLLKTGSERVAHQCRENLYTIQTLKDFQYIDRDGKDQGVNVREKVKQVMALLKDEERLRQERTHALKTKERMALEGIGIGSGQLGFSRRYGEDYSRSRGSPSSYNCPASDVRGRGTAAAAGPRHEP

SEQ ID NO: 27876 - protein, 50 aa, Homo sapiens
  Payload ID: 5499
  Gene Symbol: EPN3
  Gene Name: epsin 3
  ENSP ID: ENSP00000421936
MTTSALRRQVKNIVHNYSEAEIKWPSPKSWACCGGGSMTAARTGGTCTRL

SEQ ID NO: 27877 - protein, 50 aa, Homo sapiens; identical to SEQ ID NO: 27876
  Payload ID: 5499
  Gene Symbol: EPN3
  Gene Name: epsin 3
  ENSP ID: ENSP00000422201

SEQ ID NO: 27878 - protein, 108 aa, Homo sapiens
  Payload ID: 5499
  Gene Symbol: EPN3
  Gene Name: epsin 3
  ENSP ID: ENSP00000422601
MTTSALRRQVKNIVHNYSEAEIKVREATSNDPWGPPSSLMSEIADLTFNTVAFTEVMGMLWRRLNDSGKNWRHVYKALTLLDYLLKTGSERVAHQCRENLYTIQTLKD

SEQ ID NO: 27879 - protein, 51 aa, Homo sapiens
  Payload ID: 5499
  Gene Symbol: EPN3
  Gene Name: epsin 3
  ENSP ID: ENSP00000422682
MTTSALRRQVKNIVHNYSEAEIKVREATSNDPWGPPSSLMSEIADLTFNTV

SEQ ID NO: 27880 - protein, 11 aa, Homo sapiens
  Payload ID: 5499
  Gene Symbol: EPN3
  Gene Name: epsin 3
  ENSP ID: ENSP00000424306
MTTSALRRQVK

SEQ ID NO: 27881 - protein, 17 aa, Homo sapiens
  Payload ID: 5499
  Gene Symbol: EPN3
  Gene Name: epsin 3
  ENSP ID: ENSP00000426676
MSEIADLTFNTVAFTEV

SEQ ID NO: 27882 - protein, 168 aa, Homo sapiens
  Payload ID: 5499
  Gene Symbol: EPN3
  Gene Name: epsin 3
  ENSP ID: ENSP00000426762
MTTSALRRQVKNIVHNYSEAEIKVREATSNDPWGPPSSLMSEIADLTFNTVAFTEVMGMLWRRLNDSGKNWRHVYKALTLLDYLLKTGSERVAHQCRENLYTIQTLKDFQYIDRDGKDQGVNVREKVKQVMALLKDEERLRQERTHALKTKERMALEGIGIGSGQLGF

SEQ ID NO: 27883 - protein, 318 aa, Homo sapiens
  Payload ID: 5499
  Gene Symbol: EPN3
  Gene Name: epsin 3
  ENSP ID: ENSP00000439512
MTTSALRRQVKNIVHNYSEAEIKVREATSNDPWGPPSSLMSEIADLTFNTVAFTEVMGMLWRRLNDSGKNWRHVYKALTLLDYLLKTGSERVAHQCRENLYTIQTLKDFQYIDRDGKDQGVNVREKVKQVMALLKDEERLRQERTHALKTKERMALEGIGIGSGQLGFSRRYGEDYSRSRGSPSSYNSSSSSPRYTSDLEQARPQTSGEEELQLQLALAMSREEAEKPVPPASHRDEDLQLQLALRLSRQEHEKEVRSWQGDGSPMANGAGAVVHHQRDREPEREERKEEEKLKTSQAPPTSEPRLPLPSTVLHPGLG

SEQ ID NO: 27884 - protein, 318 aa, Homo sapiens; identical to SEQ ID NO: 27883
  Payload ID: 5499
  Gene Symbol: EPN3
  Gene Name: epsin 3
  ENSP ID: ENSP00000460911

SEQ ID NO: 27885 - protein, 229 aa, Homo sapiens
  Payload ID: 5500
  Gene Symbol: EBI3
  Gene Name: Epstein-Barr virus induced 3
  Uniprot ID: Q14213
  ENSP ID: ENSP00000221847
MTPQLLLALVLWASCPPCSGRKGPPAALTLPRVQCRASRYPIAVDCSWTLPPAPNSTSPVSFIATYRLGMAARGHSWPCLQQTPTSTSCTITDVQLFSMAPYVLNVTAVHPWGSSSSFVPFITEHIIKPDPPEGVRLSPLAERQLQVQWEPPGSWPFPEIFSLKYWIRYKRQGAARFHRVGPIEATSFILRAVRPRARYYVQVAAQDLTDYGELSDWSLPATATMSLGK

SEQ ID NO: 27886 - protein, 127 aa, Homo sapiens
  Payload ID: 5501
  Gene Symbol: EQTN
  Gene Name: equatorin, sperm acrosome associated
  Uniprot ID: Q9NQ60
  ENSP ID: ENSP00000369370
MNFILFIFIPGVFSLKSSTLKPTIEALPNVLPLNEDVNKQEEKNEDHTPNYAPANEKNGNYYKDIKQYVFTTQNPNGTESEISVRATTDLNFALKNDKTVNATTYEKSTIEEETTTSEPSHKNIQSI

SEQ ID NO: 27887 - protein, 294 aa, Homo sapiens
  Payload ID: 5501
  Gene Symbol: EQTN
  Gene Name: equatorin, sperm acrosome associated
  Uniprot ID: Q9NQ60
  ENSP ID: ENSP00000369371
MNFILFIFIPGVFSLKSSTLKPTIEALPNVLPLNEDVNKQEEKNEDHTPNYAPANEKNGNYYKDIKQYVFTTQNPNGTESEISVRATTDLNFALKNDKTVNATTYEKSTIEEETTTSEPSHKNIQRSTPNVPAFWTMLAKAINGTAVVMDDKDQLFHPIPESDVNATQGENQPDLEDLKIKIMLGISLMTLLLFVVLLAFCSATLYKLRHLSYKSCESQYSVNPELATMSYFHPSEGVSDTSFSKSAESSTFLGTTSSDMRRSGTRTSESKIMTDIISIGSDNEMHENDESVTR

SEQ ID NO: 27888 - protein, 265 aa, Homo sapiens
  Payload ID: 5501
  Gene Symbol: EQTN
  Gene Name: equatorin, sperm acrosome associated
  Uniprot ID: Q9NQ60
  ENSP ID: ENSP00000441630
MNFILFIFIPGVFSLKSSTLKPTIEALPNVLPLNEDVNKQEEKNEDHTPNYAPANEKNGNYYKDIKQYVFTTQNPNGTESEISVRATTDLNFALKNGSTPNVPAFWTMLAKAINGTAVVMDDKDQLFHPIPESDVNATQGENQPDLEDLKIKIMLGISLMTLLLFVVLLAFCSATLYKLRHLSYKSCESQYSVNPELATMSYFHPSEGVSDTSFSKSAESSTFLGTTSSDMRRSGTRTSESKIMTDIISIGSDNEMHENDESVTR

SEQ ID NO: 27889 - protein, 657 aa, Homo sapiens
  Payload ID: 5502
  Gene Symbol: EDEM1
  Gene Name: ER degradation enhancer, mannosidase alpha-like 1
  Uniprot ID: Q92611
  ENSP ID: ENSP00000256497
MQWRALVLGLVLLRLGLHGVLWLVFGLGPSMGFYQRFPLSFGFQRLRSPDGPASPTSGPVGRPGGVSGPSWLQPPGTGAAQSPRKAPRRPGPGMCGPANWGYVLGGRGRGPDEYEKRYSGAFPPQLRAQMRDLARGMFVFGYDNYMAHAFPQDELNPIHCRGRGPDRGDPSNLNINDVLGNYSLTLVDALDTLAIMGNSSEFQKAVKLVINTVSFDKDSTVQVFEATIRVLGSLLSAHRIITDSKQPFGDMTIKDYDNELLYMAHDLAVRLLPAFENTKTGIPYPRVNLKTGVPPDTNNETCTAGAGSLLVEFGILSRLLGDSTFEWVARRAVKALWNLRSNDTGLLGNVVNIQTGHWVGKQSGLGAGLDSFYEYLLKSYILFGEKEDLEMFNAAYQSIQNYLRRGREACNEGEGDPPLYVNVNMFSGQLMNTWIDSLQAFFPGLQVLIGDVEDAICLHAFYYAIWKRYGALPERYNWQLQAPDVLFYPLRPELVESTYLLYQATKNPFYLHVGMDILQSLEKYTKVKCGYATLHHVIDKSTEDRMESFFLSETCKYLYLLFDEDNPVHKSGTRYMFTTEGHIVSVDEHLRELPWKEFFSEEGGQDQGGKSVHRPKPHELKVINSSSNCNRVPDERRYSLPLKSIYMRQIDQMVGLI

SEQ ID NO: 27890 - protein, 78 aa, Homo sapiens
  Payload ID: 5502
  Gene Symbol: EDEM1
  Gene Name: ER degradation enhancer, mannosidase alpha-like 1
  ENSP ID: ENSP00000393659
MRDLARGMFVFGYDNYMAHAFPQDELNPIHCRGRGPDRGDPSNLNINDVLGNYSLTLVDALDTLAGPGKPPFCSQNNN

SEQ ID NO: 27891 - protein, 376 aa, Homo sapiens
  Payload ID: 5502
  Gene Symbol: EDEM1
  Gene Name: ER degradation enhancer, mannosidase alpha-like 1
  Uniprot ID: Q92611
  ENSP ID: ENSP00000394099
MGNSSEFQKAVKLVINTVSFDKDSTVQVFEATIRVLGSLLSAHRIITDSKQPFGDMTIKDYDNELLYMAHDLAVRLLPAFENTKTGIPYPRVNLKTGVPPDTNNETCTAGAGSLLVEFGILSRLLGDSTFEWVARRAVKALWNLRSNDTGLLGNVVNIQTGHWVGKQSGLGAGLDSFYEYLLKSYILFGEKEDLEMFNAAYQSIQNYLRRGREACNEGEGDPPLYVNVNMFSGQLMNTWIDSLQAFFPGLQVLIGDVEDAICLHAFYYAIWKRYGALPERYNWQLQAPDVLFYPLRPELVESTYLLYQATKNPFYLHVGMDILQSLEKYTKVKCGYATLHHVIDKSTEDRMESFFLSETCKYLYLVCVLQDEPRNI

SEQ ID NO: 27892 - protein, 53 aa, Homo sapiens
  Payload ID: 5502
  Gene Symbol: EDEM1
  Gene Name: ER degradation enhancer, mannosidase alpha-like 1
  ENSP ID: ENSP00000394615
MPAAPARPCNGERSSWGWCSSGLASMEYCGSSSGWGPAWASTSAFRSASASSV

SEQ ID NO: 27893 - protein, 541 aa, Homo sapiens
  Payload ID: 5503
  Gene Symbol: EDEM2
  Gene Name: ER degradation enhancer, mannosidase alpha-like 2
  Uniprot ID: Q9BV94
  ENSP ID: ENSP00000363615
MPFRLLIPLGLLCALLPQHHGAPGPDGSAPDPAHYSFSLTLIDALDTLLILGNVSEFQRVVEVLQDSVDFDIDVNASVFETNIRVVGGLLSAHLLSKKAGVEVEAGWPCSGPLLRMAEEAARKLLPAFQTPTGMPYGTVNLLHGVNPGETPVTCTAGIGTFIVEFATLSSLTGDPVFEDVARVALMRLWESRSDIGLVGNHIDVLTGKWVAQDAGIGAGVDSYFEYLVKGAILLQDKKLMAMFLEYNKAIRNYTRFDDWYLWVQMYKGTVSMPVFQSLEAYWPGLQSLIGDIDNAMRTFLNYYTVWKQFGGLPEFYNIPQGYTVEKREGYPLRPELIESAMYLYRATGDPTLLELGRDAVESIEKISKVECGFATIKDLRDHKLDNRMESFFLAETVKYLYLLFDPTNFIHNNGSTFDAVITPYGECILGAGGYIFNTEAHPIDPAALHCCQRLKEEQWEVEDLMREFYSLKRSRSKFQKNTVSSGPWEPPARPGTLFSPENHDQARERKPAKQKVPLLSCPSQPFTSKLALLGQVFLDSS

SEQ ID NO: 27894 - protein, 578 aa, Homo sapiens
  Payload ID: 5503
  Gene Symbol: EDEM2
  Gene Name: ER degradation enhancer, mannosidase alpha-like 2
  Uniprot ID: Q9BV94
  ENSP ID: ENSP00000363616
MPFRLLIPLGLLCALLPQHHGAPGPDGSAPDPAHYRERVKAMFYHAYDSYLENAFPFDELRPLTCDGHDTWGSFSLTLIDALDTLLILGNVSEFQRVVEVLQDSVDFDIDVNASVFETNIRVVGGLLSAHLLSKKAGVEVEAGWPCSGPLLRMAEEAARKLLPAFQTPTGMPYGTVNLLHGVNPGETPVTCTAGIGTFIVEFATLSSLTGDPVFEDVARVALMRLWESRSDIGLVGNHIDVLTGKWVAQDAGIGAGVDSYFEYLVKGAILLQDKKLMAMFLEYNKAIRNYTRFDDWYLWVQMYKGTVSMPVFQSLEAYWPGLQSLIGDIDNAMRTFLNYYTVWKQFGGLPEFYNIPQGYTVEKREGYPLRPELIESAMYLYRATGDPTLLELGRDAVESIEKISKVECGFATIKDLRDHKLDNRMESFFLAETVKYLYLLFDPTNFIHNNGSTFDAVITPYGECILGAGGYIFNTEAHPIDPAALHCCQRLKEEQWEVEDLMREFYSLKRSRSKFQKNTVSSGPWEPPARPGTLFSPENHDQARERKPAKQKVPLLSCPSQPFTSKLALLGQVFLDSS

SEQ ID NO: 27895 - protein, 932 aa, Homo sapiens
  Payload ID: 5504
  Gene Symbol: EDEM3
  Gene Name: ER degradation enhancer, mannosidase alpha-like 3
  Uniprot ID: Q9BZQ6
  ENSP ID: ENSP00000318147
MSEAGGRGCGSPVPQRARWRLVAATAAFCLVSATSVWTAGAEPMSREEKQKLGNQVLEMFDHAYGNYMEHAYPADELMPLTCRGRVRGQEPSRGDVDDALGKFSLTLIDSLDTLVVLNKTKEFEDAVRKVLRDVNLDNDVVVSVFETNIRVLGGLLGGHSLAIMLKEKGEYMQWYNDELLQMAKQLGYKLLPAFNTTSGLPYPRINLKFGIRKPEARTGTETDTCTACAGTLILEFAALSRFTGATIFEEYARKALDFLWEKRQRSSNLVGVTINIHTGDWVRKDSGVGAGIDSYYEYLLKAYVLLGDDSFLERFNTHYDAIMRYISQPPLLLDVHIHKPMLNARTWMDALLAFFPGLQVLKGDIRPAIETHEMLYQVIKKHNFLPEAFTTDFRVHWAQHPLRPEFAESTYFLYKATGDPYYLEVGKTLIENLNKYARVPCGFAAMKDVRTGSHEDRMDSFFLAEMFKYLYLLFADKEDIIFDIEDYIFTTEAHLLPLWLSTTNQSISKKNTTSEYTELDDSNFDWTCPNTQILFPNDPLYAQSIREPLKNVVDKSCPRGIIRVEESFRSGAKPPLRARDFMATNPEHLEILKKMGVSLIHLKDGRVQLVQHAIQAASSIDAEDGLRFMQEMIELSSQQQKEQQLPPRAVQIVSHPFFGRVVLTAGPAQFGLDLSKHKETRGFVASSKPSNGCSELTNPEAVMGKIALIQRGQCMFAEKARNIQNAGAIGGIVIDDNEGSSSDTAPLFQMAGDGKDTDDIKIPMLFLFSKEGSIILDAIREYEEVEVLLSDKAKDRDPEMENEEQPSSENDSQNQSGEQISSSSQEVDLVDQESSEENSLNSHPESLSLADMDNAASISPSEQTSNPTENHETTNLNGECTDLDNQLQEQSETEEDSNPNVSWGKKVQPIDSILADWNEDIEAFEMMEKDEL

SEQ ID NO: 27896 - protein, 905 aa, Homo sapiens
  Payload ID: 5504
  Gene Symbol: EDEM3
  Gene Name: ER degradation enhancer, mannosidase alpha-like 3
  Uniprot ID: Q9BZQ6
  ENSP ID: ENSP00000356482
MSREEKQKLGNQVLEMFDHAYGNYMEHAYPADELMPLTCRGRVRGQEPSRGDVDDALGKFSLTLIDSLDTLVVLNKTKEFEDAVRKVLRDVNLDNDVVVSVFETNIRVLGGLLGGHSLAIMLKEKGEYMQWYNDELLQMAKQLGYKLLPAFNTTSGLPYPRINLKFGIRKPEARTGTETDTCTACAGTLILEFAALSRFTGATIFEEYARKALDFLWEKRQRSSNLVGVTINIHTGDWVRKDSGVGAGIDSYYEYLLKAYVLLGDDSFLERFNTHYDAIMRYISQPPLLLDVHIHKPMLNARTWMDALLAFFPGLQVLKGDIRPAIETHEMLYQVIKKHNFLPEAFTTDFRVHWAQHPLRPEFAESTYFLYKATGDPYYLEVGKTLIENLNKYARVPCGFAAMKDVRTGSHEDRMDSFFLAEMFKYLYLLFADKEDIIFDIEDYIFTTEAHLLPLWLSTTNQSISKKNTTSEYTELDDSNFDWTCPNTQILFPNDPLYAQSIREPLKNVVDKSCPRGIIRVEESFRSGAKPPLRARDFMATNPEHLEILKKMGVSLIHLKDGRVQLVQHAIQAASSIDAEDGLRFMQEMIELSSQQQKEQQLPPRAVQIVSHPFFGRVVLTAGPAQFGLDLSKHKETRGFVASSKPSNGCSELTNPEAVMGKIALIQRGQCMFAEKARNIQNAGAIGGIVIDDNEGSSSDTAPLFQMAGDGKDTDDIKIPMLFLFSKEGSIILDAIREYEEVEVLLSDKAKDRAAILKGKMIPSYIINSNPEMENEEQPSSENDSQNQSGEQISSSSQEVDLVDQESSEENSLNSHPESLSLADMDNAASISPSEQTSNPTENHETTNLNGECTDLDNQLQEQSETEEDSNPNVSWGKKVQPIDSILADWNEDIEAFEMMEKDEL

SEQ ID NO: 27897 - protein, 380 aa, Homo sapiens
  Payload ID: 5504
  Gene Symbol: EDEM3
  Gene Name: ER degradation enhancer, mannosidase alpha-like 3
  ENSP ID: ENSP00000390536
VDKSCPRGIIRVEESFRSGAKPPLRARDFMATNPEHLEILKKMGVSLIHLKDGRVQLVQHAIQAASSIDAEDGLRFMQEMIELSSQQQKEQQLPPRAVQIVSHPFFGRVVLTAGPAQFGLDLSKHKETRGFVASSKPSNGCSELTNPEAVMGKIALIQRGQCMFAEKARNIQNAGAIGGIVIDDNEGSSSDTAPLFQMAGDGKDTDDIKIPMLFLFSKEGSIILDAIREYEEVEVLLSDKAKDRDPEMENEEQPSSENDSQNQSGEQISSSSQEVDLVDQESSEENSLNSHPESLSLADMDNAASISPSEQTSNPTENHETTNLNGECTDLDNQLQEQSETEEDSNPNVSWGKKVQPIDSILADWNEDIEAFEMMEKDEL

SEQ ID NO: 27898 - protein, 275 aa, Homo sapiens
  Payload ID: 5505
  Gene Symbol: ERLIN1
  Gene Name: ER lipid raft associated 1
  ENSP ID: ENSP00000359436
MNMTQARVLVAAVVGLVAVLLYASIHKIEEGHLAVYYRGGALLTSPSGPGYHIMLPFITTFRSVQTTLQTDEVKNVPCGTSGGVMIYIDRIEVVNMLAPYAVFDIVRNYTADYDKTLIFNKIHHELNQFCSAHTLQEVYIELFDQIDENLKQALQKDLNLMAPGLTIQAVRVTKPKIPEAIRRNFELMEAEKTKLLIAAQKQKVVEKEAETERKKAVIEAEKIAQVAKIRFQQKVMEKETEKRISEIEDAAFLAREKAKADAEYYAAHKYATSNK

SEQ ID NO: 27899 - protein, 348 aa, Homo sapiens
  Payload ID: 5505
  Gene Symbol: ERLIN1
  Gene Name: ER lipid raft associated 1
  Uniprot ID: O75477
  ENSP ID: ENSP00000384900
MNMTQARVLVAAVVGLVAVLLYASIHKIEEGHLAVYYRGGALLTSPSGPGYHIMLPFITTFRSVQTTLQTDEVKNVPCGTSGGVMIYIDRIEVVNMLAPYAVFDIVRNYTADYDKTLIFNKIHHELNQFCSAHTLQEVYIELFDQIDENLKQALQKDLNLMAPGLTIQAVRVTKPKIPEAIRRNFELMEAEKTKLLIAAQKQKVVEKEAETERKKAVIEAEKIAQVAKIRFQQKVMEKETEKRISEIEDAAFLAREKAKADAEYYAAHKYATSNKHKLTPEYLELKKYQAIASNSKIYFGSNIPNMFVDSSCALKYSDIRTGRESSLPSKEALEPSGENVIQNKESTG

SEQ ID NO: 27900 - protein, 348 aa, Homo sapiens; identical to SEQ ID NO: 27899
  Payload ID: 5505
  Gene Symbol: ERLIN1
  Gene Name: ER lipid raft associated 1
  Uniprot ID: O75477
  ENSP ID: ENSP00000410964

SEQ ID NO: 27901 - protein, 339 aa, Homo sapiens
  Payload ID: 5506
  Gene Symbol: ERLIN2
  Gene Name: ER lipid raft associated 2
  Uniprot ID: O94905
  ENSP ID: ENSP00000276461
MAQLGAVVAVASSFFCASLFSAVHKIEEGHIGVYYRGGALLTSTSGPGFHLMLPFITSYKSVQTTLQTDEVKNVPCGTSGGVMIYFDRIEVVNFLVPNAVYDIVKNYTADYDKALIFNKIHHELNQFCSVHTLQEVYIELFDQIDENLKLALQQDLTSMAPGLVIQAVRVTKPNIPEAIRRNYELMESEKTKLLIAAQKQKVVEKEAETERKKALIEAEKVAQVAEITYGQKVMEKETEKKISEIEDAAFLAREKAKADAECYTAMKIAEANKLKLTPEYLQLMKYKAIASNSKIYFGKDIPNMFMDSAGSVSKQFEGLADKLSFGLEDEPLETATKEN

SEQ ID NO: 27902 - protein, 152 aa, Homo sapiens
  Payload ID: 5506
  Gene Symbol: ERLIN2
  Gene Name: ER lipid raft associated 2
  Uniprot ID: O94905
  ENSP ID: ENSP00000335220
MAQLGAVVAVASSFFCASLFSAVHKIEEGHIGVYYRGGALLTSTSGPGFHLMLPFITSYKSVQTTLQTDEVKNVPCGTSGGVMIYFDRIEVVNFLVPNAVYDIVKNYTADYDKALIFNKIHHELNQFCSVHTLQEVYIELFGLENDFSQESS

SEQ ID NO: 27903 - protein, 152 aa, Homo sapiens; identical to SEQ ID NO: 27902
  Payload ID: 5506
  Gene Symbol: ERLIN2
  Gene Name: ER lipid raft associated 2
  Uniprot ID: O94905
  ENSP ID: ENSP00000380405

SEQ ID NO: 27904 - protein, 206 aa, Homo sapiens
  Payload ID: 5506
  Gene Symbol: ERLIN2
  Gene Name: ER lipid raft associated 2
  Uniprot ID: O94905
  ENSP ID: ENSP00000427847
MAQLGAVVAVASSFFCASLFSAVHKIEEGHIGVYYRGGALLTSTSGPGFHLMLPFITSYKSVQTTLQTDEVKNVPCGTSGGVMIYFDRIEVVNFLVPNAVYDIVKNYTADYDKALIFNKIHHELNQFCSVHTLQEVYIELFGKKVSPEHAVLKQGSWNPASLHCLKPGCLQGVMVTYGQEMLKNLVLRSWSQRSSWRMLIAMQQDP

SEQ ID NO: 27905 - protein, 339 aa, Homo sapiens; identical to SEQ ID NO: 27901
  Payload ID: 5506
  Gene Symbol: ERLIN2
  Gene Name: ER lipid raft associated 2
  Uniprot ID: O94905
  ENSP ID: ENSP00000428112

SEQ ID NO: 27906 - protein, 197 aa, Homo sapiens
  Payload ID: 5506
  Gene Symbol: ERLIN2
  Gene Name: ER lipid raft associated 2
  ENSP ID: ENSP00000429229
MAQLGAVVAVASSFFCASLFSAVHKIEEGHIGVYYSGGVMIYFDRIEVVNFLVPNAVYDIVKNYTADYDKALIFNKIHHELNQFCSVHTLQEVYIELFDQIDENLKLALQQDLTSMAPGLVIQAVRVTKPNIPEAIRRNYELMESEKTKLLIAAQKQKVVEKEAETERKKALIEAEKVAQVAEITYGQKVMEKETEK

SEQ ID NO: 27907 - protein, 338 aa, Homo sapiens
  Payload ID: 5506
  Gene Symbol: ERLIN2
  Gene Name: ER lipid raft associated 2
  ENSP ID: ENSP00000429621
MAQLGAVVAVASSFFCASLFSAVHKIEEGHIGVYYRGGALLTSTSGPGFHLMLPFITSYKSVQTTLQTDEVKNVPCGTSGGVMIYFDRIEVVNFLVPNAVYDIVKNYTADYDKALIFNKIHHELNQFCSVHTLQEVYIELFDQIDENLKLALQQDLTSMAPGLVIQAVRVTKPNIPEAIRRNYELMESEKTKLLIAAQKQKVVEKEAETERKKALIEAEKVAQVAEITYGQKVMEKETEKKISEIEDAAFLAREKAKADAECYTAMKIAEANKLKLTPEYLQLMKYKAIASNSKIYFGKDIPNMFMDSAGSVSKQFEGLADKLSFGLEDEPLETATKE

SEQ ID NO: 27908 - protein, 206 aa, Homo sapiens; identical to SEQ ID NO: 27904
  Payload ID: 5506
  Gene Symbol: ERLIN2
  Gene Name: ER lipid raft associated 2
  Uniprot ID: O94905
  ENSP ID: ENSP00000429903

SEQ ID NO: 27909 - protein, 206 aa, Homo sapiens; identical to SEQ ID NO: 27904
  Payload ID: 5506
  Gene Symbol: ERLIN2
  Gene Name: ER lipid raft associated 2
  Uniprot ID: O94905
  ENSP ID: ENSP00000473292

SEQ ID NO: 27910 - protein, 75 aa, Homo sapiens
  Payload ID: 5507
  Gene Symbol: EMC1
  Gene Name: ER membrane protein complex subunit 1
  ENSP ID: ENSP00000364329
MAAEWASRFWLWATLLIPAAAVYEDQVGKFDWRQQYVGKVKFASLEFSPGSKKLVVATEKNVIAALNSRTGEICE

SEQ ID NO: 27911 - protein, 992 aa, Homo sapiens
  Payload ID: 5507
  Gene Symbol: EMC1
  Gene Name: ER membrane protein complex subunit 1
  Uniprot ID: Q8N766
  ENSP ID: ENSP00000364345
MAAEWASRFWLWATLLIPAAAVYEDQVGKFDWRQQYVGKVKFASLEFSPGSKKLVVATEKNVIAALNSRTGEILWRHVDKGTAEGAVDAMLLHGQDVITVSNGGRIMRSWETNIGGLNWEITLDSGSFQALGLVGLQESVRYIAVLKKTTLALHHLSSGHLKWVEHLPESDSIHYQMVYSYGSGVVWALGVVPFSHVNIVKFNVEDGEIVQQVRVSTPWLQHLSGACGVVDEAVLVCPDPSSRSLQTLALETEWELRQIPLQSLDLEFGSGFQPRVLPTQPNPVDASRAQFFLHLSPSHYALLQYHYGTLSLLKNFPQTALVSFATTGEKTVAAVMACRNEVKSSSSEDGSMGSFSEKSSSKDSLACFNQTYTINLYLVETGRRLLDTTITFSLEQSGTRPERLYIQVFLKKDDSVGYRALVQTEDHLLLFLQQLAGKVVLWSREESLAEVVCLEMVDLPLTGAQAELEGEFGKKADGLLGMFLKRLSSQLILLQAWTSHLWKMFYDARKPRSQIKNEINIDTLARDEFNLQKMMVMVTASGKLFGIESSSGTILWKQYLPNVKPDSSFKLMVQRTTAHFPHPPQCTLLVKDKESGMSSLYVFNPIFGKWSQVAPPVLKRPILQSLLLPVMDQDYAKVLLLIDDEYKVTAFPATRNVLRQLHELAPSIFFYLVDAEQGRLCGYRLRKDLTTELSWELTIPPEVQRIVKVKGKRSSEHVHSQGRVMGDRSVLYKSLNPNLLAVVTESTDAHHERTFIGIFLIDGVTGRIIHSSVQKKAKGPVHIVHSENWVVYQYWNTKARRNEFTVLELYEGTEQYNATAFSSLDRPQLPQVLQQSYIFPSSISAMEATITERGITSRHLLIGLPSGAILSLPKALLDPRRPEIPTEQSREENLIPYSPDVQIHAERFINYNQTVSRMRGIYTAPSGLESTCLVVAYGLDIYQTRVYPSKQFDVLKDDYDYVLISSVLFGLVFATMITKRLAQVKLLNRAWR

SEQ ID NO: 27912 - protein, 971 aa, Homo sapiens
  Payload ID: 5507
  Gene Symbol: EMC1
  Gene Name: ER membrane protein complex subunit 1
  Uniprot ID: Q8N766
  ENSP ID: ENSP00000364354
MAAEWASRFWLWATLLIPAAAVYEDQVGKFDWRQQYVGKVKFASLEFSPGSKKLVVATEKNVIAALNSRTGEIYVITVSNGGRIMRSWETNIGGLNWEITLDSGSFQALGLVGLQESVRYIAVLKKTTLALHHLSSGHLKWVEHLPESDSIHYQMVYSYGSGVVWALGVVPFSHVNIVKFNVEDGEIVQQVRVSTPWLQHLSGACGVVDEAVLVCPDPSSRSLQTLALETEWELRQIPLQSLDLEFGSGFQPRVLPTQPNPVDASRAQFFLHLSPSHYALLQYHYGTLSLLKNFPQTALVSFATTGEKTVAAVMACRNEVQKSSSSEDGSMGSFSEKSSSKDSLACFNQTYTINLYLVETGRRLLDTTITFSLEQSGTRPERLYIQVFLKKDDSVGYRALVQTEDHLLLFLQQLAGKVVLWSREESLAEVVCLEMVDLPLTGAQAELEGEFGKKADGLLGMFLKRLSSQLILLQAWTSHLWKMFYDARKPRSQIKNEINIDTLARDEFNLQKMMVMVTASGKLFGIESSSGTILWKQYLPNVKPDSSFKLMVQRTTAHFPHPPQCTLLVKDKESGMSSLYVFNPIFGKWSQVAPPVLKRPILQSLLLPVMDQDYAKVLLLIDDEYKVTAFPATRNVLRQLHELAPSIFFYLVDAEQGRLCGYRLRKDLTTELSWELTIPPEVQRIVKVKGKRSSEHVHSQGRVMGDRSVLYKSLNPNLLAVVTESTDAHHERTFIGIFLIDGVTGRIIHSSVQKKAKGPVHIVHSENWVVYQYWNTKARRNEFTVLELYEGTEQYNATAFSSLDRPQLPQVLQQSYIFPSSISAMEATITERGITSRHLLIGLPSGAILSLPKALLDPRRPEIPTEQSREENLIPYSPDVQIHAERFINYNQTVSRMRGIYTAPSGLESTCLVVAYGLDIYQTRVYPSKQFDVLKDDYDYVLISSVLFGLVFATMITKRLAQVKLLNRAWR

SEQ ID NO: 27913 - protein, 86 aa, Homo sapiens
  Payload ID: 5507
  Gene Symbol: EMC1
  Gene Name: ER membrane protein complex subunit 1
  ENSP ID: ENSP00000417070
  MOD_RES (1)..(1): Any amino acid
XNATAFSSLDRPQLPQVLQQSYIFPSSISAMEATITERGITSRHLLIGLPSGAILSLPKALLDPRRPEIPTEQSRCTDTRRAIHQL

SEQ ID NO: 27914 - protein, 75 aa, Homo sapiens; identical to SEQ ID NO: 27910
  Payload ID: 5507
  Gene Symbol: EMC1
  Gene Name: ER membrane protein complex subunit 1
  ENSP ID: ENSP00000418481

SEQ ID NO: 27915 - protein, 178 aa, Homo sapiens
  Payload ID: 5507
  Gene Symbol: EMC1
  Gene Name: ER membrane protein complex subunit 1
  ENSP ID: ENSP00000419345
FIGIFLIDGVTGRIIHSSVQKKAKGPVHIVHSENWVVYQYWNTKARRNEFTVLELYEGTEQYNATAFSSLDRPQLPQVLQQSYIFPSSISAMEATITERGITSRHLLSFAGSPPPRDPNRTKQMYRYTQSDSSTITRQFLECEVSTQLPRVWSPLVWLWPMVWTFTKLESTHPSSLTF

SEQ ID NO: 27916 - protein, 993 aa, Homo sapiens
  Payload ID: 5507
  Gene Symbol: EMC1
  Gene Name: ER membrane protein complex subunit 1
  Uniprot ID: Q8N766
  ENSP ID: ENSP00000420608
MAAEWASRFWLWATLLIPAAAVYEDQVGKFDWRQQYVGKVKFASLEFSPGSKKLVVATEKNVIAALNSRTGEILWRHVDKGTAEGAVDAMLLHGQDVITVSNGGRIMRSWETNIGGLNWEITLDSGSFQALGLVGLQESVRYIAVLKKTTLALHHLSSGHLKWVEHLPESDSIHYQMVYSYGSGVVWALGVVPFSHVNIVKFNVEDGEIVQQVRVSTPWLQHLSGACGVVDEAVLVCPDPSSRSLQTLALETEWELRQIPLQSLDLEFGSGFQPRVLPTQPNPVDASRAQFFLHLSPSHYALLQYHYGTLSLLKNFPQTALVSFATTGEKTVAAVMACRNEVQKSSSSEDGSMGSFSEKSSSKDSLACFNQTYTINLYLVETGRRLLDTTITFSLEQSGTRPERLYIQVFLKKDDSVGYRALVQTEDHLLLFLQQLAGKVVLWSREESLAEVVCLEMVDLPLTGAQAELEGEFGKKADGLLGMFLKRLSSQLILLQAWTSHLWKMFYDARKPRSQIKNEINIDTLARDEFNLQKMMVMVTASGKLFGIESSSGTILWKQYLPNVKPDSSFKLMVQRTTAHFPHPPQCTLLVKDKESGMSSLYVFNPIFGKWSQVAPPVLKRPILQSLLLPVMDQDYAKVLLLIDDEYKVTAFPATRNVLRQLHELAPSIFFYLVDAEQGRLCGYRLRKDLTTELSWELTIPPEVQRIVKVKGKRSSEHVHSQGRVMGDRSVLYKSLNPNLLAVVTESTDAHHERTFIGIFLIDGVTGRIIHSSVQKKAKGPVHIVHSENWVVYQYWNTKARRNEFTVLELYEGTEQYNATAFSSLDRPQLPQVLQQSYIFPSSISAMEATITERGITSRHLLIGLPSGAILSLPKALLDPRRPEIPTEQSREENLIPYSPDVQIHAERFINYNQTVSRMRGIYTAPSGLESTCLVVAYGLDIYQTRVYPSKQFDVLKDDYDYVLISSVLFGLVFATMITKRLAQVKLLNRAWR

SEQ ID NO: 27917 - protein, 262 aa, Homo sapiens
  Payload ID: 5508
  Gene Symbol: EMC10
  Gene Name: ER membrane protein complex subunit 10
  Uniprot ID: Q5UCC4
  ENSP ID: ENSP00000334037
MAAASAGATRLLLLLLMAVAAPSRARGSGCRAGTGARGAGAEGREGEACGTVGLLLEHSFEIDDSANFRKRGSLLWNQQDGTLSLSQRQLSEEERGRLRDVAALNGLYRVRIPRRPGALDGLEAGGYVSSFVPACSLVESHLSDQLTLHVDVAGNVVGVSVVTHPGGCRGHEVEDVDLELFNTSVQLQPPTTAPGPETAAFIERLEMEQAQKAKNPQEQKSFFAKYWMYIIPVVLFLMMSGAPDTGGQGGGGGGGGGGGSGR

SEQ ID NO: 27918 - protein, 254 aa, Homo sapiens
  Payload ID: 5508
  Gene Symbol: EMC10
  Gene Name: ER membrane protein complex subunit 10
  Uniprot ID: Q5UCC4
  ENSP ID: ENSP00000366117
MAAASAGATRLLLLLLMAVAAPSRARGSGCRAGTGARGAGAEGREGEACGTVGLLLEHSFEIDDSANFRKRGSLLWNQQDGTLSLSQRQLSEEERGRLRDVAALNGLYRVRIPRRPGALDGLEAGGYVSSFVPACSLVESHLSDQLTLHVDVAGNVVGVSVVTHPGGCRGHEVEDVDLELFNTSVQLQPPTTAPGPETAAFIERLEMEQAQKAKNPQEQKSFFAKYWHIILGGAVLLTALRPAAPGPAPPPQEA

SEQ ID NO: 27919 - protein, 42 aa, Homo sapiens
  Payload ID: 5508
  Gene Symbol: EMC10
  Gene Name: ER membrane protein complex subunit 10
  ENSP ID: ENSP00000470164
MAAASAGATRLLLLLLMAVAAPSRARGSGCRAGTGARGVSAL

SEQ ID NO: 27920 - protein, 43 aa, Homo sapiens
  Payload ID: 5508
  Gene Symbol: EMC10
  Gene Name: ER membrane protein complex subunit 10
  ENSP ID: ENSP00000470949
MAAASAGATRLLLLLLMAHSFEIDDSANFRKRGSLLWNQQDGT

SEQ ID NO: 27921 - protein, 88 aa, Homo sapiens
  Payload ID: 5508
  Gene Symbol: EMC10
  Gene Name: ER membrane protein complex subunit 10
  ENSP ID: ENSP00000471764
MLVIPALREAEAGGPLEVRSSRPACSKWLGRKVERARPVARWGCCWSTHLRSMTVPTSGSGAHCSGTSRMVPCPCHSGSSARRSGADS

SEQ ID NO: 27922 - protein, 371 aa, Homo sapiens
  Payload ID: 5508
  Gene Symbol: EMC10
  Gene Name: ER membrane protein complex subunit 10
  ENSP ID: ENSP00000472420
MAAASAGATRLLLLLLMAVAAPSRARGSGCRAGTGARGAGAEGREGEACGTVGLLLEHSFEIDDSANFRKRGSLLWNQQDGTLSLSQRQLSEEERGRLRDVAALNGLYRVRIPRRPGALDGLEAGGYVSSFVPACSLVESHLSDQLTLHVDVAGNVVGVSVVTHPGGCRGHEVEDVDLELFNTSVQLQPPTTAPGPETAAFIERLEMEQAQKAKNPQEQKSFFAKYWMYIIPVVLFLMMSGAPDTGGQGGGGGGGGGGGSGRPLSSAFCWQRSSWTGAFGTAAGVSCARLPHGPMQPQGLPPCPWSRARDPGHYASSDLASPYPEPMQSGNMPPSLQPLCLCSRWSHPPVPGWARWSCPGSCSAPLTLTLD

SEQ ID NO: 27923 - protein, 42 aa, Homo sapiens; identical to SEQ ID NO: 27919
  Payload ID: 5508
  Gene Symbol: EMC10
  Gene Name: ER membrane protein complex subunit 10
  ENSP ID: ENSP00000472714

SEQ ID NO: 27924 - protein, 297 aa, Homo sapiens
  Payload ID: 5509
  Gene Symbol: EMC2
  Gene Name: ER membrane protein complex subunit 2
  Uniprot ID: Q15006
  ENSP ID: ENSP00000220853
MAKVSELYDVTWEEMRDKMRKWREENSRNSEQIVEVGEELINEYASKLGDDIWIIYEQVMIAALDYGRDDLALFCLQELRRQFPGSHRVKRLTGMRFEAMERYDDAIQLYDRILQEDPTNTAARKRKIAIRKAQGKNVEAIRELNEYLEQFVGDQEAWHELAELYINEHDYAKAAFCLEELMMTNPHNHLYCQQYAEVKYTQGGLENLELSRKYFAQALKLNNRNMRALFGLYMSASHIASNPKASAKTKKDNMKYASWAASQINRAYQFAGRSKKETKYSLKAVEDMLETLQITQS

SEQ ID NO: 27925 - protein, 135 aa, Homo sapiens
  Payload ID: 5509
  Gene Symbol: EMC2
  Gene Name: ER membrane protein complex subunit 2
  ENSP ID: ENSP00000428040
  MOD_RES (1)..(1): Any amino acid
XIIYEQVMIAALDYGRDDLALFCLQELRRQFPGSHRVKRLTGMRFEAMERYDDAIQLYDRILQEDPTNTAARKRKIAIRKAQGKNVEAIRELNEYLEQFVGDQEAWHELAELYINEHDLQVEVRRKPNILLRLSK

SEQ ID NO: 27926 - protein, 112 aa, Homo sapiens
  Payload ID: 5509
  Gene Symbol: EMC2
  Gene Name: ER membrane protein complex subunit 2
  ENSP ID: ENSP00000430122
MKYSSSHTLYCLKEEMRDKMRKWREENSRNSEQIVEVGEELINEYASKLGDDIWIIYEQVMIAALDYGRDDLALFCLQELRRQFPGSHRVKRLTGMRFEAMERYDDAIQLYD

SEQ ID NO: 27927 - protein, 261 aa, Homo sapiens
  Payload ID: 5510
  Gene Symbol: EMC3
  Gene Name: ER membrane protein complex subunit 3
  Uniprot ID: Q9P0I2
  ENSP ID: ENSP00000245046
MAGPELLLDSNIRLWVVLPIVIITFFVGMIRHYVSILLQSDKKLTQEQVSDSQVLIRSRVLRENGKYIPKQSFLTRKYYFNNPEDGFFKKTKRKVVPPSPMTDPTMLTDMMKGNVTNVLPMILIGGWINMTFSGFVTTKVPFPLTLRFKPMLQQGIELLTLDASWVSSASWYFLNVFGLRSIYSLILGQDNAADQSRMMQEQMTGAAMAMPADTNKAFKTEWEALELTDHQWALDDVEEELMAKDLHFEGMFKKELQTSIF

SEQ ID NO: 27928 - protein, 203 aa, Homo sapiens
  Payload ID: 5510
  Gene Symbol: EMC3
  Gene Name: ER membrane protein complex subunit 3
  ENSP ID: ENSP00000408803
MAGPELLLDSNIRLWVVLPIVIITFFVGMIRHYVSILLQSDKKLTQEQVSDRKYLSGLVQWLTPIIPALWGAEMGGSLEPRNLRPTLAACQVLIRSRVLRENGKYIPKQSFLTRKYYFNNPEDGFFKKTKRKVVPPSPMTDPTMLTDMMKGNVTNVLPMILIGGWINMTFSGFVTTKVPFPLTLRFKPMLQQGIELLTLDASW

SEQ ID NO: 27929 - protein, 78 aa, Homo sapiens
  Payload ID: 5510
  Gene Symbol: EMC3
  Gene Name: ER membrane protein complex subunit 3
  ENSP ID: ENSP00000474771
MAGPELLLDSNIRLWVVLPIVIITFFVGMIRHYVSILLQSDKKLTQEQVSDSQVLIRSRVLRENGKYIPKQSFLTRKY

SEQ ID NO: 27930 - protein, 149 aa, Homo sapiens
  Payload ID: 5511
  Gene Symbol: EMC4
  Gene Name: ER membrane protein complex subunit 4
  Uniprot ID: Q5J8M3
  ENSP ID: ENSP00000249209
MTAQGGLVANRGRRFKWAIELSGPGGGSRGRSDRGSGQGDSLYPVGYLDKQVPDTSVQETDRILVEKRCWDIALGPLKQIPMNLFIMYMAGNTISIFPTMMVCMMAWRPIQALMAISAKNGVQWWRTAFVNMRKQRLVPMYLGLIYILL

SEQ ID NO: 27931 - protein, 183 aa, Homo sapiens
  Payload ID: 5511
  Gene Symbol: EMC4
  Gene Name: ER membrane protein complex subunit 4
  Uniprot ID: Q5J8M3
  ENSP ID: ENSP00000267750
MTAQGGLVANRGRRFKWAIELSGPGGGSRGRSDRGSGQGDSLYPVGYLDKQVPDTSVQETDRILVEKRCWDIALGPLKQIPMNLFIMYMAGNTISIFPTMMVCMMAWRPIQALMAISATFKMLESSSQKFLQGLVYLIGNLMGLALAVYKCQSMGLLPTHASDWLAFIEPPERMEFSGGGLLL

SEQ ID NO: 27932 - protein, 78 aa, Homo sapiens
  Payload ID: 5511
  Gene Symbol: EMC4
  Gene Name: ER membrane protein complex subunit 4
  ENSP ID: ENSP00000452672
MTAQGGLVANRGRRFKWAIELSGPGGGSRGRSDRGSGQGDSLYPVGYLDKQVPDTSVQETDRILVEKRMEFSGGGLLL

SEQ ID NO: 27933 - protein, 98 aa, Homo sapiens
  Payload ID: 5511
  Gene Symbol: EMC4
  Gene Name: ER membrane protein complex subunit 4
  ENSP ID: ENSP00000452849
  MOD_RES (1)..(1): Any amino acid
XCWDIALGPLKQIPMNLFIMYMAGNTISIFPTMMVCMMAWRPIQALMAISANVRKFKPEVSSGFGLSHWEPDGFGIGCLQVPVHGTVTYTCIGLVSLH

SEQ ID NO: 27934 - protein, 125 aa, Homo sapiens
  Payload ID: 5511
  Gene Symbol: EMC4
  Gene Name: ER membrane protein complex subunit 4
  ENSP ID: ENSP00000453287
MTAQGGLVANRGRRFKWAIELSGPGGGSSFLVWFFRGRSDRGSGQGDSLYPVGYLDKQVPDTSVQETDRILVEKRCWDIALGPLKQIPMNLFIMYMAGNTISIFPTMMVCMMAWRPIQALMAISA

SEQ ID NO: 27935 - protein, 72 aa, Homo sapiens
  Payload ID: 5511
  Gene Symbol: EMC4
  Gene Name: ER membrane protein complex subunit 4
  ENSP ID: ENSP00000453610
MTAQGGLVANRGRRFKWAIELSGPGGGSRETRSTQSVTWTSKCLIPACKRQTGSWWRSAAGTSPWVPSNRFP

SEQ ID NO: 27936 - protein, 43 aa, Homo sapiens
  Payload ID: 5511
  Gene Symbol: EMC4
  Gene Name: ER membrane protein complex subunit 4
  ENSP ID: ENSP00000453880
MTAQGGLVANRGRRFKWAIELSGPGGGSSAAGTSPWVPSNRFP

SEQ ID NO: 27937 - protein, 84 aa, Homo sapiens
  Payload ID: 5511
  Gene Symbol: EMC4
  Gene Name: ER membrane protein complex subunit 4
  ENSP ID: ENSP00000454042
MTAQGGLVANRGRRFKWAIELSGPGGGSRGRSDRGSGQGDSLYPVGYLDKQVPDTSVQETDRILVEKVQSAAGTSPWVPSNRFP

SEQ ID NO: 27938 - protein, 102 aa, Homo sapiens
  Payload ID: 5511
  Gene Symbol: EMC4
  Gene Name: ER membrane protein complex subunit 4
  ENSP ID: ENSP00000454052
MTAQGGLVANRGRRFKWAIELSGPGGGSRGRSDRGSGQGDSLYPVGYLDKQVPDTSVQETDRILVEKRCWDIALGPLKQIPMNLFIMYMAGNTISIFPTMMA

SEQ ID NO: 27939 - protein, 72 aa, Homo sapiens
  Payload ID: 5511
  Gene Symbol: EMC4
  Gene Name: ER membrane protein complex subunit 4
  ENSP ID: ENSP00000473881
MTAQGGLVANRGRRFKWAIELSGPGGGSRGRSDRGSGQGDSLYPVGYLDKQVPDTSVQETDRILVEKVQRLQ

SEQ ID NO: 27940 - protein, 110 aa, Homo sapiens
  Payload ID: 5512
  Gene Symbol: EMC6
  Gene Name: ER membrane protein complex subunit 6
  Uniprot ID: Q9BV81
  ENSP ID: ENSP00000248378
MAAVVAKREGPPFISEAAVRGNAAVLDYCRTSVSALSGATAGILGLTGLYGFIFYLLASVLLSLLLILKAGRRWNKYFKSRRPLFTGGLIGGLFTYVLFWTFLYGMVHVY

SEQ ID NO: 27941 - protein, 110 aa, Homo sapiens; identical to SEQ ID NO: 27940
  Payload ID: 5512
  Gene Symbol: EMC6
  Gene Name: ER membrane protein complex subunit 6
  Uniprot ID: Q9BV81
  ENSP ID: ENSP00000380322

SEQ ID NO: 27942 - protein, 242 aa, Homo sapiens
  Payload ID: 5513
  Gene Symbol: EMC7
  Gene Name: ER membrane protein complex subunit 7
  Uniprot ID: Q9NPA0
  ENSP ID: ENSP00000256545
MAAALWGFFPVLLLLLLSGDVQSSEVPGAAAEGSGGSGVGIGDRFKIEGRAVVPGVKPQDWISAARVLVDGEEHVGFLKTDGSFVVHDIPSGSYVVEVVSPAYRFDPVRVDITSKGKMRARYVNYIKTSEVVRLPYPLQMKSSGPPSYFIKRESWGWTDFLMNPMVMMMVLPLLIFVLLPKVVNTSDPDMRREMEQSMNMLNSNHELPDVSEFMTRLFSSKSSGKSSSGSSKTGKSGAGKRR

SEQ ID NO: 27943 - protein, 192 aa, Homo sapiens
  Payload ID: 5513
  Gene Symbol: EMC7
  Gene Name: ER membrane protein complex subunit 7
  ENSP ID: ENSP00000434292
  MOD_RES (1)..(1): Any amino acid
XLLLLLLSGDVQSSEVPGAAAEGSGGSGVGIGDRFKIEGRAVVPGVKPQDWISAARVLVDGEEHVGFLKARYVNYIKTSEVVRLPYPLQMKSSGPPSYFIKRESWGWTDFLMNPMVMMMVLPLLIFVLLPKVVNTSDPDMRREMEQSMNMLNSNHELPDVSEFMTRLFSSKSSGKSSSGSSKTGKSGAGKRR

SEQ ID NO: 27944 - protein, 160 aa, Homo sapiens
  Payload ID: 5513
  Gene Symbol: EMC7
  Gene Name: ER membrane protein complex subunit 7
  ENSP ID: ENSP00000434496
MSRARRTDGSFVVHDIPSGSYVVEVVSPAYRFDPVRVDITSKGKMRARYVNYIKTSEVVRLPYPLQMKSSGPPSYFIKRESWGWTDFLMNPMVMMMVLPLLIFVLLPKVVNTSDPDMRREMEQSMNMLNSNHELPDVSEFMTRLFSSKSSGKSSSGSSKT

SEQ ID NO: 27945 - protein, 210 aa, Homo sapiens
  Payload ID: 5514
  Gene Symbol: EMC8
  Gene Name: ER membrane protein complex subunit 8
  Uniprot ID: O43402
  ENSP ID: ENSP00000253457
MPGVKLTTQAYCKMVLHGAKYPHCAVNGLLVAEKQKPRKEHLPLGGPGAHHTLFVDCIPLFHGTLALAPMLEVALTLIDSWCKDHSYVIAGYYQANERVKDASPNQVAEKVASRIAEGFSDTALIMVDNTKFTMDCVAPTIHVYEHHENRWRCRDPHHDYCEDWPEAQRISASLLDSRSYETLVDFDNHLDDIRNDWTNPEINKAVLHLC

SEQ ID NO: 27946 - protein, 126 aa, Homo sapiens
  Payload ID: 5514
  Gene Symbol: EMC8
  Gene Name: ER membrane protein complex subunit 8
  Uniprot ID: O43402
  ENSP ID: ENSP00000391730
MPGVKLTTQAYCKMVLHGAKYPHCAVNGLLVAEKQKPRKEHLPLGGPGAHHTLFVDCIPLFHGTLALAPMLEVALTLIDSWCKDHSYVIAGYYQANERVKDASPNQVAEKVASRIAEGFSDTALIM

SEQ ID NO: 27947 - protein, 100 aa, Homo sapiens
  Payload ID: 5514
  Gene Symbol: EMC8
  Gene Name: ER membrane protein complex subunit 8
  ENSP ID: ENSP00000471751
VASRIAEGFSDTALIMVDNTKFTMDCVAPTIHVYEHHENRWRCRDPHHDYCEDWPEAQRISASLLDSRSYETLVDFDNHLDDIRNDWTNPEINKAVLHLC

SEQ ID NO: 27948 - protein, 208 aa, Homo sapiens
  Payload ID: 5515
  Gene Symbol: EMC9
  Gene Name: ER membrane protein complex subunit 9
  Uniprot ID: Q9Y3B6
  ENSP ID: ENSP00000216799
MGEVEISALAYVKMCLHAARYPHAAVNGLFLAPAPRSGECLCLTDCVPLFHSHLALSVMLEVALNQVDVWGAQAGLVVAGYYHANAAVNDQSPGPLALKIAGRIAEFFPDAVLIMLDNQKLVPQPRVPPVIVLENQGLRWVPKDKNLVMWRDWEESRQMVGALLEDRAHQHLVDFDCHLDDIRQDWTNQRLNTQITQWVGPTNGNGNA

SEQ ID NO: 27949 - protein, 208 aa, Homo sapiens; identical to SEQ ID NO: 27948
  Payload ID: 5515
  Gene Symbol: EMC9
  Gene Name: ER membrane protein complex subunit 9
  Uniprot ID: Q9Y3B6
  ENSP ID: ENSP00000403210

SEQ ID NO: 27950 - protein, 94 aa, Homo sapiens
  Payload ID: 5515
  Gene Symbol: EMC9
  Gene Name: ER membrane protein complex subunit 9
  ENSP ID: ENSP00000452797
MGEVEISALAYVKMCLHAARYPHAAVNGLFLAPAPRSGECLCLTDCVPLFHSHLALSVMLEVALNQVDVWGAQAGLVVAGYYHANAAVNDQSNI

SEQ ID NO: 27951 - protein, 134 aa, Homo sapiens
  Payload ID: 5515
  Gene Symbol: EMC9
  Gene Name: ER membrane protein complex subunit 9
  ENSP ID: ENSP00000454016
MGFAHSWLLTPLIFPLHSPGPLALKIAGRIAEFFPDAVLIMLDNQKLVPQPRVPPVIVLENQGLRWVPKDKNLVMWRDWEESRQMVGALLEDRAHQHLVDFDCHLDDIRQDWTNQRLNTQITQWVGPTNGNGNA

SEQ ID NO: 27952 - protein, 631 aa, Homo sapiens
  Payload ID: 5516
  Gene Symbol: ERMARD
  Gene Name: ER membrane-associated RNA degradation
  Uniprot ID: Q5T6L9
  ENSP ID: ENSP00000355734
MEVLIGDPITTCLSPSVYDIICNLGFQLRENCDINSIVTQNGEVCWKTITDCVSYTESEQGLDYWGSVRLLGPVCEAVHSHFLSLTKGQFEIRYAPWFQWTSFPELFPEIFDALESLQSPAISLSLMKLTSCLERALGDVFLLIGKECPFLLRDLLSSEELAQVFSQSVMNVLKVFVGSPCGLNLRNVLWHGFASPEEIPPKYCSMMILLTAGLGQLLKSYLQNTKLTLAHRSFISLTNLEDLIVFPDVTYEVLSVLEEVMMKSAFILKIMLPYWEVALVKFKSHRFADCAILLLTQLETGLRNVFATLNRCPKRLLTAESTALYTTFDQILAKHLNDGKINQLPLFLGEPAMEFLWDFLNHQEGPRIRDHLSHGEINLHEFSKETTNQLLAFSLVLLLRFVDDCLLSVFKEKSAVELLISLAEGYSSRCHPVFQLKKQVLSCEESIRVWALLPFPEELTRQAVRLEDNSETNACHSLITKMTDELYHHMPENRCVLKDLDRLPTETPTSDTPLALAPRKPQPCRCRRRVRPSIRLLSPVLSLILLLIALELVNIHAVCGKNAHEYQQYLKFVKSILQYTENLVAYTSYEKNKWNETINLTHTALLKMWTFSEKKQMLIHLAKKSTSKVLL

SEQ ID NO: 27953 - protein, 678 aa, Homo sapiens
  Payload ID: 5516
  Gene Symbol: ERMARD
  Gene Name: ER membrane-associated RNA degradation
  Uniprot ID: Q5T6L9
  ENSP ID: ENSP00000355735
MEVLIGDPITTCLSPSVYDIICNLGFQLRENCDINSIVTQNGEVCWKTITDCVSYTESEQGLDYWGSVRLLGPVCEAVHSHFLSLTKGQFEIRYAPWFQWTSFPELFPEIFDALESLQSPAISLSLMKLTSCLERALGDVFLLIGKECPFLLRDLLSSEELAQVFSQSVMNVLKVFVGSPCGLNLRNVLWHGFASPEEIPPKYCSMMILLTAGLGQLLKSYLQNTKLTLAHRSFISLTNLEDLIVFPDVTYEVLSVLEEVMMKSAFILKIMLPYWEVALVKFKSHRFADCAILLLTQLETGLRNVFATLNRCPKRLLTAESTALYTTFDQILAKHLNDGKINQLPLFLGEPAMEFLWDFLNHQEGPRIRDHLSHGEINLHEFSKETTNQLLAFSLVLLLRFVDDCLLSVFKEKSAVELLISLAEGYSSRCHPVFQLKKQVLSCEESIRVWALLPFPEELTRQAVRLEDNSETNACHSLITKMTDELYHHMPENRCVLKDLDRLPTETWPQLLRELCSTPVPTLFCPRIVLEVLVVLRSISEQCRRVSSQVTVASELRHRQWVERTLRSRQRQNYLRMWSSIRLLSPVLSLILLLIALELVNIHAVCGKNAHEYQQYLKFVKSILQYTENLVAYTSYEKNKWNETINLTHTALLKMWTFSEKKQMLIHLAKKSTSKVLL

SEQ ID NO: 27954 - protein, 552 aa, Homo sapiens
  Payload ID: 5516
  Gene Symbol: ERMARD
  Gene Name: ER membrane-associated RNA degradation
  Uniprot ID: Q5T6L9
  ENSP ID: ENSP00000375945
MKLTSCLERALGDVFLLIGKECPFLLRDLLSSEELAQVFSQSVMNVLKVFVGSPCGLNLRNVLWHGFASPEEIPPKYCSMMILLTAGLGQLLKSYLQNTKLTLAHRSFISLTNLEDLIVFPDVTYEVLSVLEEVMMKSAFILKIMLPYWEVALVKFKSHRFADCAILLLTQLETGLRNVFATLNRCPKRLLTAESTALYTTFDQILAKHLNDGKINQLPLFLGEPAMEFLWDFLNHQEGPRIRDHLSHGEINLHEFSKETTNQLLAFSLVLLLRFVDDCLLSVFKEKSAVELLISLAEGYSSRCHPVFQLKKQVLSCEESIRVWALLPFPEELTRQAVRLEDNSETNACHSLITKMTDELYHHMPENRCVLKDLDRLPTETWPQLLRELCSTPVPTLFCPRIVLEVLVVLRSISEQCRRVSSQVTVASELRHRQWVERTLRSRQRQNYLRMWSSIRLLSPVLSLILLLIALELVNIHAVCGKNAHEYQQYLKFVKSILQYTENLVAYTSYEKNKWNETINLTHTALLKMWTFSEKKQMLIHLAKKSTSKVLL

SEQ ID NO: 27955 - protein, 605 aa, Homo sapiens
  Payload ID: 5516
  Gene Symbol: ERMARD
  Gene Name: ER membrane-associated RNA degradation
  Uniprot ID: Q5T6L9
  ENSP ID: ENSP00000397661
MEVLIGDPITTCLSPSVYDIICNLGFQLRENCDINSIVTQNGEVCWKTITDCVSYTESEQGLDYWGSVRLLGPVCEAVHSHFLSLTKGQFEIRYAPWFQWTSFPELFPEIFDALESLQSPAISLSLMKLTSCLERALGDVFLLIGKECPFLLRDLLSSEELAQVFSQSVMNVLKVFVGSPCGLNLRNVLWHGFASPEEIPPKYCSMMILLTAGLGQLLKSYLQNTKLTLAHRSFISLTNLEDLIVFPDVTYEVLSVLEEVMMKSAFILKIMLPYWEVALVKFKSHRFADCAILLLTQLETGLRNVFATLNRCPKRLLTAESTALYTTFDQILAKHLNDGKINQLPLFLGEPAMEFLWDFLNHQEGPRIRDHLSHGEINLHEFSKETTNQLLAFSLVLLLRFVDDCLLSVFKEKSAVELLISLAEGYSSRCHPVFQLKKQVLSCEESIRVWALLPFPEELTRQAVRLEDNSETNACHSLITKMTDELYHHMPENRCVLKDLDRLPTETIRLLSPVLSLILLLIALELVNIHAVCGKNAHEYQQYLKFVKSILQYTENLVAYTSYEKNKWNETINLTHTALLKMWTFSEKKQMLIHLAKKSTSKVLL

SEQ ID NO: 27956 - protein, 46 aa, Homo sapiens
  Payload ID: 5516
  Gene Symbol: ERMARD
  Gene Name: ER membrane-associated RNA degradation
  ENSP ID: ENSP00000466335
  MOD_RES (1)..(1): Any amino acid
XVYDIICNLGFQLRENCDINSIVTQNGEVCWKTITDCVSYTESVIS

SEQ ID NO: 27957 - protein, 74 aa, Homo sapiens
  Payload ID: 5516
  Gene Symbol: ERMARD
  Gene Name: ER membrane-associated RNA degradation
  ENSP ID: ENSP00000466474
MKLTSCLERALGDVFLLIGKECPFLLRDLLSSEELAQVFSQSVMNVLKVFVGSPCGLNLRNVLWHGFASPEEIP

SEQ ID NO: 27958 - protein, 28 aa, Homo sapiens
  Payload ID: 5516
  Gene Symbol: ERMARD
  Gene Name: ER membrane-associated RNA degradation
  ENSP ID: ENSP00000466679
MKLTSCLERALGDVFLLIGKECPFLLRD

SEQ ID NO: 27959 - protein, 73 aa, Homo sapiens
  Payload ID: 5516
  Gene Symbol: ERMARD
  Gene Name: ER membrane-associated RNA degradation
  ENSP ID: ENSP00000467582
MEVLIGDPITTCLSPSVYDIICNLGFQLRENCDINSIVTQNGEVCWKTITDCVSYTESGSGLLGKREAAGPCV

SEQ ID NO: 27960 - protein, 5 aa, Homo sapiens
  Payload ID: 5516
  Gene Symbol: ERMARD
  Gene Name: ER membrane-associated RNA degradation
  ENSP ID: ENSP00000467665
MKLTS

SEQ ID NO: 27961 - protein, 174 aa, Homo sapiens
  Payload ID: 5516
  Gene Symbol: ERMARD
  Gene Name: ER membrane-associated RNA degradation
  ENSP ID: ENSP00000468124
MEVLIGDPITTCLSPSVYDIICNLGFQLRENCDINSIVTQNGEVCWKTITDCVSYTESEQGLDYWGSVRLLGPVCEAVHSHFLSLTKGQFEIRYAPWFQWTSFPEVFLLIGKECPFLLRDLLSSEELAQVFSQSVMNVLKVFVGSPCGLNLRNVLWHGFASPEEIPPKYCSMMI

SEQ ID NO: 27962 - protein, 542 aa, Homo sapiens
  Payload ID: 5516
  Gene Symbol: ERMARD
  Gene Name: ER membrane-associated RNA degradation
  ENSP ID: ENSP00000468240
MKLTSCLERALGDVFLLIGKECPFLLRDLLSSEELAQVFSQSVMNVLKVFVGSPCGLNLRNVLWHGFASPEEIPPKYCSMMILLTAGLGQLLKSYLQNTKLTLAHRSFISLTNLEDLIVFPDVTYEVLSVLEEVMMKSAFILKIMLPYWEVALVKFKSHRFADCAILLLTQLETGLRNVFATLNRCPKRLLTAEILAKHLNDGKINQLPLFLGEPAMEFLWDFLNHQEGPRIRDHLSHGEINLHEFSKETTNQLLAFSLVLLLRFVDDCLLSVFKEKSAVELLISLAEGYSSRCHPVFQLKKQVLSCEESIRVWALLPFPEELTRQAVRLEDNSETNACHSLITKMTDELYHHMPENRCVLKDLDRLPTETWPQLLRELCSTPVPTLFCPRIVLEVLVVLRSISEQCRRVSSQVTVASELRHRQWVERTLRSRQRQNYLRMWSSIRLLSPVLSLILLLIALELVNIHAVCGKNAHEYQQYLKFVKSILQYTENLVAYTSYEKNKWNETINLTHTALLKMWTFSEKKQMLIHLAKKSTSKVLL

SEQ ID NO: 27963 - protein, 18 aa, Homo sapiens
  Payload ID: 5516
  Gene Symbol: ERMARD
  Gene Name: ER membrane-associated RNA degradation
  ENSP ID: ENSP00000468722
MKLTSCLERALGDVFLLI

SEQ ID NO: 27964 - protein, 552 aa, Homo sapiens; identical to SEQ ID NO: 27954
  Payload ID: 5516
  Gene Symbol: ERMARD
  Gene Name: ER membrane-associated RNA degradation
  Uniprot ID: Q5T6L9
  ENSP ID: ENSP00000480327

SEQ ID NO: 27965 - protein, 631 aa, Homo sapiens; identical to SEQ ID NO: 27952
  Payload ID: 5516
  Gene Symbol: ERMARD
  Gene Name: ER membrane-associated RNA degradation
  Uniprot ID: Q5T6L9
  ENSP ID: ENSP00000483666

SEQ ID NO: 27966 - protein, 605 aa, Homo sapiens; identical to SEQ ID NO: 27955
  Payload ID: 5516
  Gene Symbol: ERMARD
  Gene Name: ER membrane-associated RNA degradation
  Uniprot ID: Q5T6L9
  ENSP ID: ENSP00000483849

SEQ ID NO: 27967 - protein, 678 aa, Homo sapiens; identical to SEQ ID NO: 27953
  Payload ID: 5516
  Gene Symbol: ERMARD
  Gene Name: ER membrane-associated RNA degradation
  Uniprot ID: Q5T6L9
  ENSP ID: ENSP00000483960

SEQ ID NO: 27968 - protein, 28 aa, Homo sapiens
  Payload ID: 5516
  Gene Symbol: ERMARD
  Gene Name: ER membrane-associated RNA degradation
  ENSP ID: ENSP00000485754
MKLTSCLERALGDVFLLIGKECPFLLRD

SEQ ID NO: 27969 - protein, 73 aa, Homo sapiens; identical to SEQ ID NO: 27959
  Payload ID: 5516
  Gene Symbol: ERMARD
  Gene Name: ER membrane-associated RNA degradation
  ENSP ID: ENSP00000486172

SEQ ID NO: 27970 - protein, 542 aa, Homo sapiens; identical to SEQ ID NO: 27962
  Payload ID: 5516
  Gene Symbol: ERMARD
  Gene Name: ER membrane-associated RNA degradation
  ENSP ID: ENSP00000486399

SEQ ID NO: 27971 - protein, 174 aa, Homo sapiens; identical to SEQ ID NO: 27961
  Payload ID: 5516
  Gene Symbol: ERMARD
  Gene Name: ER membrane-associated RNA degradation
  ENSP ID: ENSP00000486419

SEQ ID NO: 27972 - protein, 5 aa, Homo sapiens
  Payload ID: 5516
  Gene Symbol: ERMARD
  Gene Name: ER membrane-associated RNA degradation
  ENSP ID: ENSP00000486806
MKLTS

SEQ ID NO: 27973 - protein, 74 aa, Homo sapiens; identical to SEQ ID NO: 27957
  Payload ID: 5516
  Gene Symbol: ERMARD
  Gene Name: ER membrane-associated RNA degradation
  ENSP ID: ENSP00000486852

SEQ ID NO: 27974 - protein, 46 aa, Homo sapiens; identical to SEQ ID NO: 27956
  Payload ID: 5516
  Gene Symbol: ERMARD
  Gene Name: ER membrane-associated RNA degradation
  ENSP ID: ENSP00000486998
  MOD_RES (1)..(1): Any amino acid

SEQ ID NO: 27975 - protein, 18 aa, Homo sapiens
  Payload ID: 5516
  Gene Symbol: ERMARD
  Gene Name: ER membrane-associated RNA degradation
  ENSP ID: ENSP00000487161
MKLTSCLERALGDVFLLI

SEQ ID NO: 27976 - protein, 437 aa, Homo sapiens
  Payload ID: 5517
  Gene Symbol: ERAL1
  Gene Name: Era-like 12S mitochondrial rRNA chaperone 1
  Uniprot ID: O75616
  ENSP ID: ENSP00000254928
MAAPSWRGARLVQSVLRVWQVGPHVARERVIPFSSLLGFQRRCVSCVAGSAFSGPRLASASRSNGQGSALDHFLGFSQPDSSVTPCVPAVSMNRDEQDVLLVHHPDMPENSRVLRVVLLGAPNAGKSTLSNQLLGRKVFPVSRKVHTTRCQALGVITEKETQVILLDTPGIISPGKQKRHHLELSLLEDPWKSMESADLVVVLVDVSDKWTRNQLSPQLLRCLTKYSQIPSVLVMNKVDCLKQKSVLLELTAALTEGVVNGKKLKMRQAFHSHPGTHCPSPAVKDPNTQSVGNPQRIGWPHFKEIFMLSALSQEDVKTLKQYLLTQAQPGPWEYHSAVLTSQTPEEICANIIREKLLEHLPQEVPYNVQQKTAVWEEGPGGELVIQQKLLVPKESYVKLLIGPKGHVISQIAQEAGHDLMDIFLCDVDIRLSVKLLK

SEQ ID NO: 27977 - protein, 171 aa, Homo sapiens
  Payload ID: 5517
  Gene Symbol: ERAL1
  Gene Name: Era-like 12S mitochondrial rRNA chaperone 1
  ENSP ID: ENSP00000396125
MAAPSWRGARLVQSVLRVWQVGPHVARERVIPFSSLLGFQRRCVSCVAGSAFSGPRLASASRSNGQGSALDHFLGFSQPDSSVTPCVPAVSMNRDEQDVLLVHHPDMPENSRVLRVVLLGAPNAGKSTLSNQLLGRKVFPVSRKVHTTRCQALGVITEKETQVVGTYKGSP

SEQ ID NO: 27978 - protein, 284 aa, Homo sapiens
  Payload ID: 5517
  Gene Symbol: ERAL1
  Gene Name: Era-like 12S mitochondrial rRNA chaperone 1
  ENSP ID: ENSP00000464402
  MOD_RES (1)..(1): Any amino acid
XSWRGARLVQSVLRVWQVGPHVARERVIPFSSLLGFQRRCVSCVAGSAFSGPRLASASRSNGQGSALDHFLGFSQPDSSVTPCVPAVSMNRDEQDVLLVHHPDMPENSRVLRVVLLGAPNAGKSTLSNQLLGRKVFPVSRKVHTTRCQALGVITEKETQVILLDTPGIISPGKQKRHHLELSLLEDPWKSMESADLVVVLVDVSDKWTRNQLSPQLLRCLTKYSQIPSVLVMNKQYLLTQAQPGPWEYHSAVLTSQTPEEICANIIREKLLEHLPQEVPYNVQQ

SEQ ID NO: 27979 - protein, 276 aa, Homo sapiens
  Payload ID: 5517
  Gene Symbol: ERAL1
  Gene Name: Era-like 12S mitochondrial rRNA chaperone 1
  ENSP ID: ENSP00000464607
  MOD_RES (1)..(1): Any amino acid
XAAPSWRGARLVQSVLRVWQVGPHVARERVIPFSSLLGFQRRCVSCVAGSAFSGPRLASASRSNGQGSALDHFLGFSQPDSSVTPCVPAVSMNRDEQDVLLVHHPDMPENSRVLRVVLLGAPNAGKSTLSNQLLGRKVFPVSRKVHTTRCQALGVITEKETQVILLDTPGIISPGKQKRHHLELSLLEDPWKSMESADLVVVLVDVSDKWTRNQLSPQLLRCLTKYSQIPSVLVMNKVDCLKQKSVLLELTAALTEAIPSDTGPARALGVPQCSPH

SEQ ID NO: 27980 - protein, 80 aa, Homo sapiens
  Payload ID: 5517
  Gene Symbol: ERAL1
  Gene Name: Era-like 12S mitochondrial rRNA chaperone 1
  ENSP ID: ENSP00000467860
QPGPWEYHSAVLTSQTPEEICANIIREKLLEHLPQEVPYNVQQKTAVWEEGPGGELVIQQKLLVPKESYVGIPAQAAGRN

SEQ ID NO: 27981 - protein, 462 aa, Homo sapiens
  Payload ID: 5518
  Gene Symbol: ERRFI1
  Gene Name: ERBB receptor feedback inhibitor 1
  Uniprot ID: Q9UJM3
  ENSP ID: ENSP00000366702
MSIAGVAAQEIRVPLKTGFLHNGRAMGNMRKTYWSSRSEFKNNFLNIDPITMAYSLNSSAQERLIPLGHASKSAPMNGHCFAENGPSQKSSLPPLLIPPSENLGPHEEDQVVCGFKKLTVNGVCASTPPLTPIKNSPSLFPCAPLCERGSRPLPPLPISEALSLDDTDCEVEFLTSSDTDFLLEDSTLSDFKYDVPGRRSFRGCGQINYAYFDTPAVSAADLSYVSDQNGGVPDPNPPPPQTHRRLRRSHSGPAGSFNKPAIRISNCCIHRASPNSDEDKPEVPPRVPIPPRPVKPDYRRWSAEVTSSTYSDEDRPPKVPPREPLSPSNSRTPSPKSLPSYLNGVMPPTQSFAPDPKYVSSKALQRQNSEGSASKVPCILPIIENGKKVSSTHYYLLPERPPYLDKYEKFFREAEETNGGAQIQPLPADCGISSATEKPDSKTKMDLGGHVKRKHLSYVVSP

SEQ ID NO: 27982 - protein, 79 aa, Homo sapiens
  Payload ID: 5518
  Gene Symbol: ERRFI1
  Gene Name: ERBB receptor feedback inhibitor 1
  ENSP ID: ENSP00000465100
MSIAGVAAQEIRVPLKTGFLHNGRAMGNMRKTYWSSRSEFKNNFLNIDPITMAYSLNSSAQERLIPLGMYSENLITVSI

SEQ ID NO: 27983 - protein, 74 aa, Homo sapiens
  Payload ID: 5518
  Gene Symbol: ERRFI1
  Gene Name: ERBB receptor feedback inhibitor 1
  ENSP ID: ENSP00000466454
MSIAGVAAQEIRVPLKTGFLHNGRAMGNMRKTYWSSRSEFKKACFQICSDEWPLLCRKWSISKVQLAPSSYSPK

SEQ ID NO: 27984 - protein, 53 aa, Homo sapiens
  Payload ID: 5518
  Gene Symbol: ERRFI1
  Gene Name: ERBB receptor feedback inhibitor 1
  ENSP ID: ENSP00000466958
MSIAGVAAQEIRVPLKTGFLHNGRAMGNMRKTYWSSRSEFKNTGRKLPGTVGD

SEQ ID NO: 27985 - protein, 52 aa, Homo sapiens
  Payload ID: 5518
  Gene Symbol: ERRFI1
  Gene Name: ERBB receptor feedback inhibitor 1
  ENSP ID: ENSP00000467030
MSIAGVAAQEIRVPLKTGFLHNGRAMGNMRKTYWSSRSEFKNFLSFQQLFKY

SEQ ID NO: 27986 - protein, 1412 aa, Homo sapiens
  Payload ID: 5519
  Gene Symbol: ERBB2IP
  Gene Name: erbb2 interacting protein
  Uniprot ID: Q96RT1
  ENSP ID: ENSP00000284037
MTTKRSLFVRLVPCRCLRGEEETVTTLDYSHCSLEQVPKEIFTFEKTLEELYLDANQIEELPKQLFNCQSLHKLSLPDNDLTTLPASIANLINLRELDVSKNGIQEFPENIKNCKVLTIVEASVNPISKLPDGFSQLLNLTQLYLNDAFLEFLPANFGRLTKLQILELRENQLKMLPKTMNRLTQLERLDLGSNEFTEVPEVLEQLSGLKEFWMDANRLTFIPGFIGSLKQLTYLDVSKNNIEMVEEGISTCENLQDLLLSSNSLQQLPETIGSLKNITTLKIDENQLMYLPDSIGGLISVEELDCSFNEVEALPSSIGQLTNLRTFAADHNYLQQLPPEIGSWKNITVLFLHSNKLETLPEEMGDMQKLKVINLSDNRLKNLPFSFTKLQQLTAMWLSDNQSKPLIPLQKETDSETQKMVLTNYMFPQQPRTEDVMFISDNESFNPSLWEEQRKQRAQVAFECDEDKDEREAPPREGNLKRYPTPYPDELKNMVKTVQTIVHRLKDEETNEDSGRDLKPHEDQQDINKDVGVKTSESTTTVKSKVDEREKYMIGNSVQKISEPEAEISPGSLPVTANMKASENLKHIVNHDDVFEESEELSSDEEMKMAEMRPPLIETSINQPKVVALSNNKKDDTKETDSLSDEVTHNSNQNNSNCSSPSRMSDSVSLNTDSSQDTSLCSPVKQTHIDINSKIRQEDENFNSLLQNGDILNSSTEEKFKAHDKKDFNLPEYDLNVEERLVLIEKSVDSTATADDTHKLDHINMNLNKLITNDTFQPEIMERSKTQDIVLGTSFLSINSKEETEHLENGNKYPNLESVNKVNGHSEETSQSPNRTEPHDSDCSVDLGISKSTEDLSPQKSGPVGSVVKSHSITNMEIGGLKIYDILSDNGPQQPSTTVKITSAVDGKNIVRSKSATLLYDQPLQVFTGSSSSSDLISGTKAIFKFDSNHNPEEPNIIRGPTSGPQSAPQIYGPPQYNIQYSSSAAVKDTLWHSKQNPQIDHASFPPQLLPRSESTENQSYAKHSANMNFSNHNNVRANTAYHLHQRLGPARHGEMWAISPNDRLIPAVTRSTIQRQSSVSSTASVNLGDPGSTRRAQIPEGDYLSYREFHSAGRTPPMMPGSQRPLSARTYSIDGPNASRPQSARPSINEIPERTMSVSDFNYSRTSPSKRPNARVGSEHSLLDPPGKSKVPRDWREQVLRHIEAKKLEKKHPQTSSSGDPCQDGIFISGQQNYSSATLSHKDVPPDSLMKMPLSNGQMGQPLRPQANYSQIHHPPQASVARHPSREQLIDYLMLKVAHQPPYTQPHCSPRQGHELAKQEIRVRVEKDPELGFSISGGVGGRGNPFRPDDDGIFVTRVQPEGPASKLLQPGDKIIQANGYSFINIEHGQAVSLLKTFQNTVELIIVREVSS

SEQ ID NO: 27987 - protein, 1302 aa, Homo sapiens
  Payload ID: 5519
  Gene Symbol: ERBB2IP
  Gene Name: erbb2 interacting protein
  Uniprot ID: Q96RT1
  ENSP ID: ENSP00000370322
MTTKRSLFVRLVPCRCLRGEEETVTTLDYSHCSLEQVPKEIFTFEKTLEELYLDANQIEELPKQLFNCQSLHKLSLPDNDLTTLPASIANLINLRELDVSKNGIQEFPENIKNCKVLTIVEASVNPISKLPDGFSQLLNLTQLYLNDAFLEFLPANFGRLTKLQILELRENQLKMLPKTMNRLTQLERLDLGSNEFTEVPEVLEQLSGLKEFWMDANRLTFIPGFIGSLKQLTYLDVSKNNIEMVEEGISTCENLQDLLLSSNSLQQLPETIGSLKNITTLKIDENQLMYLPDSIGGLISVEELDCSFNEVEALPSSIGQLTNLRTFAADHNYLQQLPPEIGSWKNITVLFLHSNKLETLPEEMGDMQKLKVINLSDNRLKNLPFSFTKLQQLTAMWLSDNQSKPLIPLQKETDSETQKMVLTNYMFPQQPRTEDVMFISDNESFNPSLWEEQRKQRAQVAFECDEDKDEREAPPREGNLKRYPTPYPDELKNMVKTVQTIVHRLKDEETNEDSGRDLKPHEDQQDINKDVGVKTSESTTTVKSKVDEREKYMIGNSVQKISEPEAEISPGSLPVTANMKASENLKHIVNHDDVFEESEELSSDEEMKMAEMRPPLIETSINQPKVVALSNNKKDDTKETDSLSDEVTHNSNQNNSNCSSPSRMSDSVSLNTDSSQDTSLCSPVKQTHIDINSKIRQEDENFNSLLQNGDILNSSTEEKFKAHDKKDFNLPEYDLNVEERLVLIEKSVDSTATADDTHKLDHINMNLNKLITNDTFQPEIMERSKTQDIVLGTSFLSINSKEETEHLENGNKYPNLESVNKVNGHSEETSQSPNRTEPHDSDCSVDLGISKSTEDLSPQKSGPVGSVVKSHSITNMEIGGLKIYDILSDNGPQQPSTTVKITSAVDGKNIVRSKSATLLYDQPLQVFTGSSSSSDLISGTKAIFKFDSNHNPEEPNIIRGPTSGPQSAPQIYGPPQYNIQYSSSAAVKDTLWHSKQNPQIDHASFPPQLLPRSESTENQSYAKHSANMNFSNHNNVRANTAYHLHQRLGPARHGEMWAISPNDRLIPAVTRSTIQRQSSVSSTASVNLGDPGSTRRAQIPEGDYLSYREFHSAGRTPPMMPGSQRPLSARTYSIDGPNASRPQSARPSINEIPERTMSVSDFNYSRTSPSKRPNARVGSEHSLLDPPGKSKVPRDWREQVLRHIEAKKLEKIRVRVEKDPELGFSISGGVGGRGNPFRPDDDGIFVTRVQPEGPASKLLQPGDKIIQANGYSFINIEHGQAVSLLKTFQNTVELIIVREVSS

SEQ ID NO: 27988 - protein, 1346 aa, Homo sapiens
  Payload ID: 5519
  Gene Symbol: ERBB2IP
  Gene Name: erbb2 interacting protein
  Uniprot ID: Q96RT1
  ENSP ID: ENSP00000370325
MTTKRSLFVRLVPCRCLRGEEETVTTLDYSHCSLEQVPKEIFTFEKTLEELYLDANQIEELPKQLFNCQSLHKLSLPDNDLTTLPASIANLINLRELDVSKNGIQEFPENIKNCKVLTIVEASVNPISKLPDGFSQLLNLTQLYLNDAFLEFLPANFGRLTKLQILELRENQLKMLPKTMNRLTQLERLDLGSNEFTEVPEVLEQLSGLKEFWMDANRLTFIPGFIGSLKQLTYLDVSKNNIEMVEEGISTCENLQDLLLSSNSLQQLPETIGSLKNITTLKIDENQLMYLPDSIGGLISVEELDCSFNEVEALPSSIGQLTNLRTFAADHNYLQQLPPEIGSWKNITVLFLHSNKLETLPEEMGDMQKLKVINLSDNRLKNLPFSFTKLQQLTAMWLSDNQSKPLIPLQKETDSETQKMVLTNYMFPQQPRTEDVMFISDNESFNPSLWEEQRKQRAQVAFECDEDKDEREAPPREGNLKRYPTPYPDELKNMVKTVQTIVHRLKDEETNEDSGRDLKPHEDQQDINKDVGVKTSESTTTVKSKVDEREKYMIGNSVQKISEPEAEISPGSLPVTANMKASENLKHIVNHDDVFEESEELSSDEEMKMAEMRPPLIETSINQPKVVALSNNKKDDTKETDSLSDEVTHNSNQNNSNCSSPSRMSDSVSLNTDSSQDTSLCSPVKQTHIDINSKIRQEDENFNSLLQNGDILNSSTEEKFKAHDKKDFNLPEYDLNVEERLVLIEKSVDSTATADDTHKLDHINMNLNKLITNDTFQPEIMERSKTQDIVLGTSFLSINSKEETEHLENGNKYPNLESVNKVNGHSEETSQSPNRTEPHDSDCSVDLGISKSTEDLSPQKSGPVGSVVKSHSITNMEIGGLKIYDILSDNGPQQPSTTVKITSAVDGKNIVRSKSATLLYDQPLQVFTGSSSSSDLISGTKAIFKFDSNHNPEEPNIIRGPTSGPQSAPQIYGPPQYNIQYSSSAAVKDTLWHSKQNPQIDHASFPPQLLPRSESTENQSYAKHSANMNFSNHNNVRANTAYHLHQRLGPARHGEMWAISPNDRLIPAVTRSTIQRQSSVSSTASVNLGDPGSTRRAQIPEGDYLSYREFHSAGRTPPMMPGSQRPLSARTYSIDGPNASRPQSARPSINEIPERTMSVSDFNYSRTSPSKRPNARVGSEHSLLDPPGKSKVPRDWREQVLRHIEAKKLEKMPLSNGQMGQPLRPQANYSQIHHPPQASVARHPSREQLIDYLMLKVAHQPPYTQPHCSPRQGHELAKQEIRVRVEKDPELGFSISGGVGGRGNPFRPDDDANGYSFINIEHGQAVSLLKTFQNTVELIIVREVSS

SEQ ID NO: 27989 - protein, 1371 aa, Homo sapiens
  Payload ID: 5519
  Gene Symbol: ERBB2IP
  Gene Name: erbb2 interacting protein
  Uniprot ID: Q96RT1
  ENSP ID: ENSP00000370330
MTTKRSLFVRLVPCRCLRGEEETVTTLDYSHCSLEQVPKEIFTFEKTLEELYLDANQIEELPKQLFNCQSLHKLSLPDNDLTTLPASIANLINLRELDVSKNGIQEFPENIKNCKVLTIVEASVNPISKLPDGFSQLLNLTQLYLNDAFLEFLPANFGRLTKLQILELRENQLKMLPKTMNRLTQLERLDLGSNEFTEVPEVLEQLSGLKEFWMDANRLTFIPGFIGSLKQLTYLDVSKNNIEMVEEGISTCENLQDLLLSSNSLQQLPETIGSLKNITTLKIDENQLMYLPDSIGGLISVEELDCSFNEVEALPSSIGQLTNLRTFAADHNYLQQLPPEIGSWKNITVLFLHSNKLETLPEEMGDMQKLKVINLSDNRLKNLPFSFTKLQQLTAMWLSDNQSKPLIPLQKETDSETQKMVLTNYMFPQQPRTEDVMFISDNESFNPSLWEEQRKQRAQVAFECDEDKDEREAPPREGNLKRYPTPYPDELKNMVKTVQTIVHRLKDEETNEDSGRDLKPHEDQQDINKDVGVKTSESTTTVKSKVDEREKYMIGNSVQKISEPEAEISPGSLPVTANMKASENLKHIVNHDDVFEESEELSSDEEMKMAEMRPPLIETSINQPKVVALSNNKKDDTKETDSLSDEVTHNSNQNNSNCSSPSRMSDSVSLNTDSSQDTSLCSPVKQTHIDINSKIRQEDENFNSLLQNGDILNSSTEEKFKAHDKKDFNLPEYDLNVEERLVLIEKSVDSTATADDTHKLDHINMNLNKLITNDTFQPEIMERSKTQDIVLGTSFLSINSKEETEHLENGNKYPNLESVNKVNGHSEETSQSPNRTEPHDSDCSVDLGISKSTEDLSPQKSGPVGSVVKSHSITNMEIGGLKIYDILSDNGPQQPSTTVKITSAVDGKNIVRSKSATLLYDQPLQVFTGSSSSSDLISGTKAIFKFDSNHNPEEPNIIRGPTSGPQSAPQIYGPPQYNIQYSSSAAVKDTLWHSKQNPQIDHASFPPQLLPRSESTENQSYAKHSANMNFSNHNNVRANTAYHLHQRLGPARHGEMWAISPNDRLIPAVTRSTIQRQSSVSSTASVNLGDPGSTRRAQIPEGDYLSYREFHSAGRTPPMMPGSQRPLSARTYSIDGPNASRPQSARPSINEIPERTMSVSDFNYSRTSPSKRPNARVGSEHSLLDPPGKSKVPRDWREQVLRHIEAKKLEKMPLSNGQMGQPLRPQANYSQIHHPPQASVARHPSREQLIDYLMLKVAHQPPYTQPHCSPRQGHELAKQEIRVRVEKDPELGFSISGGVGGRGNPFRPDDDGIFVTRVQPEGPASKLLQPGDKIIQANGYSFINIEHGQAVSLLKTFQNTVELIIVREVSS

SEQ ID NO: 27990 - protein, 610 aa, Homo sapiens
  Payload ID: 5519
  Gene Symbol: ERBB2IP
  Gene Name: erbb2 interacting protein
  ENSP ID: ENSP00000397833
MTTKRSLFVRLVPCRCLRGEEETVTTLDYSHCSLEQVPKEIFTFEKTLEELYLDANQIEELPKQLFNCQSLHKLSLPDNDLTTLPASIANLINLRELDVSKNGIQEFPENIKNCKVLTIVEASVNPISKLPDGFSQLLNLTQLYLNDAFLEFLPANFGRLTKLQILELRENQLKMLPKTMNRLTQLERLDLGSNEFTEVPEVLEQLSGLKEFWMDANRLTFIPGFIGSLKQLTYLDVSKNNIEMVEEGISTCENLQDLLLSSNSLQQLPETIGSLKNITTLKIDENQLMYLPDSIGGLISVEELDCSFNEVEALPSSIGQLTNLRTFAADHNYLQQLPPEIGSWKNITVLFLHSNKLETLPEEMGDMQKLKVINLSDNRLKNLPFSFTKLQQLTAMWLSDNQSMLSRSFNSNFTTVSSFHCGSSRDLHGSQGSLALSVADRRGSGGHIFRMPLSNGQMGQPLRPQANYSQIHHPPQASVARHPSREQLIDYLMLKVAHQPPYTQPHCSPRQGHELAKQEIRVRVEKDPELGFSISGGVGGRGNPFRPDDDGIFVTRVQPEGPASKLLQPGDKIIQANGYSFINIEHGQAVSLLKTFQNTVELIIVREVSS

SEQ ID NO: 27991 - protein, 1302 aa, Homo sapiens; identical to SEQ ID NO: 27987
  Payload ID: 5519
  Gene Symbol: ERBB2IP
  Gene Name: erbb2 interacting protein
  Uniprot ID: Q96RT1
  ENSP ID: ENSP00000422015

SEQ ID NO: 27992 - protein, 1367 aa, Homo sapiens
  Payload ID: 5519
  Gene Symbol: ERBB2IP
  Gene Name: erbb2 interacting protein
  Uniprot ID: Q96RT1
  ENSP ID: ENSP00000422766
MTTKRSLFVRLVPCRCLRGEEETVTTLDYSHCSLEQVPKEIFTFEKTLEELYLDANQIEELPKQLFNCQSLHKLSLPDNDLTTLPASIANLINLRELDVSKNGIQEFPENIKNCKVLTIVEASVNPISKLPDGFSQLLNLTQLYLNDAFLEFLPANFGRLTKLQILELRENQLKMLPKTMNRLTQLERLDLGSNEFTEVPEVLEQLSGLKEFWMDANRLTFIPGFIGSLKQLTYLDVSKNNIEMVEEGISTCENLQDLLLSSNSLQQLPETIGSLKNITTLKIDENQLMYLPDSIGGLISVEELDCSFNEVEALPSSIGQLTNLRTFAADHNYLQQLPPEIGSWKNITVLFLHSNKLETLPEEMGDMQKLKVINLSDNRLKNLPFSFTKLQQLTAMWLSDNQSKPLIPLQKETDSETQKMVLTNYMFPQQPRTEDVMFISDNESFNPSLWEEQRKQRAQVAFECDEDKDEREAPPREGNLKRYPTPYPDELKNMVKTVQTIVHRLKDEETNEDSGRDLKPHEDQQDINKDTSESTTTVKSKVDEREKYMIGNSVQKISEPEAEISPGSLPVTANMKASENLKHIVNHDDVFEESEELSSDEEMKMAEMRPPLIETSINQPKVVALSNNKKDDTKETDSLSDEVTHNSNQNNSNCSSPSRMSDSVSLNTDSSQDTSLCSPVKQTHIDINSKIRQEDENFNSLLQNGDILNSSTEEKFKAHDKKDFNLPEYDLNVEERLVLIEKSVDSTATADDTHKLDHINMNLNKLITNDTFQPEIMERSKTQDIVLGTSFLSINSKEETEHLENGNKYPNLESVNKVNGHSEETSQSPNRTEPHDSDCSVDLGISKSTEDLSPQKSGPVGSVVKSHSITNMEIGGLKIYDILSDNGPQQPSTTVKITSAVDGKNIVRSKSATLLYDQPLQVFTGSSSSSDLISGTKAIFKFDSNHNPEEPNIIRGPTSGPQSAPQIYGPPQYNIQYSSSAAVKDTLWHSKQNPQIDHASFPPQLLPRSESTENQSYAKHSANMNFSNHNNVRANTAYHLHQRLGPARHGEMWAISPNDRLIPAVTRSTIQRQSSVSSTASVNLGDPGSTRRAQIPEGDYLSYREFHSAGRTPPMMPGSQRPLSARTYSIDGPNASRPQSARPSINEIPERTMSVSDFNYSRTSPSKRPNARVGSEHSLLDPPGKSKVPRDWREQVLRHIEAKKLEKMPLSNGQMGQPLRPQANYSQIHHPPQASVARHPSREQLIDYLMLKVAHQPPYTQPHCSPRQGHELAKQEIRVRVEKDPELGFSISGGVGGRGNPFRPDDDGIFVTRVQPEGPASKLLQPGDKIIQANGYSFINIEHGQAVSLLKTFQNTVELIIVREVSS

SEQ ID NO: 27993 - protein, 158 aa, Homo sapiens
  Payload ID: 5519
  Gene Symbol: ERBB2IP
  Gene Name: erbb2 interacting protein
  ENSP ID: ENSP00000423959
SMLSRSFNSNFTTVSSFHCGSSRDLHGSQGSLALSVADRRGSGGHIFRKHPQTSSSGDPCQDGIFISGQQNYSSATLSHKDVPPDSLMKMPLSNGQMGQPLRPQANYSQIHHPPQASVARHPSREQLIDYLMLKVAHQPPYTQPHCSPRQGHELAKQE

SEQ ID NO: 27994 - protein, 197 aa, Homo sapiens
  Payload ID: 5519
  Gene Symbol: ERBB2IP
  Gene Name: erbb2 interacting protein
  ENSP ID: ENSP00000425728
  MOD_RES (1)..(1): Any amino acid
XSYREFHSAGRTPPMMPGSQRPLSARTYSIDGPNASRPQSARPSINEIPERTMSVSDFNYSRTSPSKRPNARVGSEHSLLDPPGKSKVPRDWREQVLRHIEAKKLEKSMLSRSFNSNFTTVSSFHCGSSRDLHGSQGSLALSVADRRGSGGHIFRKHPQTSSSGDPCQDGIFISGQQNYSSATLSHKDVPPDSLMKV

SEQ ID NO: 27995 - protein, 1419 aa, Homo sapiens
  Payload ID: 5519
  Gene Symbol: ERBB2IP
  Gene Name: erbb2 interacting protein
  Uniprot ID: Q96RT1
  ENSP ID: ENSP00000426632
MTTKRSLFVRLVPCRCLRGEEETVTTLDYSHCSLEQVPKEIFTFEKTLEELYLDANQIEELPKQLFNCQSLHKLSLPDNDLTTLPASIANLINLRELDVSKNGIQEFPENIKNCKVLTIVEASVNPISKLPDGFSQLLNLTQLYLNDAFLEFLPANFGRLTKLQILELRENQLKMLPKTMNRLTQLERLDLGSNEFTEVPEVLEQLSGLKEFWMDANRLTFIPGFIGSLKQLTYLDVSKNNIEMVEEGISTCENLQDLLLSSNSLQQLPETIGSLKNITTLKIDENQLMYLPDSIGGLISVEELDCSFNEVEALPSSIGQLTNLRTFAADHNYLQQLPPEIGSWKNITVLFLHSNKLETLPEEMGDMQKLKVINLSDNRLKNLPFSFTKLQQLTAMWLSDNQSKPLIPLQKETDSETQKMVLTNYMFPQQPRTEDVMFISDNESFNPSLWEEQRKQRAQVAFECDEDKDEREAPPREGNLKRYPTPYPDELKNMVKTVQTIVHRLKDEETNEDSGRDLKPHEDQQDINKDVGVKTSESTTTVKSKVDEREKYMIGNSVQKISEPEAEISPGSLPVTANMKASENLKHIVNHDDVFEESEELSSDEEMKMAEMRPPLIETSINQPKVVALSNNKKDDTKETDSLSDEVTHNSNQNNSNCSSPSRMSDSVSLNTDSSQDTSLCSPVKQTHIDINSKIRQEDENFNSLLQNGDILNSSTEEKFKAHDKKDFNLPEYDLNVEERLVLIEKSVDSTATADDTHKLDHINMNLNKLITNDTFQPEIMERSKTQDIVLGTSFLSINSKEETEHLENGNKYPNLESVNKVNGHSEETSQSPNRTEPHDSDCSVDLGISKSTEDLSPQKSGPVGSVVKSHSITNMEIGGLKIYDILSDNGPQQPSTTVKITSAVDGKNIVRSKSATLLYDQPLQVFTGSSSSSDLISGTKAIFKFDSNHNPEEPNIIRGPTSGPQSAPQIYGPPQYNIQYSSSAAVKDTLWHSKQNPQIDHASFPPQLLPRSESTENQSYAKHSANMNFSNHNNVRANTAYHLHQRLGPARHGEMWAISPNDRLIPAVTRSTIQRQSSVSSTASVNLGDPGSTRRAQIPEGDYLSYREFHSAGRTPPMMPGSQRPLSARTYSIDGPNASRPQSARPSINEIPERTMSVSDFNYSRTSPSKRPNARVGSEHSLLDPPGKSKVPRDWREQVLRHIEAKKLEKSMLSRSFNSNFTTVSSFHCGSSRDLHGSQGSLALSVADRRGSGGHIFRMPLSNGQMGQPLRPQANYSQIHHPPQASVARHPSREQLIDYLMLKVAHQPPYTQPHCSPRQGHELAKQEIRVRVEKDPELGFSISGGVGGRGNPFRPDDDGIFVTRVQPEGPASKLLQPGDKIIQANGYSFINIEHGQAVSLLKTFQNTVELIIVREVSS

SEQ ID NO: 27996 - protein, 1255 aa, Homo sapiens [sequence omitted]

SEQ ID NO: 27997 - protein, 1225 aa, Homo sapiens
  Payload ID: 5520
  Gene Symbol: ERBB2
  Gene Name: erb-b2 receptor tyrosine kinase 2
  Uniprot ID: P04626
  ENSP ID: ENSP00000385185
MKLRLPASPETHLDMLRHLYQGCQVVQGNLELTYLPTNASLSFLQDIQEVQGYVLIAHNQVRQVPLQRLRIVRGTQLFEDNYALAVLDNGDPLNNTTPVTGASPGGLRELQLRSLTEILKGGVLIQRNPQLCYQDTILWKDIFHKNNQLALTLIDTNRSRACHPCSPMCKGSRCWGESSEDCQSLTRTVCAGGCARCKGPLPTDCCHEQCAAGCTGPKHSDCLACLHFNHSGICELHCPALVTYNTDTFESMPNPEGRYTFGASCVTACPYNYLSTDVGSCTLVCPLHNQEVTAEDGTQRCEKCSKPCARVCYGLGMEHLREVRAVTSANIQEFAGCKKIFGSLAFLPESFDGDPASNTAPLQPEQLQVFETLEEITGYLYISAWPDSLPDLSVFQNLQVIRGRILHNGAYSLTLQGLGISWLGLRSLRELGSGLALIHHNTHLCFVHTVPWDQLFRNPHQALLHTANRPEDECVGEGLACHQLCARGHCWGPGPTQCVNCSQFLRGQECVEECRVLQGLPREYVNARHCLPCHPECQPQNGSVTCFGPEADQCVACAHYKDPPFCVARCPSGVKPDLSYMPIWKFPDEEGACQPCPINCTHSCVDLDDKGCPAEQRASPLTSIISAVVGILLVVVLGVVFGILIKRRQQKIRKYTMRRLLQETELVEPLTPSGAMPNQAQMRILKETELRKVKVLGSGAFGTVYKGIWIPDGENVKIPVAIKVLRENTSPKANKEILDEAYVMAGVGSPYVSRLLGICLTSTVQLVTQLMPYGCLLDHVRENRGRLGSQDLLNWCMQIAKGMSYLEDVRLVHRDLAARNVLVKSPNHVKITDFGLARLLDIDETEYHADGGKVPIKWMALESILRRRFTHQSDVWSYGVTVWELMTFGAKPYDGIPAREIPDLLEKGERLPQPPICTIDVYMIMVKCWMIDSECRPRFRELVSEFSRMARDPQRFVVIQNEDLGPASPLDSTFYRSLLEDDDMGDLVDAEEYLVPQQGFFCPDPAPGAGGMVHHRHRSSSTRSGGGDLTLGLEPSEEEAPRSPLAPSEGAGSDVFDGDLGMGAAKGLQSLPTHDPSPLQRYSEDPTVPLPSETDGYVAPLTCSPQPEYVNQPDVRPQPPSPREGPLPAARPAGATLERPKTLSPGKNGVVKDVFAFGGAVENPEYLTPQGGAAPQPHPPPAFSPAFDNLYYWDQDPPERGAPPSTFKGTPTAENPEYLGLDVPV

SEQ ID NO: 27998 - protein, 979 aa, Homo sapiens
  Payload ID: 5520
  Gene Symbol: ERBB2
  Gene Name: erb-b2 receptor tyrosine kinase 2
  ENSP ID: ENSP00000404047
MELAALCRWGLLLALLPPGAASTQDNYLSTDVGSCTLVCPLHNQEVTAEDGTQRCEKCSKPCARVCYGLGMEHLREVRAVTSANIQEFAGCKKIFGSLAFLPESFDGDPASNTAPLQPEQLQVFETLEEITGYLYISAWPDSLPDLSVFQNLQVIRGRILHNGAYSLTLQGLGISWLGLRSLRELGSGLALIHHNTHLCFVHTVPWDQLFRNPHQALLHTANRPEDECVGEGLACHQLCARGHCWGPGPTQCVNCSQFLRGQECVEECRVLQGLPREYVNARHCLPCHPECQPQNGSVTCFGPEADQCVACAHYKDPPFCVARCPSGVKPDLSYMPIWKFPDEEGACQPCPINCTHSCVDLDDKGCPAEQRASPLTSIISAVVGILLVVVLGVVFGILIKRRQQKIRKYTMRRLLQETELVEPLTPSGAMPNQAQMRILKETELRKVKVLGSGAFGTVYKGIWIPDGENVKIPVAIKVLRENTSPKANKEILDEAYVMAGVGSPYVSRLLGICLTSTVQLVTQLMPYGCLLDHVRENRGRLGSQDLLNWCMQIAKGMSYLEDVRLVHRDLAARNVLVKSPNHVKITDFGLARLLDIDETEYHADGGKVPIKWMALESILRRRFTHQSDVWSYGVTVWELMTFGAKPYDGIPAREIPDLLEKGERLPQPPICTIDVYMIMVKCWMIDSECRPRFRELVSEFSRMARDPQRFVVIQNEDLGPASPLDSTFYRSLLEDDDMGDLVDAEEYLVPQQGFFCPDPAPGAGGMVHHRHRSSSTRSGGGDLTLGLEPSEEEAPRSPLAPSEGAGSDVFDGDLGMGAAKGLQSLPTHDPSPLQRYSEDPTVPLPSETDGYVAPLTCSPQPEYVNQPDVRPQPPSPREGPLPAARPAGATLERPKTLSPGKNGVVKDVFAFGGAVENPEYLTPQGGAAPQPHPPPAFSPAFDNLYYWDQDPPERGAPPSTFKGTPTAENPEYLGLDVPV

SEQ ID NO: 27999 - protein, 1240 aa, Homo sapiens
  Payload ID: 5520
  Gene Symbol: ERBB2
  Gene Name: erb-b2 receptor tyrosine kinase 2
  Uniprot ID: P04626
  ENSP ID: ENSP00000446466
MPRGSWKPQVCTGTDMKLRLPASPETHLDMLRHLYQGCQVVQGNLELTYLPTNASLSFLQDIQEVQGYVLIAHNQVRQVPLQRLRIVRGTQLFEDNYALAVLDNGDPLNNTTPVTGASPGGLRELQLRSLTEILKGGVLIQRNPQLCYQDTILWKDIFHKNNQLALTLIDTNRSRACHPCSPMCKGSRCWGESSEDCQSLTRTVCAGGCARCKGPLPTDCCHEQCAAGCTGPKHSDCLACLHFNHSGICELHCPALVTYNTDTFESMPNPEGRYTFGASCVTACPYNYLSTDVGSCTLVCPLHNQEVTAEDGTQRCEKCSKPCARVCYGLGMEHLREVRAVTSANIQEFAGCKKIFGSLAFLPESFDGDPASNTAPLQPEQLQVFETLEEITGYLYISAWPDSLPDLSVFQNLQVIRGRILHNGAYSLTLQGLGISWLGLRSLRELGSGLALIHHNTHLCFVHTVPWDQLFRNPHQALLHTANRPEDECVGEGLACHQLCARGHCWGPGPTQCVNCSQFLRGQECVEECRVLQGLPREYVNARHCLPCHPECQPQNGSVTCFGPEADQCVACAHYKDPPFCVARCPSGVKPDLSYMPIWKFPDEEGACQPCPINCTHSCVDLDDKGCPAEQRASPLTSIISAVVGILLVVVLGVVFGILIKRRQQKIRKYTMRRLLQETELVEPLTPSGAMPNQAQMRILKETELRKVKVLGSGAFGTVYKGIWIPDGENVKIPVAIKVLRENTSPKANKEILDEAYVMAGVGSPYVSRLLGICLTSTVQLVTQLMPYGCLLDHVRENRGRLGSQDLLNWCMQIAKGMSYLEDVRLVHRDLAARNVLVKSPNHVKITDFGLARLLDIDETEYHADGGKVPIKWMALESILRRRFTHQSDVWSYGVTVWELMTFGAKPYDGIPAREIPDLLEKGERLPQPPICTIDVYMIMVKCWMIDSECRPRFRELVSEFSRMARDPQRFVVIQNEDLGPASPLDSTFYRSLLEDDDMGDLVDAEEYLVPQQGFFCPDPAPGAGGMVHHRHRSSSTRSGGGDLTLGLEPSEEEAPRSPLAPSEGAGSDVFDGDLGMGAAKGLQSLPTHDPSPLQRYSEDPTVPLPSETDGYVAPLTCSPQPEYVNQPDVRPQPPSPREGPLPAARPAGATLERPKTLSPGKNGVVKDVFAFGGAVENPEYLTPQGGAAPQPHPPPAFSPAFDNLYYWDQDPPERGAPPSTFKGTPTAENPEYLGLDVPV

SEQ ID NO: 28000 - protein, 96 aa, Homo sapiens
  Payload ID: 5520
  Gene Symbol: ERBB2
  Gene Name: erb-b2 receptor tyrosine kinase 2
  ENSP ID: ENSP00000462024
MELAALCRWGLLLALLPPGAASTQVCTGTDMKLRLPASPETHLDMLRHLYQGCQVVQGNLELTYLPTNASLSFLQTTTFLRTWDPAPSSAPCTTKR

SEQ ID NO: 28001 - protein, 139 aa, Homo sapiens
  Payload ID: 5520
  Gene Symbol: ERBB2
  Gene Name: erb-b2 receptor tyrosine kinase 2
  ENSP ID: ENSP00000462270
MKLRLPASPETHLDMLRHLYQGCQVVQGNLELTYLPTNASLSFLQDIQEVQGYVLIAHNQVRQVPLQRLRIVRGTQLFEDNYALAVLDNGDPLNNTTPVTGASPGGLRELQLRSLTEILKGGVLIQRNPQLCYQDTILW

SEQ ID NO: 28002 - protein, 1225 aa, Homo sapiens; identical to SEQ ID NO: 27997
  Payload ID: 5520
  Gene Symbol: ERBB2
  Gene Name: erb-b2 receptor tyrosine kinase 2
  Uniprot ID: P04626
  ENSP ID: ENSP00000462438

SEQ ID NO: 28003 - protein, 603 aa, Homo sapiens
  Payload ID: 5520
  Gene Symbol: ERBB2
  Gene Name: erb-b2 receptor tyrosine kinase 2
  ENSP ID: ENSP00000462808
MKLRLPASPETHLDMLRHLYQGCQVVQGNLELTYLPTNASLSFLQDIQEVQGYVLIAHNQVRQVPLQRLRIVRGTQLFEDNYALAVLDNGDPLNNTTPVTGASPGGLRELQLRSLTEILKGGVLIQRNPQLCYQDTILWKDIFHKNNQLALTLIDTNRSRACHPCSPMCKGSRCWGESSEDCQSLTRTVCAGGCARCKGPLPTDCCHEQCAAGCTGPKHSDCLACLHFNHSGICELHCPALVTYNTDTFESMPNPEGRYTFGASCVTACPYNYLSTDVGSCTLVCPLHNQEVTAEDGTQRCEKCSKPCARVCYGLGMEHLREVRAVTSANIQEFAGCKKIFGSLAFLPESFDGDPASNTAPLQPEQLQVFETLEEITGYLYISAWPDSLPDLSVFQNLQVIRGRILHNGAYSLTLQGLGISWLGLRSLRELGSGLALIHHNTHLCFVHTVPWDQLFRNPHQALLHTANRPEDECVGEGLACHQLCARGHCWGPGPTQCVNCSQFLRGQECVEECRVLQGLPREYVNARHCLPCHPECQPQNGSVTCFGPEADQCVACAHYKDPPFCVARCPSGVKPDLSYMPIWKFPDEEGACQPCPINCTHS

SEQ ID NO: 28004 - protein, 251 aa, Homo sapiens
  Payload ID: 5520
  Gene Symbol: ERBB2
  Gene Name: erb-b2 receptor tyrosine kinase 2
  ENSP ID: ENSP00000463002
  MOD_RES (1)..(1): Any amino acid
XPDEEGACQPCPINCTHSPLTSIISAVVGILLVVVLGVVFGILIKRRQQKIRKYTMRRLLQETELVEPLTPSGAMPNQAQMRILKETELRKVKVLGSGAFGTVYKGIWIPDGENVKIPVAIKVLRENTSPKANKEILDEAYVMAGVGSPYVSRLLGICLTSTVQLVTQLMPYGCLLDHVRENRGRLGSQDLLNWCMQIAKGMSYLEDVRLVHRDLAARNVLVKSPNHVKITDFGLARLLDIDETEYHADGG

SEQ ID NO: 28005 - protein, 90 aa, Homo sapiens
  Payload ID: 5520
  Gene Symbol: ERBB2
  Gene Name: erb-b2 receptor tyrosine kinase 2
  ENSP ID: ENSP00000463427
MELAALCRWGLLLALLPPGAASTQVCTGTDMKLRLPASPETHLDMLRHLYQGCQVVQGNLELTYLPTNASLSFLQVRPVGNPARPCLQLG

SEQ ID NO: 28006 - protein, 1055 aa, Homo sapiens
  Payload ID: 5520
  Gene Symbol: ERBB2
  Gene Name: erb-b2 receptor tyrosine kinase 2
  ENSP ID: ENSP00000463714
MELAALCRWGLLLALLPPGAASTQVCTGTDMKLRLPASPETHLDMLRHLYQGCQVVQGNLELTYLPTNASLSFLQDIQEVQGYVLIAHNQVRQVPLQRLRIVRGTQLFEDNYALAVLDNGDPLNNTTPVTGASPGGLRELQLRSLTEILKGGVLIQRNPQLCYQDTILWKDIFHKNNQLALTLIDTNRSRACHPCSPMCKGSRCWGESSEDCQSLTRTVCAGGCARCKGPLPTDCCHEQCAAGCTGPKHSDCLACLHFNHSGICELHCPALVTYNTDTFESMPNPEGRYTFGASCVTACPYNYLSTDVGSCTLVCPLHNQEVTAEDGTQRCEKCSKPCARVCYGLGMEHLREVRAVTSANIQEFAGCKKIFGSLAFLPESFDGDPASNTAPLQPEQLQVFETLEEITGYLYISAWPDSLPDLSVFQNLQVIRGRILHNGAYSLTLQGLGISWLGLRSLRELGSGLALIHHNTHLCFVHTVPWDQLFRNPHQALLHTANRPEDECVGEGLACHQLCARGHCWGPGPTQCVNCSQFLRGQECVEECRVLQGLPREYVNARHCLPCHPECQPQNGSVTCFGPEADQCVACAHYKDPPFCVARCPSGVKPDLSYMPIWKFPDEEGACQPCPINCTHSCVDLDDKGCPAEQRASPLTSIISAVVGILLVVVLGVVFGILIKRRQQKIRKYTMRRLLQETELVEPLTPSGAMPNQAQMRILKETELRKVKVLGSGAFGTVYKGIWIPDGENVKIPVAIKVLRENTSPKANKEILDEAYVMAGVGSPYVSRLLGICLTSTVQLVTQLMPYGCLLDHVRENRGRLGSQDLLNWCMQIAKGMSYLEDVRLVHRDLAARNVLVKSPNHVKITDFGLARLLDIDETEYHADGGKVPIKWMALESILRRRFTHQSDVWSYGVTVWELMTFGAKPYDGIPAREIPDLLEKGERLPQPPICTIDVYMIMVKCWMIDSECRPRFRELVSEFSRMARDPQRFVVIQNEDLGPASPLDSTFYRSLLEDDDMGDLVDAEEYLVPQQGFFCPDPAPGAGGMVHHRHRSSSTRNM

SEQ ID NO: 28007 - protein, 102 aa, Homo sapiens
  Payload ID: 5520
  Gene Symbol: ERBB2
  Gene Name: erb-b2 receptor tyrosine kinase 2
  ENSP ID: ENSP00000463719
MKLRLPASPETHLDMLRHLYQGCQVVQGNLELTYLPTNASLSFLQDIQEVQGYVLIAHNQVRQVPLQRLRIVRGTQLFEDNYALAVLDNGDPLNNTTPVTGA

SEQ ID NO: 28008 - protein, 177 aa, Homo sapiens
  Payload ID: 5520
  Gene Symbol: ERBB2
  Gene Name: erb-b2 receptor tyrosine kinase 2
  ENSP ID: ENSP00000464252
  MOD_RES (1)..(1): Any amino acid
XPCHPECQPQNGSVTCFGPEADQCVACAHYKDPPFCVARCPSGVKPDLSYMPIWKFPDEEGACQPCPINCTHSCVDLDDKGCPAEQRASPLTSIISAVVGILLVVVLGVVFGILIKRRQQKIRKYTMRRLLQETELVEPLTPSGAMPNQAQMRILKETELRKVKGIWIPDGENVKIP

SEQ ID NO: 28009 - protein, 166 aa, Homo sapiens
  Payload ID: 5520
  Gene Symbol: ERBB2
  Gene Name: erb-b2 receptor tyrosine kinase 2
  ENSP ID: ENSP00000464420
  MOD_RES (1)..(1): Any amino acid
XHSGICELHCPALVTYNTDTFESMPNPEGRYTFGASCVTACPYNYLSTDVGSCTLVCPLHNQEVTAEDGTQRCEKCSKPCARVCYGLGMEHLREVRAVTSANIQEFAGCKKIFGSLAFLPESFDGVSLCQQAGVQWYDLGSLQPLPPGFKQFSCLSLLSSWDYRDP

SEQ ID NO: 28010 - protein, 1342 aa, Homo sapiens
  Payload ID: 5521
  Gene Symbol: ERBB3
  Gene Name: erb-b2 receptor tyrosine kinase 3
  Uniprot ID: P21860
  ENSP ID: ENSP00000267101
MRANDALQVLGLLFSLARGSEVGNSQAVCPGTLNGLSVTGDAENQYQTLYKLYERCEVVMGNLEIVLTGHNADLSFLQWIREVTGYVLVAMNEFSTLPLPNLRVVRGTQVYDGKFAIFVMLNYNTNSSHALRQLRLTQLTEILSGGVYIEKNDKLCHMDTIDWRDIVRDRDAEIVVKDNGRSCPPCHEVCKGRCWGPGSEDCQTLTKTICAPQCNGHCFGPNPNQCCHDECAGGCSGPQDTDCFACRHFNDSGACVPRCPQPLVYNKLTFQLEPNPHTKYQYGGVCVASCPHNFVVDQTSCVRACPPDKMEVDKNGLKMCEPCGGLCPKACEGTGSGSRFQTVDSSNIDGFVNCTKILGNLDFLITGLNGDPWHKIPALDPEKLNVFRTVREITGYLNIQSWPPHMHNFSVFSNLTTIGGRSLYNRGFSLLIMKNLNVTSLGFRSLKEISAGRIYISANRQLCYHHSLNWTKVLRGPTEERLDIKHNRPRRDCVAEGKVCDPLCSSGGCWGPGPGQCLSCRNYSRGGVCVTHCNFLNGEPREFAHEAECFSCHPECQPMEGTATCNGSGSDTCAQCAHFRDGPHCVSSCPHGVLGAKGPIYKYPDVQNECRPCHENCTQGCKGPELQDCLGQTLVLIGKTHLTMALTVIAGLVVIFMMLGGTFLYWRGRRIQNKRAMRRYLERGESIEPLDPSEKANKVLARIFKETELRKLKVLGSGVFGTVHKGVWIPEGESIKIPVCIKVIEDKSGRQSFQAVTDHMLAIGSLDHAHIVRLLGLCPGSSLQLVTQYLPLGSLLDHVRQHRGALGPQLLLNWGVQIAKGMYYLEEHGMVHRNLAARNVLLKSPSQVQVADFGVADLLPPDDKQLLYSEAKTPIKWMALESIHFGKYTHQSDVWSYGVTVWELMTFGAEPYAGLRLAEVPDLLEKGERLAQPQICTIDVYMVMVKCWMIDENIRPTFKELANEFTRMARDPPRYLVIKRESGPGIAPGPEPHGLTNKKLEEVELEPELDLDLDLEAEEDNLATTTLGSALSLPVGTLNRPRGSQSLLSPSSGYMPMNQGNLGESCQESAVSGSSERCPRPVSLHPMPRGCLASESSEGHVTGSEAELQEKVSMCRSRSRSRSPRPRGDSAYHSQRHSLLTPVTPLSPPGLEEEDVNGYVMPDTHLKGTPSSREGTLSSVGLSSVLGTEEEDEDEEYEYMNRRRRHSPPHPPRPSSLEELGYEYMDVGSDLSASLGSTQSCPLHPVPIMPTAGTTPDEDYEYMNRQRDGGGPGGDYAAMGACPASEQGYEEMRAFQGPGHQAPHVHYARLKTLRSLEATDSAFDNPDYWHSRLFPKANAQRT

SEQ ID NO: 28011 - protein, 1283 aa, Homo sapiens
  Payload ID: 5521
  Gene Symbol: ERBB3
  Gene Name: erb-b2 receptor tyrosine kinase 3
  Uniprot ID: P21860
  ENSP ID: ENSP00000408340
MGNLEIVLTGHNADLSFLQWIREVTGYVLVAMNEFSTLPLPNLRVVRGTQVYDGKFAIFVMLNYNTNSSHALRQLRLTQLTEILSGGVYIEKNDKLCHMDTIDWRDIVRDRDAEIVVKDNGRSCPPCHEVCKGRCWGPGSEDCQTLTKTICAPQCNGHCFGPNPNQCCHDECAGGCSGPQDTDCFACRHFNDSGACVPRCPQPLVYNKLTFQLEPNPHTKYQYGGVCVASCPHNFVVDQTSCVRACPPDKMEVDKNGLKMCEPCGGLCPKACEGTGSGSRFQTVDSSNIDGFVNCTKILGNLDFLITGLNGDPWHKIPALDPEKLNVFRTVREITGYLNIQSWPPHMHNFSVFSNLTTIGGRSLYNRGFSLLIMKNLNVTSLGFRSLKEISAGRIYISANRQLCYHHSLNWTKVLRGPTEERLDIKHNRPRRDCVAEGKVCDPLCSSGGCWGPGPGQCLSCRNYSRGGVCVTHCNFLNGEPREFAHEAECFSCHPECQPMEGTATCNGSGSDTCAQCAHFRDGPHCVSSCPHGVLGAKGPIYKYPDVQNECRPCHENCTQGCKGPELQDCLGQTLVLIGKTHLTMALTVIAGLVVIFMMLGGTFLYWRGRRIQNKRAMRRYLERGESIEPLDPSEKANKVLARIFKETELRKLKVLGSGVFGTVHKGVWIPEGESIKIPVCIKVIEDKSGRQSFQAVTDHMLAIGSLDHAHIVRLLGLCPGSSLQLVTQYLPLGSLLDHVRQHRGALGPQLLLNWGVQIAKGMYYLEEHGMVHRNLAARNVLLKSPSQVQVADFGVADLLPPDDKQLLYSEAKTPIKWMALESIHFGKYTHQSDVWSYGVTVWELMTFGAEPYAGLRLAEVPDLLEKGERLAQPQICTIDVYMVMVKCWMIDENIRPTFKELANEFTRMARDPPRYLVIKRESGPGIAPGPEPHGLTNKKLEEVELEPELDLDLDLEAEEDNLATTTLGSALSLPVGTLNRPRGSQSLLSPSSGYMPMNQGNLGESCQESAVSGSSERCPRPVSLHPMPRGCLASESSEGHVTGSEAELQEKVSMCRSRSRSRSPRPRGDSAYHSQRHSLLTPVTPLSPPGLEEEDVNGYVMPDTHLKGTPSSREGTLSSVGLSSVLGTEEEDEDEEYEYMNRRRRHSPPHPPRPSSLEELGYEYMDVGSDLSASLGSTQSCPLHPVPIMPTAGTTPDEDYEYMNRQRDGGGPGGDYAAMGACPASEQGYEEMRAFQGPGHQAPHVHYARLKTLRSLEATDSAFDNPDYWHSRLFPKANAQRT

SEQ ID NO: 28012 - protein, 183 aa, Homo sapiens
  Payload ID: 5521
  Gene Symbol: ERBB3
  Gene Name: erb-b2 receptor tyrosine kinase 3
  Uniprot ID: P21860
  ENSP ID: ENSP00000415753
MRANDALQVLGLLFSLARGSEVGNSQAVCPGTLNGLSVTGDAENQYQTLYKLYERCEVVMGNLEIVLTGHNADLSFLQWIREVTGYVLVAMNEFSTLPLPNLRVVRGTQVYDGKFAIFVMLNYNTNSSHALRQLRLTQLTGQFPMVPSGLTPQPAQDWYLLDDDPRLLTLSASSKVPVTLAAV

SEQ ID NO: 28013 - protein, 331 aa, Homo sapiens
  Payload ID: 5521
  Gene Symbol: ERBB3
  Gene Name: erb-b2 receptor tyrosine kinase 3
  Uniprot ID: P21860
  ENSP ID: ENSP00000447510
MRANDALQVLGLLFSLARGSEVGNSQAVCPGTLNGLSVTGDAENQYQTLYKLYERCEVVMGNLEIVLTGHNADLSFLQWIREVTGYVLVAMNEFSTLPLPNLRVVRGTQVYDGKFAIFVMLNYNTNSSHALRQLRLTQLTEILSGGVYIEKNDKLCHMDTIDWRDIVRDRDAEIVVKDNGRSCPPCHEVCKGRCWGPGSEDCQTLTKTICAPQCNGHCFGPNPNQCCHDECAGGCSGPQDTDCFACRHFNDSGACVPRCPQPLVYNKLTFQLEPNPHTKYQYGGVCVASCPHNFVVDQTSCVRACPPDKMEVDKNGLKMCEPCGGLCPKAF

SEQ ID NO: 28014 - protein, 921 aa, Homo sapiens
  Payload ID: 5521
  Gene Symbol: ERBB3
  Gene Name: erb-b2 receptor tyrosine kinase 3
  ENSP ID: ENSP00000448483
MRANDALQVLGLLFSLARGSEVGNSQAVCPGTLNGLSVTGDAENQYQTLYKLYERCEVVMGNLEIVLTGHNADLSFLQWIREVTGYVLVAMNEFSTLPLPNLRVVRGTQVYDGKFAIFVMLNYNTNSSHALRQLRLTQLTEILSGGVYIEKNDKLCHMDTIDWRDIVRDRDAEIVVKDNGRSCPPCHEVCKGRCWGPGSEDCQTLTKTICAPQCNGHCFGPNPNQCCHDECAGGCSGPQDTDCFACRHFNDSGACVPRCPQPLVYNKLTFQLEPNPHTKYQYGGVCVASCPHNFVVDQTSCVRACPPDKMEVDKNGLKMCEPCGGLCPKACEGTGSGSRFQTVDSSNIDGFVNCTKILGNLDFLITGLNGDPWHKIPALDPEKLNVFRTVREITGYLNIQSWPPHMHNFSVFSNLTTIGGRSLYNRGFSLLIMKNLNVTSLGFRSLKEISAGRIYISANRQLCYHHSLNWTKVLRGPTEERLDIKHNRPRRDCVAEGKVCDPLCSSGGCWGPGPGQCLSCRNYSRGGVCVTHCNFLNGEPREFAHEAECFSCHPECQPMEGTATCNGSGSDTCAQCAHFRDGPHCVSSCPHGVLGAKGPIYKYPDVQNECRPCHENCTQGCKGPELQDCLGQTLVLIGKTHLTMALTVIAGLVVIFMMLGGTFLYWRGRRIQNKRAMRRYLERGESIEPLDPSEKANKVLARIFKETELRKLKVLGSGVFGTVHKGVWIPEGESIKIPVCIKVIEDKSGRQSFQAVTDHMLAIGSLDHAHIVRLLGLCPGSSLQLVTQYLPLGSLLDHVRQHRGALGPQLLLNWGVQIAKGMYYLEEHGMVHRNLAARNVLLKSPSQVQVADFGVADLLPPDDKQLLYSEAKTPIKWMALESIHFGKYTHQSDVWSYGQCIWMPSLPSLAPVSNLPFETPS

SEQ ID NO: 28015 - protein, 126 aa, Homo sapiens
  Payload ID: 5521
  Gene Symbol: ERBB3
  Gene Name: erb-b2 receptor tyrosine kinase 3
  ENSP ID: ENSP00000448636
MRANDALQVLGLLFSLARGSEVGNSQAVCPGTLNGLSVTGDAENQYQTLYKLYERCEVVMGNLEIVLTGHNADLSFLQWIREVTGYVLVAMNEFSTLPLPNLRVVRGTQVYDGKFAIFVMLNYNTN

SEQ ID NO: 28016 - protein, 43 aa, Homo sapiens
  Payload ID: 5521
  Gene Symbol: ERBB3
  Gene Name: erb-b2 receptor tyrosine kinase 3
  ENSP ID: ENSP00000448671
MRANDALQVPRAQSTSTQMFRMNVGPAMRTAPRGVKDQSFKTV

SEQ ID NO: 28017 - protein, 462 aa, Homo sapiens
  Payload ID: 5521
  Gene Symbol: ERBB3
  Gene Name: erb-b2 receptor tyrosine kinase 3
  ENSP ID: ENSP00000448729
MPMSTILPVTSPCLPATGVTVWELMTFGAEPYAGLRLAEVPDLLEKGERLAQPQICTIDVYMVMVKCWMIDENIRPTFKELANEFTRMARDPPRYLVIKRESGPGIAPGPEPHGLTNKKLEEVELEPELDLDLDLEAEEDNLATTTLGSALSLPVGTLNRPRGSQSLLSPSSGYMPMNQGNLGESCQESAVSGSSERCPRPVSLHPMPRGCLASESSEGHVTGSEAELQEKVSMCRSRSRSRSPRPRGDSAYHSQRHSLLTPVTPLSPPGLEEEDVNGYVMPDTHLKGTPSSREGTLSSVGLSSVLGTEEEDEDEEYEYMNRRRRHSPPHPPRPSSLEELGYEYMDVGSDLSASLGSTQSCPLHPVPIMPTAGTTPDEDYEYMNRQRDGGGPGGDYAAMGACPASEQGYEEMRAFQGPGHQAPHVHYARLKTLRSLEATDSAFDNPDYWHSRLFPKANAQRT

SEQ ID NO: 28018 - protein, 649 aa, Homo sapiens
  Payload ID: 5521
  Gene Symbol: ERBB3
  Gene Name: erb-b2 receptor tyrosine kinase 3
  ENSP ID: ENSP00000448946
CLSCRNYSRGGVCVTHCNFLNGEPREFAHEAECFSCHPECQPMEGTATCNGSGSDTCAQCAHFRDGPHCVSSCPHGVLGAKGPIYKYPDVQNECRPCHENCTQGCKGPELQDCLGQTLVLIGKTHLTMALTVIAGLVVIFMMLGGTFLYWRGRRIQNKRAMRRYLERGESIEPLDPSEKTPIKWMALESIHFGKYTHQSDVWSYGVTVWELMTFGAEPYAGLRLAEVPDLLEKGERLAQPQICTIDVYMVMVKCWMIDENIRPTFKELANEFTRMARDPPRYLVIKRESGPGIAPGPEPHGLTNKKLEEVELEPELDLDLDLEAEEDNLATTTLGSALSLPVGTLNRPRGSQSLLSPSSGYMPMNQGNLGESCQESAVSGSSERCPRPVSLHPMPRGCLASESSEGHVTGSEAELQEKVSMCRSRSRSRSPRPRGDSAYHSQRHSLLTPVTPLSPPGLEEEDVNGYVMPDTHLKGTPSSREGTLSSVGLSSVLGTEEEDEDEEYEYMNRRRRHSPPHPPRPSSLEELGYEYMDVGSDLSASLGSTQSCPLHPVPIMPTAGTTPDEDYEYMNRQRDGGGPGGDYAAMGACPASEQGYEEMRAFQGPGHQAPHVHYARLKTLRSLEATDSAFDNPDYWHSRLFPKANAQRT

SEQ ID NO: 28019 - protein, 583 aa, Homo sapiens
  Payload ID: 5521
  Gene Symbol: ERBB3
  Gene Name: erb-b2 receptor tyrosine kinase 3
  ENSP ID: ENSP00000449129
MLAIGSLDHAHIVRLLGLCPGSSLQLVTQYLPLGSLLDHVRQHRGALGPQLLLNWGVQIAKGMYYLEEHGMVHRNLAARNVLLKSPSQVQVADFGVADLLPPDDKQLLYSEAKTPIKWMALESIHFGKYTHQSDVWSYGVTVWELMTFGAEPYAGLRLAEVPDLLEKGERLAQPQICTIDVYMVMVKCWMIDENIRPTFKELANEFTRMARDPPRYLVIKRESGPGIAPGPEPHGLTNKKLEEVELEPELDLDLDLEAEEDNLATTTLGSALSLPVGTLNRPRGSQSLLSPSSGYMPMNQGNLGESCQESAVSGSSERCPRPVSLHPMPRGCLASESSEGHVTGSEAELQEKVSMCRSRSRSRSPRPRGDSAYHSQRHSLLTPVTPLSPPGLEEEDVNGYVMPDTHLKGTPSSREGTLSSVGLSSVLGTEEEDEDEEYEYMNRRRRHSPPHPPRPSSLEELGYEYMDVGSDLSASLGSTQSCPLHPVPIMPTAGTTPDEDYEYMNRQRDGGGPGGDYAAMGACPASEQGYEEMRAFQGPGHQAPHVHYARLKTLRSLEATDSAFDNPDYWHSRLFPKANAQRT

SEQ ID NO: 28020 - protein, 116 aa, Homo sapiens
  Payload ID: 5521
  Gene Symbol: ERBB3
  Gene Name: erb-b2 receptor tyrosine kinase 3
  ENSP ID: ENSP00000449138
MGNLEIVLTGHNADLSFLQWIREVTGYVLVAMNEFSTLPLPNLRVVRGTQVYDGKFAIFVMLNYNTNSSHALRQLRLTQLTEILSGGVYIEKNDKLCHMDTIDWRDIVRDRDAEIV

SEQ ID NO: 28021 - protein, 115 aa, Homo sapiens
  Payload ID: 5521
  Gene Symbol: ERBB3
  Gene Name: erb-b2 receptor tyrosine kinase 3
  ENSP ID: ENSP00000449713
MGNLEIVLTGHNADLSFLQWIREVTGYVLVAMNEFSTLPLPNLRVVRGTQVYDGKFAIFVMLNYNTNSSHALRQLRLTQLTEILSGGVYIEKNDKLCHMDTIDWRDIVRDRDAEI

SEQ ID NO: 28022 - protein, 81 aa, Homo sapiens
  Payload ID: 5521
  Gene Symbol: ERBB3
  Gene Name: erb-b2 receptor tyrosine kinase 3
  ENSP ID: ENSP00000482073
LDIKHNRPRRDCVAEGKVCDPLCSSGGCWGPGPGQCLSCRNYSRGGVCVTHCNFLNGYSKGSQSRMGGGGALQWNCSGGIQ

SEQ ID NO: 28023 - protein, 731 aa, Homo sapiens
  Payload ID: 5522
  Gene Symbol: ERBB4
  Gene Name: erb-b2 receptor tyrosine kinase 4
  ENSP ID: ENSP00000260943
  MOD_RES (1)..(1): Any amino acid
XKPATGLWVWVSLLVAAGTVQPSDSQSVCAGTENKLSSLSDLEQQYRALRKYYENCEVVMGNLEITSIEHNRDLSFLRSVREVTGYVLVALNQFRYLPLENLRIIRGTKLYEDRYALAIFLNYRKDGNFGLQELGLKNLTEILNGGVYVDQNKFLCYADTIHWQDIVRNPWPSNLTLVSTNGSSGCGRCHKSCTGRCWGPTENHCQTLTRTVCAEQCDGRCYGPYVSDCCHRECAGGCSGPKDTDCFACMNFNDSGACVTQCPQTFVYNPTTFQLEHNFNAKYTYGAFCVKKCPHNFVVDSSSCVRACPSSKMEVEENGIKMCKPCTDICPKACDGIGTGSLMSAQTVDSSNIDKFINCTKINGNLIFLVTGIHGDPYNAIEAIDPEKLNVFRTVREITGFLNIQSWPPNMTDFSVFSNLVTIGGRVLYSGLSLLILKQQGITSLQFQSLKEISAGNIYITDNSNLCYYHTINWTTLFSTINQRIVIRDNRKAENCTAEGMVCNHLCSSDGCWGPGPDQCLSCRRFSRGRICIESCNLYDGEFREFENGSICVECDPQCEKMEDGLLTCHGPGPDNCTKCSHFKDGPNCVEKCPDGLQGANSFIFKYADPDRECHPCHPNCTQGCIGSSIEDCIGLMDRTPLIAAGVIGGLFILVIVGLTFAVYVRRKSIKKKRALRRFLETELVEPLTPSGTAPNQAQLRILKETELKRVKVLGSGAFGTVYKGIWVPEG

SEQ ID NO: 28024 - protein, 1308 aa, Homo sapiens
  Payload ID: 5522
  Gene Symbol: ERBB4
  Gene Name: erb-b2 receptor tyrosine kinase 4
  Uniprot ID: Q15303
  ENSP ID: ENSP00000342235
MKPATGLWVWVSLLVAAGTVQPSDSQSVCAGTENKLSSLSDLEQQYRALRKYYENCEVVMGNLEITSIEHNRDLSFLRSVREVTGYVLVALNQFRYLPLENLRIIRGTKLYEDRYALAIFLNYRKDGNFGLQELGLKNLTEILNGGVYVDQNKFLCYADTIHWQDIVRNPWPSNLTLVSTNGSSGCGRCHKSCTGRCWGPTENHCQTLTRTVCAEQCDGRCYGPYVSDCCHRECAGGCSGPKDTDCFACMNFNDSGACVTQCPQTFVYNPTTFQLEHNFNAKYTYGAFCVKKCPHNFVVDSSSCVRACPSSKMEVEENGIKMCKPCTDICPKACDGIGTGSLMSAQTVDSSNIDKFINCTKINGNLIFLVTGIHGDPYNAIEAIDPEKLNVFRTVREITGFLNIQSWPPNMTDFSVFSNLVTIGGRVLYSGLSLLILKQQGITSLQFQSLKEISAGNIYITDNSNLCYYHTINWTTLFSTINQRIVIRDNRKAENCTAEGMVCNHLCSSDGCWGPGPDQCLSCRRFSRGRICIESCNLYDGEFREFENGSICVECDPQCEKMEDGLLTCHGPGPDNCTKCSHFKDGPNCVEKCPDGLQGANSFIFKYADPDRECHPCHPNCTQGCNGPTSHDCIYYPWTGHSTLPQHARTPLIAAGVIGGLFILVIVGLTFAVYVRRKSIKKKRALRRFLETELVEPLTPSGTAPNQAQLRILKETELKRVKVLGSGAFGTVYKGIWVPEGETVKIPVAIKILNETTGPKANVEFMDEALIMASMDHPHLVRLLGVCLSPTIQLVTQLMPHGCLLEYVHEHKDNIGSQLLLNWCVQIAKGMMYLEERRLVHRDLAARNVLVKSPNHVKITDFGLARLLEGDEKEYNADGGKMPIKWMALECIHYRKFTHQSDVWSYGVTIWELMTFGGKPYDGIPTREIPDLLEKGERLPQPPICTIDVYMVMVKCWMIDADSRPKFKELAAEFSRMARDPQRYLVIQGDDRMKLPSPNDSKFFQNLLDEEDLEDMMDAEEYLVPQAFNIPPPIYTSRARIDSNRSEIGHSPPPAYTPMSGNQFVYRDGGFAAEQGVSVPYRAPTSTIPEAPVAQGATAEIFDDSCCNGTLRKPVAPHVQEDSSTQRYSADPTVFAPERSPRGELDEEGYMTPMRDKPKQEYLNPVEENPFVSRRKNGDLQALDNPEYHNASNGPPKAEDEYVNEPLYLNTFANTLGKAEYLKNNILSMPEKAKKAFDNPDYWNHSLPPRSTLQHPDYLQEYSTKYFYKQNGRIRPIVAENPEYLSEFSLKPGTVLPPPPYRHRNTVV

SEQ ID NO: 28025 - protein, 1249 aa, Homo sapiens
  Payload ID: 5522
  Gene Symbol: ERBB4
  Gene Name: erb-b2 receptor tyrosine kinase 4
  ENSP ID: ENSP00000385565
MGNLEITSIEHNRDLSFLRSVREVTGYVLVALNQFRYLPLENLRIIRGTKLYEDRYALAIFLNYRKDGNFGLQELGLKNLTEILNGGVYVDQNKFLCYADTIHWQDIVRNPWPSNLTLVSTNGSSGCGRCHKSCTGRCWGPTENHCQTLTRTVCAEQCDGRCYGPYVSDCCHRECAGGCSGPKDTDCFACMNFNDSGACVTQCPQTFVYNPTTFQLEHNFNAKYTYGAFCVKKCPHNFVVDSSSCVRACPSSKMEVEENGIKMCKPCTDICPKACDGIGTGSLMSAQTVDSSNIDKFINCTKINGNLIFLVTGIHGDPYNAIEAIDPEKLNVFRTVREITGFLNIQSWPPNMTDFSVFSNLVTIGGRVLYSGLSLLILKQQGITSLQFQSLKEISAGNIYITDNSNLCYYHTINWTTLFSTINQRIVIRDNRKAENCTAEGMVCNHLCSSDGCWGPGPDQCLSCRRFSRGRICIESCNLYDGEFREFENGSICVECDPQCEKMEDGLLTCHGPGPDNCTKCSHFKDGPNCVEKCPDGLQGANSFIFKYADPDRECHPCHPNCTQGCNGPTSHDCIYYPWTGHSTLPQHARTPLIAAGVIGGLFILVIVGLTFAVYVRRKSIKKKRALRRFLETELVEPLTPSGTAPNQAQLRILKETELKRVKVLGSGAFGTVYKGIWVPEGETVKIPVAIKILNETTGPKANVEFMDEALIMASMDHPHLVRLLGVCLSPTIQLVTQLMPHGCLLEYVHEHKDNIGSQLLLNWCVQIAKGMMYLEERRLVHRDLAARNVLVKSPNHVKITDFGLARLLEGDEKEYNADGGKMPIKWMALECIHYRKFTHQSDVWSYGVTIWELMTFGGKPYDGIPTREIPDLLEKGERLPQPPICTIDVYMVMVKCWMIDADSRPKFKELAAEFSRMARDPQRYLVIQGDDRMKLPSPNDSKFFQNLLDEEDLEDMMDAEEYLVPQAFNIPPPIYTSRARIDSNRSEIGHSPPPAYTPMSGNQFVYRDGGFAAEQGVSVPYRAPTSTIPEAPVAQGATAEIFDDSCCNGTLRKPVAPHVQEDSSTQRYSADPTVFAPERSPRGELDEEGYMTPMRDKPKQEYLNPVEENPFVSRRKNGDLQALDNPEYHNASNGPPKAEDEYVNEPLYLNTFANTLGKAEYLKNNILSMPEKAKKAFDNPDYWNHSLPPRSTLQHPDYLQEYSTKYFYKQNGRIRPIVAENPEYLSEFSLKPGTVLPPPPYRHRNTVV

SEQ ID NO: 28026 - protein, 1292 aa, Homo sapiens
  Payload ID: 5522
  Gene Symbol: ERBB4
  Gene Name: erb-b2 receptor tyrosine kinase 4
  Uniprot ID: Q15303
  ENSP ID: ENSP00000403204
MKPATGLWVWVSLLVAAGTVQPSDSQSVCAGTENKLSSLSDLEQQYRALRKYYENCEVVMGNLEITSIEHNRDLSFLRSVREVTGYVLVALNQFRYLPLENLRIIRGTKLYEDRYALAIFLNYRKDGNFGLQELGLKNLTEILNGGVYVDQNKFLCYADTIHWQDIVRNPWPSNLTLVSTNGSSGCGRCHKSCTGRCWGPTENHCQTLTRTVCAEQCDGRCYGPYVSDCCHRECAGGCSGPKDTDCFACMNFNDSGACVTQCPQTFVYNPTTFQLEHNFNAKYTYGAFCVKKCPHNFVVDSSSCVRACPSSKMEVEENGIKMCKPCTDICPKACDGIGTGSLMSAQTVDSSNIDKFINCTKINGNLIFLVTGIHGDPYNAIEAIDPEKLNVFRTVREITGFLNIQSWPPNMTDFSVFSNLVTIGGRVLYSGLSLLILKQQGITSLQFQSLKEISAGNIYITDNSNLCYYHTINWTTLFSTINQRIVIRDNRKAENCTAEGMVCNHLCSSDGCWGPGPDQCLSCRRFSRGRICIESCNLYDGEFREFENGSICVECDPQCEKMEDGLLTCHGPGPDNCTKCSHFKDGPNCVEKCPDGLQGANSFIFKYADPDRECHPCHPNCTQGCNGPTSHDCIYYPWTGHSTLPQHARTPLIAAGVIGGLFILVIVGLTFAVYVRRKSIKKKRALRRFLETELVEPLTPSGTAPNQAQLRILKETELKRVKVLGSGAFGTVYKGIWVPEGETVKIPVAIKILNETTGPKANVEFMDEALIMASMDHPHLVRLLGVCLSPTIQLVTQLMPHGCLLEYVHEHKDNIGSQLLLNWCVQIAKGMMYLEERRLVHRDLAARNVLVKSPNHVKITDFGLARLLEGDEKEYNADGGKMPIKWMALECIHYRKFTHQSDVWSYGVTIWELMTFGGKPYDGIPTREIPDLLEKGERLPQPPICTIDVYMVMVKCWMIDADSRPKFKELAAEFSRMARDPQRYLVIQGDDRMKLPSPNDSKFFQNLLDEEDLEDMMDAEEYLVPQAFNIPPPIYTSRARIDSNRNQFVYRDGGFAAEQGVSVPYRAPTSTIPEAPVAQGATAEIFDDSCCNGTLRKPVAPHVQEDSSTQRYSADPTVFAPERSPRGELDEEGYMTPMRDKPKQEYLNPVEENPFVSRRKNGDLQALDNPEYHNASNGPPKAEDEYVNEPLYLNTFANTLGKAEYLKNNILSMPEKAKKAFDNPDYWNHSLPPRSTLQHPDYLQEYSTKYFYKQNGRIRPIVAENPEYLSEFSLKPGTVLPPPPYRHRNTVV

SEQ ID NO: 28027 - protein, 128 aa, Homo sapiens
  Payload ID: 5522
  Gene Symbol: ERBB4
  Gene Name: erb-b2 receptor tyrosine kinase 4
  ENSP ID: ENSP00000405564
MGNLEITSIEHNRDLSFLRSVREVTGYVLVALNQFRYLPLENLRIIRGTKLYEDRYALAIFLNYRKDGNFGLQELGLKNLTEILNGGVYVDQNKFLCYADTIHWQDIVRNPWPSNLTLVSTNGSSGCG

SEQ ID NO: 28028 - protein, 145 aa, Homo sapiens; identical to SEQ ID NO: 26995
  Payload ID: 5523
  Gene Symbol:
  Gene Name: ERC1
  ENSP ID: ENSP00000488936

SEQ ID NO: 28029 - protein, 948 aa, Homo sapiens; identical to SEQ ID NO: 26986
  Payload ID: 5523
  Gene Symbol:
  Gene Name: ERC1
  ENSP ID: ENSP00000489059

SEQ ID NO: 28030 - protein, 720 aa, Homo sapiens; identical to SEQ ID NO: 26993
  Payload ID: 5523
  Gene Symbol:
  Gene Name: ERC1
  ENSP ID: ENSP00000489064

SEQ ID NO: 28031 - protein, 344 aa, Homo sapiens; identical to SEQ ID NO: 26999
  Payload ID: 5523
  Gene Symbol:
  Gene Name: ERC1
  ENSP ID: ENSP00000489077

SEQ ID NO: 28032 - protein, 285 aa, Homo sapiens; identical to SEQ ID NO: 26998
  Payload ID: 5523
  Gene Symbol:
  Gene Name: ERC1
  ENSP ID: ENSP00000489084
  MOD_RES (1)..(1): Any amino acid

SEQ ID NO: 28033 - protein, 1116 aa, Homo sapiens; identical to SEQ ID NO: 26988
  Payload ID: 5523
  Gene Symbol:
  Gene Name: ERC1
  ENSP ID: ENSP00000489120

SEQ ID NO: 28034 - protein, 1088 aa, Homo sapiens; identical to SEQ ID NO: 26989
  Payload ID: 5523
  Gene Symbol:
  Gene Name: ERC1
  ENSP ID: ENSP00000489206

SEQ ID NO: 28035 - protein, 992 aa, Homo sapiens; identical to SEQ ID NO: 26990
  Payload ID: 5523
  Gene Symbol:
  Gene Name: ERC1
  ENSP ID: ENSP00000489265

SEQ ID NO: 28036 - protein, 1120 aa, Homo sapiens; identical to SEQ ID NO: 26992
  Payload ID: 5523
  Gene Symbol:
  Gene Name: ERC1
  ENSP ID: ENSP00000489348

SEQ ID NO: 28037 - protein, 1116 aa, Homo sapiens; identical to SEQ ID NO: 26988
  Payload ID: 5523
  Gene Symbol:
  Gene Name: ERC1
  ENSP ID: ENSP00000489361

SEQ ID NO: 28038 - protein, 89 aa, Homo sapiens; identical to SEQ ID NO: 26997
  Payload ID: 5523
  Gene Symbol:
  Gene Name: ERC1
  ENSP ID: ENSP00000489387
  MOD_RES (1)..(1): Any amino acid

SEQ ID NO: 28039 - protein, 976 aa, Homo sapiens; identical to SEQ ID NO: 26994
  Payload ID: 5523
  Gene Symbol:
  Gene Name: ERC1
  ENSP ID: ENSP00000489414

SEQ ID NO: 28040 - protein, 1088 aa, Homo sapiens; identical to SEQ ID NO: 26989
  Payload ID: 5523
  Gene Symbol:
  Gene Name: ERC1
  ENSP ID: ENSP00000489460

SEQ ID NO: 28041 - protein, 1086 aa, Homo sapiens; identical to SEQ ID NO: 26987
  Payload ID: 5523
  Gene Symbol:
  Gene Name: ERC1
  ENSP ID: ENSP00000489593

SEQ ID NO: 28042 - protein, 89 aa, Homo sapiens; identical to SEQ ID NO: 26996
  Payload ID: 5523
  Gene Symbol:
  Gene Name: ERC1
  ENSP ID: ENSP00000489594

SEQ ID NO: 28043 - protein, 720 aa, Homo sapiens; identical to SEQ ID NO: 26993
  Payload ID: 5523
  Gene Symbol:
  Gene Name: ERC1
  ENSP ID: ENSP00000489601

SEQ ID NO: 28044 - protein, 1061 aa, Homo sapiens
  Payload ID: 5524
  Gene Symbol: ERCC6-PGBD3
  Gene Name: ERCC6-PGBD3 readthrough
  ENSP ID: ENSP00000387966
MPNEGIPHSSQTQEQDCLQSQPVSNNEEMAIKQESGGDGEVEEYLSFRSVGDGLSTSAVGCASAAPRRGPALLHIDRHQIQAVEPSAQALELQGLGVDVYDQDVLEQGVLQQVDNAIHEASRASQLVDVEKEYRSVLDDLTSCTTSLRQINKIIEQLSPQAATSRDINRKLDSVKRQKYNKEQQLKKITAKQKHLQAILGGAEVKIELDHASLEEDAEPGPSSLGSMLMPVQETAWEELIRTGQMTPFGTQIPQKQEKKPRKIMLNEASGFEKYLADQAKLSFERKKQGCNKRAARKAPAPVTPPAPVQNKNKPNKKARVLSKKEERLKKHIKKLQKRALQFQGKVGLPKARRPWESDMRPEAEGDSEGEESEYFPTEEEEEEEDDEVEGAEADLSGDGTDYELKPLPKGGKRQKKVPVQEIDDDFFPSSGEEAEAASVGEGGGGGRKVGRYRDDGDEDYYKQRLSPKMPRTLSLHEITDLLETDDSIEASAIVIQPPENATAPVSDEESGDEEGGTINNLPGSLLHTAAYLIQDGSDAESDSDDPSYAPKDDSPDEVPSTFTVQQPPPSRRRKMTKILCKWKKADLTVQPVAGRVTAPPNDFFTVMRTPTEILELFLDDEVIELIVKYSNLYACSKGVHLGLTSSEFKCFLGIIFLSGYVSVPRRRMFWEQRTDVHNVLVSAAMRRDRFETIFSNLHVADNANLDPVDKFSKLRPLISKLNERCMKFVPNETYFSFDEFMVPYFGRHGCKQFIRGKPIRFGYKFWCGATCLGYICWFQPYQGKNPNTKHEEYGVGASLVLQFSEALTEAHPGQYHFVFNNFFTSIALLDKLSSMGHQATGTVRKDHIDRVPLESDVALKKKERGTFDYRIDGKGNIVCRWNDNSVVTVASSGAGIHPLCLVSRYSQKLKKKIQVQQPNMIKVYNQFMGGVDRADENIDKYRASIRGKKWYSSPLLFCFELVLQNAWQLHKTYDEKPVDFLEFRRRVVCHYLETHGHPPEPGQKGRPQKRNIDSRYDGINHVIVKQGKQTRCAECHKNTTFRCEKCDVALHVKCSVEYHTE

SEQ ID NO: 28045 - protein, 1061 aa, Homo sapiens; identical to SEQ ID NO: 28044
  Payload ID: 5524
  Gene Symbol: ERCC6-PGBD3
  Gene Name: ERCC6-PGBD3 readthrough
  ENSP ID: ENSP00000423550

SEQ ID NO: 28046 - protein, 377 aa, Homo sapiens
  Payload ID: 5525
  Gene Symbol: ERGIC2
  Gene Name: ERGIC and golgi 2
  Uniprot ID: Q96RQ1
  ENSP ID: ENSP00000353270
MRRLNRKKTLSLVKELDAFPKVPESYVETSASGGTVSLIAFTTMALLTIMEFSVYQDTWMKYEYEVDKDFSSKLRINIDITVAMKCQYVGADVLDLAETMVASADGLVYEPTVFDLSPQQKEWQRMLQLIQSRLQEEHSLQDVIFKSAFKSTSTALPPREDDSSQSPNACRIHGHLYVNKVAGNFHITVGKAIPHPRGHAHLAALVNHESYNFSHRIDHLSFGELVPAIINPLDGTEKIAIDHNQMFQYFITVVPTKLHTYKISADTHQFSVTERERIINHAAGSHGVSGIFMKYDLSSLMVTVTEEHMPFWQFFVRLCGIVGGIFSTTGMLHGIGKFIVEIICCRFRLGSYKPVNSVPFEDGHTDNHLPLLENNTH

SEQ ID NO: 28047 - protein, 172 aa, Homo sapiens
  Payload ID: 5525
  Gene Symbol: ERGIC2
  Gene Name: ERGIC and golgi 2
  ENSP ID: ENSP00000447165
MRRLNRKKTLSLVKELDAFPKVPESYVETSASGGTVYQDTWMKYEYEVDKDFSSKLRINIDITVAMKCQYVGADVLDLAETMVASADGLVYEPTVFDLSPQQKEWQRMLQLIQSRLQEEHSLQDVIFKSAFKSTSTALPPREDDSSQSPNACRIHGHLYVNKVAGNFHITVG

SEQ ID NO: 28048 - protein, 57 aa, Homo sapiens
  Payload ID: 5525
  Gene Symbol: ERGIC2
  Gene Name: ERGIC and golgi 2
  ENSP ID: ENSP00000447212
  MOD_RES (1)..(1): Any amino acid
XAIPHPRGHAHLAALVNHESYNFSHRIDHLSFGELVPAIINPLDGTEKIAIDLFFVF

SEQ ID NO: 28049 - protein, 49 aa, Homo sapiens
  Payload ID: 5525
  Gene Symbol: ERGIC2
  Gene Name: ERGIC and golgi 2
  ENSP ID: ENSP00000447678
ERIINHAAGSHGVSGIFMKYDLSSLMVTVTEEHMPFWQFFACYMELENL

SEQ ID NO: 28050 - protein, 175 aa, Homo sapiens
  Payload ID: 5525
  Gene Symbol: ERGIC2
  Gene Name: ERGIC and golgi 2
  ENSP ID: ENSP00000448426
MRRLNRKKTLSLVKELDAFPKVPESYVETSASGGTVSLIAFTTMALLTIMEFSVYQDTWMKYEYEVDKDFSSKLRINIDITVAMKCQYVGADVLDLAETMVASADGLVYEPTVFDLSPQQKEWQRMLQLIQSRLQEEHSLQDVIFKSAFKSTSTALPPREDDSSQSPNACRIHGH

SEQ ID NO: 28051 - protein, 71 aa, Homo sapiens
  Payload ID: 5525
  Gene Symbol: ERGIC2
  Gene Name: ERGIC and golgi 2
  ENSP ID: ENSP00000448482
MRRLNRKKTLSLVKELDAFPKVPESYVETSASGGTVSLIAFTTMALLTIMEFSVYQDTWMKYEYEVDKDFS

SEQ ID NO: 28052 - protein, 209 aa, Homo sapiens
  Payload ID: 5525
  Gene Symbol: ERGIC2
  Gene Name: ERGIC and golgi 2
  ENSP ID: ENSP00000448535
  MOD_RES (1)..(1): Any amino acid
XFKSAFKSTSTALPPREDDSSQSPNACRIHGHLYVNKVAGNFHITVGKIDHLSFGELVPAIINPLDGTEKIAIDHNQMFQYFITVVPTKLHTYKISADTHQFSVTERERIINHAAGSHGVSGIFMKYDLSSLMVTVTEEHMPFWQFFVRLCGIVGGIFSTTGMLHGIGKFIVEIICCRFRLGSYKPVNSVPFEDGHTDNHLPLLENNTH

SEQ ID NO: 28053 - protein, 163 aa, Homo sapiens
  Payload ID: 5525
  Gene Symbol: ERGIC2
  Gene Name: ERGIC and golgi 2
  ENSP ID: ENSP00000448585
  MOD_RES (1)..(1): Any amino acid
XAIPHPRGHAHLAALVNHESYNFSHRIDHLSFGELVPAIINPLDGTEKIAIDHNQMFQYFITVVPTKLHTYKISADTHQFSVTERERIINHAAGSHGVSGIFMKYDLSSLMVTVTEEHMPFWQFFVRLCGIVGGIFSTTDLDPINLSILFLLRMATQTTTYLF

SEQ ID NO: 28054 - protein, 203 aa, Homo sapiens
  Payload ID: 5525
  Gene Symbol: ERGIC2
  Gene Name: ERGIC and golgi 2
  ENSP ID: ENSP00000449691
MRRLNRKKTLSLVKELDAFPKVPESYVETSASGGTVSLIAFTTMALLTIMEFSVYQDTWMKYEYEVDKDFSSKLRINIDITVAMKCQYVGADVLDLAETMVASADGLVYEPTVFDLSPQQKEWQRMLQLIQSRLQEEHSLQDVIFKSAFKSTSTALPPRAIPHPRGHAHLAALVNHESYNFSHRIDHLSFGELVPAIINPLDG

SEQ ID NO: 28055 - protein, 220 aa, Homo sapiens
  Payload ID: 5525
  Gene Symbol: ERGIC2
  Gene Name: ERGIC and golgi 2
  ENSP ID: ENSP00000450042
MRRLNRKKTLSLVKELDAFPKVPESYVETSASGGTVSLIAFTTMALLTIMEFSVYQDTWMKYEYEVDKDFSSKLRINIDITVAMKCQYVGADVLDLAETMVASADGLVYEPTVFDLSPQQKEWQRMLQLIQSRLQEEHSLQDVIFKSAFKSTSTALPPREDDSSQSPNACRIHGHLYVNKVAGNFHITVGKAIPHPRGHAHLAALVNHESYNFSHRIDHL

SEQ ID NO: 28056 - protein, 386 aa, Homo sapiens
  Payload ID: 5525
  Gene Symbol: ERGIC2
  Gene Name: ERGIC and golgi 2
  ENSP ID: ENSP00000478266
MKEEEGFPEDEATESEKTLSLVKELDAFPKVPESYVETSASGGTVSLIAFTTMALLTIMEFSVYQDTWMKYEYEVDKDFSSKLRINIDITVAMKCQYVGADVLDLAETMVASADGLVYEPTVFDLSPQQKEWQRMLQLIQSRLQEEHSLQDVIFKSAFKSTSTALPPREDDSSQSPNACRIHGHLYVNKVAGNFHITVGKAIPHPRGHAHLAALVNHESYNFSHRIDHLSFGELVPAIINPLDGTEKIAIDHNQMFQYFITVVPTKLHTYKISADTHQFSVTERERIINHAAGSHGVSGIFMKYDLSSLMVTVTEEHMPFWQFFVRLCGIVGGIFSTTGMLHGIGKFIVEIICCRFRLGSYKPVNSVPFEDGHTDNHLPLLENNTH

SEQ ID NO: 28057 - protein, 383 aa, Homo sapiens
  Payload ID: 5526
  Gene Symbol: ERGIC3
  Gene Name: ERGIC and golgi 3
  Uniprot ID: Q9Y282
  ENSP ID: ENSP00000341358
MEALGKLKQFDAYPKTLEDFRVKTCGGATVTIVSGLLMLLLFLSELQYYLTTEVHPELYVDKSRGDKLKINIDVLFPHMPCAYLSIDAMDVAGEQQLDVEHNLFKQRLDKDGIPVSSEAERHELGKVEVTVFDPDSLDPDRCESCYGAEAEDIKCCNTCEDVREAYRRRGWAFKNPDTIEQCRREGFSQKMQEQKNEGCQVYGFLEVNKVAGNFHFAPGKSFQQSHVHVHDLQSFGLDNINMTHYIQHLSFGEDYPGIVNPLDHTNVTAPQASMMFQYFVKVVPTVYMKVDGEVLRTNQFSVTRHEKVANGLLGDQGLPGVFVLYELSPMMVKLTEKHRSFTHFLTGVCAIIGGMFTVAGLIDSLIYHSARAIQKKIDLGKTT

SEQ ID NO: 28058 - protein, 388 aa, Homo sapiens
  Payload ID: 5526
  Gene Symbol: ERGIC3
  Gene Name: ERGIC and golgi 3
  Uniprot ID: Q9Y282
  ENSP ID: ENSP00000349970
MEALGKLKQFDAYPKTLEDFRVKTCGGATVTIVSGLLMLLLFLSELQYYLTTEVHPELYVDKSRGDKLKINIDVLFPHMPCAYLSIDAMDVAGEQQLDVEHNLFKQRLDKDGIPVSSEAERHELGKVEVTVFDPDSLDPDRCESCYGAEAEDIKCCNTCEDVREAYRRRGWAFKNPDTIEQCRREGFSQKMQEQKNEGCQVYGFLEVNKVAGNFHFAPGKSFQQSHVHVHAVEIHDLQSFGLDNINMTHYIQHLSFGEDYPGIVNPLDHTNVTAPQASMMFQYFVKVVPTVYMKVDGEVLRTNQFSVTRHEKVANGLLGDQGLPGVFVLYELSPMMVKLTEKHRSFTHFLTGVCAIIGGMFTVAGLIDSLIYHSARAIQKKIDLGKTT

SEQ ID NO: 28059 - protein, 123 aa, Homo sapiens
  Payload ID: 5526
  Gene Symbol: ERGIC3
  Gene Name: ERGIC and golgi 3
  ENSP ID: ENSP00000389398
MEALGKLKQFDAYPKTLEDFRVKTCGGATVTIVSGLLMLLLFLSELQYYLTTEVHPELYVDKSRGDKLKINIDVLFPHMPCAYLSIDAMDVAGEQQLDVEHNLFKQRLDKDGIPVSSEAERHD

SEQ ID NO: 28060 - protein, 397 aa, Homo sapiens
  Payload ID: 5526
  Gene Symbol: ERGIC3
  Gene Name: ERGIC and golgi 3
  ENSP ID: ENSP00000399124
  MOD_RES (1)..(1): Any amino acid
XALGKLKQFDAYPKTLEDFRVKTCGGATVTIVSGLLMLLLFLSELQYYLTTEVHPELYVDKSRGDKLKINIDVLFPHMPCAYLSIDAMDVAGEQQLDVEHNLFKQRLDKDGIPVSSEAERHELGKVEVTVFDPDSLDPDRCESCYGAEAEDIKCCNTCEDVREAYRRRGWAFKNPDTIEQCRREGFSQKMQEQKNEGCQVYGFLEVNKVAGNFHFAPGKSFQQSHVHGCVCRLKMIARSLACVHDLQSFGLDNINMTHYIQHLSFGEDYPGIVNPLDHTNVTAPQASMMFQYFVKVVPTVYMKVDGEVLRTNQFSVTRHEKVANGLLGDQGLPGVFVLYELSPMMVKLTEKHRSFTHFLTGVCAIIGGMFTVAGLIDSLIYHSARAIQKKIDLGKTT

SEQ ID NO: 28061 - protein, 326 aa, Homo sapiens
  Payload ID: 5526
  Gene Symbol: ERGIC3
  Gene Name: ERGIC and golgi 3
  ENSP ID: ENSP00000402480
  MOD_RES (1)..(1): Any amino acid
XAYPKTLEDFRVKTCGGATVTIVSGLLMLLLFLSELQYYLTTEVHPELYVDKSRGDKLKINIDVLFPHMPCAWSQYLSLIFLLPDLSIDAMDVAGEQQLDVEHNLFKQRLDKDGIPVSSEAERHELGKVEVTVFDPDSLDPDRCESCYGAEAEDIKCCNTCEDVREAYRRRGWAFKNPDTIEQCRREGFSQKMQEQKNEGCQVYGFLEVNKVAGNFHFAPGKSFQQSHVHVHDLQSFGLDNINMTHYIQHLSFGEDYPGIVNPLDHTNVTAPQASMMFQYFVKVVPTVYMKVDGEVLRTNQFSVTRHEKVANGLLGDQGLPGVFVL

SEQ ID NO: 28062 - protein, 157 aa, Homo sapiens
  Payload ID: 5526
  Gene Symbol: ERGIC3
  Gene Name: ERGIC and golgi 3
  ENSP ID: ENSP00000408840
  MOD_RES (1)..(1): Any amino acid
XHYIQHLSFGEDYPGIVNPLDHTNVTAPQASMMFQYFVKVVPTVYMKVDGEAQQERGRSRGGADGGWSQVLALALAQAPLPPQVLRTNQFSVTRHEKVANGLLGDQGLPGVFVLYELSPMMVKLTEKHRSFTHFLTGVCAIIGGMFTVAGLIDSLIY

SEQ ID NO: 28063 - protein, 118 aa, Homo sapiens
  Payload ID: 5526
  Gene Symbol: ERGIC3
  Gene Name: ERGIC and golgi 3
  ENSP ID: ENSP00000414490
LKQFDAYPKTLEDFRVKTCGGATVTIVSGLLMLLLFLSELQYYLTTEVHPELYVDKSRGDKLKINIDVLFPHMPCAYLSIDAMDVAGEQQLDVEHNLFKQRLDKDGIPVSSEAERHAD

SEQ ID NO: 28064 - protein, 130 aa, Homo sapiens
  Payload ID: 5526
  Gene Symbol: ERGIC3
  Gene Name: ERGIC and golgi 3
  ENSP ID: ENSP00000416402
  MOD_RES (1)..(1): Any amino acid
XPLDHTNVTAPQASMMFQYFVKVVPTVYMKVDGEAPLPPQVLRTNQFSVTRHEKVANGLLGDQGLPGVFVLYELSPMMVKLTEKHRSFTHFLTGVCAIIGGMFTVAGLIDSLIYHSARAIQKKIDLGKTT

SEQ ID NO: 28065 - protein, 328 aa, Homo sapiens
  Payload ID: 5527
  Gene Symbol: ERI2
  Gene Name: ERI1 exoribonuclease family member 2
  Uniprot ID: A8K979
  ENSP ID: ENSP00000300005
MATKRLARQLGLIRRKSIAPANGNLGRSKSKQLFDYLIVIDFESTCWNDGKHHHSQEIIEFPAVLLNTSTGQIDSEFQAYVQPQEHPILSEFCMELTGIKQAQVDEGVPLKICLSQFCKWIHKIQQQKNIIFATGISEPSASEVKLCAFVTWSDWDLGVCLEYECKRKQLLKPVFLNSWIDLRATYKLFYRRKPKGLSGALQEVGIEFSGREHSGLDDSRNTALLAWKMIRDGCVMKITRSLNKGPFLLPSWTWNSDLASGDQHAFLQQEFGCGTYRTLLQKPNMSKQEKGNILWLTMVWLSLACLQRKNYNDCMLNTASQTVTTEKF

SEQ ID NO: 28066 - protein, 691 aa, Homo sapiens
  Payload ID: 5527
  Gene Symbol: ERI2
  Gene Name: ERI1 exoribonuclease family member 2
  Uniprot ID: A8K979
  ENSP ID: ENSP00000350651
MATKRLARQLGLIRRKSIAPANGNLGRSKSKQLFDYLIVIDFESTCWNDGKHHHSQEIIEFPAVLLNTSTGQIDSEFQAYVQPQEHPILSEFCMELTGIKQAQVDEGVPLKICLSQFCKWIHKIQQQKNIIFATGISEPSASEVKLCAFVTWSDWDLGVCLEYECKRKQLLKPVFLNSWIDLRATYKLFYRRKPKGLSGALQEVGIEFSGREHSGLDDSRNTALLAWKMIRDGCVMKITRSLNKVPTKKNFSILARNLNTIQVEEMSACNISIQGPSIYNKEPKNIINPHEKVQMKSICANSPIKAQQDQLQVKNNIKASLHNVKSSLPLFNTKSSTSVGQLQSPTLNSPIYMQKQGKNEHLAFNTKSKASTVGSELVLVSTTVPTVHHVSDLEMSSTLDCLPVLADWEDVVLLPASQPEENVDCTVPISDSDLEISFNSGERLMVLKELEMSSHENFGDIEETPQKSETSKSIVYKSPHTTIYNVKEAKDPGSDISAFKLPEHKSSTFNRVNANMSHPLVLGKHPLLSGGTKRNPCSPQAFPPAKKQPFTIHEEKPTSSDCSPVRSSSWRRLPSILTSTVNLQEPWKSGKMTPPLCKCGRRSKRLVVSNNGPNHGKVFYCCPIGKYQENRKCCGYFKWEQTLQKERANSMVPSHSTGGLTFSSPETSHICDRNLSISTKNSLRLRPSMRN

SEQ ID NO: 28067 - protein, 598 aa, Homo sapiens
  Payload ID: 5527
  Gene Symbol: ERI2
  Gene Name: ERI1 exoribonuclease family member 2
  Uniprot ID: A8K979
  ENSP ID: ENSP00000454661
MELTGIKQAQVDEGVPLKICLSQFCKWIHKIQQQKNIIFATGISEPSASEVKLCAFVTWSDWDLGVCLEYECKRKQLLKPVFLNSWIDLRATYKLFYRRKPKGLSGALQEVGIEFSGREHSGLDDSRNTALLAWKMIRDGCVMKITRSLNKVPTKKNFSILARNLNTIQVEEMSACNISIQGPSIYNKEPKNIINPHEKVQMKSICANSPIKAQQDQLQVKNNIKASLHNVKSSLPLFNTKSSTSVGQLQSPTLNSPIYMQKQGKNEHLAFNTKSKASTVGSELVLVSTTVPTVHHVSDLEMSSTLDCLPVLADWEDVVLLPASQPEENVDCTVPISDSDLEISFNSGERLMVLKELEMSSHENFGDIEETPQKSETSKSIVYKSPHTTIYNVKEAKDPGSDISAFKLPEHKSSTFNRVNANMSHPLVLGKHPLLSGGTKRNPCSPQAFPPAKKQPFTIHEEKPTSSDCSPVRSSSWRRLPSILTSTVNLQEPWKSGKMTPPLCKCGRRSKRLVVSNNGPNHGKVFYCCPIGKYQENRKCCGYFKWEQTLQKERANSMVPSHSTGGLTFSSPETSHICDRNLSISTKNSLRLRPSMRN

SEQ ID NO: 28068 - protein, 156 aa, Homo sapiens
  Payload ID: 5527
  Gene Symbol: ERI2
  Gene Name: ERI1 exoribonuclease family member 2
  ENSP ID: ENSP00000454720
MATKRLARQLGLIRRKSIAPANGNLGRSKSKQLFDYLIVIDFESTCWNDGKHHHSQEIIEFPAVLLNTSTGQIDSEFQAYVQPQEHPILSEFCMELTGIKQAQVDEGVPLKICLSQFCKWIHKIQQQKNIIFATGISEPSASEVKLCAFVTWSAFL

SEQ ID NO: 28069 - protein, 598 aa, Homo sapiens; identical to SEQ ID NO: 28067
  Payload ID: 5527
  Gene Symbol: ERI2
  Gene Name: ERI1 exoribonuclease family member 2
  Uniprot ID: A8K979
  ENSP ID: ENSP00000455982

SEQ ID NO: 28070 - protein, 279 aa, Homo sapiens
  Payload ID: 5527
  Gene Symbol: ERI2
  Gene Name: ERI1 exoribonuclease family member 2
  Uniprot ID: A8K979
  ENSP ID: ENSP00000457488
MATKRLARQLGLIRRKSIAPANGNLGRSKSKQLFDYLIVIDFESTCWNDGKHHHSQEIIEFPAVLLNTSTGQIDSEFQAYVQPQEHPILSEFCMELTGIKQAQVDEGVPLKICLSQFCKWIHKIQQQKNIIFATGISEPSASEVKLCAFVTWSDWDLGVCLEYECKRKQLLKPVFLNSWIDLRATYKLFYRRKPKGLSGALQEVGIEFSGREHSGLDDSRNTALLAWKMIRDGCVMKITRSLNKVVPKGIHAVPKLSHQQKNNPSLFMKKSLHHLIAPQ

SEQ ID NO: 28071 - protein, 337 aa, Homo sapiens
  Payload ID: 5528
  Gene Symbol: ERI3
  Gene Name: ERI1 exoribonuclease family member 3
  Uniprot ID: O43414
  ENSP ID: ENSP00000361331
MATASPAADGGRGRPWEGGLVSWPPAPPLTLPWTWMGPSWGQHPGHWGFPALTEPSASPAAGLGIFEVRRVLDASGCSMLAPLQTGAARFSSYLLSRARKVLGSHLFSPCGVPEFCSISTRKLAAHGFGASMAAMVSFPPQRYHYFLVLDFEATCDKPQIHPQEIIEFPILKLNGRTMEIESTFHMYVQPVVHPQLTPFCTELTGIIQAMVDGQPSLQQVLERVDEWMAKEGLLDPNVKSIFVTCGDWDLKVMLPGQCQYLGLPVADYFKQWINLKKAYSFAMGCWPKNGLLDMNKGLSLQHIGRPHSGIDDCKNIANIMKTLAYRGFIFKQTSKPF

SEQ ID NO: 28072 - protein, 222 aa, Homo sapiens
  Payload ID: 5528
  Gene Symbol: ERI3
  Gene Name: ERI1 exoribonuclease family member 3
  Uniprot ID: O43414
  ENSP ID: ENSP00000361333
MFVMLQVPWLQSCANLVQIGAPLPLLGCLGQYFEVLGSMEVLAGQYGMEIIEFPILKLNGRTMEIESTFHMYVQPVVHPQLTPFCTELTGIIQAMVDGQPSLQQVLERVDEWMAKEGLLDPNVKSIFVTCGDWDLKVMLPGQCQYLGLPVADYFKQWINLKKAYSFAMGCWPKNGLLDMNKGLSLQHIGRPHSGIDDCKNIANIMKTLAYRGFIFKQTSKPF

SEQ ID NO: 28073 - protein, 204 aa, Homo sapiens
  Payload ID: 5528
  Gene Symbol: ERI3
  Gene Name: ERI1 exoribonuclease family member 3
  ENSP ID: ENSP00000390710
LQEIIEFPILKLNGRTMEIESTFHMYVQPVVHPQLTPFCTELTGIIQAMVDGQPSLQQVLERVDEWMAKEGLLDPNVKSIFVTCGDWDLKVMLPGQCQYLGLPVADYFKQWINLKKGSSPGTASGTSCYQSEEAQRKENTPGVKAYSFAMGCWPKNGLLDMNKGLSLQHIGRPHSGIDDCKNIANIMKTLAYRGFIFKQTSKPF

SEQ ID NO: 28074 - protein, 176 aa, Homo sapiens
  Payload ID: 5528
  Gene Symbol: ERI3
  Gene Name: ERI1 exoribonuclease family member 3
  ENSP ID: ENSP00000396764
MATASPAADGGRGRPWEGGLVSWPPAPPLTLPWTWMGPSWGQHPGEIIEFPILKLNGRTMEIESTFHMYVQPVVHPQLTPFCTELTGIIQAMVDGQPSLQQVLERVDEWMAKEGLLDPNVKSIFVTCGDWDLKVMLPGQCQYLGLPVADYFKQWINLKKAYSFAMGCWPKNGLLDM

SEQ ID NO: 28075 - protein, 250 aa, Homo sapiens
  Payload ID: 5528
  Gene Symbol: ERI3
  Gene Name: ERI1 exoribonuclease family member 3
  ENSP ID: ENSP00000412291
MATASPAADGGRGRPWEGGLVSWPPAPPLTLPWTWMGPSWGQHPGHWGFPALTEPSASPAAGLGIFEVRRDASGCSMLAPLQTGAARFSSYLLSRARKVLGSHLFSPCGVPEFCSISTRKLAAHGFGASMAAMVSFPPQRYHYFLVLDFEATCDKPQIHPQEIIEFPILKLNGRTMEIESTFHMYVQPVVHPQLTPFCTELTGIIQAMVDGQPSLQQVLERVDEWMAKEGLLDPNVKSIFVTCGDWDLKV

SEQ ID NO: 28076 - protein, 297 aa, Homo sapiens
  Payload ID: 5529
  Gene Symbol: ERMN
  Gene Name: ermin, ERM-like protein
  Uniprot ID: Q8TAM6
  ENSP ID: ENSP00000380453
MKTLSPDRIQPHIMTDVPATFTQAECNGDKPPENGQQTITKISEELTDVDSPLPHYRVEPSLEGALTKGSQEERRKLQGNMLLNSSMEDKMLKENPEEKLFIVHKAITDLSLQETSADEMTFREGHQWEKIPLSGSNQEIRRQKERITEQPLKEEEDEDRKNKGHQAAEIEWLGFRKPSQADMLHSKHDEEQKVWDEEIDDDDDDNCNNDEDEVRVIEFKKKHEEVSQFKEEGDASEDSPLSSASSQAVTPDEQPTLGKKSDISRNAYSRYNTISYRKIRKGNTKQRIDEFESMMHL

SEQ ID NO: 28077 - protein, 284 aa, Homo sapiens
  Payload ID: 5529
  Gene Symbol: ERMN
  Gene Name: ermin, ERM-like protein
  Uniprot ID: Q8TAM6
  ENSP ID: ENSP00000387047
MTDVPATFTQAECNGDKPPENGQQTITKISEELTDVDSPLPHYRVEPSLEGALTKGSQEERRKLQGNMLLNSSMEDKMLKENPEEKLFIVHKAITDLSLQETSADEMTFREGHQWEKIPLSGSNQEIRRQKERITEQPLKEEEDEDRKNKGHQAAEIEWLGFRKPSQADMLHSKHDEEQKVWDEEIDDDDDDNCNNDEDEVRVIEFKKKHEEVSQFKEEGDASEDSPLSSASSQAVTPDEQPTLGKKSDISRNAYSRYNTISYRKIRKGNTKQRIDEFESMMHL

SEQ ID NO: 28078 - protein, 146 aa, Homo sapiens
  Payload ID: 5529
  Gene Symbol: ERMN
  Gene Name: ermin, ERM-like protein
  ENSP ID: ENSP00000387049
MTDVPATFTQAECNGDKPPENGQQTITKISEELTDVDSPLPHYRVEPSLEGALTKGSQEERRKLQGNMLLNSSMEDKMLKENPEEKLFIVHKAITDLSLQETSADEMTFREDGVSLLLPRLECNGAISADCNLCLQGSSDSPASAS

SEQ ID NO: 28079 - protein, 146 aa, Homo sapiens; identical to SEQ ID NO: 28078
  Payload ID: 5529
  Gene Symbol: ERMN
  Gene Name: ermin, ERM-like protein
  ENSP ID: ENSP00000387325

SEQ ID NO: 28080 - protein, 84 aa, Homo sapiens
  Payload ID: 5529
  Gene Symbol: ERMN
  Gene Name: ermin, ERM-like protein
  ENSP ID: ENSP00000387339
MTDVPATFTQAECNGDKPPENGQQTITKISEELTDVDSPLPHYRVEPSLEGALTKGSQEERRKLQGNMLLNSSMEDKMLKGWSI

SEQ ID NO: 28081 - protein, 152 aa, Homo sapiens
  Payload ID: 5529
  Gene Symbol: ERMN
  Gene Name: ermin, ERM-like protein
  ENSP ID: ENSP00000389595
MTDVPATFTQAECNGDKPPENGQQTITKISEELTDVDSPLPHYRVEPSLEGALTKGSQEERRKLQGNMLLNSSMEDKMLKENPEEKLFIVHKAITDLSLQETSADEMTFREGHQWEKIPLSGSNQEIRRQKERITEQPLKEEEDEDRKNKGH

SEQ ID NO: 28082 - protein, 160 aa, Homo sapiens
  Payload ID: 5529
  Gene Symbol: ERMN
  Gene Name: ermin, ERM-like protein
  ENSP ID: ENSP00000398149
MTDVPATFTQAECNGDKPPENGQQTITKISEELTDVDSPLPHYRVEPSLEGALTKGSQEERRKLQGNMLLNSSMEDKMLKENPEEKLFIVHKAITDLSLQETSADEMTFREGHQWEKIPLSGSNQEIRRQKERITEQPLKEEEDEDRKNKGHQAAEIEWL

SEQ ID NO: 28083 - protein, 264 aa, Homo sapiens
  Payload ID: 5529
  Gene Symbol: ERMN
  Gene Name: ermin, ERM-like protein
  ENSP ID: ENSP00000410646
MTDVPATFTQAECNGDKPPENGQQTITKISEELTDVDSPLPHYRVEPSLEGALTKGSQEERRKLQGNMLLNSSMEDKMLKETSADEMTFREGHQWEKIPLSGSNQEIRRQKERITEQPLKEEEDEDRKNKGHQAAEIEWLGFRKPSQADMLHSKHDEEQKVWDEEIDDDDDDNCNNDEDEVRVIEFKKKHEEVSQFKEEGDASEDSPLSSASSQAVTPDEQPTLGKKSDISRNAYSRYNTISYRKIRKGNTKQRIDEFESMMHL

SEQ ID NO: 28084 - protein, 111 aa, Homo sapiens
  Payload ID: 5529
  Gene Symbol: ERMN
  Gene Name: ermin, ERM-like protein
  ENSP ID: ENSP00000410934
MTDVPATFTQAECNGDKPPENGQQTITKISEELTDVDSPLPHYRVEPSLEGALTKGSQEERRKLQGNMLLNSSMEDKMLKEEKLFIVHKAITDLSLQETSADEMTFREGHQ

SEQ ID NO: 28085 - protein, 385 aa, Homo sapiens
  Payload ID: 5530
  Gene Symbol: ERMAP
  Gene Name: erythroblast membrane-associated protein (Scianna blood group)
  ENSP ID: ENSP00000332439
MPEYKGRTVLVRDAQEGSVTLQILDVRLEDQGSYRCLIQVGNLSKEDTVILQVAAPSVGSLSPSAVALAVILPVLVLLIMVCLCLIWKQRRAKEKLLYEHVTEVDNLLSDHAKEKGKLHKAVKKLRSELKLKRAAANSGWRRARLHFVAVTLDPDTAHPKLILSEDQRCVRLGDRRQPVPDNPQRFDFVVSILGSEYFTTGCHYWEVYVGDKTKWILGVCSESVSRKGKVTASPANGHWLLRQSRGNEYEALTSPQTSFRLKEPPRCVGIFLDYEAGVISFYNVTNKSHIFTFTHNFSGPLRPFFEPCLHDGGKNTAPLVICSELHKSEESIVPRPEGKGHANGDVSLKVNSSLLPPKAPELKDIILSLPPDLGPALQELKAPSF

SEQ ID NO: 28086 - protein, 475 aa, Homo sapiens
  Payload ID: 5530
  Gene Symbol: ERMAP
  Gene Name: erythroblast membrane-associated protein (Scianna blood group)
  Uniprot ID: Q96PL5
  ENSP ID: ENSP00000361592
MEMASSAGSWLSGCLIPLVFLRLSVHVSGHAGDAGKFHVALLGGTAELLCPLSLWPGTVPKEVRWLRSPFPQRSQAVHIFRDGKDQDEDLMPEYKGRTVLVRDAQEGSVTLQILDVRLEDQGSYRCLIQVGNLSKEDTVILQVAAPSVGSLSPSAVALAVILPVLVLLIMVCLCLIWKQRRAKEKLLYEHVTEVDNLLSDHAKEKGKLHKAVKKLRSELKLKRAAANSGWRRARLHFVAVTLDPDTAHPKLILSEDQRCVRLGDRRQPVPDNPQRFDFVVSILGSEYFTTGCHYWEVYVGDKTKWILGVCSESVSRKGKVTASPANGHWLLRQSRGNEYEALTSPQTSFRLKEPPRCVGIFLDYEAGVISFYNVTNKSHIFTFTHNFSGPLRPFFEPCLHDGGKNTAPLVICSELHKSEESIVPRPEGKGHANGDVSLKVNSSLLPPKAPELKDIILSLPPDLGPALQELKAPSF

SEQ ID NO: 28087 - protein, 475 aa, Homo sapiens; identical to SEQ ID NO: 28086
  Payload ID: 5530
  Gene Symbol: ERMAP
  Gene Name: erythroblast membrane-associated protein (Scianna blood group)
  Uniprot ID: Q96PL5
  ENSP ID: ENSP00000361595

SEQ ID NO: 28088 - protein, 775 aa, Homo sapiens
  Payload ID: 5531
  Gene Symbol: EPB41
  Gene Name: erythrocyte membrane protein band 4.1
  Uniprot ID: P11171
  ENSP ID: ENSP00000290100
MTTEKSLVTEAENSQHQQKEEGEEAINSGQQEPQQEESCQTAAEGDNWCEQKLKASNGDTPTHEDLTKNKERTSESRGLSRLFSSFLKRPKSQVSEEEGKEVESDKEKGEGGQKEIEFGTSLDEEIILKAPIAAPEPELKTDPSLDLHSLSSAETQPAQEELREDPDFEIKEGEGLEECSKIEVKEESPQSKAETELKASQKPIRKHRNMHCKVSLLDDTVYECVVETWLDSAKEIKKQVRGVPWNFTFNVKFYPPDPAQLTEDITRYYLCLQLRQDIVAGRLPCSFATLALLGSYTIQSELGDYDPELHGVDYVSDFKLAPNQTKELEEKVMELHKSYRSMTPAQADLEFLENAKKLSMYGVDLHKAKDLEGVDIILGVCSSGLLVYKDKLRINRFPWPKVLKISYKRSSFFIKIRPGEQEQYESTIGFKLPSYRAAKKLWKVCVEHHTFFRLTSTDTIPKSKFLALGSKFRYSGRTQAQTRQASALIDRPAPHFERTASKRASRSLDGAAAVDSADRSPRPTSAPAITQGQVAEGGVLDASAKKTVVPKAQKETVKAEVKKEDEPPEQAEPEPTEAWKDLDKSQEEIKKHHASISELKKNFMESVPEPRPSEWDKRLSTHSPFRTLNINGQIPTGEGPPLVKTQTVTISDNANAVKSEIPTKDVPIVHTETKTITYEAAQTDDNSGDLDPGVLLTAQTITSETPSSTTTTQITKTVKGGISETRIEKRIVITGDADIDHDQVLVQAIKEAKEQHPDMSVTKVVVHQETEIADE

SEQ ID NO: 28089 - protein, 641 aa, Homo sapiens
  Payload ID: 5531
  Gene Symbol: EPB41
  Gene Name: erythrocyte membrane protein band 4.1
  Uniprot ID: P11171
  ENSP ID: ENSP00000317597
MHCKVSLLDDTVYECVVEKHAKGQDLLKRVCEHLNLLEEDYFGLAIWDNATSKTWLDSAKEIKKQVRGVPWNFTFNVKFYPPDPAQLTEDITRYYLCLQLRQDIVAGRLPCSFATLALLGSYTIQSELGDYDPELHGVDYVSDFKLAPNQTKELEEKVMELHKSYRSMTPAQADLEFLENAKKLSMYGVDLHKAKDLEGVDIILGVCSSGLLVYKDKLRINRFPWPKVLKISYKRSSFFIKIRPGEQEQYESTIGFKLPSYRAAKKLWKVCVEHHTFFRLTSTDTIPKSKFLALGSKFRYSGRTQAQTRQASALIDRPAPHFERTASKRASRSLDGAAAVDSADRSPRPTSAPAITQGQVAEGGVLDASAKKTVVPKAQKETVKAEVKKEDEPPEQAEPEPTEAWKVEKTHIEVTVPTSNGDQTQKKRERLDGENIYIRHSNLMLEDLDKSQEEIKKHHASISELKKNFMESVPEPRPSEWDKRLSTHSPFRTLNINGQIPTGEGPPLVKTQTVTISDNANAVKSEIPTKDVPIVHTETKTITYEAAQTDDNSGDLDPGVLLTAQTITSETPSSTTTTQITKTVKGGISETRIEKRIVITGDADIDHDQVLVQAIKEAKEQHPDMSVTKVVVHQETEIADE

SEQ ID NO: 28090 - protein, 864 aa, Homo sapiens
  Payload ID: 5531
  Gene Symbol: EPB41
  Gene Name: erythrocyte membrane protein band 4.1
  Uniprot ID: P11171
  ENSP ID: ENSP00000345259
MTTEKSLVTEAENSQHQQKEEGEEAINSGQQEPQQEESCQTAAEGDNWCEQKLKASNGDTPTHEDLTKNKERTSESRGLSRLFSSFLKRPKSQVSEEEGKEVESDKEKGEGGQKEIEFGTSLDEEIILKAPIAAPEPELKTDPSLDLHSLSSAETQPAQEELREDPDFEIKEGEGLEECSKIEVKEESPQSKAETELKASQKPIRKHRNMHCKVSLLDDTVYECVVEKHAKGQDLLKRVCEHLNLLEEDYFGLAIWDNATSKTWLDSAKEIKKQVRGVPWNFTFNVKFYPPDPAQLTEDITRYYLCLQLRQDIVAGRLPCSFATLALLGSYTIQSELGDYDPELHGVDYVSDFKLAPNQTKELEEKVMELHKSYRSMTPAQADLEFLENAKKLSMYGVDLHKAKDLEGVDIILGVCSSGLLVYKDKLRINRFPWPKVLKISYKRSSFFIKIRPGEQEQYESTIGFKLPSYRAAKKLWKVCVEHHTFFRLTSTDTIPKSKFLALGSKFRYSGRTQAQTRQASALIDRPAPHFERTASKRASRSLDGAAAVDSADRSPRPTSAPAITQGQVAEGGVLDASAKKTVVPKAQKETVKAEVKKEDEPPEQAEPEPTEAWKVEKTHIEVTVPTSNGDQTQKLAEKTEDLIRMRKKKRERLDGENIYIRHSNLMLEDLDKSQEEIKKHHASISELKKNFMESVPEPRPSEWDKRLSTHSPFRTLNINGQIPTGEGPPLVKTQTVTISDNANAVKSEIPTKDVPIVHTETKTITYEAAQTDDNSGDLDPGVLLTAQTITSETPSSTTTTQITKTVKGGISETRIEKRIVITGDADIDHDQVLVQAIKEAKEQHPDMSVTKVVVHQETEIADE

SEQ ID NO: 28091 - protein, 622 aa, Homo sapiens
  Payload ID: 5531
  Gene Symbol: EPB41
  Gene Name: erythrocyte membrane protein band 4.1
  ENSP ID: ENSP00000348397
MHCKVSLLDDTVYECVVEKHAKGQDLLKRVCEHLNLLEEDYFGLAIWDNATSKTWLDSAKEIKKQVRGVPWNFTFNVKFYPPDPAQLTEDITRYYLCLQLRQDIVAGRLPCSFATLALLGSYTIQSELGDYDPELHGVDYVSDFKLAPNQTKELEEKVMELHKSYRSMTPAQADLEFLENAKKLSMYGVDLHKAKDLEGVDIILGVCSSGLLVYKDKLRINRFPWPKVLKISYKRSSFFIKIRPGEQEQYESTIGFKLPSYRAAKKLWKVCVEHHTFFRLTSTDTIPKSKFLALGSKFRYSGRTQAQTRQASALIDRPAPHFERTASKRASRSLDGAAAVDSADRSPRPTSAPAITQGQVAEGGVLDASAKKTVVPKAQKETVKAEVKKEDEPPEQAEPEPTEAWKKKRERLDGENIYIRHSNLMLEDLDKSQEEIKKHHASISELKKNFMESVPEPRPSEWDKRLSTHSPFRTLNINGQIPTGEGPPLVKTQTVTISDNANAVKSEIPTKDVPIVHTETKTITYEAAQTDDNSGDLDPGVLLTAQTITSETPSSTTTTQITKTVKGGISETRIEKRIVITGDADIDHDQVLVQAIKEAKEQHPDMSVTKVVVHQETEIADE

SEQ ID NO: 28092 - protein, 720 aa, Homo sapiens
  Payload ID: 5531
  Gene Symbol: EPB41
  Gene Name: erythrocyte membrane protein band 4.1
  Uniprot ID: P11171
  ENSP ID: ENSP00000362903
MTTEKSLVTEAENSQHQQKEEGEEAINSGQQEPQQEESCQTAAEGDNWCEQKLKASNGDTPTHEDLTKNKERTSESRGLSRLFSSFLKRPKSQVSEEEGKEVESDKEKGEGGQKEIEFGTSLDEEIILKAPIAAPEPELKTDPSLDLHSLSSAETQPAQEELREDPDFEIKEGEGLEECSKIEVKEESPQSKAETELKASQKPIRKHRNMHCKVSLLDDTVYECVVEKHAKGQDLLKRVCEHLNLLEEDYFGLAIWDNATSKTWLDSAKEIKKQVRGVPWNFTFNVKFYPPDPAQLTEDITRYYLCLQLRQDIVAGRLPCSFATLALLGSYTIQSELGDYDPELHGVDYVSDFKLAPNQTKELEEKVMELHKSYRSMTPAQADLEFLENAKKLSMYGVDLHKAKDLEGVDIILGVCSSGLLVYKDKLRINRFPWPKVLKISYKRSSFFIKIRPGEQEQYESTIGFKLPSYRAAKKLWKVCVEHHTFFRLTSTDTIPKSKFLALGSKFRYSGRTQAQTRQASALIDRPAPHFERTASKRASRSLDGAAAVDSADRSPRPTSAPAITQGQVAEGGVLDASAKKTVVPKAQKETVKAEVKKEDEPPEQAEPEPTEAWKVEKTHIEVTVPTSNGDQTQKKRERLDGENIYIRHSNLMLEDLDKSQEEIKKHHASISELKKNFMESVPEPRPSEWDKRLSTHSPFRTLNINGQIPTGEGVSTLST

SEQ ID NO: 28093 - protein, 864 aa, Homo sapiens; identical to SEQ ID NO: 28090
  Payload ID: 5531
  Gene Symbol: EPB41
  Gene Name: erythrocyte membrane protein band 4.1
  Uniprot ID: P11171
  ENSP ID: ENSP00000362904

SEQ ID NO: 28094 - protein, 588 aa, Homo sapiens
  Payload ID: 5531
  Gene Symbol: EPB41
  Gene Name: erythrocyte membrane protein band 4.1
  Uniprot ID: P11171
  ENSP ID: ENSP00000362906
MHCKVSLLDDTVYECVVEKHAKGQDLLKRVCEHLNLLEEDYFGLAIWDNATSKTWLDSAKEIKKQVRGVPWNFTFNVKFYPPDPAQLTEDITRYYLCLQLRQDIVAGRLPCSFATLALLGSYTIQSELGDYDPELHGVDYVSDFKLAPNQTKELEEKVMELHKSYRSMTPAQADLEFLENAKKLSMYGVDLHKAKDLEGVDIILGVCSSGLLVYKDKLRINRFPWPKVLKISYKRSSFFIKIRPGEQEQYESTIGFKLPSYRAAKKLWKVCVEHHTFFRLTSTDTIPKSKFLALGSKFRYSGRTQAQTRQASALIDRPAPHFERTASKRASRSLDGAAAVDSADRSPRPTSAPAITQGQVAEGGVLDASAKKTVVPKAQKETVKAEVKKEDEPPEQAEPEPTEAWKKKRERLDGENIYIRHSNLMLEDLDKSQEEIKKHHASISELKKNFMESVPEPRPSEWDKRLSTHSPFRTLNINGQIPTGEGPPLVKTQTVTISDNANAVKSEIPTKDVPIVHTETKTITYEAAQTVKGGISETRIEKRIVITGDADIDHDQVLVQAIKEAKEQHPDMSVTKVVVHQETEIADE

SEQ ID NO: 28095 - protein, 686 aa, Homo sapiens
  Payload ID: 5532
  Gene Symbol: EPB41L4A
  Gene Name: erythrocyte membrane protein band 4.1 like 4A
  Uniprot ID: Q9HCS5
  ENSP ID: ENSP00000261486
MGCFCAVPEEFYCEVLLLDESKLTLTTQQQGIKKSTKGSVVLDHVFHHVNLVEIDYFGLRYCDRSHQTYWLDPAKTLAEHKELINTGPPYTLYFGIKFYAEDPCKLKEEITRYQFFLQVKQDVLQGRLPCPVNTAAQLGAYAIQSELGDYDPYKHTAGYVSEYRFVPDQKEELEEAIERIHKTLMGQIPSEAELNYLRTAKSLEMYGVDLHPVYGENKSEYFLGLTPVGVVVYKNKKQVGKYFWPRITKVHFKETQFELRVLGKDCNETSFFFEARSKTACKHLWKCSVEHHTFFRMPENESNSLSRKLSKFGSIRYKHRYSGRTALQMSRDLSIQLPRPDQNVTRSRSKTYPKRIAQTQPAESNSISRITANMENGENEGTIKIIAPSPVKSFKKAKNENSPDTQRSKSHAPWEENGPQSGLYNSPSDRTKSPKFPYTRRRNPSCGSDNDSVQPVRRRKAHNSGEDSDLKQRRRSRSRCNTSSGSESENSNREYRKKRNRIRQENDMVDSAPQWEAVLRRQKEKNQADPNNRRSRHRSRSRSPDIQAKEELWKHIQKELVDPSGLSEEQLKEIPYTKIETQGDPIRIRHSHSPRSYRQYRRSQCSDGERSVLSEVNSKTDLVPPLPVTRSSDAQGSGDATVHQRRNGSKDSLMEEKPQTSTNNLAGKHTAKTIKTIQASRLKTET

SEQ ID NO: 28096 - protein, 686 aa, Homo sapiens; identical to SEQ ID NO: 28095
  Payload ID: 5532
  Gene Symbol: EPB41L4A
  Gene Name: erythrocyte membrane protein band 4.1 like 4A
  Uniprot ID: Q9HCS5
  ENSP ID: ENSP00000482810

SEQ ID NO: 28097 - protein, 518 aa, Homo sapiens
  Payload ID: 5533
  Gene Symbol: EPB41L4B
  Gene Name: erythrocyte membrane protein band 4.1 like 4B
  Uniprot ID: Q9H329
  ENSP ID: ENSP00000363685
MLRFLRRTFGRRSMQRYARGAAGRGAAGLGDERDGGPRGGPAAAASSSALPAAPGGSVFPAGGGPLLTGGAAVHISAAGAAKATLYCRVFLLDGTEVSVDLPKHAKGQDLFDQIVYHLDLVETDYFGLQFLDSAQVAHWLDHAKPIKKQMKIGPAYALHFRVKYYSSEPNNLREEFTRYLFVLQLRHDILSGKLKCPYETAVELAALCLQAELGECELPEHTPELVSEFRFIPNQTEAMEFDIFQRWKECRGKSPAQAELSYLNKAKWLEMYGVDMHVVRGRDGCEYSLGLTPTGILIFEGANKIGLFFWPKITKMDFKKSKLTLVVVEDDDQGREQEHTFVFRLDSARTCKHLWKCAVEHHAFFRLRTPGNSKSNRSDFIRLGSRFRFSGRTEYQATHGSRLRRTSTFERKPSKRYPSRRHSTFKASNPVIAAQLCSKTNPEVHNYQPQYHPNIHPSQPRWHPHSPNVRPSFQDDRSHWKASASGDDSHFDYVHDQNQKNLGGMQSMMYRDKLMTAL

SEQ ID NO: 28098 - protein, 900 aa, Homo sapiens
  Payload ID: 5533
  Gene Symbol: EPB41L4B
  Gene Name: erythrocyte membrane protein band 4.1 like 4B
  Uniprot ID: Q9H329
  ENSP ID: ENSP00000363694
MLRFLRRTFGRRSMQRYARGAAGRGAAGLGDERDGGPRGGPAAAASSSALPAAPGGSVFPAGGGPLLTGGAAVHISAAGAAKATLYCRVFLLDGTEVSVDLPKHAKGQDLFDQIVYHLDLVETDYFGLQFLDSAQVAHWLDHAKPIKKQMKIGPAYALHFRVKYYSSEPNNLREEFTRYLFVLQLRHDILSGKLKCPYETAVELAALCLQAELGECELPEHTPELVSEFRFIPNQTEAMEFDIFQRWKECRGKSPAQAELSYLNKAKWLEMYGVDMHVVRGRDGCEYSLGLTPTGILIFEGANKIGLFFWPKITKMDFKKSKLTLVVVEDDDQGREQEHTFVFRLDSARTCKHLWKCAVEHHAFFRLRTPGNSKSNRSDFIRLGSRFRFSGRTEYQATHGSRLRRTSTFERKPSKRYPSRRHSTFKASNPVIAAQLCSKTNPEVHNYQPQYHPNIHPSQPRWHPHSPNVSYPLPSPVLSSSDRLPFGIEENGGTPFLTAASGRHHHQHQHQHQHQHHSNYSLSLTLENKEGPLRSPNSSSKSLTKLSPGTPALFSEAAAHLKKLELETVKAAGPWPPLHININKAEEKKVSEKTLQTPLLPSPVADHVKCNILKAQLENASRVNIQGGKEESPFVNINKKSSLQDASVRSPIPIRVETAQPAVEKPEIKPPRVRKLTRQYSFDEDDLPPDLAEAVGVTTSTTTNTTTAATQVSVPLPSPKVQNVSSPHKSEGKGLLSPGAKSPSDRGGAFTLEPGDLLMDFTEATPLAEPASNPHCAHSRCSPPLSLPMKEETTGVCMYPPIKTRLIKTFPVDTMNPFPDTFTTGPQFTADFRDSKLQCCPGPTSPLIPAATLRPLTETVSTVQTIYTTRKPVSLAASAETLRQELEREKMMKRLLMTEL

SEQ ID NO: 28099 - protein, 733 aa, Homo sapiens
  Payload ID: 5534
  Gene Symbol: EPB41L5
  Gene Name: erythrocyte membrane protein band 4.1 like 5
  Uniprot ID: Q9HCM4
  ENSP ID: ENSP00000263713
MLSFFRRTLGRRSMRKHAEKERLREAQRAATHIPAAGDSKSIITCRVSLLDGTDVSVDLPKKAKGQELFDQIMYHLDLIESDYFGLRFMDSAQVAHWLDGTKSIKKQVKIGSPYCLHLRVKFYSSEPNNLREELTRYLFVLQLKQDILSGKLDCPFDTAVQLAAYNLQAELGDYDLAEHSPELVSEFRFVPIQTEEMELAIFEKWKEYRGQTPAQAETNYLNKAKWLEMYGVDMHVVKARDGNDYSLGLTPTGVLVFEGDTKIGLFFWPKITRLDFKKNKLTLVVVEDDDQGKEQEHTFVFRLDHPKACKHLWKCAVEHHAFFRLRGPVQKSSHRSGFIRLGSRFRYSGKTEYQTTKTNKARRSTSFERRPSKRYSRRTLQMKACATKPEELSVHNNVSTQSNGSQQAWGMRSALPVSPSISSAPVPVEIENLPQSPGTDQHDRKCIPLNIDLLNSPDLLEATIGDVIGASDTMETSQALNDVNVATRLPGLGEPEVEYETLKDTSEKLKQLEMENSPLLSPRSNIDVNINSQEEVVKLTEKCLNNVIESPGLNVMRVPPDFKSNILKAQVEAVHKVTKEDSLLSHKNANVQDAATNSAVLNENNVPLPKESLETLMLITPADSGSVLKEATDELDALLASLTENLIDHTVAPQVSSTSMITPRWIVPQSGAMSNGLAGCEMLLTGKEGHGNKDGISLISPPAPFLVDAVTSSGPILAEEAVLKQKCLLTTEL

SEQ ID NO: 28100 - protein, 505 aa, Homo sapiens
  Payload ID: 5534
  Gene Symbol: EPB41L5
  Gene Name: erythrocyte membrane protein band 4.1 like 5
  Uniprot ID: Q9HCM4
  ENSP ID: ENSP00000329687
MLSFFRRTLGRRSMRKHAEKERLREAQRAATHIPAAGDSKSIITCRVSLLDGTDVSVDLPKKAKGQELFDQIMYHLDLIESDYFGLRFMDSAQVAHWLDGTKSIKKQVKIGSPYCLHLRVKFYSSEPNNLREELTRYLFVLQLKQDILSGKLDCPFDTAVQLAAYNLQAELGDYDLAEHSPELVSEFRFVPIQTEEMELAIFEKWKEYRGQTPAQAETNYLNKAKWLEMYGVDMHVVKARDGNDYSLGLTPTGVLVFEGDTKIGLFFWPKITRLDFKKNKLTLVVVEDDDQGKEQEHTFVFRLDHPKACKHLWKCAVEHHAFFRLRGPVQKSSHRSGFIRLGSRFRYSGKTEYQTTKTNKARRSTSFERRPSKRYSRRTLQMKACATKPEELSVHNNVSTQSNGSQQAWGMRSALPVSPSISSAPVPVEIENLPQSPGTDQHDRKWLSAASDCCQRGGNQWNTRALPPPQTAHRNYTDFVHEHNVKNAGIRHDVHFPGHTAMTEI

SEQ ID NO: 28101 - protein, 732 aa, Homo sapiens
  Payload ID: 5534
  Gene Symbol: EPB41L5
  Gene Name: erythrocyte membrane protein band 4.1 like 5
  Uniprot ID: Q9HCM4
  ENSP ID: ENSP00000390439
MLSFFRRTLGRRSMRKHAEKERLREAQRAATHIPAAGDSKSIITCRVSLLDGTDVSVDLPKKAKGQELFDQIMYHLDLIESDYFGLRFMDSAQVAHWLDGTKSIKKQVKIGSPYCLHLRVKFYSSEPNNLREELTRYLFVLQLKQDILSGKLDCPFDTAVQLAAYNLQAELGDYDLAEHSPELVSEFRFVPIQTEEMELAIFEKWKEYRGQTPAQAETNYLNKAKWLEMYGVDMHVVKARDGNDYSLGLTPTGVLVFEGDTKIGLFFWPKITRLDFKKNKLTLVVVEDDDQGKEQEHTFVFRLDHPKACKHLWKCAVEHHAFFRLRGPVQKSSHRSGFIRLGSRFRYSGKTEYQTTKTNKARRSTSFERRPSKRYSRRTLQMKACATKPEELSVHNNVSTQSNGSQQAWGMRSALPVSPSISSAPVPVEIENLPQSPGTDQHDRKCIPLNIDLLNSPDLLEATIGDVIGASDTMETSQALNDVNVATRLPGLGEPEVEYETLKDTSEKLKQLEMENSPLLSPRSNIDVNINSQEEVVKLTEKCLNNVIESPGLNVMRVPPDFKSNILKAQVEAVHKVTKEDSLLSHKNANVQDAATNSAVLNENNVPLPKESLETLMLITPADSGSVLKEATDELDALLASLTENLIDHTVAPQVSSTSMITPRWIVPSGAMSNGLAGCEMLLTGKEGHGNKDGISLISPPAPFLVDAVTSSGPILAEEAVLKQKCLLTTEL

SEQ ID NO: 28102 - protein, 505 aa, Homo sapiens; identical to SEQ ID NO: 28100
  Payload ID: 5534
  Gene Symbol: EPB41L5
  Gene Name: erythrocyte membrane protein band 4.1 like 5
  Uniprot ID: Q9HCM4
  ENSP ID: ENSP00000393722

SEQ ID NO: 28103 - protein, 687 aa, Homo sapiens
  Payload ID: 5534
  Gene Symbol: EPB41L5
  Gene Name: erythrocyte membrane protein band 4.1 like 5
  Uniprot ID: Q9HCM4
  ENSP ID: ENSP00000393856
MLSFFRRTLGRRSMRKHAEKERLREAQRAATHIPAAGDSKSIITCRVSLLDGTDVSVDLPKKAKGQELFDQIMYHLDLIESDYFGLRFMDSAQVAHWLDGTKSIKKQVKIGSPYCLHLRVKFYSSEPNNLREELTRYLFVLQLKQDILSGKLDCPFDTAVQLAAYNLQAELGDYDLAEHSPELVSEFRFVPIQTEEMELAIFEKWKEYRGQTPAQAETNYLNKAKWLEMYGVDMHVVKARDGNDYSLGLTPTGVLVFEGDTKIGLFFWPKITRLDFKKNKLTLVVVEDDDQGKEQEHTFVFRLDHPKACKHLWKCAVEHHAFFRLRGPVQKSSHRSGFIRLGSRFRYSGKTEYQTTKTNKARRSTSFERRPSKRYSRRTLQMKACATKPEELSVHNNVSTQSNGSQQAWGMRSALPVSPSISSAPVPVEIENLPQSPGTDQHDRKCIPLNIDLLNSPDLLEATIGDVIGASDTMETSQALNDVNVATRLPGLGEPEVEYETLKDTSEKLKQLEMENSPLLSPRSNIDVNINSQEEVVKLTEKCLNNVIESPGLNVMRVPPDFKSNILKAQVEAVHKVTKEDSLLSHKNANVQDAATNSAVLNENNVPLPKESLETLMLITPADSGSVLKEATDELDALLASLTENLIDHTVAPQVSSTSMITPRWIVPLWSHFGRRSCPEAEVFTDH

SEQ ID NO: 28104 - protein, 779 aa, Homo sapiens
  Payload ID: 5535
  Gene Symbol: EPB41L1
  Gene Name: erythrocyte membrane protein band 4.1-like 1
  Uniprot ID: Q9H4G0
  ENSP ID: ENSP00000202028
MEEKDYSEADGLSERTTPSKAQKSPQKIAKKYKSAICRVTLLDASEYECEVEKHGRGQVLFDLVCEHLNLLEKDYFGLTFCDADSQKNWLDPSKEIKKQIRSSPWNFAFTVKFYPPDPAQLTEDITRYYLCLQLRADIITGRLPCSFVTHALLGSYAVQAELGDYDAEEHVGNYVSELRFAPNQTRELEERIMELHKTYRGMTPGEAEIHFLENAKKLSMYGVDLHHAKDSEGIDIMLGVCANGLLIYRDRLRINRFAWPKILKISYKRSNFYIKIRPGEYEQFESTIGFKLPNHRSAKRLWKVCIEHHTFFRLVSPEPPPKGFLVMGSKFRYSGRTQAQTRQASALIDRPAPFFERSSSKRYTMSRSLDGAEFSRPASVSENHDAGPDGDKRDEDGESGGQRSEAEEGEVRTPTKIKELKFLDKPEDVLLKHQASINELKRTLKEPNSKLIHRDRDWERERRLPSSPASPSPKGTPEKANERAGLREGSEEKVKPPRPRAPESDTGDEDQDQERDTVFLKDNHLAIERKCSSITVSSTSSLEAEVDFTVIGDYHGSAFEDFSRSLPELDRDKSDSDTEGLLFSRDLNKGAPSQDDESGGIEDSPDRGACSTPDMPQFEPVKTETMTVSSLAIRKKIEPEAVLQTRVSAMDNTQENSLKSGKGAAAMIPGPQTVATEIRSLSPIIGKDVLTSTYGATAETLSTSTTTHVTKTVKGGFSETRIEKRIIITGDEDVDQDQALALAIKEAKLQHPDMLVTKAVVYRETDPSPEERDKKPQES

SEQ ID NO: 28105 - protein, 881 aa, Homo sapiens
  Payload ID: 5535
  Gene Symbol: EPB41L1
  Gene Name: erythrocyte membrane protein band 4.1-like 1
  Uniprot ID: Q9H4G0
  ENSP ID: ENSP00000337168
MTTETGPDSEVKKAQEEAPQQPEAAAAVTTPVTPAGHGHPEANSNEKHPSQQDTRPAEQSLDMEEKDYSEADGLSERTTPSKAQKSPQKIAKKYKSAICRVTLLDASEYECEVEKHGRGQVLFDLVCEHLNLLEKDYFGLTFCDADSQKNWLDPSKEIKKQIRSSPWNFAFTVKFYPPDPAQLTEDITRYYLCLQLRADIITGRLPCSFVTHALLGSYAVQAELGDYDAEEHVGNYVSELRFAPNQTRELEERIMELHKTYRGMTPGEAEIHFLENAKKLSMYGVDLHHAKDSEGIDIMLGVCANGLLIYRDRLRINRFAWPKILKISYKRSNFYIKIRPGEYEQFESTIGFKLPNHRSAKRLWKVCIEHHTFFRLVSPEPPPKGFLVMGSKFRYSGRTQAQTRQASALIDRPAPFFERSSSKRYTMSRSLDGAEFSRPASVSENHDAGPDGDKRDEDGESGGQRSEAEEGEVRTPTKIKELKPEQETTPRHKQEFLDKPEDVLLKHQASINELKRTLKEPNSKLIHRDRDWERERRLPSSPASPSPKGTPEKANERAGLREGSEEKVKPPRPRAPESDTGDEDQDQERDTVFLKDNHLAIERKCSSITVSSTSSLEAEVDFTVIGDYHGSAFEDFSRSLPELDRDKSDSDTEGLLFSRDLNKGAPSQDDESGGIEDSPDRGACSTPDMPQFEPVKTETMTVSSLAIRKKIEPEAVLQTRVSAMDNTQQVDGSASVGREFIATTPSITTETISTTMENSLKSGKGAAAMIPGPQTVATEIRSLSPIIGKDVLTSTYGATAETLSTSTTTHVTKTVKGGFSETRIEKRIIITGDEDVDQDQALALAIKEAKLQHPDMLVTKAVVYRETDPSPEERDKKPQES

SEQ ID NO: 28106 - protein, 880 aa, Homo sapiens
  Payload ID: 5535
  Gene Symbol: EPB41L1
  Gene Name: erythrocyte membrane protein band 4.1-like 1
  ENSP ID: ENSP00000363052
MTTETGPDSEVKKAQEEAPQQPEAAAAVTTPVTPAGHGHPEANSNEKHPSQQDTRPAEQSLDMEEKDYSEADGLSERTTPSKAQKSPQKIAKKYKSAICRVTLLDASEYECEVEKHGRGQVLFDLVCEHLNLLEKDYFGLTFCDADSQKNWLDPSKEIKKQIRSSPWNFAFTVKFYPPDPAQLTEDITRYYLCLQLRADIITGRLPCSFVTHALLGSYAVQAELGDYDAEEHVGNYVSELRFAPNQTRELEERIMELHKTYRGMTPGEAEIHFLENAKKLSMYGVDLHHAKDSEGIDIMLGVCANGLLIYRDRLRINRFAWPKILKISYKRSNFYIKIRPGEYEQFESTIGFKLPNHRSAKRLWKVCIEHHTFFRLVSPEPPPKGFLVMGSKFRYSGRTQAQTRQASALIDRPAPFFERSSSKRYTMSRSLDGAEFSRPASVSENHDAGPDGDKRDEDGESGGQRSEAEEGEVRTPTKIKELKPEQETTPRHKQEFLDKPEDVLLKHQASINELKRTLKEPNSKLIHRDRDWERERRLPSSPASPSPKGTPEKANERAGLREGSEEKVKPPRPRAPESDTGDEDQDQERDTVFLKDNHLAIERKCSSITVSSTSSLEAEVDFTVIGDYHGSAFEDFSRSLPELDRDKSDSDTEGLLFSRDLNKGAPSQDDESGGIEDSPDRGACSTPDMPQFEPVKTETMTVSSLAIRKKIEPEAVLQTRVSAMDNTQVDGSASVGREFIATTPSITTETISTTMENSLKSGKGAAAMIPGPQTVATEIRSLSPIIGKDVLTSTYGATAETLSTSTTTHVTKTVKGGFSETRIEKRIIITGDEDVDQDQALALAIKEAKLQHPDMLVTKAVVYRETDPSPEERDKKPQES

SEQ ID NO: 28107 - protein, 199 aa, Homo sapiens
  Payload ID: 5535
  Gene Symbol: EPB41L1
  Gene Name: erythrocyte membrane protein band 4.1-like 1
  ENSP ID: ENSP00000363056
MEEKDYSEADGLSERTTPSKAQKSPQKIAKKYKSAICRVTLLDASEYECEVEKHGRGQVLFDLVCEHLNLLEKDYFGLTFCDADSQKNWLDPSKEIKKQIRSSPWNFAFTVKFYPPDPAQLTEDITRYYLCLQLRADIITGRLPCSFVTHALLGSYAVQAELGDYDAEEHVGNYVSELRFAPNQTRELEERIMELHKTY

SEQ ID NO: 28108 - protein, 880 aa, Homo sapiens; identical to SEQ ID NO: 28106
  Payload ID: 5535
  Gene Symbol: EPB41L1
  Gene Name: erythrocyte membrane protein band 4.1-like 1
  ENSP ID: ENSP00000363057

SEQ ID NO: 28109 - protein, 772 aa, Homo sapiens
  Payload ID: 5535
  Gene Symbol: EPB41L1
  Gene Name: erythrocyte membrane protein band 4.1-like 1
  Uniprot ID: Q9H4G0
  ENSP ID: ENSP00000363061
MEEKDYSEADGLSERTTPSKAQKSPQKIAKKYKSAICRVTLLDASEYECEVENWLDPSKEIKKQIRSSPWNFAFTVKFYPPDPAQLTEDITRYYLCLQLRADIITGRLPCSFVTHALLGSYAVQAELGDYDAEEHVGNYVSELRFAPNQTRELEERIMELHKTYRGMTPGEAEIHFLENAKKLSMYGVDLHHAKDSEGIDIMLGVCANGLLIYRDRLRINRFAWPKILKISYKRSNFYIKIRPGEYEQFESTIGFKLPNHRSAKRLWKVCIEHHTFFRLVSPEPPPKGFLVMGSKFRYSGRTQAQTRQASALIDRPAPFFERSSSKRYTMSRSLDGAEFSRPASVSENHDAGPDGDKRDEDGESGGQRSEAEEGEVRTPTKIKELKFLDKPEDVLLKHQASINELKRTLKEPNSKLIHRDRDWERERRLPSSPASPSPKGTPEKANERAGLREGSEEKVKPPRPRAPESDTGDEDQDQERDTVFLKDNHLAIERKCSSITVSSTSSLEAEVDFTVIGDYHGSAFEDFSRSLPELDRDKSDSDTEGLLFSRDLNKGAPSQDDESGGIEDSPDRGACSTPDMPQFEPVKTETMTVSSLAIRKKIEPEAVLQTRVSAMDNTQQVDGSASVGREFIATTPSITTETISTTMENSLKSGKGAAAMIPGPQTVATEIRSLSPIIGKDVLTSTYGATAETLSTSTTTHVTKTVKGGFSETRIEKRIIITGDEDVDQDQALALAIKEAKLQHPDMLVTKAVVYRETDPSPEERDKKPQES

SEQ ID NO: 28110 - protein, 168 aa, Homo sapiens
  Payload ID: 5535
  Gene Symbol: EPB41L1
  Gene Name: erythrocyte membrane protein band 4.1-like 1
  ENSP ID: ENSP00000385244
MTTETGPDSEVKKAQEEAPQQPEAAAAVTTPVTPAGHGHPEANSNEKHPSQQDTRPAEQSLDMEEKDYSEADGLSERTTPSKAQKSPQKIAKKYKSAICRVTLLDASEYECEVEKHGRGQVLFDLVCEHLNLLEKDYFGLTFCDADSQKNWLDPSKEIKKQIRSSPWN

SEQ ID NO: 28111 - protein, 197 aa, Homo sapiens
  Payload ID: 5535
  Gene Symbol: EPB41L1
  Gene Name: erythrocyte membrane protein band 4.1-like 1
  ENSP ID: ENSP00000388281
VLLKHQASINELKRTLKEPNSKLIHRDRDWERERRLPSSPASPSPKGTPEKANEPVKTETMTVSSLAIRKKIEPEAVLQTRVSAMDNTQQVDGSASVGREFIATTPSITTETISTTMENSLKSGKGAAAMIPGPQTVATEIRSLSPIIGKDVLTSTYGATAETLSTSTTTHVTKTVKGGFSETRIEKRIIITGDEDV

SEQ ID NO: 28112 - protein, 119 aa, Homo sapiens
  Payload ID: 5535
  Gene Symbol: EPB41L1
  Gene Name: erythrocyte membrane protein band 4.1-like 1
  ENSP ID: ENSP00000390262
  MOD_RES (1)..(1): Any amino acid
XSVGREFIATTPSITTETISTTMIIGKDVLTSTYGATAETLSTSTTTHVTKTVKGGFSETRIEKRIIITGDEDVDQDQALALAIKEAKLQHPDMLVTKAVVYRETDPSPEERDKKPQES

SEQ ID NO: 28113 - protein, 37 aa, Homo sapiens
  Payload ID: 5535
  Gene Symbol: EPB41L1
  Gene Name: erythrocyte membrane protein band 4.1-like 1
  ENSP ID: ENSP00000393106
MEEKDYSEADGLSERTTPSKAQKSPQKIAKKYKSAIC

SEQ ID NO: 28114 - protein, 114 aa, Homo sapiens
  Payload ID: 5535
  Gene Symbol: EPB41L1
  Gene Name: erythrocyte membrane protein band 4.1-like 1
  ENSP ID: ENSP00000396366
MTTETGPDSEVKKAQEEAPQQPEAAAAVTTPVTPAGHGHPEANSNEKHPSQQDTRPAEQSLDMEEKDYSEADGLSERTTPSKAQKSPQKIAKKYKSAICRVTLLDASEYECEVE

SEQ ID NO: 28115 - protein, 779 aa, Homo sapiens; identical to SEQ ID NO: 28104
  Payload ID: 5535
  Gene Symbol: EPB41L1
  Gene Name: erythrocyte membrane protein band 4.1-like 1
  Uniprot ID: Q9H4G0
  ENSP ID: ENSP00000399214

SEQ ID NO: 28116 - protein, 257 aa, Homo sapiens
  Payload ID: 5535
  Gene Symbol: EPB41L1
  Gene Name: erythrocyte membrane protein band 4.1-like 1
  ENSP ID: ENSP00000404341
MEEKDYSEADGLSERTTPSKAQKSPQKIAKKYKSAICRVTLLDASEYECEVEKHGRGQVLFDLVCEHLNLLEKDYFGLTFCDADSQKNWLDPSKEIKKQIRSSPWNFAFTVKFYPPDPAQLTEDITRYYLCLQLRADIITGRLPCSFVTHALLGSYAVQAELGDYDAEEHVGNYVSELRFAPNQTRELEERIMELHKTYRGMTPGEAEIHFLENAKKLSMYGVDLHHAKDSEGIDIMLGVCANGLLIYRDRLRINRF

SEQ ID NO: 28117 - protein, 268 aa, Homo sapiens
  Payload ID: 5535
  Gene Symbol: EPB41L1
  Gene Name: erythrocyte membrane protein band 4.1-like 1
  ENSP ID: ENSP00000406464
  MOD_RES (1)..(1): Any amino acid
XRYTMSRSLDGAEFSRPASVSENHDAGPDGDKRDEDGESGGQRSEAEEGEVRTPTKIKELKFLDKPEDVLLKHQASINELKRTLKEPNSKLIHRDRDWERERRLPSSPASPSPKGTPEKANEPVKTETMTVSSLAIRKKIEPEAVLQTRVSAMDNTQVDGSASVGREFIATTPSITTETISTTMENSLKSGKGAAAMIPGPQTVATEIRSLSPIIGKDVLTSTYGATAETLSTSTTTHVTKTVKGGFSETRIEKRIIITGDEDVDQDQ

SEQ ID NO: 28118 - protein, 59 aa, Homo sapiens
  Payload ID: 5535
  Gene Symbol: EPB41L1
  Gene Name: erythrocyte membrane protein band 4.1-like 1
  ENSP ID: ENSP00000408877
MTTETGPDSEVKKAQEEAPQQPEAAAAVTTPVTPAGHGHPEANSNEKHPSQQDTRPAEQ

SEQ ID NO: 28119 - protein, 188 aa, Homo sapiens
  Payload ID: 5535
  Gene Symbol: EPB41L1
  Gene Name: erythrocyte membrane protein band 4.1-like 1
  ENSP ID: ENSP00000413262
MTTETGPDSEVKKAQEEAPQQPEAAAAVTTPVTPAGHGHPEANSNEKHPSQQDTRPAEQSLDMEEKDYSEADGLSERTTPSKAQKSPQKIAKKYKSAICRVTLLDASEYECEVEKHGRGQVLFDLVCEHLNLLEKDYFGLTFCDADSQKNWLDPSKEIKKQIRSSPWNFAFTVKFYPPDPAQLTEDIT

SEQ ID NO: 28120 - protein, 701 aa, Homo sapiens
  Payload ID: 5535
  Gene Symbol: EPB41L1
  Gene Name: erythrocyte membrane protein band 4.1-like 1
  Uniprot ID: Q9H4G0
  ENSP ID: ENSP00000487049
MVFLGRINEVEPAKGLAESLAPTERSVKSLDMEEKDYSEADGLSERTTPSKAQKSPQKIAKKYKSAICRVTLLDASEYECEVEKHGRGQVLFDLVCEHLNLLEKDYFGLTFCDADSQKNWLDPSKEIKKQIRSSPWNFAFTVKFYPPDPAQLTEDITRYYLCLQLRADIITGRLPCSFVTHALLGSYAVQAELGDYDAEEHVGNYVSELRFAPNQTRELEERIMELHKTYRGMTPGEAEIHFLENAKKLSMYGVDLHHAKDSEGIDIMLGVCANGLLIYRDRLRINRFAWPKILKISYKRSNFYIKIRPGEYEQFESTIGFKLPNHRSAKRLWKVCIEHHTFFRLVSPEPPPKGFLVMGSKFRYSGRTQAQTRQASALIDRPAPFFERSSSKRYTMSRSLDGAEFSRPASVSENHDAGPDGDKRDEDGESGGQRSEAEEGEVRTPTKIKELKFLDKPEDVLLKHQASINELKRTLKEPNSKLIHRDRDWERERRLPSSPASPSPKGTPEKANEPVKTETMTVSSLAIRKKIEPEAVLQTRVSAMDNTQQVDGSASVGREFIATTPSITTETISTTMENSLKSGKGAAAMIPGPQTVATEIRSLSPIIGKDVLTSTYGATAETLSTSTTTHVTKTVKGGFSETRIEKRIIITGDEDVDQDQALALAIKEAKLQHPDMLVTKAVVYRETDPSPEERDKKPQES

SEQ ID NO: 28121 - protein, 1005 aa, Homo sapiens
  Payload ID: 5536
  Gene Symbol: EPB41L2
  Gene Name: erythrocyte membrane protein band 4.1-like 2
  Uniprot ID: O43491
  ENSP ID: ENSP00000338481
MTTEVGSVSEVKKDSSQLGTDATKEKPKEVAENQQNQSSDPEEEKGSQPPPAAESQSSLRRQKREKETSESRGISRFIPPWLKKQKSYTLVVAKDGGDKKEPTQAVVEEQVLDKEEPLPEEQRQAKGDAEEMAQKKQEIKVEVKEEKPSVSKEEKPSVSKVEMQPTELVSKEREEKVKETQEDKLEGGAAKRETKEVQTNELKAEKASQKVTKKTKTVQCKVTLLDGTEYSCDLEKHAKGQVLFDKVCEHLNLLEKDYFGLLFQESPEQKNWLDPAKEIKRQLRNLPWLFTFNVKFYPPDPSQLTEDITRYFLCLQLRQDIASGRLPCSFVTHALLGSYTLQAELGDYDPEEHGSIDLSEFQFAPTQTKELEEKVAELHKTHRGLSPAQADSQFLENAKRLSMYGVDLHHAKDSEGVDIKLGVCANGLLIYKDRLRINRFAWPKILKISYKRSNFYIKVRPAELEQFESTIGFKLPNHRAAKRLWKVCVEHHTFYRLVSPEQPPKAKFLTLGSKFRYSGRTQAQTRQASTLIDRPAPHFERTSSKRVSRSLDGAPIGVMDQSLMKDFPGAAGEISAYGPGLVSIAVVQDGDGRREVRSPTKAPHLQLIEGKKNSLRVEGDNIYVRHSNLMLEELDKAQEDILKHQASISELKRNFMESTPEPRPNEWEKRRITPLSLQTQGSSHETLNIVEEKKRAEVGKDERVITEEMNGKEISPGSGPGEIRKVEPVTQKDSTSLSSESSSSSSESEEEDVGEYRPHHRVTEGTIREEQEYEEEVEEEPRPAAKVVEREEAVPEASPVTQAGASVITVETVIQENVGAQKIPGEKSVHEGALKQDMGEEAEEEPQKVNGEVSHVDIDVLPQIICCSEPPVVKTEMVTISDASQRTEISTKEVPIVQTETKTITYESPQIDGGAGGDSGTLLTAQTITSESVSTTTTTHITKTVKGGISETRIEKRIVITGDGDIDHDQALAQAIREAREQHPDMSVTRVVVHKETELAEEGED

SEQ ID NO: 28122 - protein, 1005 aa, Homo sapiens; identical to SEQ ID NO: 28121
  Payload ID: 5536
  Gene Symbol: EPB41L2
  Gene Name: erythrocyte membrane protein band 4.1-like 2
  Uniprot ID: O43491
  ENSP ID: ENSP00000357110

SEQ ID NO: 28123 - protein, 673 aa, Homo sapiens
  Payload ID: 5536
  Gene Symbol: EPB41L2
  Gene Name: erythrocyte membrane protein band 4.1-like 2
  Uniprot ID: O43491
  ENSP ID: ENSP00000376222
MTTEVGSVSEVKKDSSQLGTDATKEKPKEVAENQQNQSSDPEEEKGSQPPPAAESQSSLRRQKREKETSESRGISRFIPPWLKKQKSYTLVVAKDGGDKKEPTQAVVEEQVLDKEEPLPEEQRQAKGDAEEMAQKKQEIKVEVKEEKPSVSKEEKPSVSKVEMQPTELVSKEREEKVKETQEDKLEGGAAKRETKEVQTNELKAEKASQKVTKKTKTVQCKVTLLDGTEYSCDLEKHAKGQVLFDKVCEHLNLLEKDYFGLLFQESPEQKNWLDPAKEIKRQLRNLPWLFTFNVKFYPPDPSQLTEDITRYFLCLQLRQDIASGRLPCSFVTHALLGSYTLQAELGDYDPEEHGSIDLSEFQFAPTQTKELEEKVAELHKTHRGLSPAQADSQFLENAKRLSMYGVDLHHAKDSEGVDIKLGVCANGLLIYKDRLRINRFAWPKILKISYKRSNFYIKVRPAELEQFESTIGFKLPNHRAAKRLWKVCVEHHTFYRLVSPEQPPKAKFLTLGSKFRYSGRTQAQTRQASTLIDRPAPHFERTSSKRVSRSLDGAPIGVMDQSLMKDFPGAAGEISAYGPGLVSIAVVQDGDGRREVRSPTKAPHLQLIEGKTVKGGISETRIEKRIVITGDGDIDHDQALAQAIREAREQHPDMSVTRVVVHKETELAEEGED

SEQ ID NO: 28124 - protein, 380 aa, Homo sapiens
  Payload ID: 5536
  Gene Symbol: EPB41L2
  Gene Name: erythrocyte membrane protein band 4.1-like 2
  ENSP ID: ENSP00000397580
  MOD_RES (1)..(1): Any amino acid
XLGSKFRYSGRTQAQTRQASTLIDRPAPHFERTSSKRVSRSLDGAPIGVMDQSLMKDFPGAAGEISAYGPGLVSIAVVQDGDGRREVRSPTKAPHLQLIEGKKNSLRVEGDNIYVRHSNLMLEELDKAQEDILKHQASISELKRNFMESTPEPRPNEWEKRRITPLSLQTQGRKGDHLFKDILSVKEKYLMPTIWTVEEKAQETDKTRAPESEGPCTGARDAVKSSHETLNIVEEKKRAEVGKDERVITEEMNGKEISPGSGPGEIRKVEPVTQKDSTSLSSESSSSSSESEEEDVGEYRPHHRVTEGTIREEQEYEEEVEEEPRPAAKVVEREEAVPEASPVTQAGASVITVETVIQENVGAQKIPGEKSVHEGALKQD

SEQ ID NO: 28125 - protein, 747 aa, Homo sapiens
  Payload ID: 5536
  Gene Symbol: EPB41L2
  Gene Name: erythrocyte membrane protein band 4.1-like 2
  Uniprot ID: O43491
  ENSP ID: ENSP00000402041
MTTEVGSVSEVKKDSSQLGTDATKEKPKEVAENQQNQSSDPEEEKGSQPPPAAESQSSLRRQKREKETSESRGISRFIPPWLKKQKSYTLVVAKDGGDKKEPTQAVVEEQVLDKEEPLPEEQRQAKGDAEEMAQKKQEIKVEVKEEKPSVSKEEKPSVSKVEMQPTELVSKEREEKVKETQEDKLEGGAAKRETKEVQTNELKAEKASQKVTKKTKTVQCKVTLLDGTEYSCDLEKHAKGQVLFDKVCEHLNLLEKDYFGLLFQESPEQKNWLDPAKEIKRQLRNLPWLFTFNVKFYPPDPSQLTEDITRYFLCLQLRQDIASGRLPCSFVTHALLGSYTLQAELGDYDPEEHGSIDLSEFQFAPTQTKELEEKVAELHKTHRGLSPAQADSQFLENAKRLSMYGVDLHHAKDSEGVDIKLGVCANGLLIYKDRLRINRFAWPKILKISYKRSNFYIKVRPAELEQFESTIGFKLPNHRAAKRLWKVCVEHHTFYRLVSPEQPPKAKFLTLGSKFRYSGRTQAQTRQASTLIDRPAPHFERTSSKRVSRSLDGAPIGVMDQSLMKDFPGAAGEISAYGPGLVSIAVVQDGDGRREVRSPTKAPHLQLIEGKPPVVKTEMVTISDASQRTEISTKEVPIVQTETKTITYESPQIDGGAGGDSGTLLTAQTITSESVSTTTTTHITKTVKGGISETRIEKRIVITGDGDIDHDQALAQAIREAREQHPDMSVTRVVVHKETELAEEGED

SEQ ID NO: 28126 - protein, 811 aa, Homo sapiens
  Payload ID: 5536
  Gene Symbol: EPB41L2
  Gene Name: erythrocyte membrane protein band 4.1-like 2
  ENSP ID: ENSP00000431647
MTTEVGSVSEVKKDSSQLGTDATKEKPKEVAENQQNQSSDPEEEKGSQPPPAAESQSSLRRQKREKETSESRGISRFIPPWLKKQKSYTLVVAKDGGDKKEPTQAVVEEQVLDKEEPLPEEQRQAKGDAEEMAQKKQEIKVEVKEEKPSVSKEEKPSVSKVEMQPTELVSKEREEKVKETQEDKLEGGAAKRETKEVQTNELKAEKASQKVTKKTKTVQCKVTLLDGTEYSCDLEKHAKGQVLFDKVCEHLNLLEKDYFGLLFQESPEQKNWLDPAKEIKRQLRNLPWLFTFNVKFYPPDPSQLTEDITRYFLCLQLRQDIASGRLPCSFVTHALLGSYTLQAELGDYDPEEHGSIDLSEFQFAPTQTKELEEKVAELHKTHRGLSPAQADSQFLENAKRLSMYGVDLHHAKDSEGVDIKLGVCANGLLIYKDRLRINRFAWPKILKISYKRSNFYIKVRPAELEQFESTIGFKLPNHRAAKRLWKVCVEHHTFYRLVSPEQPPKAKFLTLGSKFRYSGRTQAQTRQASTLIDRPAPHFERTSSKRVSRSLDGAPIGVMDQSLMKDFPGAAGEISAYGPGLVSIAVVQDGDGRREVRSPTKAPHLQLIEGKSSHETLNIVEEKKRAEVGKDERVITEEMNGKEISPGSGPGEIRKVEPVTQKDSTSLSSESSSSSSESEEEDVGEYRPHHRVTEGTIREEQEYEEEVEEEPRPAAKIDGGAGGDSGTLLTAQTITSESVSTTTTTHITKTVKGGISETRIEKRIVITGDGDIDHDQALAQAIREAREQHPDMSVTRVVVHKETELAEEGED

SEQ ID NO: 28127 - protein, 706 aa, Homo sapiens
  Payload ID: 5536
  Gene Symbol: EPB41L2
  Gene Name: erythrocyte membrane protein band 4.1-like 2
  ENSP ID: ENSP00000431988
MTTEVGSVSEVKKDSSQLGTDATKEKPKEVAENQQNQSSDPEEEKGSQPPPAAESQSSLRRQKREKETSESRGISRFIPPWLKKQKSYTLVVAKDGGDKKEPTQAVVEEQVLDKEEPLPEEQRQAKGDAEEMAQKKQEIKVEVKEEKPSVSKEEKPSVSKVEMQPTELVSKEREEKVKETQEDKLEGGAAKRETKEVQTNELKAEKASQKVTKKTKTVQCKVTLLDGTEYSCDLEKHAKGQVLFDKVCEHLNLLEKDYFGLLFQESPEQKNWLDPAKEIKRQLRNLPWLFTFNVKFYPPDPSQLTEDITRYFLCLQLRQDIASGRLPCSFVTHALLGSYTLQAELGDYDPEEHGSIDLSEFQFAPTQTKELEEKVAELHKTHRGLSPAQADSQFLENAKRLSMYGVDLHHAKDSEGVDIKLGVCANGLLIYKDRLRINRFAWPKILKISYKRSNFYIKVRPAELEQFESTIGFKLPNHRAAKRLWKVCVEHHTFYRLVSPEQPPKAKFLTLGSKFRYSGRTQAQTRQASTLIDRPAPHFERTSSKRVSRSLDGAPIGVMDQSLMKDFPGAAGEISAYGPGLVSIAVVQDGDGRREVRSPTKAPHLQLIEGKIDGGAGGDSGTLLTAQTITSESVSTTTTTHITKTVKGGISETRIEKRIVITGDGDIDHDQALAQAIREAREQHPDMSVTRVVVHKETELAEEGED

SEQ ID NO: 28128 - protein, 162 aa, Homo sapiens
  Payload ID: 5536
  Gene Symbol: EPB41L2
  Gene Name: erythrocyte membrane protein band 4.1-like 2
  ENSP ID: ENSP00000432013
MTTEVGSVSEVKKDSSQLGTDATKEKPKEVAENQQNQSSDPEEEKGSQPPPAAESQSSLRRQKREKETSESRGISRFIPPWLKKQKSYTLVVAKDGGDKKEPTQAVVEEQVLDKEEPLPEEQRQAKGDAEEMAQKKQEIKVEVKEEKPSVSKEEKPSVSKVE

SEQ ID NO: 28129 - protein, 153 aa, Homo sapiens
  Payload ID: 5536
  Gene Symbol: EPB41L2
  Gene Name: erythrocyte membrane protein band 4.1-like 2
  ENSP ID: ENSP00000432329
MTTEVGSVSEVKKDSSQLGTDATKEKPKEVAENQQNQSSDPEEEKGSQPPPAAESQSSLRRQKREKETSESRGISRFIPPWLKKQKSYTLVVAKDGGDKKEPTQAVVEEQVLDKEEPLPEEQRQAKGDAEEMAQKKQEIKVEVKEEKPSVSKE

SEQ ID NO: 28130 - protein, 673 aa, Homo sapiens; identical to SEQ ID NO: 28123
  Payload ID: 5536
  Gene Symbol: EPB41L2
  Gene Name: erythrocyte membrane protein band 4.1-like 2
  Uniprot ID: O43491
  ENSP ID: ENSP00000432803

SEQ ID NO: 28131 - protein, 240 aa, Homo sapiens
  Payload ID: 5536
  Gene Symbol: EPB41L2
  Gene Name: erythrocyte membrane protein band 4.1-like 2
  ENSP ID: ENSP00000432949
MEEEETQLEEELDKAQEDILKHQASISELKRNFMESTPEPRPNEWEKRRITPLSLQTQGSLEEEITSILFSEKGFSDSMKATFTSATTWTAEGAVVSANAPSEKLSSSPFSHLLETRAPESEGPCTGARDAVKPPVVKTEMVTISDASQRTEISTKEVPIVQTETKTITYESPQIDGGAGGDSGTLLTAQTITSESVSTTTTTHITKTVKGGISETRIEKRIVITGDGDIDHDQALAQAI

SEQ ID NO: 28132 - protein, 747 aa, Homo sapiens; identical to SEQ ID NO: 28125
  Payload ID: 5536
  Gene Symbol: EPB41L2
  Gene Name: erythrocyte membrane protein band 4.1-like 2
  Uniprot ID: O43491
  ENSP ID: ENSP00000434308

SEQ ID NO: 28133 - protein, 852 aa, Homo sapiens
  Payload ID: 5536
  Gene Symbol: EPB41L2
  Gene Name: erythrocyte membrane protein band 4.1-like 2
  Uniprot ID: O43491
  ENSP ID: ENSP00000434576
MTTEVGSVSEVKKDSSQLGTDATKEKPKEVAENQQNQSSDPEEEKGSQPPPAAESQSSLRRQKREKETSESRGISRFIPPWLKKQKSYTLVVAKDGGDKKEPTQAVVEEQVLDKEEPLPEEQRQAKGDAEEMAQKKQEIKVEVKEEKPSVSKEEKPSVSKVEMQPTELVSKEREEKVKETQEDKLEGGAAKRETKEVQTNELKAEKASQKVTKKTKTVQCKVTLLDGTEYSCDLEKHAKGQVLFDKVCEHLNLLEKDYFGLLFQESPEQKNWLDPAKEIKRQLRNLPWLFTFNVKFYPPDPSQLTEDITRYFLCLQLRQDIASGRLPCSFVTHALLGSYTLQAELGDYDPEEHGSIDLSEFQFAPTQTKELEEKVAELHKTHRGLSPAQADSQFLENAKRLSMYGVDLHHAKDSEGVDIKLGVCANGLLIYKDRLRINRFAWPKILKISYKRSNFYIKVRPAELEQFESTIGFKLPNHRAAKRLWKVCVEHHTFYRLVSPEQPPKAKFLTLGSKFRYSGRTQAQTRQASTLIDRPAPHFERTSSKRVSRSLDGAPIGVMDQSLMKDFPGAAGEISAYGPGLVSIAVVQDGDGRREVRSPTKAPHLQLIEGKSSHETLNIVEEKKRAEVGKDERVITEEMNGKEISPGSGPGEIRKVEPVTQKDSTSLSSESSSSSSESEEEDVGEYRPHHRVTEGTIREEQEYEEEVEEEPRPAAKPPVVKTEMVTISDASQRTEISTKEVPIVQTETKTITYESPQIDGGAGGDSGTLLTAQTITSESVSTTTTTHITKTVKGGISETRIEKRIVITGDGDIDHDQALAQAIREAREQHPDMSVTRVVVHKETELAEEGED

SEQ ID NO: 28134 - protein, 126 aa, Homo sapiens
  Payload ID: 5536
  Gene Symbol: EPB41L2
  Gene Name: erythrocyte membrane protein band 4.1-like 2
  ENSP ID: ENSP00000434596
MEEEETQLEEKNSLRVEGDNIYVRHSNLMLEIDGGAGGDSGTLLTAQTITSESVSTTTTTHITKTVKGGISETRIEKRIVITGDGDIDHDQALAQAIREAREQHPDMSVTRVVVHKETELAEEGED

SEQ ID NO: 28135 - protein, 224 aa, Homo sapiens
  Payload ID: 5536
  Gene Symbol: EPB41L2
  Gene Name: erythrocyte membrane protein band 4.1-like 2
  ENSP ID: ENSP00000434998
MEEEETQLEEELDKAQEDILKHQASISELKRNFMESTPEPRPNEWEKRRITPLSLQTQGSLEEEITSILFSEKGFSDSMKATFTSATTWTAEGAVVSANAPSEKLSSSPFSHLLETRAPESEGPCTGARDAVKSSHETLNIVEEKKRAEVGKDERVITEEMNGKEISPGSGPGEIRKVEPVTQKDSTSLSSESSSSSSESEEEDVGEYRPHHRVTEGTIREEQE

SEQ ID NO: 28136 - protein, 118 aa, Homo sapiens
  Payload ID: 5536
  Gene Symbol: EPB41L2
  Gene Name: erythrocyte membrane protein band 4.1-like 2
  ENSP ID: ENSP00000435556
MTTEVGSVSEVKKDSSQLGTDATKEKPKEVAENQQNQSSDPEEEKGSQPPPAAESQSSLRRQKREKETSESRGISRFIPPWLKKQKSYTLVVAKDGGDKKEPTQAVVEEQVLDKEEPL

SEQ ID NO: 28137 - protein, 127 aa, Homo sapiens
  Payload ID: 5536
  Gene Symbol: EPB41L2
  Gene Name: erythrocyte membrane protein band 4.1-like 2
  ENSP ID: ENSP00000436145
MTTEVGSVSEVKKDSSQLGTDATKEKPKEVAENQQNQSSDPEEEKGSQPPPAAESQSSLRRQKREKETSESRGISRFIPPWLKKQKSYTLVVAKDGGDKKEPTQAVVEEQVLDKEEPLPEEQRQAKG

SEQ ID NO: 28138 - protein, 935 aa, Homo sapiens
  Payload ID: 5536
  Gene Symbol: EPB41L2
  Gene Name: erythrocyte membrane protein band 4.1-like 2
  ENSP ID: ENSP00000436348
MTTEVGSVSEVKKDSSQLGTDATKEKPKEVAENQQNQSSDPEEEKGSQPPPAAESQSSLRRQKREKETSESRGISRFIPPWLKKQKSYTLVVAKDGGDKKEPTQAVVEEQVLDKEEPLPEEQRQAKGDAEEMAQKKQEIKVEVKEEKPSVSKEEKPSVSKVEMQPTELVSKEREEKVKETQEDKLEGGAAKRETKEVQTNELKAEKASQKVTKKTKTVQCKVTLLDGTEYSCDLEKHAKGQVLFDKVCEHLNLLEKDYFGLLFQESPEQKNWLDPAKEIKRQLRNLPWLFTFNVKFYPPDPSQLTEDITRYFLCLQLRQDIASGRLPCSFVTHALLGSYTLQAELGDYDPEEHGSIDLSEFQFAPTQTKELEEKVAELHKTHRGLSPAQADSQFLENAKRLSMYGVDLHHAKDSEGVDIKLGVCANGLLIYKDRLRINRFAWPKILKISYKRSNFYIKVRPAELEQFESTIGFKLPNHRAAKRLWKVCVEHHTFYRLVSPEQPPKAKFLTLGSKFRYSGRTQAQTRQASTLIDRPAPHFERTSSKRVSRSLDGAPIGVMDQSLMKDFPGAAGEISAYGPGLVSIAVVQDGDGRREVRSPTKAPHLQLIEGKSSHETLNIVEEKKRAEVGKDERVITEEMNGKEISPGSGPGEIRKVEPVTQKDSTSLSSESSSSSSESEEEDVGEYRPHHRVTEGTIREEQEYEEEVEEEPRPAAKVVEREEAVPEASPVTQAGASVITVETVIQENVGAQKIPGEKSVHEGALKQDMGEEAEEEPQKVNGEVSHVDIDVLPQIICCSEPPVVKTEMVTISDASQRTEISTKEVPIVQTETKTITYESPQIDGGAGGDSGTLLTAQTITSESVSTTTTTHITKTVKGGISETRIEKRIVITGDGDIDHDQALAQAIREAREQHPDMSVTRVVVHKETELAEEGED

SEQ ID NO: 28139 - protein, 201 aa, Homo sapiens
  Payload ID: 5536
  Gene Symbol: EPB41L2
  Gene Name: erythrocyte membrane protein band 4.1-like 2
  ENSP ID: ENSP00000436349
MEEEETQLEEKNSLRVEGDNIYVRHSNLMLEELDKAQEDILKHQASISELKRNFMESTPEPRPNEWEKRRITPLSLQTQGTRAPESEGPCTGARDAVKPPVVKTEMVTISDASQRTEISTKEVPIVQTETKTITYESPQTVKGGISETRIEKRIVITGDGDIDHDQALAQAIREAREQHPDMSVTRVVVHKETELAEEGED

SEQ ID NO: 28140 - protein, 935 aa, Homo sapiens; identical to SEQ ID NO: 28138
  Payload ID: 5536
  Gene Symbol: EPB41L2
  Gene Name: erythrocyte membrane protein band 4.1-like 2
  ENSP ID: ENSP00000436641

SEQ ID NO: 28141 - protein, 179 aa, Homo sapiens
  Payload ID: 5536
  Gene Symbol: EPB41L2
  Gene Name: erythrocyte membrane protein band 4.1-like 2
  ENSP ID: ENSP00000436871
MTTEVGSVSEVKKDSSQLGTDATKEKPKEVAENQQNQSSDPEEEKGSQPPPAAESQSSLRRQKREKETSESRGISRFIPPWLKKQKSYTLVVAKDGGDKKEPTQAVVEEQVLDKEEPLPEEQRQAKGDAEEMAQKKQEIKVEVKEEKPSVSKEEKPSVSKVEMQPTELVSKEREEKVKE

SEQ ID NO: 28142 - protein, 383 aa, Homo sapiens
  Payload ID: 5536
  Gene Symbol: EPB41L2
  Gene Name: erythrocyte membrane protein band 4.1-like 2
  ENSP ID: ENSP00000437207
MEEEETQLEEELDKAQEDILKHQASISELKRNFMESTPEPRPNEWEKRRITPLSLQTQGSSHETLNIVEEKKRAEVGKDERVITEEMNGKEISPGSGPGEIRKVEPVTQKDSTSLSSESSSSSSESEEEDVGEYRPHHRVTEGTIREEQEYEEEVEEEPRPAAKVVEREEAVPEASPVTQAGASVITVETVIQENVGAQKIPGEKSVHEGALKQDMGEEAEEEPQKVNGEVSHVDIDVLPQIICCSEPPVVKTEMVTISDASQRTEISTKEVPIVQTETKTITYESPQIDGGAGGDSGTLLTAQTITSESVSTTTTTHITKTVKGGISETRIEKRIVITGDGDIDHDQALAQAIREAREQHPDMSVTRVVVHKETELAEEGED

SEQ ID NO: 28143 - protein, 268 aa, Homo sapiens
  Payload ID: 5536
  Gene Symbol: EPB41L2
  Gene Name: erythrocyte membrane protein band 4.1-like 2
  ENSP ID: ENSP00000437295
MEEEETQLEEKNSLRVEGDNIYVRHSNLMLEELDKAQEDILKHQASISELKRNFMESTPEPRPNEWEKRRITPLSLQTQGSSHETLNIVEEKKRAEVGKDERVITEEMNGKEISPGSGPGEIRKVEPVTQKDSTSLSSESSSSSSESEEEDVGEYRPHHRVTEGTIREEQEYEEEVEEEPRPAAKVVEREEAVPEASPVTQAGASVITVETVIQENVGAQKIPGEKSVHEGALKQDMGEEAEEEPQKVNGEVSHVDIDVLPQIICCSE

SEQ ID NO: 28144 - protein, 633 aa, Homo sapiens
  Payload ID: 5536
  Gene Symbol: EPB41L2
  Gene Name: erythrocyte membrane protein band 4.1-like 2
  ENSP ID: ENSP00000477544
MTTEVGSVSEVKKDSSQLGTDATKEKPKEVAENQQNQSSDPEEEKGSQPPPAAESQSSLRRQKREKETSESRGISRFIPPWLKKQKSYTLVVAKDGGDKKEPTQAVVEEQVLDKEEPLPEEQRQAKGDAEEMAQKKQEIKVEVKEEKPSVSKEEKPSVSKVEMQPTELVSKEREEKVKETQEDKLEGGAAKRETKEVQTNELKAEKASQKVTKKTKTVQCKVTLLDGTEYSCDLEKHAKGQVLFDKVCEHLNLLEKDYFGLLFQESPEQKNWLDPAKEIKRQLRNLPWLFTFNVKFYPPDPSQLTEDITRYFLCLQLRQDIASGRLPCSFVTHALLGSYTLQAELGDYDPEEHGSIDLSEFQFAPTQTKELEEKVAELHKTHRGLSPAQADSQFLENAKRLSMYGVDLHHAKDSEGVDIKLGVCANGLLIYKDRLRINRFAWPKILKISYKRSNFYIKVRPAELEQFESTIGFKLPNHRAAKRLWKVCVEHHTFYRLVSPEQPPKAKFLTLGSKFRYSGRTQAQTRQASTLIDRPAPHFERTSSKRVSRSLDGAPIGVMDQSLMKDFPGAAGEISAYGPGLVSIAVVQDGDGRREVRSPTKAPHLQLIEGKSSHETLNIVEEKSGQRLGKTKE

SEQ ID NO: 28145 - protein, 935 aa, Homo sapiens; identical to SEQ ID NO: 28138
  Payload ID: 5536
  Gene Symbol: EPB41L2
  Gene Name: erythrocyte membrane protein band 4.1-like 2
  ENSP ID: ENSP00000486691

SEQ ID NO: 28146 - protein, 918 aa, Homo sapiens
  Payload ID: 5537
  Gene Symbol: EPB41L3
  Gene Name: erythrocyte membrane protein band 4.1-like 3
  ENSP ID: ENSP00000341138
MTTESGSDSESKPDQEAEPQEAAGAQGRAGAPVPEPPKEEQQQALEQFAAAAAHSTPVRREVTDKEQEFAARAAKQLEYQQLEDDKLSQKSSSSKLSRSPLKIVKKPKSMQCKVILLDGSEYTCDVEKRSRGQVLFDKVCEHLNLLEKDYFGLTYRDAENQKNWLDPAKEIKKQVRSGAWHFSFNVKFYPPDPAQLSEDITRYYLCLQLRDDIVSGRLPCSFVTLALLGSYTVQSELGDYDPDECGSDYISEFRFAPNHTKELEDKVIELHKSHRGMTPAEAEMHFLENAKKLSMYGVDLHHAKDSEGVEIMLGVCASGLLIYRDRLRINRFAWPKVLKISYKRNNFYIKIRPGEFEQFESTIGFKLPNHRAAKRLWKVCVEHHTFFRLLLPEAPPKKFLTLGSKFRYSGRTQAQTRRASALIDRPAPYFERSSSKRYTMSRSLDGASVNENHEIYMKDSMSAAEVGTGQYATTKGISQTNLITTVTPEKKAEEERDEEEDKRRKGEEVTPISAIRHEGKTDSERTDTAADGETTATESDQEEDAELKAQELEKTQDDLMKHQTNISELKRTFLETSTDTAVTNEWEKRLSTSPVRLAARQEDAPMIEPLVPEETKQSSGEKLMDGSEIFSLLESARKPTEFIGGVTSTSQSWVQKMETKTESSGIETEPTVHHLPLSTEKVVQETVLVEERRVVHASGDASYSAGDSGDAAAQPAFTGIKGKEGSALTEGAKEEGGEEVAKAVLEQEETAAASRERQEEQSAAIHISETLEQKPHFESSTVKTETISFGSVSPGGVKLEISTKEVPVVHTETKTITYESSQVDPGTDLEPGVLMSAQTITSETTSTTTTTHITKTVKGGISETRIEKRIVITGDADIDHDQALAQAIKEAKEQHPDMSVTKVVVHKETEITPEDGED

SEQ ID NO: 28147 - protein, 1087 aa, Homo sapiens
  Payload ID: 5537
  Gene Symbol: EPB41L3
  Gene Name: erythrocyte membrane protein band 4.1-like 3
  Uniprot ID: Q9Y2J2
  ENSP ID: ENSP00000343158
MTTESGSDSESKPDQEAEPQEAAGAQGRAGAPVPEPPKEEQQQALEQFAAAAAHSTPVRREVTDKEQEFAARAAKQLEYQQLEDDKLSQKSSSSKLSRSPLKIVKKPKSMQCKVILLDGSEYTCDVEKRSRGQVLFDKVCEHLNLLEKDYFGLTYRDAENQKNWLDPAKEIKKQVRSGAWHFSFNVKFYPPDPAQLSEDITRYYLCLQLRDDIVSGRLPCSFVTLALLGSYTVQSELGDYDPDECGSDYISEFRFAPNHTKELEDKVIELHKSHRGMTPAEAEMHFLENAKKLSMYGVDLHHAKDSEGVEIMLGVCASGLLIYRDRLRINRFAWPKVLKISYKRNNFYIKIRPGEFEQFESTIGFKLPNHRAAKRLWKVCVEHHTFFRLLLPEAPPKKFLTLGSKFRYSGRTQAQTRRASALIDRPAPYFERSSSKRYTMSRSLDGEVGTGQYATTKGISQTNLITTVTPEKKAEEERDEEEDKRRKGEEVTPISAIRHEGKSPGLGTDSCPLSPPSTHCAPTSPTELRRRCKENDCKLPGYEPSRAEHLPGEPALDSDGPGRPYLGDQDVAFSYRQQTGKGTTLFSFSLQLPESFPSLLDDDGYLSFPNLSETNLLPQSLQHYLPIRSPSLVPCFLFIFFFLLSASFSVPYALTLSFPLALCLCYLEPKAASLSASLDNDPSDSSEEETDSERTDTAADGETTATESDQEEDAELKAQELEKTQDDLMKHQTNISELKRTFLETSTDTAVTNEWEKRLSTSPVRLAARQEDAPMIEPLVPEETKQSSGEKLMDGSEIFSLLESARKPTEFIGGVTSTSQSWVQKMETKTESSGIETEPTVHHLPLSTEKVVQETVLVEERRVVHASGDASYSAGDSGDAAAQPAFTGIKGKEGSALTEGAKEEGGEEVAKAVLEQEETAAASRERQEEQSAAIHISETLEQKPHFESSTVKTETISFGSVSPGGVKLEISTKEVPVVHTETKTITYESSQVDPGTDLEPGVLMSAQTITSETTSTTTTTHITKTVKGGISETRIEKRIVITGDADIDHDQALAQAIKEAKEQHPDMSVTKVVVHKETEITPEDGED

SEQ ID NO: 28148 - protein, 503 aa, Homo sapiens
  Payload ID: 5537
  Gene Symbol: EPB41L3
  Gene Name: erythrocyte membrane protein band 4.1-like 3
  ENSP ID: ENSP00000382981
MQCKVILLDGSEYTCDVEKRSRGQVLFDKVCEHLNLLEKDYFGLTYRDAENQKNWLDPAKEIKKQVRSGAWHFSFNVKFYPPDPAQLSEDITRYYLCLQLRDDIVSGRLPCSFVTLALLGSYTVQSELGDYDPDECGSDYISEFRFAPNHTKELEDKVIELHKSHRGMTPAEAEMHFLENAKKLSMYGVDLHHAKDSEGVEIMLGVCASGLLIYRDRLRINRFAWPKVLKISYKRNNFYIKIRPGEFEQFESTIGFKLPNHRAAKRLWKVCVEHHTFFRLLLPEAPPKKFLTLGSKFRYSGRTQAQTRRASALIDRPAPYFERSSSKRYTMSRSLDGASVNENHEIYMKDSMSAAEVGTGQYATTKGISQTNLITTVTPEKKAEEERDEEEDKRRKGEEVTPISAIRHEGKTDSERTDTAADGETTATEELEKTQDDLMKHQTNISELKRTFLETSTDTAVTNEWEKRLSTSPVRLAARQEDAPMIEPLVPEEKMETKTESSG

SEQ ID NO: 28149 - protein, 883 aa, Homo sapiens
  Payload ID: 5537
  Gene Symbol: EPB41L3
  Gene Name: erythrocyte membrane protein band 4.1-like 3
  Uniprot ID: Q9Y2J2
  ENSP ID: ENSP00000441174
MTTESGSDSESKPDQEAEPQEAAGAQGRAGAPVPEPPKEEQQQALEQFAAAAAHSTPVRREVTDKEQEFAARAAKQLEYQQLEDDKLSQKSSSSKLSRSPLKIVKKPKSMQCKVILLDGSEYTCDVEKRSRGQVLFDKVCEHLNLLEKDYFGLTYRDAENQKNWLDPAKEIKKQVRSGAWHFSFNVKFYPPDPAQLSEDITRYYLCLQLRDDIVSGRLPCSFVTLALLGSYTVQSELGDYDPDECGSDYISEFRFAPNHTKELEDKVIELHKSHRGMTPAEAEMHFLENAKKLSMYGVDLHHAKDSEGVEIMLGVCASGLLIYRDRLRINRFAWPKVLKISYKRNNFYIKIRPGEFEQFESTIGFKLPNHRAAKRLWKVCVEHHTFFRLLLPEAPPKKFLTLGSKFRYSGRTQAQTRRASALIDRPAPYFERSSSKRYTMSRSLDGASVNENHEIYMKDSMSAAEVGTGQYATTKGISQTNLITTVTPEKKAEEERDEEEDKRRKGEEVTPISAIRHEGKTDSERTDTAADGETTATESDQEEDAELKAQELEKTQDDLMKHQTNISELKRTFLETSTDTAVTNEWEKRLSTSPVRLAARQEDAPMIEPLVPEETKQSSGEKLMDGSEIFSLLESARKPTEFIGGVTSTSQSWVQKMETKTESSGIETEPTVHHLPLSTEKVVQETVLVEERRVVHASGDASYSAGDSGDAAAQPAFTGIKGKEGSALTEGAKEEGGEEVAKAVLEQEETAAASRERQEEQSAAIHISETLEQKPHFESSTVKTETISFGSVSPGGVKLEISTKEVPVVHTETKTITYESSQVDPGTDLEPGVLMSAQTITSETTSTTTTTHITKTVKGGISETRIEKRIVITGDADIDHDQE

SEQ ID NO: 28150 - protein, 865 aa, Homo sapiens
  Payload ID: 5537
  Gene Symbol: EPB41L3
  Gene Name: erythrocyte membrane protein band 4.1-like 3
  Uniprot ID: Q9Y2J2
  ENSP ID: ENSP00000442091
MTTESGSDSESKPDQEAEPQEAAGAQGRAGAPVPEPPKEEQQQALEQFAAAAAHSTPVRREVTDKEQEFAARAAKQLEYQQLEDDKLSQKSSSSKLSRSPLKIVKKPKSMQCKVILLDGSEYTCDVEKRSRGQVLFDKVCEHLNLLEKDYFGLTYRDAENQKNWLDPAKEIKKQVRSGAWHFSFNVKFYPPDPAQLSEDITRYYLCLQLRDDIVSGRLPCSFVTLALLGSYTVQSELGDYDPDECGSDYISEFRFAPNHTKELEDKVIELHKSHRGMTPAEAEMHFLENAKKLSMYGVDLHHAKDSEGVEIMLGVCASGLLIYRDRLRINRFAWPKVLKISYKRNNFYIKIRPGEFEQFESTIGFKLPNHRAAKRLWKVCVEHHTFFRLLLPEAPPKKFLTLGSKFRYSGRTQAQTRRASALIDRPAPYFERSSSKRYTMSRSLDGASVNENHEIYMKDSMSAAEVGTGQYATTKGISQTNLITTVTPEKKAEEERDEEEDKRRKGEEVTPISAIRHEGKTDSERTDTAADGETTATEELEKTQDDLMKHQTNISELKRTFLETSTDTAVTNEWEKRLSTSPVRLAARQEDAPMIEPLVPEEKMETKTESSGIETEPTVHHLPLSTEKVVQETVLVEERRVVHASGDASYSAGDSGDAAAQPAFTGIKGKEGSALTEGAKEEGGEEVAKAVLEQEETAAASRERQEEQSAAIHISETLEQKPHFESSTVKTETISFGSVSPGGVKLEISTKEVPVVHTETKTITYESSQVDPGTDLEPGVLMSAQTITSETTSTTTTTHITKTVKGGISETRIEKRIVITGDADIDHDQALAQAIKEAKEQHPDMSVTKVVVHKETEITPEDGED

SEQ ID NO: 28151 - protein, 116 aa, Homo sapiens
  Payload ID: 5537
  Gene Symbol: EPB41L3
  Gene Name: erythrocyte membrane protein band 4.1-like 3
  ENSP ID: ENSP00000461937
MTTESGSDSESKPDQEAEPQEAAGAQGRAGAPVPEPPKEEQQQALEQFAAAAAHSTPVRREVTDKEQEFAARAAKQLEYQQLEDDKLSQKSSSSKLSRSPLKIVKKPKSMQCKVIL

SEQ ID NO: 28152 - protein, 90 aa, Homo sapiens
  Payload ID: 5537
  Gene Symbol: EPB41L3
  Gene Name: erythrocyte membrane protein band 4.1-like 3
  ENSP ID: ENSP00000462338
MTTESGSDSESKPDQEAEPQEAAGAQGRAGAPVPEPPKEEQQQALEQFAAAAAHSTPVRREVTDKEQEFAARAAKQLEYQQLEDDKLSQK

SEQ ID NO: 28153 - protein, 162 aa, Homo sapiens
  Payload ID: 5537
  Gene Symbol: EPB41L3
  Gene Name: erythrocyte membrane protein band 4.1-like 3
  ENSP ID: ENSP00000462692
MTTESGSDSESKPDQEAEPQEAAGAQGRAGAPVPEPPKEEQQQALEQFAAAAAHSTPVRREVTDKEQEFAARAAKQLEYQQLEDDKLSQKSSSSKLSRSPLKIVKKPKSMQCKVILLDGSEYTCDVEKRSRGQVLFDKVCEHLNLLEKDYFGLTYRDAENQK

SEQ ID NO: 28154 - protein, 147 aa, Homo sapiens
  Payload ID: 5537
  Gene Symbol: EPB41L3
  Gene Name: erythrocyte membrane protein band 4.1-like 3
  ENSP ID: ENSP00000462783
MFLVFSMTDIFHFEQFESTIGFKLPNHRAAKRLWKVCVEHHTFFRLLLPEAPPKKFLTLGSKFRYSGRTQAQTRRASALIDRPAPYFERSSSKRYTMSRSLDGASVNENHEIYMKDSMSAAEVGTGQYATTKGISQTNLITTVTPEK

SEQ ID NO: 28155 - protein, 125 aa, Homo sapiens
  Payload ID: 5537
  Gene Symbol: EPB41L3
  Gene Name: erythrocyte membrane protein band 4.1-like 3
  ENSP ID: ENSP00000463122
MTTESGSDSESKPDQEAEPQEAAGAQGRAGAPVPEPPKEEQQQALEQFAAAAAHSTPVRREVTDKEQEFAARAAKQLEYQQLEDDKLSQKSSSSKLSRSPLKIVKKPKSMQCKVILLDGSEYTCD

SEQ ID NO: 28156 - protein, 113 aa, Homo sapiens
  Payload ID: 5537
  Gene Symbol: EPB41L3
  Gene Name: erythrocyte membrane protein band 4.1-like 3
  ENSP ID: ENSP00000463289
MTTESGSDSESKPDQEAEPQEAAGAQGRAGAPVPEPPKEEQQQALEQFAAAAAHSTPVRREVTDKEQEFAARAAKQLEYQQLEDDKLSQKSSSSKLSRSPLKIVKKPKSMQCK

SEQ ID NO: 28157 - protein, 96 aa, Homo sapiens
  Payload ID: 5537
  Gene Symbol: EPB41L3
  Gene Name: erythrocyte membrane protein band 4.1-like 3
  ENSP ID: ENSP00000463707
MPSFICLYLCSKSLLGFGEQSTMTTESGSDSESKPDQEAEPQEAAGAQGRAGAPVPEPPKEEQQQALEQFAAAAAHSTPVRREVTDKEQEFAARAA

SEQ ID NO: 28158 - protein, 127 aa, Homo sapiens
  Payload ID: 5537
  Gene Symbol: EPB41L3
  Gene Name: erythrocyte membrane protein band 4.1-like 3
  ENSP ID: ENSP00000464020
MTTESGSDSESKPDQEAEPQEAAGAQGRAGAPVPEPPKEEQQQALEQFAAAAAHSTPVRREVTDKEQEFAARAAKQLEYQQLEDDKLSQKSSSSKLSRSPLKIVKKPKSMQCKVILLDGSEYTCDVE

SEQ ID NO: 28159 - protein, 127 aa, Homo sapiens; identical to SEQ ID NO: 28158
  Payload ID: 5537
  Gene Symbol: EPB41L3
  Gene Name: erythrocyte membrane protein band 4.1-like 3
  ENSP ID: ENSP00000464148

SEQ ID NO: 28160 - protein, 79 aa, Homo sapiens
  Payload ID: 5537
  Gene Symbol: EPB41L3
  Gene Name: erythrocyte membrane protein band 4.1-like 3
  ENSP ID: ENSP00000464336
MTTESGSDSESKPDQEAEPQEAAGAQGRAGAPVPEPPKEEQQQALEQFAAAAAHSTPVRREVTDKEQEFAARAAKQLEY

SEQ ID NO: 28161 - protein, 162 aa, Homo sapiens; identical to SEQ ID NO: 28153
  Payload ID: 5537
  Gene Symbol: EPB41L3
  Gene Name: erythrocyte membrane protein band 4.1-like 3
  ENSP ID: ENSP00000464533

SEQ ID NO: 28162 - protein, 110 aa, Homo sapiens
  Payload ID: 5537
  Gene Symbol: EPB41L3
  Gene Name: erythrocyte membrane protein band 4.1-like 3
  ENSP ID: ENSP00000464570
SSTVKTETISFGSVSPGGVKLEISTKEVPVVHTETKTITYESSQVDPGTDLEPGVLMSAQTITSETTSTTTTTHITKTVKGGISETRIEKRIVITGDADIDHDQVVCVRR

SEQ ID NO: 28163 - protein, 188 aa, Homo sapiens
  Payload ID: 5537
  Gene Symbol: EPB41L3
  Gene Name: erythrocyte membrane protein band 4.1-like 3
  ENSP ID: ENSP00000487780
  MOD_RES (1)..(1): Any amino acid
XYTMSRSLDGASVNENHEIYMKDSMSAAEVGTGQYATTKGISQTNLITTVTPEKKAEEERDEEEDKRRKGEEVTPISAIRHEGKTDSERTDTAADGETTATESDQEEDAELKAQELEKTQDDLMKHQTNISELKRTFLETSTDTAVTNEWEKRLSTSPVRLAARQEDAPMIEPLVPEETKQSSGEKLM

SEQ ID NO: 28164 - protein, 183 aa, Homo sapiens
  Payload ID: 5537
  Gene Symbol: EPB41L3
  Gene Name: erythrocyte membrane protein band 4.1-like 3
  ENSP ID: ENSP00000487786
KAEEERDEEEDKRRKGEEVTPISAIRHEGKELEKTQDDLMKHQTNISELKRTFLETSTDTAVTNEWEKRLSTSPVRLAARQEDAPMIEPLVPEEKMETKTESSGIETEPTVHHLPLSTEKVVQETVLVEERRVVHASGDASYSAGDSGDAAAQPAFTGIKGKEGSALTEGAKEEGGEEVAKAV

SEQ ID NO: 28165 - protein, 194 aa, Homo sapiens
  Payload ID: 5537
  Gene Symbol: EPB41L3
  Gene Name: erythrocyte membrane protein band 4.1-like 3
  ENSP ID: ENSP00000487915
VTPEKKAEEERDEEEDKRRKGEEVTPISAIRHEGKTDSERTDTAADGETTATEELEKTQDDLMKHQTNISELKRTFLETSTDTAVTNEWEKRLSTSPVRLAARQEDAPMIEPLVPEETKEETEISEKVIFLQQGSAPFLESQTKQSSGEKLMDGSEIFSLLESARKPTEFIGGVTSTSQSWVQKMETKTESSGI

SEQ ID NO: 28166 - protein, 189 aa, Homo sapiens
  Payload ID: 5537
  Gene Symbol: EPB41L3
  Gene Name: erythrocyte membrane protein band 4.1-like 3
  ENSP ID: ENSP00000488037
EEERDEEEDKRRKGEEVTPISAIRHEGKTDSERTDTAADGETTATEELEKTQDDLMKHQTNISELKRTFLETSTDTAVTNEWEKRLSTSPVRLAARQEDAPMIEPLVPEEVSSQTKEETEISEKVIFLQQGSAPFLESQTKQSSGEKLMDGSEIFSLLESARKPTEFIGGVTSTSQSWVQKMETKTESS

SEQ ID NO: 28167 - protein, 197 aa, Homo sapiens
  Payload ID: 5537
  Gene Symbol: EPB41L3
  Gene Name: erythrocyte membrane protein band 4.1-like 3
  ENSP ID: ENSP00000488095
  MOD_RES (1)..(1): Any amino acid
XKAEEERDEEEDKRRKGEEVTPISAIRHEGKTDSERTDTAADGETTATEELEKTQDDLMKHQTNISELKRTFLETSTDTAVTNEWEKRLSTSPVRLAARQEDAPMIEPLVPEEPSVIKKMQEGDSADSVVTSRQIIFQKTVPSTLETKQSSGEKLMDGSEIFSLLESARKPTEFIGGVTSTSQSWVQKMETKTESSG

SEQ ID NO: 28168 - protein, 756 aa, Homo sapiens
  Payload ID: 5537
  Gene Symbol: EPB41L3
  Gene Name: erythrocyte membrane protein band 4.1-like 3
  ENSP ID: ENSP00000488626
MQCKVILLDGSEYTCDVEKRSRGQVLFDKVCEHLNLLEKDYFGLTYRDAENQKNWLDPAKEIKKQVRSGAWHFSFNVKFYPPDPAQLSEDITRYYLCLQLRDDIVSGRLPCSFVTLALLGSYTVQSELGDYDPDECGSDYISEFRFAPNHTKELEDKVIELHKSHRGMTPAEAEMHFLENAKKLSMYGVDLHHAKDSEGVEIMLGVCASGLLIYRDRLRINRFAWPKVLKISYKRNNFYIKIRPGEFEQFESTIGFKLPNHRAAKRLWKVCVEHHTFFRLLLPEAPPKKFLTLGSKFRYSGRTQAQTRRASALIDRPAPYFERSSSKRYTMSRSLDGASVNENHEIYMKDSMSAAEVGTGQYATTKGISQTNLITTVTPEKKAEEERDEEEDKRRKGEEVTPISAIRHEGKTDSERTDTAADGETTATEELEKTQDDLMKHQTNISELKRTFLETSTDTAVTNEWEKRLSTSPVRLAARQEDAPMIEPLVPEEKMETKTESSGIETEPTVHHLPLSTEKVVQETVLVEERRVVHASGDASYSAGDSGDAAAQPAFTGIKGKEGSALTEGAKEEGGEEVAKAVLEQEETAAASRERQEEQSAAIHISETLEQKPHFESSTVKTETISFGSVSPGGVKLEISTKEVPVVHTETKTITYESSQVDPGTDLEPGVLMSAQTITSETTSTTTTTHITKTVKGGISETRIEKRIVITGDADIDHDQALAQAIKEAKEQHPDMSVTKVVVHKETEITPEDGED

SEQ ID NO: 28169 - protein, 325 aa, Homo sapiens
  Payload ID: 5537
  Gene Symbol: EPB41L3
  Gene Name: erythrocyte membrane protein band 4.1-like 3
  ENSP ID: ENSP00000488647
  MOD_RES (1)..(1): Any amino acid
XTPEKKAEEERDEEEDKRRKGEEVTPISAIRHEGKTDSERTDTAADGETTATEELEKTQDDLMKHQTNISELKRTFLETSTDTAVTNEWEKRLSTSPVRLAARQEDAPMIEPLVPEETKQSSGEKLMDGSEIFSLLESARKPTEFIGGVTSTSQSWVQKMETKTESSGIETEPTVHHLPLSTEKVVQETVLVEERRVVHASGDASYSAGDSGDAAAQPAFTGIKGKEGSALTEGAKEEGGEEVAKAVLEQEETAAASRERQEEQSAAIHISETLEQKPHFESSTVKTETISFGSVSPGGVKLEISTKEVPVVHTETKTITYESSQ

SEQ ID NO: 28170 - protein, 36 aa, Homo sapiens
  Payload ID: 5537
  Gene Symbol: EPB41L3
  Gene Name: erythrocyte membrane protein band 4.1-like 3
  ENSP ID: ENSP00000489405
  MOD_RES (1)..(1): Any amino acid
XQFAAAAAHSTPVRREVSPGQKTNDAVFAELLQDRL

SEQ ID NO: 28171 - protein, 721 aa, Homo sapiens
  Payload ID: 5538
  Gene Symbol: EPB42
  Gene Name: erythrocyte membrane protein band 4.2
  Uniprot ID: P16452
  ENSP ID: ENSP00000300215
MGQGEPSQRSTGLAGLYAAPAASPVFIKGSGMDALGIKSCDFQAARNNEEHHTKALSSRRLFVRRGQPFTIILYFRAPVRAFLPALKKVALTAQTGEQPSKINRTQATFPISSLGDRKWWSAVVEERDAQSWTISVTTPADAVIGHYSLLLQVSGRKQLLLGQFTLLFNPWNREDAVFLKNEAQRMEYLLNQNGLIYLGTADCIQAESWDFGQFEGDVIDLSLRLLSKDKQVEKWSQPVHVARVLGALLHFLKEQRVLPTPQTQATQEGALLNKRRGSVPILRQWLTGRGRPVYDGQAWVLAAVACTVLRCLGIPARVVTTFASAQGTGGRLLIDEYYNEEGLQNGEGQRGRIWIFQTSTECWMTRPALPQGYDGWQILHPSAPNGGGVLGSCDLVPVRAVKEGTLGLTPAVSDLFAAINASCVVWKCCEDGTLELTDSNTKYVGNNISTKGVGSDRCEDITQNYKYPEGSLQEKEVLERVEKEKMEREKDNGIRPPSLETASPLYLLLKAPSSLPLRGDAQISVTLVNHSEQEKAVQLAIGVQAVHYNGVLAAKLWRKKLHLTLSANLEKIITIGLFFSNFERNPPENTFLRLTAMATHSESNLSCFAQEDIAICRPHLAIKMPEKAEQYQPLTASVSLQNSLDAPMEDCVISILGRGLIHRERSYRFRSVWPENTMCAKFQFTPTHVGLQRLTVEVDCNMFQNLTNYKSVTVVAPELSA

SEQ ID NO: 28172 - protein, 691 aa, Homo sapiens
  Payload ID: 5538
  Gene Symbol: EPB42
  Gene Name: erythrocyte membrane protein band 4.2
  Uniprot ID: P16452
  ENSP ID: ENSP00000396616
MGQALGIKSCDFQAARNNEEHHTKALSSRRLFVRRGQPFTIILYFRAPVRAFLPALKKVALTAQTGEQPSKINRTQATFPISSLGDRKWWSAVVEERDAQSWTISVTTPADAVIGHYSLLLQVSGRKQLLLGQFTLLFNPWNREDAVFLKNEAQRMEYLLNQNGLIYLGTADCIQAESWDFGQFEGDVIDLSLRLLSKDKQVEKWSQPVHVARVLGALLHFLKEQRVLPTPQTQATQEGALLNKRRGSVPILRQWLTGRGRPVYDGQAWVLAAVACTVLRCLGIPARVVTTFASAQGTGGRLLIDEYYNEEGLQNGEGQRGRIWIFQTSTECWMTRPALPQGYDGWQILHPSAPNGGGVLGSCDLVPVRAVKEGTLGLTPAVSDLFAAINASCVVWKCCEDGTLELTDSNTKYVGNNISTKGVGSDRCEDITQNYKYPEGSLQEKEVLERVEKEKMEREKDNGIRPPSLETASPLYLLLKAPSSLPLRGDAQISVTLVNHSEQEKAVQLAIGVQAVHYNGVLAAKLWRKKLHLTLSANLEKIITIGLFFSNFERNPPENTFLRLTAMATHSESNLSCFAQEDIAICRPHLAIKMPEKAEQYQPLTASVSLQNSLDAPMEDCVISILGRGLIHRERSYRFRSVWPENTMCAKFQFTPTHVGLQRLTVEVDCNMFQNLTNYKSVTVVAPELSA

SEQ ID NO: 28173 - protein, 613 aa, Homo sapiens
  Payload ID: 5538
  Gene Symbol: EPB42
  Gene Name: erythrocyte membrane protein band 4.2
  ENSP ID: ENSP00000444699
MGQALGIKSCDFQAARNNEEHHTKALSSRRLFVRRGQPFTIILYFRAPVRAFLPALKKVALTAQTEDAVFLKNEAQRMEYLLNQNGLIYLGTADCIQAESWDFGQFEGDVIDLSLRLLSKDKQVEKWSQPVHVARVLGALLHFLKEQRVLPTPQTQATQEGALLNKRRGSVPILRQWLTGRGRPVYDGQAWVLAAVACTVLRCLGIPARVVTTFASAQGTGGRLLIDEYYNEEGLQNGEGQRGRIWIFQTSTECWMTRPALPQGYDGWQILHPSAPNGGGVLGSCDLVPVRAVKEGTLGLTPAVSDLFAAINASCVVWKCCEDGTLELTDSNTKYVGNNISTKGVGSDRCEDITQNYKYPEGSLQEKEVLERVEKEKMEREKDNGIRPPSLETASPLYLLLKAPSSLPLRGDAQISVTLVNHSEQEKAVQLAIGVQAVHYNGVLAAKLWRKKLHLTLSANLEKIITIGLFFSNFERNPPENTFLRLTAMATHSESNLSCFAQEDIAICRPHLAIKMPEKAEQYQPLTASVSLQNSLDAPMEDCVISILGRGLIHRERSYRFRSVWPENTMCAKFQFTPTHVGLQRLTVEVDCNMFQNLTNYKSVTVVAPELSA

SEQ ID NO: 28174 - protein, 191 aa, Homo sapiens
  Payload ID: 5538
  Gene Symbol: EPB42
  Gene Name: erythrocyte membrane protein band 4.2
  ENSP ID: ENSP00000455489
VIGHYSLLLQVSGRKQLLLGQFTLLFNPWNREDAVFLKNEAQRMEYLLNQNGLIYLGTADCIQAESWDFGQLHFLKEQRVLPTPQTQATQEGALLNKRRGSVPILRQWLTGRGRPVYDGQAWVLAAVACTVLRCLGIPARVVTTFASAQGTGGRLLIDEYYNEEGLQNGEGQRGRIWIFQTSTECWMTRPA

SEQ ID NO: 28175 - protein, 543 aa, Homo sapiens
  Payload ID: 5538
  Gene Symbol: EPB42
  Gene Name: erythrocyte membrane protein band 4.2
  ENSP ID: ENSP00000457140
PVRAFLPALKKVALTAQTGEQPSKINRTQATFPISSLGDRKWWSAVVEERDAQSWTISVTTPADAVIGHYSLLLQVSGRKQLLLGQFTLLFNPWNREDAVFLKNEAQRMEYLLNQNGLIYLGTADCIQAESWDFGQFEGDVIDLSLRLLSKDKQVEKWSQPVHVARVLGALLHFLKEQRVLPTPQTQATQEGALLNKRRGSVPILRQWLTGRGRPVYDGQAWVLAAVACTVLRCLGIPARVVTTFASAQGTGGRLLIDEYYNEEGLQNGEGQRGRIWIFQTSTECWMTRPALPQGYDGWQILHPSAPNGGGVLGSCDLVPVRAVKEGTLGLTPAVSDLFAAINASCVVWKCCEDGTLELTDSNTKYVGNNISTKGVGSDRCEDITQNYKYPEGSLQEKEVLERVEKEKMEREKDNGIRPPSLETASPLYLLLKAPSSLPLRGDAQISVTLVNHSEQEKAVQLAIGVQAVHYNGVLAAKLWRKKLHLTLSANLDARESRAVSTPHSLSQPPELPRCPHGGLCDLHPGKGAHSQREELQIPFSVA

SEQ ID NO: 28176 - protein, 147 aa, Homo sapiens
  Payload ID: 5538
  Gene Symbol: EPB42
  Gene Name: erythrocyte membrane protein band 4.2
  ENSP ID: ENSP00000457757
  MOD_RES (1)..(1): Any amino acid
XRCEDITQNYKYPEGSLQEKEVLERVEKEKMEREKDNGIRPPSLETASPLYLLLKAPSSLPLRGDAQISVTLVNHSEQEKAVQLAIGVQAVHYNGVLAAKLWRKKLHLTLSANLGNALWPHQTPPDTHTHMAPALGRQQPQGTPCSL

SEQ ID NO: 28177 - protein, 619 aa, Homo sapiens
  Payload ID: 5538
  Gene Symbol: EPB42
  Gene Name: erythrocyte membrane protein band 4.2
  Uniprot ID: P16452
  ENSP ID: ENSP00000481226
MGQALGIKSCDFQAARNNEEHHTKALSSRRLFVRRGQPFTIILYFRAPVRAFLPALKKVALTAQTGEQPSKINRTQATFPISSLGDRKWWSAVVEERDAQSWTISVTTPADAVIGHYSLLLQVSGRKQLLLGQFTLLFNPWNREDAVFLKNEAQRMEYLLNQNGLIYLGTADCIQAESWDFGQFEGDVIDLSLRLLSKDKQVEKWSQPVHVARVLGALLHFLKEQRVLPTPQTQATQEGALLNKRRGSVPILRQWLTGRGRPVYDGQAWVLAAVACTVLRCLGIPARVVTTFASAQGTGGRLLIDEYYNEEGLQNGEGQRGRIWKCCEDGTLELTDSNTKYVGNNISTKGVGSDRCEDITQNYKYPEGSLQEKEVLERVEKEKMEREKDNGIRPPSLETASPLYLLLKAPSSLPLRGDAQISVTLVNHSEQEKAVQLAIGVQAVHYNGVLAAKLWRKKLHLTLSANLEKIITIGLFFSNFERNPPENTFLRLTAMATHSESNLSCFAQEDIAICRPHLAIKMPEKAEQYQPLTASVSLQNSLDAPMEDCVISILGRGLIHRERSYRFRSVWPENTMCAKFQFTPTHVGLQRLTVEVDCNMFQNLTNYKSVTVVAPELSA

SEQ ID NO: 28178 - protein, 1204 aa, Homo sapiens
  Payload ID: 5539
  Gene Symbol: EDRF1
  Gene Name: erythroid differentiation regulatory factor 1
  Uniprot ID: Q3B7T1
  ENSP ID: ENSP00000336727
MGDAKEAGAEGPPAGAAARGGLSLLSQGESEESSAQGSALFLGGNEVKSRAVVKYSSAPPRTAFARLEEKTDLKLPPANWLRESAKLGPAGTTILGNSKKSKPFSSFGMAYDFIDSVGNDVDVVSDSENIKKLLKIPYSKSHVSMAVHRIGRTLLLDELDIQELFMRSSQTGDWTWLKEFYQRLIDQKWQRKKKSKEHWYQKAILSKFLYYSINGDGAAQPVSSTAEQQESSSSDQTNDSEGASWPAPFEMPSSVSEDPSASSQGLKNDFVRNILWTFEDIHMLVGSNMPIFGGGRYPAVSLRLRDNNKPINVLTGIDYWLDNLICNVPELVMCFHVNGIVQKYEMIKTEEIPNLENSNFSTKVIKDIAQNILSFLKSNCTKEGHTYWLFKASGSDIVKLYDLTTLCEETEDKYQNPFTMPVAILLYKVACNMMMKKNQNKKHYGTIRTLLLNCLKLLDKSRHPQIIASANYMLSELFQLDEPKKEENSESPLNENSDESYSEEEEEMPDSDENGSYSTSSDPSDDSKAVAIIKSVGELSVPEKYKSIHQIRPSCAFPVCHDTEERCRLVLSYVLEGLKSVDSSIKKESDLPAADPSTPIPLKYEDESSRGGPEGLEKQMALFLDKMGSLQKGNYSSQSGMIPGSWQHKMKLQLILKSSKAYYVLSDAAMSLQKYGRALRYIKLALQSHDTYCCLCTNMLSEVLLFLSQYLTLCGDIQLMLAQNANNRAAHLEEFHYQTKEDQEILHSLHRESSCQGFAWATDLSTDLESQLSVSCKCYEAANEILQFSDLKSQNPEHYVQVLKRMGNIRNEIGVFYMNQAAALQSERLVSKSVSAAEQQLWKKSFSCFEKGIHNFESIEDATNAALLLCNTGRLMRICAQAHCGAGDELKREFSPEEGLYYNKAIDYYLKALRSLGTRDIHPAVWDSVNWELSTTYFTMATLQQDYAPLSRKAQEQIEKEVSEAMMKSLKYCDVDSVSARQPLCQYRAATIHHRLASMYHSCLRNQVGDEHLRKQHRVLADLHYSKAAKLFQLLKDAPCELLRVQLERVAFAEFQMTSQNSNVGKLKTLSGALDIMVRTEHAFQLIQKELIEEFGQPKSGDAAAAADASPSLNREEVMKLLSIFESRLSFLLLQSIKLLSSTKKKTSNNIEDDTILKTNKHIYSQLLRATANKTATLLERINVIVHLLGQLAAGSAASSNAVQ

SEQ ID NO: 28179 - protein, 1238 aa, Homo sapiens
  Payload ID: 5539
  Gene Symbol: EDRF1
  Gene Name: erythroid differentiation regulatory factor 1
  Uniprot ID: Q3B7T1
  ENSP ID: ENSP00000349244
MGDAKEAGAEGPPAGAAARGGLSLLSQGESEESSAQGSALFLGGNEVKSRAVVKYSSAPPRTAFARLEEKTDLKLPPANWLRESAKLGPAGTTILGNSKKSKPFSSFGMAYDFIDSVGNDVDVVSDSENIKKLLKIPYSKSHVSMAVHRIGRTLLLDELDIQELFMRSSQTGDWTWLKEFYQRLIDQKWQRKKKSKEHWYQKAILSKFLYYSINGDGAAQPVSSTAEQQESSSSDQTNDSEGASWPAPFEMPSSVSEDPSASSQGSEPLEPSYIVGHVASAPKEQNLITLFNDGEHSQGLKNDFVRNILWTFEDIHMLVGSNMPIFGGGRYPAVSLRLRDNNKPINVLTGIDYWLDNLICNVPELVMCFHVNGIVQKYEMIKTEEIPNLENSNFSTKVIKDIAQNILSFLKSNCTKEGHTYWLFKASGSDIVKLYDLTTLCEETEDKYQNPFTMPVAILLYKVACNMMMKKNQNKKHYGTIRTLLLNCLKLLDKSRHPQIIASANYMLSELFQLDEPKKEENSESPLNENSDESYSEEEEEMPDSDENGSYSTSSDPSDDSKAVAIIKSVGELSVPEKYKSIHQIRPSCAFPVCHDTEERCRLVLSYVLEGLKSVDSSIKKESDLPAADPSTPIPLKYEDESSRGGPEGLEKQMALFLDKMGSLQKGNYSSQSGMIPGSWQHKMKLQLILKSSKAYYVLSDAAMSLQKYGRALRYIKLALQSHDTYCCLCTNMLSEVLLFLSQYLTLCGDIQLMLAQNANNRAAHLEEFHYQTKEDQEILHSLHRESSCQGFAWATDLSTDLESQLSVSCKCYEAANEILQFSDLKSQNPEHYVQVLKRMGNIRNEIGVFYMNQAAALQSERLVSKSVSAAEQQLWKKSFSCFEKGIHNFESIEDATNAALLLCNTGRLMRICAQAHCGAGDELKREFSPEEGLYYNKAIDYYLKALRSLGTRDIHPAVWDSVNWELSTTYFTMATLQQDYAPLSRKAQEQIEKEVSEAMMKSLKYCDVDSVSARQPLCQYRAATIHHRLASMYHSCLRNQVGDEHLRKQHRVLADLHYSKAAKLFQLLKDAPCELLRVQLERVAFAEFQMTSQNSNVGKLKTLSGALDIMVRTEHAFQLIQKELIEEFGQPKSGDAAAAADASPSLNREEVMKLLSIFESRLSFLLLQSIKLLSSTKKKTSNNIEDDTILKTNKHIYSQLLRATANKTATLLERINVIVHLLGQLAAGSAASSNAVQ

SEQ ID NO: 28180 - protein, 317 aa, Homo sapiens
  Payload ID: 5539
  Gene Symbol: EDRF1
  Gene Name: erythroid differentiation regulatory factor 1
  ENSP ID: ENSP00000357803
SIHQIRPSCAFPVCHDTEERCRLVLSYVLEGLKSVDSSIKKESDLPAADPSTPIPLKYEDESSRGGPEGLEKQMALFLDKMGSLQKGNYSSQSGMIPGSWQHKMKLQLILKSSKAYYVLSDAAMSLQKYGRALRYIKLALQSHDTYCCLCTNMLSEVLLFLSQYLTLCGDIQLMLAQNANNRAAHLEEFHYQTKEDQEILHSLHRESSCQGVPQAWTTWFTVGLCSLAHAYLSIQKRGRNIRVLIFALYLFIYFLRRSFALVAQAGVQWCNLGSLKPPPPGFKQFSCLSLPSSWNYRHAPPCPASPPWPPKVLGLQV

SEQ ID NO: 28181 - protein, 593 aa, Homo sapiens
  Payload ID: 5539
  Gene Symbol: EDRF1
  Gene Name: erythroid differentiation regulatory factor 1
  Uniprot ID: Q3B7T1
  ENSP ID: ENSP00000357805
MGDAKEAGAEGPPAGAAARGGLSLLSQGESEESSAQGSALFLGGNEVKSRAVVKYSSAPPRTAFARLEEKTDLKLPPANWLRESAKLGPAGTTILGNSKKSKPFSSFGMAYDFIDSVGNDVDVVSDSENIKKLLKIPYSKSHVSMAVHRIGRTLLLDELDIQELFMRSSQTGDWTWLKEFYQRLIDQKWQRKKKSKEHWYQKAILSKFLYYSINGDGAAQPVSSTAEQQESSSSDQTNDSEGASWPAPFEMPSSVSEDPSASSQGSEPLEPSYIVGHVASAPKEQNLITLFNDGEHSQGLKNDFVRNILWTFEDIHMLVGSNMPIFGGGRYPAVSLRLRDNNKPINVLTGIDYWLDNLICNVPELVMCFHVNGIVQKYEMIKTEEIPNLENSNFSTKVIKDIAQNILSFLKSNCTKEGHTYWLFKASGSDIVKLYDLTTLCEETEDKYQNPFTMPVAILLYKVACNMMMKKNQNKKHYGTIRTLLLNCLKLLDKSRHPQIIASANYMLSELFQLDEPKKEENSESPLNENSDESYSEEEEEMPDSDENGSYSTSSDPSDDSKAVAIIKSVGELSVPEKYKSIHQIRLCISSLP

SEQ ID NO: 28182 - protein, 796 aa, Homo sapiens
  Payload ID: 5539
  Gene Symbol: EDRF1
  Gene Name: erythroid differentiation regulatory factor 1
  Uniprot ID: Q3B7T1
  ENSP ID: ENSP00000396544
MGDAKEAGAEGPPAGAAARGGLSLLSQGESEESSAQGSALFLGGNEVKSRAVVKYSSAPPRTAFARLEEKTDLKLPPANWLRESAKLGPAGTTILGNSKKSKPFSSFGMAYDFIDSVGNDVDVVSDSENIKKLLKIPYSKSHVSMAVHRIGRTLLLDELDIQELFMRSSQTGDWTWLKEFYQRLIDQKWQRKKKSKEHWYQKAILSKFLYYSINGDGAAQPVSSTAEQQESSSSDQTNDSEGASWPAPFEMPSSVSEDPSASSQGSEPLEPSYIVGHVASAPKEQNLITLFNDGEHSQGLKNDFVRNILWTFEDIHMLVGSNMPIFGGGRYPAVSLRLRDNNKPINVLTGIDYWLDNLICNVPELVMCFHVNGIVQKYEMIKTEEIPNLENSNFSTKVIKDIAQNILSFLKSNCTKEGHTYWLFKASGSDIVKLYDLTTLCEETEDKYQNPFTMPVAILLYKVACNMMMKKNQNKKHYGTIRTLLLNCLKLLDKSRHPQIIASANYMLSELFQLDEPKKEENSESPLNENSDESYSEEEEEMPDSDENGSYSTSSDPSDDSKAVAIIKSVGELSVPEKYKSIHQIRPSCAFPVCHDTEERCRLVLSYVLEGLKSVDSSIKKESDLPAADPSTPIPLKYEDESSRGGPEGLEKQMALFLDKMGSLQKGNYSSQSGMIPGSWQHKMKLQLILKSSKAYYVLSDAAMSLQKYGRALRYIKLALQSHDTYCCLCTNMLSEVLLFLSQYLTLCGDIQLMLAQNANNRAAHLEEFHYQTKEDQEILHSLHRESSCQGFKTGK

SEQ ID NO: 28183 - protein, 343 aa, Homo sapiens
  Payload ID: 5539
  Gene Symbol: EDRF1
  Gene Name: erythroid differentiation regulatory factor 1
  ENSP ID: ENSP00000431902
MGDAKEAGAEGPPAGAAARGGLSLLSQGESEESSAQGSALFLGGNEVKSRAVVKYSSAPPRTAFARLEEKTDLKLPPANWLRESAKLGPAGTTILGNSKKSKPFSSFGMAYDFIDSVGNDVDVVSDSENIKKLLKIPYSKSHVSMAVHRIGRTLLLDELDIQELFMRSSQTGDWTWLKEFYQRLIDQKWQRKKKSKEHWYQKAILSKFLYYSINGDGAAQPVSSTAEQQESSSSDQTNDSEGASWPAPFEMPSSVSEDPSASSQGSEPLEPSYIVGHVASAPKEQNLITLFNDGEHSQGLKNDFVRNILWTFEDIHMLVGSNMPIFGGGRYPAVSLRLRNVYF

SEQ ID NO: 28184 - protein, 23 aa, Homo sapiens
  Payload ID: 5539
  Gene Symbol: EDRF1
  Gene Name: erythroid differentiation regulatory factor 1
  ENSP ID: ENSP00000432102
  MOD_RES (1)..(1): Any amino acid
XSRLSFLLLQSIKLLSSTKKKTR

SEQ ID NO: 28185 - protein, 151 aa, Homo sapiens
  Payload ID: 5539
  Gene Symbol: EDRF1
  Gene Name: erythroid differentiation regulatory factor 1
  ENSP ID: ENSP00000432229
  MOD_RES (1)..(1): Any amino acid
XEGASWPAPFEMPSSVSEDPSASSQGSEPLEPSYIVGHVASAPKEQNLITLFNDGEHSQGLKNDFVRNILWTFEDIHMLVGSNMPIFGGGRYPAVSLRLRDNNKPINVLTGIDYWLDNLICNVPELVMCFHVNGIVQLPHMLLFLFDGKRD

SEQ ID NO: 28186 - protein, 193 aa, Homo sapiens
  Payload ID: 5540
  Gene Symbol: EPO
  Gene Name: erythropoietin
  Uniprot ID: P01588
  ENSP ID: ENSP00000252723
MGVHECPAWLWLLLSLLSLPLGLPVLGAPPRLICDSRVLERYLLEAKEAENITTGCAEHCSLNENITVPDTKVNFYAWKRMEVGQQAVEVWQGLALLSEAVLRGQALLVNSSQPWEPLQLHVDKAVSGLRSLTTLLRALGAQKEAISPPDAASAAPLRTITADTFRKLFRVYSNFLRGKLKLYTGEACRTGDR

SEQ ID NO: 28187 - protein, 508 aa, Homo sapiens
  Payload ID: 5541
  Gene Symbol: EPOR
  Gene Name: erythropoietin receptor
  Uniprot ID: P19235
  ENSP ID: ENSP00000222139
MDHLGASLWPQVGSLCLLLAGAAWAPPPNLPDPKFESKAALLAARGPEELLCFTERLEDLVCFWEEAASAGVGPGNYSFSYQLEDEPWKLCRLHQAPTARGAVRFWCSLPTADTSSFVPLELRVTAASGAPRYHRVIHINEVVLLDAPVGLVARLADESGHVVLRWLPPPETPMTSHIRYEVDVSAGNGAGSVQRVEILEGRTECVLSNLRGRTRYTFAVRARMAEPSFGGFWSAWSEPVSLLTPSDLDPLILTLSLILVVILVLLTVLALLSHRRALKQKIWPGIPSPESEFEGLFTTHKGNFQLWLYQNDGCLWWSPCTPFTEDPPASLEVLSERCWGTMQAVEPGTDDEGPLLEPVGSEHAQDTYLVLDKWLLPRNPPSEDLPGPGGSVDIVAMDEGSEASSCSSALASKPSPEGASAASFEYTILDPSSQLLRPWTLCPELPPTPPHLKYLYLVVSDSGISTDYSSGDSQGAQGGLSDGPYSNPYENSLIPAAEPLPPSYVACS

SEQ ID NO: 28188 - protein, 119 aa, Homo sapiens
  Payload ID: 5541
  Gene Symbol: EPOR
  Gene Name: erythropoietin receptor
  ENSP ID: ENSP00000466784
MDHLGASLWPQVGSLCLLLAGAAWAPPPNLPDPKFESKAALLAARGPEELLCFTERLEDLVCFWEEAASAGVGPGNYSFSYQLEAGTPSMGRGANTPAITAGTRPQTSGWDNNASKSRG

SEQ ID NO: 28189 - protein, 130 aa, Homo sapiens
  Payload ID: 5541
  Gene Symbol: EPOR
  Gene Name: erythropoietin receptor
  ENSP ID: ENSP00000467230
MDHLGASLWPQVGSLCLLLAGAAWAPPPNLPDPKFESKAALLAARGPEELLCFTERLEDLVCFWEEAASAGVGPGNYSFSYQLDRGHWRETCGSRAGTPSMGRGANTPAITAGTRPQTSGWDNNASKSRG

SEQ ID NO: 28190 - protein, 328 aa, Homo sapiens
  Payload ID: 5541
  Gene Symbol: EPOR
  Gene Name: erythropoietin receptor
  Uniprot ID: P19235
  ENSP ID: ENSP00000467809
MDHLGASLWPQVGSLCLLLAGAAWAPPPNLPDPKFESKAALLAARGPEELLCFTERLEDLVCFWEEAASAGVGPGNYSFSYQLEDEPWKLCRLHQAPTARGAVRFWCSLPTADTSSFVPLELRVTAASGAPRYHRVIHINEVVLLDAPVGLVARLADESGHVVLRWLPPPETPMTSHIRYEVDVSAGNGAGSVQRVEILEGRTECVLSNLRGRTRYTFAVRARMAEPSFGGFWSAWSEPVSLLTPSDLDPLILTLSLILVVILVLLTVLALLSHRRALKQKIWPGIPSPESEFEGLFTTHKGNFQVGGLVVPSVPGLPCFLQPNCRPL

SEQ ID NO: 28191 - protein, 276 aa, Homo sapiens
  Payload ID: 5541
  Gene Symbol: EPOR
  Gene Name: erythropoietin receptor
  ENSP ID: ENSP00000468187
MDHLGASLWPQVGSLCLLLAGAAWAPPPNLPDPKFESKGWGGAGSPELEVLNAAPSSAGRWVGRCAPVVTAGDTALLAARGPEELLCFTERLEDLVCFWEEAASAGVGPGNYSFSYQLEDEPWKLCRLHQAPTARGAVRFWCSLPTADTSSFVPLELRVTAASGAPRYHRVIHINEVVLLDAPVGLVARLADESGHVVLRWLPPPETPMTSHIRYEVDVSAGNGAGSVQRGTVFLSPDWLSSTRARPHVIYFCLLRVPRPDSAPRWRSWRAAPSVC

SEQ ID NO: 28192 - protein, 233 aa, Homo sapiens
  Payload ID: 5542
  Gene Symbol: ERAS
  Gene Name: ES cell expressed Ras
  Uniprot ID: Q7Z444
  ENSP ID: ENSP00000339136
MELPTKPGTFDLGLATWSPSFQGETHRAQARRRDVGRQLPEYKAVVVGASGVGKSALTIQLNHQCFVEDHDPTIQDSYWKELTLDSGDCILNVLDTAGQAIHRALRDQCLAVCDGVLGVFALDDPSSLIQLQQIWATWGPHPAQPLVLVGNKCDLVTTAGDAHAAAAALAHSWGAHFVETSAKTRQGVEEAFSLLVHEIQRVQEAMAKEPMARSCREKTRHQKATCHCGCSVA

SEQ ID NO: 28193 - protein, 851 aa, Homo sapiens
  Payload ID: 5543
  Gene Symbol: ESF1
  Gene Name: ESF1 nucleolar pre-rRNA processing protein homolog
  Uniprot ID: Q9H501
  ENSP ID: ENSP00000202816
MSSKQEIMSDQRFRRVAKDPRFWEMPEKDRKVKIDKRFRAMFHDKKFKLNYAVDKRGRPISHSTTEDLKRFYDLSDSDSNLSGEDSKALSQKKIKKKKTQTKKEIDSKNLVEKKKETKKANHKGSENKTDLDNSIGIKKMKTSCKFKIDSNISPKKDSKEFTQKNKKEKKNIVQHTTDSSLEEKQRTLDSGTSEIVKSPRIECSKTRREMQSVVQLIMTRDSDGYENSTDGEMCDKDALEEDSESVSEIGSDEESENEITSVGRASGDDDGSEDDEEEDEDEEEDEDEDSEDDDKSDSGPDLARGKGNIETSSEDEDDTADLFPEESGFEHAWRELDKDAPRADEITRRLAVCNMDWDRLKAKDLLALFNSFKPKGGVIFSVKIYPSEFGKERMKEEQVQGPVELLSIPEDAPEKDWTSREKLRDYQFKRLKYYYAVVDCDSPETASKIYEDCDGLEFESSCSFIDLRFIPDDITFDDEPKDVASEVNLTAYKPKYFTSAAMGTSTVEITWDETDHERITMLNRKFKKEELLDMDFQAYLASSSEDEEEIEEELQGDDGVNVEEDGKTKKSQKDDEEQIAKYRQLLQVIQEKEKKGKENDMEMEIKWVPGLKESAEEMVKNKLEGKDKLTPWEQFLEKKKEKKRLKRKQKALAEEASEEELPSDVDLNDPYFAEEVKQIGINKKSVKSAKDGTSPEEEIEIERQKAEMALLMMDEDEDSKKHFNYNKIVEHQNLSKKKKKQLMKKKELIEDDFEVNVNDARFQAMYTSHLFNLDPSDPNFKKTKAMEKILEEKARQRERKEQELTQAIKKKESEIEKESQRKSIDPALSMLIKSIKTKTEQFQARKKQKVK

SEQ ID NO: 28194 - protein, 456 aa, Homo sapiens
  Payload ID: 5543
  Gene Symbol: ESF1
  Gene Name: ESF1 nucleolar pre-rRNA processing protein homolog
  ENSP ID: ENSP00000480783
MQSVVQLIMTRDSDGYENSTDGEMCDKDALEEDSESVSEIGSDEESENEITSVGRASGDDDGSEDDEEEDEDEEEDEDEDSEDDDKSDSGPDLARGKGNIETSSEDEDDTADLFPEESGFEHAWRELDKDAPRADEITRRLAVCNMDWDRLKAKDLLALFNSFKPKGGVIFSVKIYPSEFGKERMKEEQVQGPVELLSIPEDAPEKDWTSREKLRDYQFKRLKYYYAVVDCDSPETASKIYEDCDGLEFESSCSFIDLRFIPDDITFDDEPKDVASEVNLTAYKPKYFTSAAMGTSTVEITWDETDHERITMLNRKFKKEELLDMDFQAYLASSSEDEEEIEEELQGDDGVNVEEDGKTKKSQKDDEEQIAKYRQLLQVIQEKEKKGKENDMEMEIKWVPGLKESAEEMVKNKLEGKDKLTPWEQFLEKKKEKKRLKRKQKALAEEASEEELPSLI

SEQ ID NO: 28195 - protein, 854 aa, Homo sapiens
  Payload ID: 5544
  Gene Symbol: ESPN
  Gene Name: espin
  Uniprot ID: B1AK53
  ENSP ID: ENSP00000367059
MALEQALQAARQGELDVLRSLHAAGLLGPSLRDPLDALPVHHAARAGKLHCLRFLVEEAALPAAARARNGATPAHDASATGHLACLQWLLSQGGCRVQDKDNSGATVLHLAARFGHPEVVNWLLHHGGGDPTAATDMGALPIHYAAAKGDFPSLRLLVEHYPEGVNAQTKNGATPLYLACQEGHLEVTQYLVQECGADPHARAHDGMTPLHAAAQMGHSPVIVWLVSCTDVSLSEQDKDGATAMHFAASRGHTKVLSWLLLHGGEISADLWGGTPLHDAAENGELECCQILVVNGAELDVRDRDGYTAADLSDFNGHSHCTRYLRTVENLSVEHRVLSRDPSAELEAKQPDSGMSSPNTTVSVQPLNFDLSSPTSTLSNYDSCSSSHSSIKGQHPPCGLSSARAADIQSYMDMLNPELGLPRGTIGKPTPPPPPPSFPPPPPPPGTQLPPPPPGYPAPKPPVGPQAADIYMQTKNKLRHVETEALKKELSSCDGHDGLRRQDSSRKPRAFSKQPSTGDYYRQLGRCPGETLAARPGMAHSEEVRARQPARAGCPRLGPAARGSLEGPSAPPQAALLPGNHVPNGCAADPKASRELPPPPPPPPPPLPEAASSPPPAPPLPLESAGPGCGQRRSSSSTGSTKSFNMMSPTGDNSELLAEIKAGKSLKPTPQSKGLTTVFSGIGQPAFQPDSPLPSVSPALSPVRSPTPPAAGFQPLLNGSLVPVPPTTPAPGVQLDVEALIPTHDEQGRPIPEWKRQVMVRKMQLKMQEEEEQRRKEEEEEARLASMPAWRRDLLRKKLEEEREQKRKEEERQKQEELRREKEQSEKLRTLGYDESKLAPWQRQVILKKGDIAKY

SEQ ID NO: 28196 - protein, 288 aa, Homo sapiens [sequence omitted]

SEQ ID NO: 28197 - protein, 213 aa, Homo sapiens
  Payload ID: 5544
  Gene Symbol: ESPN
  Gene Name: espin
  ENSP ID: ENSP00000401793
DGMTPLHAAAQMGHSPVIVWLDKDGATAMHFAASRGHTKVLSWLLLHGGEISADLWGGTPLHDAAENGELECCQILVVNGAELDVRDRDGYTAADLSDFNGHSHCTRYLRTVENLSVEHRVLSRDPSAELEAKQPDSGMSSPNTTVSVQPLNFDLSSPTSTLSNYDSCSSSHSSIKGQHPPCGLSSARAADIQSYMDMLNPELGLPRGTIGKP

SEQ ID NO: 28198 - protein, 188 aa, Homo sapiens
  Payload ID: 5544
  Gene Symbol: ESPN
  Gene Name: espin
  ENSP ID: ENSP00000413621
  MOD_RES (1)..(1): Any amino acid
XEIKAGKSLKPTPQSKGLTTVFSGIGQPAFQPDSPLPSVSPALSPVRSPTPPAAGFQPLLNGSLVPVPPTTPAPGVQLDVEALIPTHDEQGRPIPEWKRQVMVRKMQLKMQEEEEQRRKEEEEEARLASMPAWRRDLLRKKLEEEREQKRKEEERQKQEELRREKEQSEKLRTLGYDESKLAPWQRQI

SEQ ID NO: 28199 - protein, 288 aa, Homo sapiens
  Payload ID: 5544
  Gene Symbol: ESPN
  Gene Name: espin
  Uniprot ID: B1AK53
  ENSP ID: ENSP00000465308
MAHSEEAALLPGNHVPNGCAADPKASRELPPPPPPPPPPLPEAASSPPPAPPLPLESAGPGCGQRRSSSSTGSTKSFNMMSPTGDNSELLAEIKAGKSLKPTPQSKGLTTVFSGIGQPAFQPDSPLPSVSPALSPVRSPTPPAAGFQPLLNGSLVPVPPTTPAPGVQLDVEALIPTHDEQGRPIPEWKRQVMVRKMQLKMQEEEEQRRKEEEEEARLASMPAWRRDLLRKKLEEEREQKRKEEERQKQEELRREKEQSEKLRTLGYDESKLAPWQRQVILKKGDIAKY

SEQ ID NO: 28200 - protein, 28 aa, Homo sapiens
  Payload ID: 5544
  Gene Symbol: ESPN
  Gene Name: espin
  ENSP ID: ENSP00000466437
MAHSEEAALLPGNHVPNGCAADPKASRE

SEQ ID NO: 28201 - protein, 60 aa, Homo sapiens
  Payload ID: 5544
  Gene Symbol: ESPN
  Gene Name: espin
  ENSP ID: ENSP00000487748
MAHSEEAALLPGNHVPNGCAADPKASRELPPPPPPPPPPLPEAASSPPPAPPLPLESAGP

SEQ ID NO: 28202 - protein, 237 aa, Homo sapiens
  Payload ID: 5544
  Gene Symbol: ESPN
  Gene Name: espin
  ENSP ID: ENSP00000488071
GCGQRRSSSSTGKVRVLRHRKSTKSFNMMSPTGDNSELLAEIKAGKSLKPTPQSKGLTTVFSGIGQPAFQPDSPLPSVSPALSPVRSPTPPAAGFQPLLNGSLVPVPPTTPAPGVQLDVEALIPTHDEQGRPIPEWKRQVMVRKMQLKMQEEEEQRRKEEEEEARLASMPAWRRDLLRKKLEEEREQKRKEEERQKQEELRREKEQSEKLRTLGYDESKLAPWQRQVILKKGDIAKY

SEQ ID NO: 28203 - protein, 178 aa, Homo sapiens
  Payload ID: 5544
  Gene Symbol: ESPN
  Gene Name: espin
  ENSP ID: ENSP00000488721
MSPTGDNSELLAEIKAGKSLKPTPQSKGLTTVFSGIGQPAFQPDSPLPSVSPALSPVRSPTPPAAGFQPLLNGSLVPVPPTTPAPGVQLDVEALIPTHDEQGRPIPEWKRQVMVRKMQLKMQEEEEQRRKEEEEEARLASMPAWRRDLLRKKLEEEREQKRKEEERQKQEELRREKEQ

SEQ ID NO: 28204 - protein, 1005 aa, Homo sapiens
  Payload ID: 5545
  Gene Symbol: ESPNL
  Gene Name: espin-like
  Uniprot ID: Q6ZVH7
  ENSP ID: ENSP00000339115
MEKQRALVAAKDGDVATLERLLEAGALGPGITDALGAGLVHHATRAGHLDCVKFLVQRAQLPGNQRAHNGATPAHDAAATGSLAELCWLVREGGCGLQDQDASGVSPLHLAARFGHPVLVEWLLHEGHSATLETREGARPLHHAAVSGDLTCLKLLTAAHGSSVNRRTRSGASPLYLACQEGHLHLAQFLVKDCGADVHLRALDGMSALHAAAARGHYSLVVWLVTFTDIGLTARDNEGATALHFAARGGHTPILDRLLLMGTPILRDSWGGTPLHDAAENGQMECCQTLVSHHVDPSLRDEDGYTAADLAEYHGHRDCAQYLREVAQPVPLLMTPPPPPFPPPPLLATRRSLEDGRRGGPGPGNPSPMSLSPAWPGHPDQPLPREQMTSPAPPRIITSATADPEGTETALAGDTSDGLAALQLDGLPSGDIDGLVPTRDERGQPIPEWKRQVMVRKLQARLGAESSAEAQDNGGSSGPTEQAAWRYSQTHQAILGPFGELLTEDDLVYLEKQIADLQLRRRCQEYESELGRLAAELQALLPEPLVSITVNSHFLPRAPGLEVEEASIPAAEPAGSAEASEVAPGVQPLPFWCSHISRLVRSLSLLLKGVHGLVQGDEKPSTRPLQDTCREASASPPRSEAQRQIQEWGVSVRTLRGNFESASGPLCGFNPGPCEPGAQHRQCLSGCWPALPKPRSGLASGEPRPGDTEEASDSGISCEEVPSEAGAAAGPDLASLRKERIIMLFLSHWRRSAYTPALKTVACRTLGARHAGLRGQEAARSPGPPSPPSEGPRLGHLWQQRSTITHLLGNWKAIMAHVPARQLRRLSRQPRGALSPEQFLPHVDGAPVPYSSLSLDLFMLGYFQLLECDLPAEERKLRHLLCFEVFEHLGTHGWEAVRAFHKAVTDEVAAGRRAWTDGFEDIKARFFGSSQRPAWDTEPGRKSGLTLLGPLPHAAVPCSGPEPTAQRLGSRSQQGSFNGEDICGYINRSFAFWKEKEAEMFNFGE

SEQ ID NO: 28205 - protein, 961 aa, Homo sapiens
  Payload ID: 5545
  Gene Symbol: ESPNL
  Gene Name: espin-like
  Uniprot ID: Q6ZVH7
  ENSP ID: ENSP00000386577
MEKQRALVAAKDGDVATLERLLEAGALGPGITDALGAGLVHHATRAGHLDCVKFLVQRAQLPGNQRAHNGATPAHDAAATGSLAELCWLVREGGCGLQDQDASGVSPLHLAARFGHPVLVEWLLHEGHSATLETREGARPLHHAAVSGDLTCLKLLTAAHGSSVNRRTRSGASPLYLACQEGHLHLAQFLVKDCGADVHLRALDGMSALHAAAARGHYSLVVWLVTFTDIGLTARDNEGATALHFAARGGHTPILDRLLLMGTPILRDSWGGTPLHDAAENGQMEVPLLMTPPPPPFPPPPLLATRRSLEDGRRGGPGPGNPSPMSLSPAWPGHPDQPLPREQMTSPAPPRIITSATADPEGTETALAGDTSDGLAALQLDGLPSGDIDGLVPTRDERGQPIPEWKRQVMVRKLQARLGAESSAEAQDNGGSSGPTEQAAWRYSQTHQAILGPFGELLTEDDLVYLEKQIADLQLRRRCQEYESELGRLAAELQALLPEPLVSITVNSHFLPRAPGLEVEEASIPAAEPAGSAEASEVAPGVQPLPFWCSHISRLVRSLSLLLKGVHGLVQGDEKPSTRPLQDTCREASASPPRSEAQRQIQEWGVSVRTLRGNFESASGPLCGFNPGPCEPGAQHRQCLSGCWPALPKPRSGLASGEPRPGDTEEASDSGISCEEVPSEAGAAAGPDLASLRKERIIMLFLSHWRRSAYTPALKTVACRTLGARHAGLRGQEAARSPGPPSPPSEGPRLGHLWQQRSTITHLLGNWKAIMAHVPARQLRRLSRQPRGALSPEQFLPHVDGAPVPYSSLSLDLFMLGYFQLLECDLPAEERKLRHLLCFEVFEHLGTHGWEAVRAFHKAVTDEVAAGRRAWTDGFEDIKARFFGSSQRPAWDTEPGRKSGLTLLGPLPHAAVPCSGPEPTAQRLGSRSQQGSFNGEDICGYINRSFAFWKEKEAEMFNFGE

SEQ ID NO: 28206 - protein, 637 aa, Homo sapiens
  Payload ID: 5545
  Gene Symbol: ESPNL
  Gene Name: espin-like
  Uniprot ID: Q6ZVH7
  ENSP ID: ENSP00000386579
MSLSPAWPGHPDQPLPREQMTSPAPPRIITSATADPEGTETALAGDTSDGLAALQLDGLPSGDIDGLVPTRDERGQPIPEWKRQVMVRKLQARLGAESSAEAQDNGGSSGPTEQAAWRYSQTHQAILGPFGELLTEDDLVYLEKQIADLQLRRRCQEYESELGRLAAELQALLPEPLVSITVNSHFLPRAPGLEVEEASIPAAEPAGSAEASEVAPGVQPLPFWCSHISRLVRSLSLLLKGVHGLVQGDEKPSTRPLQDTCREASASPPRSEAQRQIQEWGVSVRTLRGNFESASGPLCGFNPGPCEPGAQHRQCLSGCWPALPKPRSGLASGEPRPGDTEEASDSGISCEEVPSEAGAAAGPDLASLRKERIIMLFLSHWRRSAYTPALKTVACRTLGARHAGLRGQEAARSPGPPSPPSEGPRLGHLWQQRSTITHLLGNWKAIMAHVPARQLRRLSRQPRGALSPEQFLPHVDGAPVPYSSLSLDLFMLGYFQLLECDLPAEERKLRHLLCFEVFEHLGTHGWEAVRAFHKAVTDEVAAGRRAWTDGFEDIKARFFGSSQRPAWDTEPGRKSGLTLLGPLPHAAVPCSGPEPTAQRLGSRSQQGSFNGEDICGYINRSFAFWKEKEAEMFNFGE

SEQ ID NO: 28207 - protein, 82 aa, Homo sapiens
  Payload ID: 5545
  Gene Symbol: ESPNL
  Gene Name: espin-like
  ENSP ID: ENSP00000417001
MSLSPAWPGHPDQPLPREQMTSPAPPRIITSATADPEGTETALAGDTSDGLAALQLDGLPSGDIDGLVPTRDERGQPIPEWK

SEQ ID NO: 28208 - protein, 140 aa, Homo sapiens
  Payload ID: 5545
  Gene Symbol: ESPNL
  Gene Name: espin-like
  ENSP ID: ENSP00000479394
MGHPSPGHLCPAGPRDLGCCLFLTCPSPVSPVPLASCPSVSVVLVASATSIFHVSLRWPQALVLPLFLLLTLGHTPSPPICEFGGAGVIPRTDSMGRRPSCQAIPAGHTPMPARPVPQPRVLRRPCFLKGGSPWGPCPPA

SEQ ID NO: 28209 - protein, 570 aa, Homo sapiens
  Payload ID: 5546
  Gene Symbol: EME1
  Gene Name: essential meiotic structure-specific endonuclease 1
  Uniprot ID: Q96AY2
  ENSP ID: ENSP00000339897
MALKKSSPSLDSGDSDSEELPTFAFLKKEPSSTKRRQPEREEKIVVVDISDCEASCPPAPELFSPPVPEIAETVTQTQPVRLLSSESEDEEEFIPLAQRLTCKFLTHKQLSPEDSSSPVKSVLDHQNNEGASCDWKKPFPKIPEVPLHDTPERSAADNKDLILDPCCQLPAYLSTCPGQSSSLAVTKTNSDILPPQKKTKPSQKVQGRGSHGCRQQRQARQKESTLRRQERKNAALVTRMKAQRPEECLKHIIVVLDPVLLQMEGGGQLLGALQTMECRCVIEAQAVPCSVTWRRRAGPSEDREDWVEEPTVLVLLRAEAFVSMIDNGKQGSLDSTMKGKETLQGFVTDITAKTAGKALSLVIVDQEKCFSAQNPPRRGKQGANKQTKKQQQRQPEASIGSMVSRVDAEEALVDLQLHTEAQAQIVQSWKELADFTCAFTKAVAEAPFKKLRDETTFSFCLESDWAGGVKVDLAGRGLALVWRRQIQQLNRVSLEMASAVVNAYPSPQLLVQAYQQCFSDKERQNLLADIQVRRGEGVTSTSRRIGPELSRRIYLQMTTLQPHLSLDSAD

SEQ ID NO: 28210 - protein, 583 aa, Homo sapiens
  Payload ID: 5546
  Gene Symbol: EME1
  Gene Name: essential meiotic structure-specific endonuclease 1
  Uniprot ID: Q96AY2
  ENSP ID: ENSP00000376952
MALKKSSPSLDSGDSDSEELPTFAFLKKEPSSTKRRQPEREEKIVVVDISDCEASCPPAPELFSPPVPEIAETVTQTQPVRLLSSESEDEEEFIPLAQRLTCKFLTHKQLSPEDSSSPVKSVLDHQNNEGASCDWKKPFPKIPEVPLHDTPERSAADNKDLILDPCCQLPAYLSTCPGQSSSLAVTKTNSDILPPQKKTKPSQKVQGRGSHGCRQQRQARQKESTLRRQERKNAALVTRMKAQRPEECLKHIIVVLDPVLLQMEGGGQLLGALQTMECRCVIEAQAVPCSVTWRRRAGPSEDREDWVEEPTVLVLLRAEAFVSMIDNGKQGSLDSTMKGKETLQGFVTDITAKTAGKALSLVIVDQEKCFSLELLFFDFLPCTSAQNPPRRGKQGANKQTKKQQQRQPEASIGSMVSRVDAEEALVDLQLHTEAQAQIVQSWKELADFTCAFTKAVAEAPFKKLRDETTFSFCLESDWAGGVKVDLAGRGLALVWRRQIQQLNRVSLEMASAVVNAYPSPQLLVQAYQQCFSDKERQNLLADIQVRRGEGVTSTSRRIGPELSRRIYLQMTTLQPHLSLDSAD

SEQ ID NO: 28211 - protein, 583 aa, Homo sapiens; identical to SEQ ID NO: 28210
  Payload ID: 5546
  Gene Symbol: EME1
  Gene Name: essential meiotic structure-specific endonuclease 1
  Uniprot ID: Q96AY2
  ENSP ID: ENSP00000421700

SEQ ID NO: 28212 - protein, 171 aa, Homo sapiens
  Payload ID: 5546
  Gene Symbol: EME1
  Gene Name: essential meiotic structure-specific endonuclease 1
  ENSP ID: ENSP00000423029
MALKKSSPSLDSGDSDSEELPTFAFLKKEPSSTKRRQPEREEKIVVVDISDCEASCPPAPELFSPPVPEIAETVTQTQPVRLLSSESEDEEEFIPLAQRLTLLLQMEGGGQLLGALQTMECRCVIEAQAVPCSVTWRRRAGPSERGLGGGANSTGVAPGRGICVHDRQWKA

SEQ ID NO: 28213 - protein, 337 aa, Homo sapiens
  Payload ID: 5546
  Gene Symbol: EME1
  Gene Name: essential meiotic structure-specific endonuclease 1
  ENSP ID: ENSP00000425567
  MOD_RES (1)..(1): Any amino acid
XLILDPCCQLPAYLSTCPGQSSSLAVTKTNSDILPPQKKTKPSQKVQGRGSHGCRQQRQARQKESTLRRQERKNAALVTRMKAQRPEECLKHIIVVLDPVLLQMEGGGQLLGALQTMECRCVIEAQAVPCSVTWRRRAGPSEGSLDSTMKGKETLQGFVTDITAKTAGKALSLVIVDQEKCFSAQNPPRRGKQGANKQTKKQQQRQPEASIGSMVSRVDAEEALVDLQLHTEAQAQIVQSWKELADFTCAFTKAVAEAPFKKLRDETTFSFCLESDWAGGVKVDLAGRGLALVWRRQIQQLNRVSLEMASAVVNAYPSPQLLVQAYQQCFSDKERQN

SEQ ID NO: 28214 - protein, 101 aa, Homo sapiens
  Payload ID: 5546
  Gene Symbol: EME1
  Gene Name: essential meiotic structure-specific endonuclease 1
  ENSP ID: ENSP00000427392
MALKKSSPSLDSGDSDSEELPTFAFLKKEPSSTKRRQPEREEKIVVVDISDCEASCPPAPELFSPPVPEIAETVTQTQPVRLLSSESEDEEEFIPLAQRLT

SEQ ID NO: 28215 - protein, 115 aa, Homo sapiens
  Payload ID: 5547
  Gene Symbol: EME2
  Gene Name: essential meiotic structure-specific endonuclease subunit 2
  ENSP ID: ENSP00000456946
  MOD_RES (1)..(1): Any amino acid
XQAFSFCTAGRWAAGEPVARDGAGLQAAWRRQIRQFSRVSPAVADAVVTAFPSPRLLQQALEACSTERERMGLLADLPVPPSEGGRPRRVGPDLSRRICLFLTTANPDLLLDLGS

SEQ ID NO: 28216 - protein, 379 aa, Homo sapiens
  Payload ID: 5547
  Gene Symbol: EME2
  Gene Name: essential meiotic structure-specific endonuclease subunit 2
  Uniprot ID: A4GXA9
  ENSP ID: ENSP00000457353
MARVGPGRAGVSCQGRGRGRGGSGQRRPPTWEISDSDAEDSAGSEAAARARDPAGERRAAAEALRLLRPEQVLKRLAVCVDTAILEDAGADVLMEALEALGCECRIEPQRPARSLRWTRASPDPCPRSLPPEVWAAGEQELLLLLEPEEFLQGVATLTQISGPTHWVPWISPETTARPHLAVIGLDAYLWSRQHVSRGTQQPESPKVAGAEVAVSWPEVEEALVLLQLWANLDVLLVASWQELSRHVCAVTKALAQYPLKQYRESQAFSFCTAGRWAAGEPVARDGAGLQAAWRRQIRQFSRVSPAVADAVVTAFPSPRLLQQALEACSTERERMGLLADLPVPPSEGGRPRRVGPDLSRRICLFLTTANPDLLLDLGS

SEQ ID NO: 28217 - protein, 190 aa, Homo sapiens
  Payload ID: 5547
  Gene Symbol: EME2
  Gene Name: essential meiotic structure-specific endonuclease subunit 2
  ENSP ID: ENSP00000457966
  MOD_RES (1)..(1): Any amino acid
XSRQHVSRGTQQPESPKVAGAEVAVSWPEVEEALVLLQLWANLDVLLVASWQELSRHVCAVTKALAQYPLKQYRESQAFSFCTAGRWAAGEPVARDGAGLQAAWRRQIRQFSRVSPAVADAVVTAFPSPRLLQQALEACSTERERMGLLADLPVPPSEGGRPRRVGPDLSRRICLFLTTANPDLLLDLGS

SEQ ID NO: 28218 - protein, 840 aa, Homo sapiens
  Payload ID: 5548
  Gene Symbol: ESCO1
  Gene Name: establishment of sister chromatid cohesion N-acetyltransferase 1
  Uniprot ID: Q5FWF5
  ENSP ID: ENSP00000269214
MMSIQEKSKENSSKVTKKSDDKNSETEIQDSQKNLAKKSGPKETIKSQAKSSSESKINQPELETRMSTRSSKAASNDKATKSINKNTVTVRGYSQESTKKKLSQKKLVHENPKANEQLNRRSQRLQQLTEVSRRSLRSREIQGQVQAVKQSLPPTKKEQCSSTQSKSNKTSQKHVKRKVLEVKSDSKEDENLVINEVINSPKGKKRKVEHQTACACSSQCTQGSEKCPQKTTRRDETKPVPVTSEVKRSKMATSVVPKKNEMKKSVHTQVNTNTTLPKSPQPSVPEQSDNELEQAGKSKRGSILQLCEEIAGEIESDNVEVKKESSQMESVKEEKPTEIKLEETSVERQILHQKETNQDVQCNRFFPSRKTKPVKCILNGINSSAKKNSNWTKIKLSKFNSVQHNKLDSQVSPKLGLLRTSFSPPALEMHHPVTQSTFLGTKLHDRNITCQQEKMKEINSEEVKINDITVEINKTTERAPENCHLANEIKPSDPPLDNQMKHSFDSASNKNFSQCLESKLENSPVENVTAASTLLSQAKIDTGENKFPGSAPQQHSILSNQTSKSSDNRETPRNHSLPKCNSHLEITIPKDLKLKEAEKTDEKQLIIDAGQKRFGAVSCNVCGMLYTASNPEDETQHLLFHNQFISAVKYVGWKKERILAEYPDGRIIMVLPEDPKYALKKVDEIREMVDNDLGFQQAPLMCYSRTKTLLFISNDKKVVGCLIAEHIQWGYRVIEEKLPVIRSEEEKVRFERQKAWCCSTLPEPAICGISRIWVFSMMRRKKIASRMIECLRSNFIYGSYLSKEEIAFSDPTPDGKLFATQYCGTGQFLVYNFINGQNST

SEQ ID NO: 28219 - protein, 701 aa, Homo sapiens
  Payload ID: 5548
  Gene Symbol: ESCO1
  Gene Name: establishment of sister chromatid cohesion N-acetyltransferase 1
  Uniprot ID: Q5FWF5
  ENSP ID: ENSP00000372763
MMSIQEKSKENSSKVTKKSDDKNSETEIQDSQKNLAKKSGPKETIKSQAKSSSESKINQPELETRMSTRSSKAASNDKATKSINKNTVTVRGYSQESTKKKLSQKKLVHENPKANEQLNRRSQRLQQLTEVSRRSLRSREIQGQVQAVKQSLPPTKKEQCSSTQSKSNKTSQKHVKRKVLEVKSDSKEDENLVINEVINSPKGKKRKVEHQTACACSSQCTQGSEKCPQKTTRRDETKPVPVTSEVKRSKMATSVVPKKNEMKKSVHTQVNTNTTLPKSPQPSVPEQSDNELEQAGKSKRGSILQLCEEIAGEIESDNVEVKKESSQMESVKEEKPTEIKLEETSVERQILHQKETNQDVQCNRFFPSRKTKPVKCILNGINSSAKKNSNWTKIKLSKFNSVQHNKLDSQVSPKLGLLRTSFSPPALEMHHPVTQSTFLGTKLHDRNITCQQEKMKEINSEEVKINDITVEINKTTERAPENCHLANEIKPSDPPLDNQMKHSFDSASNKNFSQCLESKLENSPVENVTAASTLLSQAKIDTGENKFPGSAPQQHSILSNQTSKSSDNRETPRNHSLPKCNSHLEITIPKDLKLKEAEKTDEKQLIIDAGQKRFGAVSCNVCGMLYTASNPEDETQHLLFHNQFISAVKYVVLLINHHECGSEEEFITSLFLSMFNFRYTQRSFSFPIRFLEGLEERKNSG

SEQ ID NO: 28220 - protein, 172 aa, Homo sapiens
  Payload ID: 5548
  Gene Symbol: ESCO1
  Gene Name: establishment of sister chromatid cohesion N-acetyltransferase 1
  ENSP ID: ENSP00000484873
MVLPEDPKYALKKVDEIREMVDNDLGFQQAPLMCYSRTKTLLFISNDKKVVGCLIAEHIQWGYRVIEEKLPVIRSEEEKVRFERQKAWCCSTLPEPAICGISRIWVFSMMRRKKIASRMIECLRSNFIYGSYLSKEEIAFSDPTPDGKLFATQYCGTGQFLVYNFINGQNST

SEQ ID NO: 28221 - protein, 601 aa, Homo sapiens
  Payload ID: 5549
  Gene Symbol: ESCO2
  Gene Name: establishment of sister chromatid cohesion N-acetyltransferase 2
  Uniprot ID: Q56NI9
  ENSP ID: ENSP00000306999
MAALTPRKRKQDSLKCDSLLHFTENLFPSPNKKHCFYQNSDKNEENLHCSQQEHFVLSALKTTEINRLPSANQGSPFKSALSTVSFYNQNKWYLNPLERKLIKESRSTCLKTNDEDKSFPIVTEKMQGKPVCSKKNNKKPQKSLTAKYQPKYRHIKPVSRNSRNSKQNRVIYKPIVEKENNCHSAENNSNAPRVLSQKIKPQVTLQGGAAFFVRKKSSLRKSSLENEPSLGRTQKSKSEVIEDSDVETVSEKKTFATRQVPKCLVLEEKLKIGLLSASSKNKEKLIKDSSDDRVSSKEHKVDKNEAFSSEDSLGENKTISPKSTVYPIFSASSVNSKRSLGEEQFSVGSVNFMKQTNIQKNTNTRDTSKKTKDQLIIDAGQKHFGATVCKSCGMIYTASNPEDEMQHVQHHHRFLEGIKYVGWKKERVVAEFWDGKIVLVLPHDPSFAIKKVEDVQELVDNELGFQQVVPKCPNKIKTFLFISDEKRVVGCLIAEPIKQAFRVLSEPIGPESPSSTECPRAWQCSDVPEPAVCGISRIWVFRLKRRKRIARRLVDTLRNCFMFGCFLSTDEIAFSDPTPDGKLFATKYCNTPNFLVYNFNS

SEQ ID NO: 28222 - protein, 239 aa, Homo sapiens
  Payload ID: 5549
  Gene Symbol: ESCO2
  Gene Name: establishment of sister chromatid cohesion N-acetyltransferase 2
  Uniprot ID: Q56NI9
  ENSP ID: ENSP00000380563
MKQTNIQKNTNTRDTSKKTKDQLIIDAGQKHFGATVCKSCGMIYTASNPEDEMQHVQHHHRFLEGIKYVGWKKERVVAEFWDGKIVLVLPHDPSFAIKKVEDVQELVDNELGFQQVVPKCPNKIKTFLFISDEKRVVGCLIAEPIKQAFRVLSEPIGPESPSSTECPRAWQCSDVPEPAVCGISRIWVFRLKRRKRIARRLVDTLRNCFMFGCFLSTDEIAFSDPTPDDCRRLNRYQET

SEQ ID NO: 28223 - protein, 133 aa, Homo sapiens
  Payload ID: 5549
  Gene Symbol: ESCO2
  Gene Name: establishment of sister chromatid cohesion N-acetyltransferase 2
  ENSP ID: ENSP00000428027
MAALTPRKRKQDSLKCDSLLHFTENLFPSPNKKHCFYQNSDKNEENLHCSQQEHFVLSALKTTEINRLPSANQGSPFKSALSTVSFYNQNKWYLNPLERKLIKESRSTCLKTNDEDKSFPIVTEKMQGKPVCS

SEQ ID NO: 28224 - protein, 187 aa, Homo sapiens
  Payload ID: 5549
  Gene Symbol: ESCO2
  Gene Name: establishment of sister chromatid cohesion N-acetyltransferase 2
  ENSP ID: ENSP00000428435
MAALTPRKRKQDSLKCDSLLHFTENLFPSPNKKHCFYQNSDKNEENLHCSQQEHFVLSALKTTEINRLPSANQGSPFKSALSTVSFYNQNKWYLNPLERKLIKESRSTCLKTNDEDKSFPIVTEKMQGKPVCSKKNNKKPQKSLTAKYQPKYRHIKPVSRNSRNSKQNRVIYKPIVEKENNCHSAEN

SEQ ID NO: 28225 - protein, 290 aa, Homo sapiens
  Payload ID: 5549
  Gene Symbol: ESCO2
  Gene Name: establishment of sister chromatid cohesion N-acetyltransferase 2
  ENSP ID: ENSP00000428928
MAALTPRKRKQDSLKCDSLLHFTENLFPSPNKKHCFYQNSDKNEENLHCSQQEHFVLSALKTTEINRLPSANQGSPFKSALSTVSFYNQNKWYLNPLERKLIKESRSTCLKTNDEDKSFPIVTEKMQGKPVCSKKNNKKPQKSLTAKYQPKYRHIKPVSRNSRNSKQNRVIYKPIVEKENNCHSAENNSNAPRVLSQKIKPQVTLQGGAAFFVRKKSSLRKSSLENEPSLGRTQKSKSEVIEDSDVETVSEKKTFATRQVPKCLVLEEKLKIGLLSASSKNKEKLIKIFR

SEQ ID NO: 28226 - protein, 176 aa, Homo sapiens
  Payload ID: 5549
  Gene Symbol: ESCO2
  Gene Name: establishment of sister chromatid cohesion N-acetyltransferase 2
  ENSP ID: ENSP00000428959
  MOD_RES (1)..(1): Any amino acid
XKEHKVDKNEAFSSEDSLGENKTISPKSTVYPIFSASSVNSKRSLGEEQFSVGSVNFMKQTNIQKNTNTRDTSKKTKDQLIIDAGQKHFGATVCKSCGMIYTASNPEDEMQHVQHHHRFLEGIKYVGWKKERVVAEFWDGKIVLVLPHDPSFAIKKAFRVLSEPIGPESPSSTECP

SEQ ID NO: 28227 - protein, 253 aa, Homo sapiens
  Payload ID: 5550
  Gene Symbol: ESD
  Gene Name: esterase D
  ENSP ID: ENSP00000367969
MKFAVYLPPKAETGKCPALYWLSGLTCTEQNFISKSGYHQSASEHGLVVIAPDTSPRGCNIKGEDESWDFGTGAGFYVDATEDPWKTNYRMYSYVTEELPQLINANFPVDPQRMSIFGHSMGGHGALICALKNPGKYKSVSAFAPICNPVLCPWGKKAFSGYLGTDQSKWKAYDATHLVKSYPGSQLDILIDQGKDDQFLLDGQLLPDNFIAACTEKKIPVVFRLQEGYDHSYYFIATFITDHIRHHAKYLNA

SEQ ID NO: 28228 - protein, 282 aa, Homo sapiens
  Payload ID: 5550
  Gene Symbol: ESD
  Gene Name: esterase D
  Uniprot ID: P10768
  ENSP ID: ENSP00000367992
MALKQISSNKCFGGLQKVFEHDSVELNCKMKFAVYLPPKAETGKCPALYWLSGLTCTEQNFISKSGYHQSASEHGLVVIAPDTSPRGCNIKGEDESWDFGTGAGFYVDATEDPWKTNYRMYSYVTEELPQLINANFPVDPQRMSIFGHSMGGHGALICALKNPGKYKSVSAFAPICNPVLCPWGKKAFSGYLGTDQSKWKAYDATHLVKSYPGSQLDILIDQGKDDQFLLDGQLLPDNFIAACTEKKIPVVFRLQEGYDHSYYFIATFITDHIRHHAKYLNA

SEQ ID NO: 28229 - protein, 230 aa, Homo sapiens
  Payload ID: 5550
  Gene Symbol: ESD
  Gene Name: esterase D
  ENSP ID: ENSP00000391350
  MOD_RES (1)..(1): Any amino acid
XLTCTEQNFISKSGYHQSASEHGLVVIAPDTSPRGCNIKGEDESWDFGTGAGFYVDATEDPWKTNYRMYSYVTEELPQLINANFPVDPQRMSIFGHSMGGHGALICALKNPGKYKSVSAFAPICNPVLCPWGKKAFSGYLGTDQSKWKAYDATHLVKSYPGSQLDILIDQGKDDQFLLDGQLLPDNFIAACTEKKIPVVFRLQEHGRVKSGLHSLKRISLRFVVIESTTE

SEQ ID NO: 28230 - protein, 120 aa, Homo sapiens
  Payload ID: 5550
  Gene Symbol: ESD
  Gene Name: esterase D
  ENSP ID: ENSP00000476193
  MOD_RES (1)..(1): Any amino acid
XSIFGHSMGGHGALICALKNPGKYKSVSAFAPICNPVLCPWGKKAFSGYLGTDQSKWKAYDATHLVKSYPGSQLDILIDQGKDDQFLLDGQLLPDNFIAACTEKKIPVVFRLQEASIRKL

SEQ ID NO: 28231 - protein, 595 aa, Homo sapiens [sequence omitted]

SEQ ID NO: 28232 - protein, 595 aa, Homo sapiens [sequence omitted]

SEQ ID NO: 28233 - protein, 334 aa, Homo sapiens
  Payload ID: 5551
  Gene Symbol: ESR1
  Gene Name: estrogen receptor 1
  ENSP ID: ENSP00000384064
MTMTLHTKASGMALLHQIQGNELEPLNRPQLKIPLERPLGEVYLDSSKPAVYNYPEGAAYEFNAAAAANAQVYGQTGLPYGPGSEAAAFGSNGLGGFPPLNSVSPSPLMLLHPPPQLSPFLQPHGQQVPYYLENEPSGYTVREAGPPAFYRNQGKCVEGMVEIFDMLLATSSRFRMMNLQGEEFVCLKSIILLNSGVYTFLSSTLKSLEEKDHIHRVLDKITDTLIHLMAKAGLTLQQQHQRLAQLLLILSHIRHMSNKGMEHLYSMKCKNVVPLYDLLLEMLDAHRLHAPTSRGGASVEETDQSHLATAGSTSSHSLQKYYITGEAEGFPATV

SEQ ID NO: 28234 - protein, 84 aa, Homo sapiens
  Payload ID: 5551
  Gene Symbol: ESR1
  Gene Name: estrogen receptor 1
  ENSP ID: ENSP00000385373
MTMTLHTKASGMALLHQIQGNELEPLNRPQLKIPLERPLGEVYLDSSKPAVYNYPEGAAYEFNAAAAANAQVYGQTGLPYGPGS

SEQ ID NO: 28235 - protein, 595 aa, Homo sapiens [sequence omitted]

SEQ ID NO: 28236 - protein, 310 aa, Homo sapiens
  Payload ID: 5551
  Gene Symbol: ESR1
  Gene Name: estrogen receptor 1
  ENSP ID: ENSP00000394721
MAMESAKETRYCAVCNDYASGYHYGVWSCEGCKAFFKRSIQGHNDYMCPATNQCTIDKNRRKSCQACRLRKCYEVGMMKGGIRKDRRGGRMLKHKRQRDDGEGRGEVGSAGDMRAANLWPSPLMIKRSKKNSLALSLTADQMVSALLDAEPPILYSEYDPTRPFSEASMMGLLTNLADRELVHMINWAKRVPGFVDLTLHDQVHLLECAWLEILMIGLVWRSMEHPGKLLFAPNLLLDRNQGKCVEGMVEIFDMLLATSSRFRMMNLQGEEFVCLKSIILLNSGISHVEAKKRILNLHPKIFGNKWFPRV

SEQ ID NO: 28237 - protein, 107 aa, Homo sapiens
  Payload ID: 5551
  Gene Symbol: ESR1
  Gene Name: estrogen receptor 1
  ENSP ID: ENSP00000401995
HNDYMCPATNQCTIDKNRRKSCQACRLRKCYEVGMMKGGFVDLTLHDQVHLLECAWLEILMIGLVWRSMEHPGKLLFAPNLLLDRNQGKCVEGMVEIFDMLLATSSR

SEQ ID NO: 28238 - protein, 595 aa, Homo sapiens [sequence omitted]

SEQ ID NO: 28239 - protein, 115 aa, Homo sapiens
  Payload ID: 5551
  Gene Symbol: ESR1
  Gene Name: estrogen receptor 1
  ENSP ID: ENSP00000411105
MTMTLHTKASGMALLHQIQGNELEPLNRPQLKIPLERPLGEVYLDSSKPAVYNYPEGAAYEFNAAAAANAQVYGQTGLPYGPGSEAAAFGSNGLGGFPPLNSVSPSPLMLLHPPP

SEQ ID NO: 28240 - protein, 152 aa, Homo sapiens
  Payload ID: 5551
  Gene Symbol: ESR1
  Gene Name: estrogen receptor 1
  ENSP ID: ENSP00000415934
MTMTLHTKASGMALLHQIQGNELEPLNRPQLKIPLERPLGEVYLDSSKPAVYNYPEGAAYEFNAAAAANAQVYGQTGLPYGPGSEAAAFGSNGLGGFPPLNSVSPSPLMLLHPPPQLSPFLQPHGQQVPYYLENEPSGYTVREAGPPAFYRT

SEQ ID NO: 28241 - protein, 439 aa, Homo sapiens
  Payload ID: 5552
  Gene Symbol: ESR2
  Gene Name: estrogen receptor 2 (ER beta)
  Uniprot ID: Q92731
  ENSP ID: ENSP00000267525
MDIKNSPSSLNSPSSYNCSQSILPLEHGSIYIPSSYVDSHHEYPAMTFYSPAVMNYSIPSNVTNLEGGPGRQTTSPNVLWPTPGHLSPLVVHRQLSHLYAEPQKSPWCEARSLEHTLPVNRETLKRKVSGNRCASPVTGPGSKRDAHFCAVCSDYASGYHYGVWSCEGCKAFFKRSIQGHNDYICPATNQCTIDKNRRKSCQACRLRKCYEVGMVKCGSRRERCGYRLVRRQRSADEQLHCAGKAKRSGGHAPRVRELLLDALSPEQLVLTLLEAEPPHVLISRPSAPFTEASMMMSLTKLADKELVHMISWAKKIPGMYPLVTATQDADSSRKLAHLLNAVTDALVWVIAKSGISSQQQSMRLANLLMLLSHVRHASNKGMEHLLNMKCKNVVPVYDLLLEMLNAHVLRGCKSSITGSECSPAEDSKSKEGSQNPQSQ

SEQ ID NO: 28242 - protein, 495 aa, Homo sapiens
  Payload ID: 5552
  Gene Symbol: ESR2
  Gene Name: estrogen receptor 2 (ER beta)
  Uniprot ID: Q92731
  ENSP ID: ENSP00000335551
MDIKNSPSSLNSPSSYNCSQSILPLEHGSIYIPSSYVDSHHEYPAMTFYSPAVMNYSIPSNVTNLEGGPGRQTTSPNVLWPTPGHLSPLVVHRQLSHLYAEPQKSPWCEARSLEHTLPVNRETLKRKVSGNRCASPVTGPGSKRDAHFCAVCSDYASGYHYGVWSCEGCKAFFKRSIQGHNDYICPATNQCTIDKNRRKSCQACRLRKCYEVGMVKCGSRRERCGYRLVRRQRSADEQLHCAGKAKRSGGHAPRVRELLLDALSPEQLVLTLLEAEPPHVLISRPSAPFTEASMMMSLTKLADKELVHMISWAKKIPGFVELSLFDQVRLLESCWMEVLMMGLMWRSIDHPGKLIFAPDLVLDRDEGKCVEGILEIFDMLLATTSRFRELKLQHKEYLCVKAMILLNSSMYPLVTATQDADSSRKLAHLLNAVTDALVWVIAKSGISSQQQSMRLANLLMLLSHVRHARAEKASQTLTSFGMKMETLLPEATMEQ

SEQ ID NO: 28243 - protein, 530 aa, Homo sapiens
  Payload ID: 5552
  Gene Symbol: ESR2
  Gene Name: estrogen receptor 2 (ER beta)
  Uniprot ID: Q92731
  ENSP ID: ENSP00000343925
MDIKNSPSSLNSPSSYNCSQSILPLEHGSIYIPSSYVDSHHEYPAMTFYSPAVMNYSIPSNVTNLEGGPGRQTTSPNVLWPTPGHLSPLVVHRQLSHLYAEPQKSPWCEARSLEHTLPVNRETLKRKVSGNRCASPVTGPGSKRDAHFCAVCSDYASGYHYGVWSCEGCKAFFKRSIQGHNDYICPATNQCTIDKNRRKSCQACRLRKCYEVGMVKCGSRRERCGYRLVRRQRSADEQLHCAGKAKRSGGHAPRVRELLLDALSPEQLVLTLLEAEPPHVLISRPSAPFTEASMMMSLTKLADKELVHMISWAKKIPGFVELSLFDQVRLLESCWMEVLMMGLMWRSIDHPGKLIFAPDLVLDRDEGKCVEGILEIFDMLLATTSRFRELKLQHKEYLCVKAMILLNSSMYPLVTATQDADSSRKLAHLLNAVTDALVWVIAKSGISSQQQSMRLANLLMLLSHVRHASNKGMEHLLNMKCKNVVPVYDLLLEMLNAHVLRGCKSSITGSECSPAEDSKSKEGSQNPQSQ

SEQ ID NO: 28244 - protein, 323 aa, Homo sapiens
  Payload ID: 5552
  Gene Symbol: ESR2
  Gene Name: estrogen receptor 2 (ER beta)
  Uniprot ID: Q92731
  ENSP ID: ENSP00000345616
MDIKNSPSSLNSPSSYNCSQSILPLEHGSIYIPSSYVDSHHEYPAMTFYSPAVMNYSIPSNVTNLEGGPGRQTTSPNVLWPTPGHLSPLVVHRQLSHLYAEPQKSPWCEARSLEHTLPVNRETLKRKVSGNRCASPVTGPGSKRDAHFCAVCSDYASGYHYGVWSCEGCKAFFKRSIQGHNDYICPATNQCTIDKNRRKSCQACRLRKCYEVGMVKCGSRRERCGYRLVRRQRSADEQLHCAGKAKRSGGHAPRVRELLLDALSPEQLVLTLLEAEPPHVLISRPSAPFTEASMMMSLTKLADKELVHMISWAKKIPGMRGNA

SEQ ID NO: 28245 - protein, 495 aa, Homo sapiens; identical to SEQ ID NO: 28242
  Payload ID: 5552
  Gene Symbol: ESR2
  Gene Name: estrogen receptor 2 (ER beta)
  Uniprot ID: Q92731
  ENSP ID: ENSP00000351412

SEQ ID NO: 28246 - protein, 481 aa, Homo sapiens
  Payload ID: 5552
  Gene Symbol: ESR2
  Gene Name: estrogen receptor 2 (ER beta)
  Uniprot ID: Q92731
  ENSP ID: ENSP00000450488
MDIKNSPSSLNSPSSYNCSQSILPLEHGSIYIPSSYVDSHHEYPAMTFYSPAVMNYSIPSNVTNLEGGPGRQTTSPNVLWPTPGHLSPLVVHRQLSHLYAEPQKSPWCEARSLEHTLPVNRETLKRKVSGNRCASPVTGPGSKRDAHFCAVCSDYASGYHYGVWSCEGCKAFFKRSIQGHNDYICPATNQCTIDKNRRKSCQACRLRKCYEVGMVKCGSRRERCGYRLVRRQRSADEQLHCAGKAKRSGGHAPRVRELLLDALSPEQLVLTLLEAEPPHVLISRPSAPFTEASMMMSLTKLADKELVHMISWAKKIPGFVELSLFDQVRLLESCWMEVLMMGLMWRSIDHPGKLIFAPDLVLDRDEGKCVEGILEIFDMLLATTSRFRELKLQHKEYLCVKAMILLNSSMYPLVTATQDADSSRKLAHLLNAVTDALVWVIAKSGISSQQQSMRLANLLMLLSHVRHARWGEKQFIHLKLS

SEQ ID NO: 28247 - protein, 495 aa, Homo sapiens; identical to SEQ ID NO: 28242
  Payload ID: 5552
  Gene Symbol: ESR2
  Gene Name: estrogen receptor 2 (ER beta)
  Uniprot ID: Q92731
  ENSP ID: ENSP00000450699

SEQ ID NO: 28248 - protein, 472 aa, Homo sapiens
  Payload ID: 5552
  Gene Symbol: ESR2
  Gene Name: estrogen receptor 2 (ER beta)
  Uniprot ID: Q92731
  ENSP ID: ENSP00000451582
MDIKNSPSSLNSPSSYNCSQSILPLEHGSIYIPSSYVDSHHEYPAMTFYSPAVMNYSIPSNVTNLEGGPGRQTTSPNVLWPTPGHLSPLVVHRQLSHLYAEPQKSPWCEARSLEHTLPVNRETLKRKVSGNRCASPVTGPGSKRDAHFCAVCSDYASGYHYGVWSCEGCKAFFKRSIQGHNDYICPATNQCTIDKNRRKSCQACRLRKCYEVGMVKCGSRRERCGYRLVRRQRSADEQLHCAGKAKRSGGHAPRVRELLLDALSPEQLVLTLLEAEPPHVLISRPSAPFTEASMMMSLTKLADKELVHMISWAKKIPGFVELSLFDQVRLLESCWMEVLMMGLMWRSIDHPGKLIFAPDLVLDRDEGKCVEGILEIFDMLLATTSRFRELKLQHKEYLCVKAMILLNSSMYPLVTATQDADSSRKLAHLLNAVTDALVWVIAKSGISSQQQSMRLANLLMLLSHVRHARYAP

SEQ ID NO: 28249 - protein, 474 aa, Homo sapiens
  Payload ID: 5552
  Gene Symbol: ESR2
  Gene Name: estrogen receptor 2 (ER beta)
  Uniprot ID: Q92731
  ENSP ID: ENSP00000452426
MDIKNSPSSLNSPSSYNCSQSILPLEHGSIYIPSSYVDSHHEYPAMTFYSPAVMNYSIPSNVTNLEGGPGRQTTSPNVLWPTPGHLSPLVVHRQLSHLYAEPQKSPWCEARSLEHTLPVNRETLKRKVSGNRCASPVTGPGSKRDAHFCAVCSDYASGYHYGVWSCEGCKAFFKRSIQGHNDYICPATNQCTIDKNRRKSCQACRLRKCYEVGMVKCGSRRERCGYRLVRRQRSADEQLHCAGKAKRSGGHAPRVRELLLDALSPEQLVLTLLEAEPPHVLISRPSAPFTEASMMMSLTKLADKELVHMISWAKKIPGFVELSLFDQVRLLESCWMEVLMMGLMWRSIDHPGKLIFAPDLVLDRDEGKCVEGILEIFDMLLATTSRFRELKLQHKEYLCVKAMILLNSSMYPLVTATQDADSSRKLAHLLNAVTDALVWVIAKSGISSQQQSMRLANLLMLLSHVRHARSCVYK

SEQ ID NO: 28250 - protein, 513 aa, Homo sapiens
  Payload ID: 5552
  Gene Symbol: ESR2
  Gene Name: estrogen receptor 2 (ER beta)
  ENSP ID: ENSP00000452485
MDIKNSPSSLNSPSSYNCSQSILPLEHGSIYIPSSYVDSHHEYPAMTFYSPAVMNYSIPSNVTNLEGGPGRQTTSPNVLWPTPGHLSPLVVHRQLSHLYAEPQKSPWCEARSLEHTLPVNRETLKRKVSGNRCASPVTGPGSKRDAHFCAVCSDYASGYHYGVWSCEGCKAFFKRSIQGHNDYICPATNQCTIDKNRRKSCQACRLRKCYEVGMVKCGSRRERCGYRLVRRQRSADEQLHCAGKAKRSGGHAPRVRELLLDALSPEQLVLTLLEAEPPHVLISRPSAPFTEASMMMSLTKLADKELVHMISWAKKIPGFVELSLFDQVRLLESCWMEVLMMGLMWRSIDHPGKLIFAPDLVLDRDEGKCVEGILEIFDMLLATTSRFRELKLQHKEYLCVKAMILLNSSMYPLVTATQDADSSRKLAHLLNAVTDALVWVIAKSGISSQQQSMRLANLLMLLSHVRHASSLSLSWRLFMLREASCHGVRQTPGGAHVSVSRSRSFEACQQPRE

SEQ ID NO: 28251 - protein, 213 aa, Homo sapiens
  Payload ID: 5553
  Gene Symbol: EBAG9
  Gene Name: estrogen receptor binding site associated, antigen, 9
  Uniprot ID: O00559
  ENSP ID: ENSP00000337675
MAITQFRLFKFCTCLATVFSFLKRLICRSGRGRKLSGDQITLPTTVDYSSVPKQTDVEEWTSWDEDAPTSVKIEGGNGNVATQQNSLEQLEPDYFKDMTPTIRKTQKIVIKKREPLNFGIPDGSTGFSSRLAATQDLPFIHQSSELGDLDTWQENTNAWEEEEDAAWQAEEVLRQQKLADREKRAAEQQRKKMEKEAQRLMKKEQNKIGVKLS

SEQ ID NO: 28252 - protein, 213 aa, Homo sapiens; identical to SEQ ID NO: 28251
  Payload ID: 5553
  Gene Symbol: EBAG9
  Gene Name: estrogen receptor binding site associated, antigen, 9
  Uniprot ID: O00559
  ENSP ID: ENSP00000379131

SEQ ID NO: 28253 - protein, 258 aa, Homo sapiens
  Payload ID: 5553
  Gene Symbol: EBAG9
  Gene Name: estrogen receptor binding site associated, antigen, 9
  Uniprot ID: O00559
  ENSP ID: ENSP00000432082
MAITQFRLFKFCTCLATVFSFLKRLICRSGRGRKLSGDQITLPTTVDYSSVPKQTDVEEWTSWDEDAPTSVKIEGGNGNVATQQNSLEQLEPDYFKDMTPTIRKTQKIVIKKREPLNFGIPDGSTGFSSRLAATQDLPFIHQSSELGDLDTWQENTNAWEEEEDAAWQAEEVLRSRTNVCLLCSLLFHHPTPTSTPYINQSVKIERVSLGQWSYGKSKEQQKLADREKRAAEQQRKKMEKEAQRLMKKEQNKIGVKLS

SEQ ID NO: 28254 - protein, 197 aa, Homo sapiens
  Payload ID: 5553
  Gene Symbol: EBAG9
  Gene Name: estrogen receptor binding site associated, antigen, 9
  ENSP ID: ENSP00000434878
MAITQFRLFKFCTCLATVFSFLKRLICRSGRGRKLSGDQITLPTTVDYSSVPKQTDVEEWTSWDEDAPTSVKIEGGNGNVATQQNSLEQLEPDYFKDMTPTIRKTQKIVIKKREPLNFGIPDGSTGFSSRLAATQDLPFIHQSSELGDLDTWQENTNAWEEEEDAAWQAEEVLRQQKLADREKRAAEQQRKKMEKEA

SEQ ID NO: 28255 - protein, 41 aa, Homo sapiens
  Payload ID: 5553
  Gene Symbol: EBAG9
  Gene Name: estrogen receptor binding site associated, antigen, 9
  ENSP ID: ENSP00000435687
MTPTIRKTQKIVIKKREPLNFGIPDGSTGFSSRLAATQDLP

SEQ ID NO: 28256 - protein, 78 aa, Homo sapiens
  Payload ID: 5553
  Gene Symbol: EBAG9
  Gene Name: estrogen receptor binding site associated, antigen, 9
  ENSP ID: ENSP00000435689
MAITQFRLFKFCTCLATVFSFLKRLICRSGRGRKLSGDQITLPTTVDYSSVPKQTDVEEWTSWDEDAPTSVKIEGGNG

SEQ ID NO: 28257 - protein, 153 aa, Homo sapiens
  Payload ID: 5553
  Gene Symbol: EBAG9
  Gene Name: estrogen receptor binding site associated, antigen, 9
  ENSP ID: ENSP00000437214
MAITQFRLFKFCTCLATVFSFLKRLICRSGRGRKLSGDQITLPTTVDYSSVPKQTDVEEWTSWDEDAPTSVKIEGGNGNVATQQNSLEQLEPDYFKDMTPTIRKTQKIVIKKREPLNFGIPDGSTGFSSRLAATQDLPFIHQSTSHWVGATII

SEQ ID NO: 28258 - protein, 213 aa, Homo sapiens; identical to SEQ ID NO: 28251
  Payload ID: 5553
  Gene Symbol: EBAG9
  Gene Name: estrogen receptor binding site associated, antigen, 9
  Uniprot ID: O00559
  ENSP ID: ENSP00000477645

SEQ ID NO: 28259 - protein, 258 aa, Homo sapiens; identical to SEQ ID NO: 28253
  Payload ID: 5553
  Gene Symbol: EBAG9
  Gene Name: estrogen receptor binding site associated, antigen, 9
  Uniprot ID: O00559
  ENSP ID: ENSP00000477734

SEQ ID NO: 28260 - protein, 423 aa, Homo sapiens
  Payload ID: 5554
  Gene Symbol: ESRRA
  Gene Name: estrogen-related receptor alpha
  Uniprot ID: P11474
  ENSP ID: ENSP00000000442
MSSQVVGIEPLYIKAEPASPDSPKGSSETETEPPVALAPGPAPTRCLPGHKEEEDGEGAGPGEQGGGKLVLSSLPKRLCLVCGDVASGYHYGVASCEACKAFFKRTIQGSIEYSCPASNECEITKRRRKACQACRFTKCLRVGMLKEGVRLDRVRGGRQKYKRRPEVDPLPFPGPFPAGPLAVAGGPRKTAAPVNALVSHLLVVEPEKLYAMPDPAGPDGHLPAVATLCDLFDREIVVTISWAKSIPGFSSLSLSDQMSVLQSVWMEVLVLGVAQRSLPLQDELAFAEDLVLDEEGARAAGLGELGAALLQLVRRLQALRLEREEYVLLKALALANSDSVHIEDAEAVEQLREALHEALLEYEAGRAGPGGGAERRRAGRLLLTLPLLRQTAGKVLAHFYGVKLEGKVPMHKLFLEMLEAMMD

SEQ ID NO: 28261 - protein, 423 aa, Homo sapiens; identical to SEQ ID NO: 28260
  Payload ID: 5554
  Gene Symbol: ESRRA
  Gene Name: estrogen-related receptor alpha
  Uniprot ID: P11474
  ENSP ID: ENSP00000384851

SEQ ID NO: 28262 - protein, 422 aa, Homo sapiens
  Payload ID: 5554
  Gene Symbol: ESRRA
  Gene Name: estrogen-related receptor alpha
  Uniprot ID: P11474
  ENSP ID: ENSP00000385971
MSSQVVGIEPLYIKAEPASPDSPKGSSETETEPPVALAPGPAPTRCLPGHKEEEDGEGAGPGEQGGGKLVLSSLPKRLCLVCGDVASGYHYGVASCEACKAFFKRTIQGSIEYSCPASNECEITKRRRKACQACRFTKCLRVGMLKEGVRLDRVRGGRQKYKRRPEVDPLPFPGPFPAGPLAVAGGPRKTAPVNALVSHLLVVEPEKLYAMPDPAGPDGHLPAVATLCDLFDREIVVTISWAKSIPGFSSLSLSDQMSVLQSVWMEVLVLGVAQRSLPLQDELAFAEDLVLDEEGARAAGLGELGAALLQLVRRLQALRLEREEYVLLKALALANSDSVHIEDAEAVEQLREALHEALLEYEAGRAGPGGGAERRRAGRLLLTLPLLRQTAGKVLAHFYGVKLEGKVPMHKLFLEMLEAMMD

SEQ ID NO: 28263 - protein, 162 aa, Homo sapiens
  Payload ID: 5554
  Gene Symbol: ESRRA
  Gene Name: estrogen-related receptor alpha
  ENSP ID: ENSP00000439896
MLKEGVRLDRVRGGRQKYKRRPEVDPLPFPGPFPAGPLAVAGGPRKTAAPVNALVSHLLVVEPEKLYAMPDPAGPDGHLPAVATLCDLFDREIVVTISWAKSIPGFSSLSLSDQMSVLQSVWMEVLVLGVAQRSLPLQDELAFAEDLVLDEEGARAAGLGEL

SEQ ID NO: 28264 - protein, 109 aa, Homo sapiens
  Payload ID: 5554
  Gene Symbol: ESRRA
  Gene Name: estrogen-related receptor alpha
  ENSP ID: ENSP00000441970
MSSQVVGIEPLYIKAEPASPDSPKGSSETETEPPVALAPGPAPTRCLPGHKEEEDGEGAGPGEQGGGKLVLSSLPKRLCLVCGDVASGYHYGVASCEACKAFFKRTIQG

SEQ ID NO: 28265 - protein, 198 aa, Homo sapiens
  Payload ID: 5554
  Gene Symbol: ESRRA
  Gene Name: estrogen-related receptor alpha
  ENSP ID: ENSP00000444710
  MOD_RES (1)..(1): Any amino acid
XRPEVDPLPFPGPFPAGPLAVAGGPRKTGFSSLSLSDQMSVLQSVWMEVLVLGVAQRSLPLQDELAFAEDLVLDEEGARAAGLGELGAALLQLVRRLQALRLEREEYVLLKALALANSDSVHIEDAEAVEQLREALHEALLEYEAGRAGPGGGAERRRAGRLLLTLPLLRQTAGKVLAHFYGVKLEGKVPMHKLFLEM

SEQ ID NO: 28266 - protein, 508 aa, Homo sapiens
  Payload ID: 5555
  Gene Symbol: ESRRB
  Gene Name: estrogen-related receptor beta
  Uniprot ID: O95718
  ENSP ID: ENSP00000370270
MSSDDRHLGSSCGSFIKTEPSSPSSGIDALSHHSPSGSSDASGGFGLALGTHANGLDSPPMFAGAGLGGTPCRKSYEDCASGIMEDSAIKCEYMLNAIPKRLCLVCGDIASGYHYGVASCEACKAFFKRTIQGNIEYSCPATNECEITKRRRKSCQACRFMKCLKVGMLKEGVRLDRVRGGRQKYKRRLDSESSPYLSLQISPPAKKPLTKIVSYLLVAEPDKLYAMPPPGMPEGDIKALTTLCDLADRELVVIIGWAKHIPGFSSLSLGDQMSLLQSAWMEILILGIVYRSLPYDDKLVYAEDYIMDEEHSRLAGLLELYRAILQLVRRYKKLKVEKEEFVTLKALALANSDSMYIEDLEAVQKLQDLLHEALQDYELSQRHEEPWRTGKLLLTLPLLRQTAAKAVQHFYSVKLQGKVPMHKLFLEMLEAKVGQEQLRGSPKDERMSSHDGKCPFQSAAFTSRDQSNSPGIPNPRPSSPTPLNERGRQISPSTRTPGGQGKHLWLTM

SEQ ID NO: 28267 - protein, 508 aa, Homo sapiens; identical to SEQ ID NO: 28266
  Payload ID: 5555
  Gene Symbol: ESRRB
  Gene Name: estrogen-related receptor beta
  Uniprot ID: O95718
  ENSP ID: ENSP00000422488

SEQ ID NO: 28268 - protein, 500 aa, Homo sapiens
  Payload ID: 5555
  Gene Symbol: ESRRB
  Gene Name: estrogen-related receptor beta
  Uniprot ID: O95718
  ENSP ID: ENSP00000423004
MSSDDRHLGSSCGSFIKTEPSSPSSGIDALSHHSPSGSSDASGGFGLALGTHANGLDSPPMFAGAGLGGTPCRKSYEDCASGIMEDSAIKCEYMLNAIPKRLCLVCGDIASGYHYGVASCEACKAFFKRTIQGNIEYSCPATNECEITKRRRKSCQACRFMKCLKVGMLKEGVRLDRVRGGRQKYKRRLDSESSPYLSLQISPPAKKPLTKIVSYLLVAEPDKLYAMPPPGMPEGDIKALTTLCDLADRELVVIIGWAKHIPGFSSLSLGDQMSLLQSAWMEILILGIVYRSLPYDDKLVYAEDYIMDEEHSRLAGLLELYRAILQLVRRYKKLKVEKEEFVTLKALALANSDSMYIEDLEAVQKLQDLLHEALQDYELSQRHEEPWRTGKLLLTLPLLRQTAAKAVQHFYSVKLQGKVPMHKLFLEMLEAKAWARADSLQEWRPLEQVPSPLHRATKRQHVHFLTPLPPPPSVAWVGTAQAGYHLEVFLPQRAGWPRAA

SEQ ID NO: 28269 - protein, 508 aa, Homo sapiens
  Payload ID: 5555
  Gene Symbol: ESRRB
  Gene Name: estrogen-related receptor beta
  ENSP ID: ENSP00000424992
MLLNRMSSDDRHLGSSCGSFIKTEPSSPSSGIDALSHHSPSGSSDASGGFGLALGTHANGLDSPPMFAGAGLGGTPCRKSYEDCASGIMEDSAIKCEYMLNAIPKRLCLVCGDIASGYHYGVASCEACKAFFKRTIQGNIEYSCPATNECEITKRRRKSCQACRFMKCLKVGMLKEGVRLDRVRGGRQKYKRRLDSESSPYLSLQISPPAKKPLTKIVSYLLVAEPDKLYAMPPPGMPEGDIKALTTLCDLADRELVVIIGWAKHIPGFSSLSLGDQMSLLQSAWMEILILGIVYRSLPYDDKLVYAEDYIMDEEHSRLAGLLELYRAILQLVRRYKKLKVEKEEFVTLKALALANSDSMYIEDLEAVQKLQDLLHEALQDYELSQRHEEPWRTGKLLLTLPLLRQTAAKAVQHFYSVKLQGKVPMHKLFLEMLEAKVGQEQLRGSPKDERMSSHDGKCPFQSAAFTSRDQSNSPGIPNPRPSSPTPLNERGRQISPSTRTPGGQGKH

SEQ ID NO: 28270 - protein, 433 aa, Homo sapiens
  Payload ID: 5555
  Gene Symbol: ESRRB
  Gene Name: estrogen-related receptor beta
  Uniprot ID: O95718
  ENSP ID: ENSP00000451658
MSSDDRHLGSSCGSFIKTEPSSPSSGIDALSHHSPSGSSDASGGFGLALGTHANGLDSPPMFAGAGLGGTPCRKSYEDCASGIMEDSAIKCEYMLNAIPKRLCLVCGDIASGYHYGVASCEACKAFFKRTIQGNIEYSCPATNECEITKRRRKSCQACRFMKCLKVGMLKEGVRLDRVRGGRQKYKRRLDSESSPYLSLQISPPAKKPLTKIVSYLLVAEPDKLYAMPPPGMPEGDIKALTTLCDLADRELVVIIGWAKHIPGFSSLSLGDQMSLLQSAWMEILILGIVYRSLPYDDKLVYAEDYIMDEEHSRLAGLLELYRAILQLVRRYKKLKVEKEEFVTLKALALANSDSMYIEDLEAVQKLQDLLHEALQDYELSQRHEEPWRTGKLLLTLPLLRQTAAKAVQHFYSVKLQGKVPMHKLFLEMLEAKV

SEQ ID NO: 28271 - protein, 435 aa, Homo sapiens
  Payload ID: 5556
  Gene Symbol: ESRRG
  Gene Name: estrogen-related receptor gamma
  Uniprot ID: P62508
  ENSP ID: ENSP00000352077
MSNKDRHIDSSCSSFIKTEPSSPASLTDSVNHHSPGGSSDASGSYSSTMNGHQNGLDSPPLYPSAPILGGSGPVRKLYDDCSSTIVEDPQTKCEYMLNSMPKRLCLVCGDIASGYHYGVASCEACKAFFKRTIQGNIEYSCPATNECEITKRRRKSCQACRFMKCLKVGMLKEGVRLDRVRGGRQKYKRRIDAENSPYLNPQLVQPAKKPYNKIVSHLLVAEPEKIYAMPDPTVPDSDIKALTTLCDLADRELVVIIGWAKHIPGFSTLSLADQMSLLQSAWMEILILGVVYRSLSFEDELVYADDYIMDEDQSKLAGLLDLNNAILQLVKKYKSMKLEKEEFVTLKAIALANSDSMHIEDVEAVQKLQDVLHEALQDYEAGQHMEDPRRAGKMLMTLPLLRQTSTKAVQHFYNIKLEGKVPMHKLFLEMLEAKV

SEQ ID NO: 28272 - protein, 435 aa, Homo sapiens; identical to SEQ ID NO: 28271
  Payload ID: 5556
  Gene Symbol: ESRRG
  Gene Name: estrogen-related receptor gamma
  Uniprot ID: P62508
  ENSP ID: ENSP00000353108

SEQ ID NO: 28273 - protein, 435 aa, Homo sapiens; identical to SEQ ID NO: 28271
  Payload ID: 5556
  Gene Symbol: ESRRG
  Gene Name: estrogen-related receptor gamma
  Uniprot ID: P62508
  ENSP ID: ENSP00000354584

SEQ ID NO: 28274 - protein, 435 aa, Homo sapiens; identical to SEQ ID NO: 28271
  Payload ID: 5556
  Gene Symbol: ESRRG
  Gene Name: estrogen-related receptor gamma
  Uniprot ID: P62508
  ENSP ID: ENSP00000355225

SEQ ID NO: 28275 - protein, 470 aa, Homo sapiens
  Payload ID: 5556
  Gene Symbol: ESRRG
  Gene Name: estrogen-related receptor gamma
  Uniprot ID: P62508
  ENSP ID: ENSP00000355904
MWRECDWGLGAVKSDLACVPSAKRLLCRMSNKDRHIDSSCSSFIKTEPSSPASLTDSVNHHSPGGSSDASGSYSSTMNGHQNGLDSPPLYPSAPILGGSGPVRKLYDDCSSTIVEDPQTKCEYMLNSMPKRLCLVCGDIASGYHYGVASCEACKAFFKRTIQGNIEYSCPATNECEITKRRRKSCQACRFMKCLKVGMLKEGVRLDRVRGGRQKYKRRIDAENSPYLNPQLVQPAKKPLLWSDPADNKIVSHLLVAEPEKIYAMPDPTVPDSDIKALTTLCDLADRELVVIIGWAKHIPGFSTLSLADQMSLLQSAWMEILILGVVYRSLSFEDELVYADDYIMDEDQSKLAGLLDLNNAILQLVKKYKSMKLEKEEFVTLKAIALANSDSMHIEDVEAVQKLQDVLHEALQDYEAGQHMEDPRRAGKMLMTLPLLRQTSTKAVQHFYNIKLEGKVPMHKLFLEMLEAKV

SEQ ID NO: 28276 - protein, 435 aa, Homo sapiens; identical to SEQ ID NO: 28271
  Payload ID: 5556
  Gene Symbol: ESRRG
  Gene Name: estrogen-related receptor gamma
  Uniprot ID: P62508
  ENSP ID: ENSP00000355905

SEQ ID NO: 28277 - protein, 435 aa, Homo sapiens; identical to SEQ ID NO: 28271
  Payload ID: 5556
  Gene Symbol: ESRRG
  Gene Name: estrogen-related receptor gamma
  Uniprot ID: P62508
  ENSP ID: ENSP00000355907

SEQ ID NO: 28278 - protein, 435 aa, Homo sapiens; identical to SEQ ID NO: 28271
  Payload ID: 5556
  Gene Symbol: ESRRG
  Gene Name: estrogen-related receptor gamma
  Uniprot ID: P62508
  ENSP ID: ENSP00000375761

SEQ ID NO: 28279 - protein, 458 aa, Homo sapiens
  Payload ID: 5556
  Gene Symbol: ESRRG
  Gene Name: estrogen-related receptor gamma
  Uniprot ID: P62508
  ENSP ID: ENSP00000386171
MDSVELCLPESFSLHYEEELLCRMSNKDRHIDSSCSSFIKTEPSSPASLTDSVNHHSPGGSSDASGSYSSTMNGHQNGLDSPPLYPSAPILGGSGPVRKLYDDCSSTIVEDPQTKCEYMLNSMPKRLCLVCGDIASGYHYGVASCEACKAFFKRTIQGNIEYSCPATNECEITKRRRKSCQACRFMKCLKVGMLKEGVRLDRVRGGRQKYKRRIDAENSPYLNPQLVQPAKKPYNKIVSHLLVAEPEKIYAMPDPTVPDSDIKALTTLCDLADRELVVIIGWAKHIPGFSTLSLADQMSLLQSAWMEILILGVVYRSLSFEDELVYADDYIMDEDQSKLAGLLDLNNAILQLVKKYKSMKLEKEEFVTLKAIALANSDSMHIEDVEAVQKLQDVLHEALQDYEAGQHMEDPRRAGKMLMTLPLLRQTSTKAVQHFYNIKLEGKVPMHKLFLEMLEAKV

SEQ ID NO: 28280 - protein, 435 aa, Homo sapiens; identical to SEQ ID NO: 28271
  Payload ID: 5556
  Gene Symbol: ESRRG
  Gene Name: estrogen-related receptor gamma
  Uniprot ID: P62508
  ENSP ID: ENSP00000417374

SEQ ID NO: 28281 - protein, 92 aa, Homo sapiens
  Payload ID: 5556
  Gene Symbol: ESRRG
  Gene Name: estrogen-related receptor gamma
  ENSP ID: ENSP00000417900
MSNKDRHIDSSCSSFIKTEPSSPASLTDSVNHHSPGGSSDASGSYSSTMNGHQNGLDSPPLYPSAPILGGSGPVRKLYDDCSSTIVEDPQTK

SEQ ID NO: 28282 - protein, 396 aa, Homo sapiens
  Payload ID: 5556
  Gene Symbol: ESRRG
  Gene Name: estrogen-related receptor gamma
  Uniprot ID: P62508
  ENSP ID: ENSP00000418629
MSNKDRHIDSSCSSFIKTEPSSPASLTDSVNHHSPGGSSDASGSYSSTMNGHQNGLDSPPLYPSAPILGGSGPVRKLYDDCSSTIVEDPQTKCEYMLNSMPKRLCLVCGDIASGYHYGVASCEACKAFFKRTIQGVRLDRVRGGRQKYKRRIDAENSPYLNPQLVQPAKKPYNKIVSHLLVAEPEKIYAMPDPTVPDSDIKALTTLCDLADRELVVIIGWAKHIPGFSTLSLADQMSLLQSAWMEILILGVVYRSLSFEDELVYADDYIMDEDQSKLAGLLDLNNAILQLVKKYKSMKLEKEEFVTLKAIALANSDSMHIEDVEAVQKLQDVLHEALQDYEAGQHMEDPRRAGKMLMTLPLLRQTSTKAVQHFYNIKLEGKVPMHKLFLEMLEAKV

SEQ ID NO: 28283 - protein, 50 aa, Homo sapiens
  Payload ID: 5556
  Gene Symbol: ESRRG
  Gene Name: estrogen-related receptor gamma
  ENSP ID: ENSP00000418895
MSNKDRHIDSSCSSFIKTEPSSPASLTDSVNHHSPGGSSDASGSYSSTMN

SEQ ID NO: 28284 - protein, 435 aa, Homo sapiens; identical to SEQ ID NO: 28271
  Payload ID: 5556
  Gene Symbol: ESRRG
  Gene Name: estrogen-related receptor gamma
  Uniprot ID: P62508
  ENSP ID: ENSP00000419155

SEQ ID NO: 28285 - protein, 354 aa, Homo sapiens
  Payload ID: 5556
  Gene Symbol: ESRRG
  Gene Name: estrogen-related receptor gamma
  ENSP ID: ENSP00000419514
MSNKDRHIDSSCSSFIKTEPSSPASLTDSVNHHSPGGSSDASGSYSSTMNGHQNGLDSPPLYPSAPILGGSGPVRKLYDDCSSTIVEDPQTKCEYMLNSMPKRLCLVCGDIASGYHYGVASCEACKAFFKRTIQGNIEYSCPATNECEITKRRRKSCQACRFMKCLKVGMLKEGVRLDRVRGGRQKYKRRIDAENSPYLNPQLVQPAKKPYNKIVSHLLVAEPEKIYAMPDPTVPDSDIKALTTLCDLADRELVVIIGWAKHIPGFSTLSLADQMSLLQSAWMEILILGVVYRSLSFEDELVYADDYIMDEDQSKLAGLLDLNNAILQLVKKYKSMKLEKEEFVTLKAIALANS

SEQ ID NO: 28286 - protein, 435 aa, Homo sapiens; identical to SEQ ID NO: 28271
  Payload ID: 5556
  Gene Symbol: ESRRG
  Gene Name: estrogen-related receptor gamma
  Uniprot ID: P62508
  ENSP ID: ENSP00000419594

SEQ ID NO: 28287 - protein, 55 aa, Homo sapiens
  Payload ID: 5556
  Gene Symbol: ESRRG
  Gene Name: estrogen-related receptor gamma
  ENSP ID: ENSP00000420370
MSNKDRHIDSSCSSFIKTEPSSPASLTDSVNHHSPGGSSDASGSYSSTMNGHQNG

SEQ ID NO: 28288 - protein, 47 aa, Homo sapiens
  Payload ID: 5556
  Gene Symbol: ESRRG
  Gene Name: estrogen-related receptor gamma
  ENSP ID: ENSP00000466343
MWRECDWGLGAVKSDLACVPSAKRREPLAREETGLLMNANRRSSICA

SEQ ID NO: 28289 - protein, 435 aa, Homo sapiens; identical to SEQ ID NO: 28271
  Payload ID: 5556
  Gene Symbol: ESRRG
  Gene Name: estrogen-related receptor gamma
  Uniprot ID: P62508
  ENSP ID: ENSP00000481528

SEQ ID NO: 28290 - protein, 406 aa, Homo sapiens
  Payload ID: 5557
  Gene Symbol: ESX1
  Gene Name: ESX homeobox 1
  Uniprot ID: Q8N693
  ENSP ID: ENSP00000361669
MESLRGYTHSDIGYRSLAVGEDIEEVNDEKLTVTSLMARGGEDEENTRSKPEYGTEAENNVGTEGSVPSDDQDREGGGGHEPEQQQEEPPLTKPEQQQEEPPLLELKQEQEEPPQTTVEGPQPAEGPQTAEGPQPPERKRRRRTAFTQFQLQELENFFDESQYPDVVARERLAARLNLTEDRVQVWFQNRRAKWKRNQRVLMLRNTATADLAHPLDMFLGGAYYAAPALDPALCVHLVPQLPRPPVLPVPPMPPRPPMVPMPPRPPIAPMPPMAPVPPGSRMAPVPPGPRMAPVPPWPPMAPVPPWPPMAPVPTGPPMAPVPPGPPMARVPPGPPMARVPPGPPMAPLPPGPPMAPLPPGPPMAPLPPGPPMAPLPPRSHVPHTGLAPVHITWAPVINSYYACPFF

SEQ ID NO: 28291 - protein, 452 aa, Homo sapiens
  Payload ID: 5558
  Gene Symbol: ETNK1
  Gene Name: ethanolamine kinase 1
  Uniprot ID: Q9HBU6
  ENSP ID: ENSP00000266517
MLCGRPRSSSDNRNFLRERAGLSSAAVQTRIGNSAASRRSPAARPPVPAPPALPRGRPGTEGSTSLSAPAVLVVAVAVVVVVVSAVAWAMANYIHVPPGSPEVPKLNVTVQDQEEHRCREGALSLLQHLRPHWDPQEVTLQLFTDGITNKLIGCYVGNTMEDVVLVRIYGNKTELLVDRDEEVKSFRVLQAHGCAPQLYCTFNNGLCYEFIQGEALDPKHVCNPAIFRLIARQLAKIHAIHAHNGWIPKSNLWLKMGKYFSLIPTGFADEDINKRFLSDIPSSQILQEEMTWMKEILSNLGSPVVLCHNDLLCKNIIYNEKQGDVQFIDYEYSGYNYLAYDIGNHFNEFAGVSDVDYSLYPDRELQSQWLRAYLEAYKEFKGFGTEVTEKEVEILFIQVNQFALASHFFWGLWALIQAKYSTIEFDFLGYAIVRFNQYFKMKPEVTALKVPE

SEQ ID NO: 28292 - protein, 258 aa, Homo sapiens
  Payload ID: 5558
  Gene Symbol: ETNK1
  Gene Name: ethanolamine kinase 1
  Uniprot ID: Q9HBU6
  ENSP ID: ENSP00000334041
MLCGRPRSSSDNRNFLRERAGLSSAAVQTRIGNSAASRRSPAARPPVPAPPALPRGRPGTEGSTSLSAPAVLVVAVAVVVVVVSAVAWAMANYIHVPPGSPEVPKLNVTVQDQEEHRCREGALSLLQHLRPHWDPQEVTLQLFTDGITNKLIGCYVGNTMEDVVLVRIYGNKTELLVDRDEEVKSFRVLQAHGCAPQLYCTFNNGLCYEFIQGEALDPKHVCNPAIFSLSSLTLCKGKTTRCFGLTGCRGSRLLLSFF

SEQ ID NO: 28293 - protein, 82 aa, Homo sapiens
  Payload ID: 5558
  Gene Symbol: ETNK1
  Gene Name: ethanolamine kinase 1
  ENSP ID: ENSP00000439614
  MOD_RES (1)..(1): Any amino acid
XLSAPAVLVVAVAVVVVVVSAVAWAMANYIHVPPGSPEVPKLNVTVQDQEEHRCREGALSLLQHLRPHWDPQEVTLQKPLRK

SEQ ID NO: 28294 - protein, 425 aa, Homo sapiens
  Payload ID: 5558
  Gene Symbol: ETNK1
  Gene Name: ethanolamine kinase 1
  ENSP ID: ENSP00000446292
  MOD_RES (1)..(1): Any amino acid
XDNRNFLRERAGLSSAAVQTRIGNSAASRRSPAARPPVPAPPALPRGRPGTEGSTSLSAPAVLVVAVAVVVVVVSAVAWAMANYIHVPPGSPEVPKLNVTVQDQEEHRCREGALSLLQHLRPHWDPQEVTLQLFTDGITNKLIGCYVGNTMEDVVLVRIYGNKTELLVDRDEEVKSFRVLQAHGCAPQLYCTFNNGLCYEFIQGEALDPKHVCNPAIFRLIARQLAKIHAIHAHNGWIPKSNLWLKMGKYFSLIPTGFADEDINKRFLSDIPSSQILQEEMTWMKEILSNLGSPVVLCHNDLLCKNIIYNEKQGDVQFIDYEYSGYNYLAYDIGNHFNEFAGVSDVDYSLYPDRELQSQWLRAYLEAYKEFKGFGTEVTEKEVEILFIQVNQFALGENLNFIIGNKYCQLFSLKWLLISFGDCGL

SEQ ID NO: 28295 - protein, 68 aa, Homo sapiens
  Payload ID: 5559
  Gene Symbol: ETNK2
  Gene Name: ethanolamine kinase 2
  ENSP ID: ENSP00000356165
MAVTPREVQRLYVQVNKFALASHFFWALWALIQNQYSTIDFDFLRYAVIRFNQYFKVKPQASALEMPK

SEQ ID NO: 28296 - protein, 394 aa, Homo sapiens
  Payload ID: 5559
  Gene Symbol: ETNK2
  Gene Name: ethanolamine kinase 2
  Uniprot ID: Q9NVF9
  ENSP ID: ENSP00000356169
MAVPPSAPQPRASFHLRRHTPCPQCSWGMEEKAAASASCREPPGPPRAAAVAYFGISVDPDDILPGALRLIQELRPHWKPEQVRTKRFTDGITNKLVACYVEEDMQDCVLVRVYGERTELLVDRENEVRNFQLLRAHSCAPKLYCTFQNGLCYEYMQGVALEPEHIREPRLFRLIALEMAKIHTIHANGSLPKPILWHKMHNYFTLVKNEINPSLSADVPKVEVLERELAWLKEHLSQLESPVVFCHNDLLCKNIIYDSIKGHVRFIDYEYAGYNYQAFDIGNHFNEFAGVNEVDYCLYPARETQLQWLHYYLQAQKGMAVTPREVQRLYVQVNKFALGPSCVSSTMTASLQCCRVGNRHGEIARLTLSGLFPGVSLLLGSLGPHPEPVLHHRL

SEQ ID NO: 28297 - protein, 386 aa, Homo sapiens
  Payload ID: 5559
  Gene Symbol: ETNK2
  Gene Name: ethanolamine kinase 2
  Uniprot ID: Q9NVF9
  ENSP ID: ENSP00000356170
MAVPPSAPQPRASFHLRRHTPCPQCSWGMEEKAAASASCREPPGPPRAAAVAYFGISVDPDDILPGALRLIQELRPHWKPEQVRTKRFTDGITNKLVACYVEEDMQDCVLVRVYGERTELLVDRENEVRNFQLLRAHSCAPKLYCTFQNGLCYEYMQGVALEPEHIREPRLFRLIALEMAKIHTIHANGSLPKPILWHKMHNYFTLVKNEINPSLSADVPKVEVLERELAWLKEHLSQLESPVVFCHNDLLCKNIIYDSIKGHVRFIDYEYAGYNYQAFDIGNHFNEFAGVNEVDYCLYPARETQLQWLHYYLQAQKGMAVTPREVQRLYVQVNKFALASHFFWALWALIQNQYSTIDFDFLRYAVIRFNQYFKVKPQASALEMPK

SEQ ID NO: 28298 - protein, 12 aa, Homo sapiens
  Payload ID: 5559
  Gene Symbol: ETNK2
  Gene Name: ethanolamine kinase 2
  ENSP ID: ENSP00000394618
MQDCVLVRVYGE

SEQ ID NO: 28299 - protein, 192 aa, Homo sapiens
  Payload ID: 5559
  Gene Symbol: ETNK2
  Gene Name: ethanolamine kinase 2
  ENSP ID: ENSP00000398091
NSFSSLLLRPSFCRTCAPKGLAIIPSLALWLIALEMAKIHTIHANGSLPKPILWHKMHNYFTLVKNEINPSLSADVPKVEVLERELAWLKEHLSQLESPVVFCHNDLLCKNIIYDSIKGHVRFIDYEYAGYNYQAFDIGNHFNEFAGVNEVDYCLYPARETQLQWLHYYLQAQKGMAVTPREVQRLYVQVNK

SEQ ID NO: 28300 - protein, 217 aa, Homo sapiens
  Payload ID: 5559
  Gene Symbol: ETNK2
  Gene Name: ethanolamine kinase 2
  ENSP ID: ENSP00000405497
RRLGGGTAEGKTGRGLGGPSWDTGPRAMGSLSRPSFSDRLIALEMAKIHTIHANGSLPKPILWHKMHNYFTLVKNEINPSLSADVPKVEVLERELAWLKEHLSQLESPVVFCHNDLLCKNIIYDSIKGHVRFIDYEYAGYNYQAFDIGNHFNEFAGVNEVDYCLYPARETQLQWLHYYLQAQKGMAVTPREVQRLYVQVNKFALASHFFWALWALIQ

SEQ ID NO: 28301 - protein, 147 aa, Homo sapiens
  Payload ID: 5559
  Gene Symbol: ETNK2
  Gene Name: ethanolamine kinase 2
  ENSP ID: ENSP00000406241
YGERTELLVDRENEVRNFQLLRAHSCAPKLYCTFQNGLCYEYMQGVALEPEHIREPRLFSLSADVPKVEVLERELAWLKEHLSQLESPVVFCHNDLLCKNIIYDSIKGHVRFIDYEYAGYNYQAFDIGNHFNEFAGVNEVDYCLYPA

SEQ ID NO: 28302 - protein, 149 aa, Homo sapiens
  Payload ID: 5559
  Gene Symbol: ETNK2
  Gene Name: ethanolamine kinase 2
  ENSP ID: ENSP00000410580
  MOD_RES (1)..(1): Any amino acid
XQGFGWLVSWLHGAVLPAGTWTSKSHVRFIDYEYAGYNYQAFDIGNHFNEFAGVNEVDYCLYPARETQLQWLHYYLQAQKGMAVTPREVQRLYVQVNKFALASHFFWALWALIQNQYSTIDFDFLRYAVIRFNQYFKVKPQASALEMPK

SEQ ID NO: 28303 - protein, 499 aa, Homo sapiens
  Payload ID: 5560
  Gene Symbol: ETNPPL
  Gene Name: ethanolamine-phosphate phospho-lyase
  Uniprot ID: Q8TBG4
  ENSP ID: ENSP00000296486
MCELYSKRDTLGLRKKHIGPSCKVFFASDPIKIVRAQRQYMFDENGEQYLDCINNVAHVGHCHPGVVKAALKQMELLNTNSRFLHDNIVEYAKRLSATLPEKLSVCYFTNSGSEANDLALRLARQFRGHQDVITLDHAYHGHLSSLIEISPYKFQKGKDVKKEFVHVAPTPDTYRGKYREDHADSASAYADEVKKIIEDAHNSGRKIAAFIAESMQSCGGQIIPPAGYFQKVAEYVHGAGGVFIADEVQVGFGRVGKHFWSFQMYGEDFVPDIVTMGKPMGNGHPVACVVTTKEIAEAFSSSGMEYFNTYGGNPVSCAVGLAVLDIIENEDLQGNAKRVGNYLTELLKKQKAKHTLIGDIRGIGLFIGIDLVKDHLKRTPATAEAQHIIYKMKEKRVLLSADGPHRNVLKIKPPMCFTEEDAKFMVDQLDRILTVLEEAMGTKTESVTSENTPCKTKMLKEAHIELLRDSTTDSKENPSRKRNGMCTDTHSLLSKRLKT

SEQ ID NO: 28304 - protein, 493 aa, Homo sapiens
  Payload ID: 5560
  Gene Symbol: ETNPPL
  Gene Name: ethanolamine-phosphate phospho-lyase
  Uniprot ID: Q8TBG4
  ENSP ID: ENSP00000392269
MCELYSKRDTLGLRKKHIGPSCKVFFASDPIKIVRAQRQYMFDENGEQYLDCINNVAHGVVKAALKQMELLNTNSRFLHDNIVEYAKRLSATLPEKLSVCYFTNSGSEANDLALRLARQFRGHQDVITLDHAYHGHLSSLIEISPYKFQKGKDVKKEFVHVAPTPDTYRGKYREDHADSASAYADEVKKIIEDAHNSGRKIAAFIAESMQSCGGQIIPPAGYFQKVAEYVHGAGGVFIADEVQVGFGRVGKHFWSFQMYGEDFVPDIVTMGKPMGNGHPVACVVTTKEIAEAFSSSGMEYFNTYGGNPVSCAVGLAVLDIIENEDLQGNAKRVGNYLTELLKKQKAKHTLIGDIRGIGLFIGIDLVKDHLKRTPATAEAQHIIYKMKEKRVLLSADGPHRNVLKIKPPMCFTEEDAKFMVDQLDRILTVLEEAMGTKTESVTSENTPCKTKMLKEAHIELLRDSTTDSKENPSRKRNGMCTDTHSLLSKRLKT

SEQ ID NO: 28305 - protein, 60 aa, Homo sapiens
  Payload ID: 5560
  Gene Symbol: ETNPPL
  Gene Name: ethanolamine-phosphate phospho-lyase
  ENSP ID: ENSP00000421217
MELLNTNSRFLHDNIVEYAKRLSATLPEKLSVCYFTNSGSEANDLALRLARQFRGHQDVI

SEQ ID NO: 28306 - protein, 64 aa, Homo sapiens
  Payload ID: 5560
  Gene Symbol: ETNPPL
  Gene Name: ethanolamine-phosphate phospho-lyase
  ENSP ID: ENSP00000422050
MCELYSKRDTLGLRKKHIGPSCKVFFASDPIKIVRAQRQYMFDENGEQYLDCINNVAHDPKPTT

SEQ ID NO: 28307 - protein, 459 aa, Homo sapiens
  Payload ID: 5560
  Gene Symbol: ETNPPL
  Gene Name: ethanolamine-phosphate phospho-lyase
  ENSP ID: ENSP00000423240
MFDENGEQYLDCINNVAHVGHCHPGVVKAALKQMELLNTNSRFLHDNIVEYAKRLSATLPEKLSVCYFTNSGSEANDLALRLARQFRGHQDVITLDHAYHGHLSSLIEISPYKFQKGKDVKKEFVHVAPTPDTYRGKYREDHADSASAYADEVKKIIEDAHNSGRKIAAFIAESMQSCGGQIIPPAGYFQKVAEYVHGAGGVFIADEVQVGFGRVGKHFWSFQMYGEDFVPDIVTMGKPMGNGHPVACVVTTKEIAEAFSSSGMEYFNTYGGNPVSCAVGLAVLDIIENEDLQGNAKRVGNYLTELLKKQKAKHTLIGDIRGIGLFIGIDLVKDHLKRTPATAEAQHIIYKMKEKRVLLSADGPHRNVLKIKPPMCFTEEDAKFMVDQLDRILTVLEEAMGTKTESVTSENTPCKTKMLKEAHIELLRDSTTDSKENPSRKRNGMCTDTHSLLSKRLKT

SEQ ID NO: 28308 - protein, 70 aa, Homo sapiens
  Payload ID: 5560
  Gene Symbol: ETNPPL
  Gene Name: ethanolamine-phosphate phospho-lyase
  ENSP ID: ENSP00000426525
MGHCHPGVVKAALKQMELLNTNSRFLHDNIVEYAKRLSATLPEKLSVCYFTNSGSEANDLALRLARQFRG

SEQ ID NO: 28309 - protein, 49 aa, Homo sapiens
  Payload ID: 5560
  Gene Symbol: ETNPPL
  Gene Name: ethanolamine-phosphate phospho-lyase
  ENSP ID: ENSP00000426871
MCELYSKRDTLGLRKKHIGGTLSPRSGQSCPETDGTAKYKFSIPPRQHC

SEQ ID NO: 28310 - protein, 441 aa, Homo sapiens
  Payload ID: 5560
  Gene Symbol: ETNPPL
  Gene Name: ethanolamine-phosphate phospho-lyase
  Uniprot ID: Q8TBG4
  ENSP ID: ENSP00000427065
MGHCHPGVVKAALKQMELLNTNSRFLHDNIVEYAKRLSATLPEKLSVCYFTNSGSEANDLALRLARQFRGHQDVITLDHAYHGHLSSLIEISPYKFQKGKDVKKEFVHVAPTPDTYRGKYREDHADSASAYADEVKKIIEDAHNSGRKIAAFIAESMQSCGGQIIPPAGYFQKVAEYVHGAGGVFIADEVQVGFGRVGKHFWSFQMYGEDFVPDIVTMGKPMGNGHPVACVVTTKEIAEAFSSSGMEYFNTYGGNPVSCAVGLAVLDIIENEDLQGNAKRVGNYLTELLKKQKAKHTLIGDIRGIGLFIGIDLVKDHLKRTPATAEAQHIIYKMKEKRVLLSADGPHRNVLKIKPPMCFTEEDAKFMVDQLDRILTVLEEAMGTKTESVTSENTPCKTKMLKEAHIELLRDSTTDSKENPSRKRNGMCTDTHSLLSKRLKT

SEQ ID NO: 28311 - protein, 397 aa, Homo sapiens
  Payload ID: 5561
  Gene Symbol: EPT1
  Gene Name: ethanolaminephosphotransferase 1
  Uniprot ID: Q9C0D9
  ENSP ID: ENSP00000260585
  MOD_RES (387)..(387): Selenocysteine
MAGYEYVSPEQLAGFDKYKYSAVDTNPLSLYVMHPFWNTIVKVFPTWLAPNLITFSGFLLVVFNFLLMAYFDPDFYASAPGHKHVPDWVWIVVGILNFVAYTLDGVDGKQARRTNSSTPLGELFDHGLDSWSCVYFVVTVYSIFGRGSTGVSVFVLYLLLWVVLFSFILSHWEKYNTGILFLPWGYDISQVTISFVYIVTAVVGVEAWYEPFLFNFLYRDLFTAMIIGCALCVTLPMSLLNFFRSYKNNTLKLNSVYEAMVPLFSPCLLFILSTAWILWSPSDILELHPRVFYFMVGTAFANSTCQLIVCQMSSTRCPTLNWLLVPLFLVVLVVNLGVASYVESILLYTLTTAFTLAHIHYGVRVVKQLSSHFQIYPFSLRKPNSDXLGMEEKNIGL

SEQ ID NO: 28312 - protein, 180 aa, Homo sapiens
  Payload ID: 5561
  Gene Symbol: EPT1
  Gene Name: ethanolaminephosphotransferase 1
  ENSP ID: ENSP00000391804
MAGYEYVSPEQLAGFDKYKYSAVDTNPLSLYVMHPFWNTIVKVFPTWLAPNLITFSGFLLVVFNFLLMAYFDPDFYASAPGHKHVPDWVWIVVGILNFVAYTLGCALCVTLPMSLLNFFRSYKNNTLKLNSVYEAMVPLFSPCLLFILSTAWILWSPSDILELHPRVFYFMVGTAFANST

SEQ ID NO: 28313 - protein, 118 aa, Homo sapiens
  Payload ID: 5561
  Gene Symbol: EPT1
  Gene Name: ethanolaminephosphotransferase 1
  ENSP ID: ENSP00000415280
MHPFWNTIVKVFPTWLAPNLITFSGFLLVVFNFLLMAYFDPDFYASAPGHKHVPDWVWIVVGILNFVAYTLDGVDGKQARRTNSSTPLGELFDHGLDSWSCVYFVVTVYSIFGRGSTG

SEQ ID NO: 28314 - protein, 396 aa, Homo sapiens
  Payload ID: 5561
  Gene Symbol: EPT1
  Gene Name: ethanolaminephosphotransferase 1
  ENSP ID: ENSP00000479973
MAGYEYVSPEQLAGFDKYKYSAVDTNPLSLYVMHPFWNTIVKVFPTWLAPNLITFSGFLLVVFNFLLMAYFDPDFYASAPGHKHVPDWVWIVVGILNFVAYTLDGVDGKQARRTNSSTPLGELFDHGLDSWSCVYFVVTVYSIFGRGSTGVSVFVLYLLLWVVLFSFILSHWEKYNTGILFLPWGYDISQVTISFVYIVTAVVGVEAWYEPFLFNFLYRDLFTAMIIGCALCVTLPMSLLNFFRSYKNNTLKLNSVYEAMVPLFSPCLLFILSTAWILWSPSDILELHPRVFYFMVGTAFANSTCQLIVCQMSSTRCPTLNWLLVPLFLVVLVVNLGVASYVESILLYTLTTAFTLAHIHYGVRVVKQLSSHFQIYPFSLRKPNSDLGMEEKNIGL

SEQ ID NO: 28315 - protein, 254 aa, Homo sapiens
  Payload ID: 5562
  Gene Symbol: ETHE1
  Gene Name: ethylmalonic encephalopathy 1
  Uniprot ID: O95571
  ENSP ID: ENSP00000292147
MAEAVLRVARRQLSQRGGSGAPILLRQMFEPVSCTFTYLLGDRESREAVLIDPVLETAPRDAQLIKELGLRLLYAVNTHCHADHITGSGLLRSLLPGCQSVISRLSGAQADLHIEDGDSIRFGRFALETRASPGHTPGCVTFVLNDHSMAFTGDALLIRGCGRTDFQQGCAKTLYHSVHEKIFTLPGDCLIYPAHDYHGFTVSTVEEERTLNPRLTLSCEEFVKIMGNLNLPKPQQIDFAVPANMRCGVQTPTA

SEQ ID NO: 28316 - protein, 51 aa, Homo sapiens
  Payload ID: 5562
  Gene Symbol: ETHE1
  Gene Name: ethylmalonic encephalopathy 1
  ENSP ID: ENSP00000468964
MAEAVLRVARRQLSQRGGSGAPILLRQVRVAGPRRGLLGTRRQQGRNSGVS

SEQ ID NO: 28317 - protein, 260 aa, Homo sapiens
  Payload ID: 5562
  Gene Symbol: ETHE1
  Gene Name: ethylmalonic encephalopathy 1
  ENSP ID: ENSP00000469037
MAEAVLRVARRQLSQRGGSGAPILLRQMFEPVSCTFTYLLGDRESREAVLIDPVLETAPRDAQLIKELGLRLLYAVNTHCHADHITGSGLLRSLLPGCQSVISRLSGAQADLHIEDGDSIRFGRFALETRASPGHTPGCVTFVLNDHSMAFTGDALLIRGCGRTDFQQGCAKTLYHSVHEKIFTLPGDCLIYPAHDYHGFTVSTVEEERTLNPRLTLSCEEFVKIMGNLNLPKPQQIGEQLGTWTSGSERGGAGVLDSWV

SEQ ID NO: 28318 - protein, 95 aa, Homo sapiens
  Payload ID: 5562
  Gene Symbol: ETHE1
  Gene Name: ethylmalonic encephalopathy 1
  ENSP ID: ENSP00000469219
MAEAVLRVARRQLSQRGGSGAPILLRQMFEPVSCTFTYLLGDRESREAVLIDPVLETAPRDAQLIKELGLRLLYAGVGDQGQPWPHPRLCHLRPE

SEQ ID NO: 28319 - protein, 95 aa, Homo sapiens; identical to SEQ ID NO: 28318
  Payload ID: 5562
  Gene Symbol: ETHE1
  Gene Name: ethylmalonic encephalopathy 1
  ENSP ID: ENSP00000469652

SEQ ID NO: 28320 - protein, 145 aa, Homo sapiens
  Payload ID: 5563
  Gene Symbol: ECHDC1
  Gene Name: ethylmalonyl-CoA decarboxylase 1
  Uniprot ID: Q9NTX5
  ENSP ID: ENSP00000357272
MAKSLLKTASLSGRTKLLHQTGLSLYSTSHGFYEEEVKKTLQQFPGGSIDLQKEDNGIGILTLNNPSRMNAFSGVMMLQLLEKVIELENWTEGKGLIVRGAKNTFSSGSDLNAVKSLGTPETSFNKCCAGSRLGIGWRSRIYYSM

SEQ ID NO: 28321 - protein, 145 aa, Homo sapiens; identical to SEQ ID NO: 28320
  Payload ID: 5563
  Gene Symbol: ECHDC1
  Gene Name: ethylmalonyl-CoA decarboxylase 1
  Uniprot ID: Q9NTX5
  ENSP ID: ENSP00000357274

SEQ ID NO: 28322 - protein, 125 aa, Homo sapiens
  Payload ID: 5563
  Gene Symbol: ECHDC1
  Gene Name: ethylmalonyl-CoA decarboxylase 1
  ENSP ID: ENSP00000357278
MAKSLLKTASLSGRTKLLHQTGLSLYSTSHGFYEEEVKKTLQQFPGGSIDLQKEDNGIGILTLNNPSRMNAFSGVMMLQLLEKVIELENWTEGKGLIVRGAKNTFSSGSDLNAVKSLGTPEANFL

SEQ ID NO: 28323 - protein, 76 aa, Homo sapiens
  Payload ID: 5563
  Gene Symbol: ECHDC1
  Gene Name: ethylmalonyl-CoA decarboxylase 1
  ENSP ID: ENSP00000396096
  MOD_RES (1)..(1): Any amino acid
XMLQLLEKVIELENWTEGKGLIVRGAKNTFSSGSDLNAVKSLGTPEDGMAVCMFMQNTLTRFMSRMCGEVVCIQRR

SEQ ID NO: 28324 - protein, 255 aa, Homo sapiens
  Payload ID: 5563
  Gene Symbol: ECHDC1
  Gene Name: ethylmalonyl-CoA decarboxylase 1
  ENSP ID: ENSP00000399233
  MOD_RES (1)..(1): Any amino acid
XTSHGFYEEEVKKTLQQFPGGSIDLQKEDNGIGILTLNNPSRMNAFSGVMMLQLLEKVIELENWTEGKGLIVRGAKNTFSSGSDLNAVKSLGTPEESCRWNTEFLYTLHPVSPFINILYSYGWNGRMHVHAKHLNKIYEVKKQRGKILLGLSRLPLISVALVQGWALGGGAEFTTACDFRLMTPESKIRFVHKEMGIIPSWGGTTRLVEIIGSRQALKVLSGALKLDSKNALNIGMVEEVLQSSDETKSLEEAQE

SEQ ID NO: 28325 - protein, 301 aa, Homo sapiens
  Payload ID: 5563
  Gene Symbol: ECHDC1
  Gene Name: ethylmalonyl-CoA decarboxylase 1
  Uniprot ID: Q9NTX5
  ENSP ID: ENSP00000401751
MAKSLLKTASLSGRTKLLHQTGLSLYSTSHGFYEEEVKKTLQQFPGGSIDLQKEDNGIGILTLNNPSRMNAFSGVMMLQLLEKVIELENWTEGKGLIVRGAKNTFSSGSDLNAVKSLGTPEDGMAVCMFMQNTLTRFMRLPLISVALVQGWALGGGAEFTTACDFRLMTPESKIRFVHKEMGIIPSWGGTTRLVEIIGSRQALKVLSGALKLDSKNALNIGMVEEVLQSSDETKSLEEAQEWLKQFIQGPPEVIRALKKSVCSGRELYLEEALQNERDLLGTVWGGPANLEAIAKKGKFNK

SEQ ID NO: 28326 - protein, 301 aa, Homo sapiens; identical to SEQ ID NO: 28325
  Payload ID: 5563
  Gene Symbol: ECHDC1
  Gene Name: ethylmalonyl-CoA decarboxylase 1
  Uniprot ID: Q9NTX5
  ENSP ID: ENSP00000402492

SEQ ID NO: 28327 - protein, 226 aa, Homo sapiens
  Payload ID: 5563
  Gene Symbol: ECHDC1
  Gene Name: ethylmalonyl-CoA decarboxylase 1
  Uniprot ID: Q9NTX5
  ENSP ID: ENSP00000404866
MMLQLLEKVIELENWTEGKGLIVRGAKNTFSSGSDLNAVKSLGTPEDGMAVCMFMQNTLTRFMRLPLISVALVQGWALGGGAEFTTACDFRLMTPESKIRFVHKEMGIIPSWGGTTRLVEIIGSRQALKVLSGALKLDSKNALNIGMVEEVLQSSDETKSLEEAQEWLKQFIQGPPEVIRALKKSVCSGRELYLEEALQNERDLLGTVWGGPANLEAIAKKGKFNK

SEQ ID NO: 28328 - protein, 125 aa, Homo sapiens
  Payload ID: 5563
  Gene Symbol: ECHDC1
  Gene Name: ethylmalonyl-CoA decarboxylase 1
  ENSP ID: ENSP00000420711
MAKSLLKTASLSGRTKLLHQTGLSLYSTSHGFYEEEVKKTLQQFPGGSIDLQKEDNGIGILTLNNPSRMNAFSGVMMLQLLEKVIELENWTEGKGLIVRGAKNTFSSGSDLNAVKSLGTPEGDFL

SEQ ID NO: 28329 - protein, 100 aa, Homo sapiens
  Payload ID: 5563
  Gene Symbol: ECHDC1
  Gene Name: ethylmalonyl-CoA decarboxylase 1
  ENSP ID: ENSP00000432265
  MOD_RES (1)..(1): Any amino acid
XTPEVKKQRGKILLGLSRLPLISVALVQGWALGGGAEFTTACDFRLMTPESKIRFVHKEMGIIPSWGGTTRLVEIIGSRQALKVLSGALKLDSKNALNIG

SEQ ID NO: 28330 - protein, 34 aa, Homo sapiens
  Payload ID: 5563
  Gene Symbol: ECHDC1
  Gene Name: ethylmalonyl-CoA decarboxylase 1
  ENSP ID: ENSP00000433015
  MOD_RES (1)..(1): Any amino acid
XFMRLPLISVALVQGWALGGGAEFTTACDFSFRH

SEQ ID NO: 28331 - protein, 83 aa, Homo sapiens
  Payload ID: 5563
  Gene Symbol: ECHDC1
  Gene Name: ethylmalonyl-CoA decarboxylase 1
  ENSP ID: ENSP00000433874
MAKSLLKTASLSGRTKLLHQTGLSLYSTSHGFYEEEVKKTLQQFPGGSIDLQKEDNGIGILTLNNPSRMNAFSEFREISLYQC

SEQ ID NO: 28332 - protein, 135 aa, Homo sapiens
  Payload ID: 5563
  Gene Symbol: ECHDC1
  Gene Name: ethylmalonyl-CoA decarboxylase 1
  ENSP ID: ENSP00000434143
MAKSLLKTASLSGRTKLLHQTGLSLYSTSHGFYEEEVKKTLQQFPGGSIDLQKEDNGIGILTLNNPSRMNAFSGVMMLQLLEKVIELENWTEGKGLIVRGAKNTFSSGSDLNAVKSLGTPEDGMAVCMFMQNTLT

SEQ ID NO: 28333 - protein, 301 aa, Homo sapiens; identical to SEQ ID NO: 28325
  Payload ID: 5563
  Gene Symbol: ECHDC1
  Gene Name: ethylmalonyl-CoA decarboxylase 1
  Uniprot ID: Q9NTX5
  ENSP ID: ENSP00000434908

SEQ ID NO: 28334 - protein, 179 aa, Homo sapiens
  Payload ID: 5563
  Gene Symbol: ECHDC1
  Gene Name: ethylmalonyl-CoA decarboxylase 1
  ENSP ID: ENSP00000435068
MAKSLLKTASLSGRTKLLHQTGLSLYSTSHGFYEEEVKKTLQQFPGGSIDLQKEDNGIGILTLNNPSRMNAFSGVMMLQLLEKVIELENWTEGKGLIVRGAKNTFSSGSDLNAVKSLGTPEESCRWNTEFLYTLHPVSPFINILYSYGWNGRMHVHAKHLNKIYETSFNKCCAGSRLGI

SEQ ID NO: 28335 - protein, 151 aa, Homo sapiens
  Payload ID: 5563
  Gene Symbol: ECHDC1
  Gene Name: ethylmalonyl-CoA decarboxylase 1
  ENSP ID: ENSP00000435502
MAKSLLKTASLSGRTKLLHQTGLSLYSTSHGFYEEEVKKTLQQFPGGSIDLQKEDNGIGILTLNNPSRMNAFSGVMMLQLLEKVIELENWTEGKGLIVRGAKNTFSSGSDLNAVKSLGTPEDGMAVCMFMQNTLTRFMRLPLISVALVQGW

SEQ ID NO: 28336 - protein, 70 aa, Homo sapiens
  Payload ID: 5563
  Gene Symbol: ECHDC1
  Gene Name: ethylmalonyl-CoA decarboxylase 1
  Uniprot ID: Q9NTX5
  ENSP ID: ENSP00000436109
MMLQLLEKVIELENWTEGKGLIVRGAKNTFSSGSDLNAVKSLGTPETSFNKCCAGSRLGIGWRSRIYYSM

SEQ ID NO: 28337 - protein, 307 aa, Homo sapiens
  Payload ID: 5563
  Gene Symbol: ECHDC1
  Gene Name: ethylmalonyl-CoA decarboxylase 1
  Uniprot ID: Q9NTX5
  ENSP ID: ENSP00000436585
MALKQEMAKSLLKTASLSGRTKLLHQTGLSLYSTSHGFYEEEVKKTLQQFPGGSIDLQKEDNGIGILTLNNPSRMNAFSGVMMLQLLEKVIELENWTEGKGLIVRGAKNTFSSGSDLNAVKSLGTPEDGMAVCMFMQNTLTRFMRLPLISVALVQGWALGGGAEFTTACDFRLMTPESKIRFVHKEMGIIPSWGGTTRLVEIIGSRQALKVLSGALKLDSKNALNIGMVEEVLQSSDETKSLEEAQEWLKQFIQGPPEVIRALKKSVCSGRELYLEEALQNERDLLGTVWGGPANLEAIAKKGKFNK

SEQ ID NO: 28338 - protein, 139 aa, Homo sapiens
  Payload ID: 5563
  Gene Symbol: ECHDC1
  Gene Name: ethylmalonyl-CoA decarboxylase 1
  ENSP ID: ENSP00000436703
MAKSLLKTASLSGRTKLLHQTGLSLYSTSHGFYEEEVKKTLQQFPGGSIDLQKEDNGIGILTLNNPSRMNAFSGVMMLQLLEKVIELENWTEGKGLIVRGAKNTFSSGSDLNAVKSLGTPEDGMAVCMFMQNTLTRFMR

SEQ ID NO: 28339 - protein, 340 aa, Homo sapiens
  Payload ID: 5564
  Gene Symbol: EI24
  Gene Name: etoposide induced 2.4
  Uniprot ID: O14681
  ENSP ID: ENSP00000278903
MADSVKTFLQDLARGIKDSIWGICTISKLDARIQQKREEQRRRRASSVLAQRRAQSIERKQESEPRIVSRIFQCCAWNGGVFWFSLLLFYRVFIPVLQSVTARIIGDPSLHGDVWSWLEFFLTSIFSALWVLPLFVLSKVVNAIWFQDIADLAFEVSGRKPHPFPSVSKIIADMLFNLLLQALFLIQGMFVSLFPIHLVGQLVSLLHMSLLYSLYCFEYRWFNKGIEMHQRLSNIERNWPYYFGFGLPLAFLTAMQSSYIISGCLFSILFPLFIISANEAKTPGKAYLFQLRLFSLVVFLSNRLFHKTVYLQSALSSSTSAEKFPSPHPSPAKLKATAGH

SEQ ID NO: 28340 - protein, 262 aa, Homo sapiens
  Payload ID: 5564
  Gene Symbol: EI24
  Gene Name: etoposide induced 2.4
  ENSP ID: ENSP00000431633
MADSVKTFLQDLARGIKDSIWGICTISKLDARIQQKREEQRRRRASSVLAQRRAQSIERKQESEPRIVSRIFQCCAWNGGVFWFSLLLFYRVFIPVLQSVTARIIGDPSLHGDVWSWLEFFLTSIFSALWVLPLFVLSKVVNAIWFQDIADLAFEVSGRKPHPFPSVSKIIADMLFNLLLQALFLIQGMFVSLFPIHLVGQLVSLLHMSLLYSLYCFEYRWFNKVAAFSLSSFLYSLSAPMKQRPLAKHISSSCASSPWWSS

SEQ ID NO: 28341 - protein, 125 aa, Homo sapiens
  Payload ID: 5564
  Gene Symbol: EI24
  Gene Name: etoposide induced 2.4
  ENSP ID: ENSP00000433376
MADSVKTFLQDLARGIKDSIWGICTISKLDARIQQKREEQRRRRASSVLAQRRAQSIERKQESEPRIVSRIFQCCAWNGGVFWFSLLLFYRVFIPVLQSVTARIIGDPSLHGDVWSWLEFFLTSI

SEQ ID NO: 28342 - protein, 187 aa, Homo sapiens
  Payload ID: 5564
  Gene Symbol: EI24
  Gene Name: etoposide induced 2.4
  ENSP ID: ENSP00000435034
MADSVKTFLQDLARGIKDSIWGICTISKLDARIQQKREEQRRRRASSVLAQRRAQSIERKQESEPRIVSRIFQCCAWNGGVFWFSLLLFYRVFIPVLQSVTARIIGDPSLHGDVWSWLEFFLTSIFSALWVLPLFVLSKVVNAIWFQDIADLAFEVSGRKPHPFPSVSKIIADMLFNLLLQALFLIQ

SEQ ID NO: 28343 - protein, 91 aa, Homo sapiens
  Payload ID: 5564
  Gene Symbol: EI24
  Gene Name: etoposide induced 2.4
  ENSP ID: ENSP00000435225
MADSVKTFLQDLARLDARIQQKREEQRRRRASSVLAQRRAQSIERKQESEPRIVSRIFQCCAWNGGVFWFSLLLFYRVFIPVLQSVTARII

SEQ ID NO: 28344 - protein, 217 aa, Homo sapiens
  Payload ID: 5564
  Gene Symbol: EI24
  Gene Name: etoposide induced 2.4
  ENSP ID: ENSP00000435923
MADSVKTFLQDLARGIKDSIWGICTISKLDARIQQKREEQRRRRASSVLAQRRAQSIERKQERRILALSPSCHLRLPWCNLSLLQPLPPRSKQFFCLSEPAGWKYSEPRIVSRIFQCCAWNGGVFWFSLLLFYRVFIPVLQSVTARIIGDPSLHGDVWSWLEFFLTSIFSALWVLPLFVLSKVVNAIWFQDIADLAFEVSGRKPHPFPSVSKIIADM

SEQ ID NO: 28345 - protein, 14 aa, Homo sapiens
  Payload ID: 5564
  Gene Symbol: EI24
  Gene Name: etoposide induced 2.4
  ENSP ID: ENSP00000436130
MADSVKTFLQDLAR

SEQ ID NO: 28346 - protein, 167 aa, Homo sapiens
  Payload ID: 5564
  Gene Symbol: EI24
  Gene Name: etoposide induced 2.4
  ENSP ID: ENSP00000477849
MLFNLLLQALFLIQGMFVSLFPIHLVGQLVSLLHMSLLYSLYCFEYRWFNKGIEMHQRLSNIERNWPYYFGFGLPLAFLTAMQSSYIISGCLFSILFPLFIISANEAKTPGKAYLFQLRLFSLVVFLSNRLFHKTVYLQSALSSSTSAEKFPSPHPSPAKLKATAGH

SEQ ID NO: 28347 - protein, 41 aa, Homo sapiens
  Payload ID: 5564
  Gene Symbol: EI24
  Gene Name: etoposide induced 2.4
  ENSP ID: ENSP00000479171
MADSVKTFLQDLARMLESSKRERSSVEEGQVVSWHREEPRV

SEQ ID NO: 28348 - protein, 326 aa, Homo sapiens
  Payload ID: 5564
  Gene Symbol: EI24
  Gene Name: etoposide induced 2.4
  Uniprot ID: O14681
  ENSP ID: ENSP00000479943
MADSVKTFLQDLARLDARIQQKREEQRRRRASSVLAQRRAQSIERKQESEPRIVSRIFQCCAWNGGVFWFSLLLFYRVFIPVLQSVTARIIGDPSLHGDVWSWLEFFLTSIFSALWVLPLFVLSKVVNAIWFQDIADLAFEVSGRKPHPFPSVSKIIADMLFNLLLQALFLIQGMFVSLFPIHLVGQLVSLLHMSLLYSLYCFEYRWFNKGIEMHQRLSNIERNWPYYFGFGLPLAFLTAMQSSYIISGCLFSILFPLFIISANEAKTPGKAYLFQLRLFSLVVFLSNRLFHKTVYLQSALSSSTSAEKFPSPHPSPAKLKATAGH

SEQ ID NO: 28349 - protein, 167 aa, Homo sapiens; identical to SEQ ID NO: 28346
  Payload ID: 5564
  Gene Symbol: EI24
  Gene Name: etoposide induced 2.4
  ENSP ID: ENSP00000480094

SEQ ID NO: 28350 - protein, 340 aa, Homo sapiens; identical to SEQ ID NO: 28339
  Payload ID: 5564
  Gene Symbol: EI24
  Gene Name: etoposide induced 2.4
  Uniprot ID: O14681
  ENSP ID: ENSP00000484510

SEQ ID NO: 28351 - protein, 300 aa, Homo sapiens
  Payload ID: 5565
  Gene Symbol: EHF
  Gene Name: ets homologous factor
  Uniprot ID: Q9NZC4
  ENSP ID: ENSP00000257831
MILEGGGVMNLNPGNNLLHQPPAWTDSYSTCNVSSGFFGGQWHEIHPQYWTKYQVWEWLQHLLDTNQLDANCIPFQEFDINGEHLCSMSLQEFTRAAGTAGQLLYSNLQHLKWNGQCSSDLFQSTHNVIVKTEQTEPSIMNTWKDENYLYDTNYGSTVDLLDSKTFCRAQISMTTTSHLPVAESPDMKKEQDPPAKCHTKKHNPRGTHLWEFIRDILLNPDKNPGLIKWEDRSEGVFRFLKSEAVAQLWGKKKNNSSMTYEKLSRAMRYYYKREILERVDGRRLVYKFGKNARGWRENEN

SEQ ID NO: 28352 - protein, 277 aa, Homo sapiens
  Payload ID: 5565
  Gene Symbol: EHF
  Gene Name: ets homologous factor
  Uniprot ID: Q9NZC4
  ENSP ID: ENSP00000399733
MILEGGGVMNLNPGNNLLHQPPAWTDSYSTCNVSSGFFGGQWHEIHPQYWTKYQVWEWLQHLLDTNQLDANCIPFQEFDINGEHLCSMSLQEFTRAAGTAGQLLYSNLQHLKWNGQCSSDLFQSTHNVIVKTEQTEPSIMNTWKDENYLYDTNYGSTVAESPDMKKEQDPPAKCHTKKHNPRGTHLWEFIRDILLNPDKNPGLIKWEDRSEGVFRFLKSEAVAQLWGKKKNNSSMTYEKLSRAMRYYYKREILERVDGRRLVYKFGKNARGWRENEN

SEQ ID NO: 28353 - protein, 158 aa, Homo sapiens
  Payload ID: 5565
  Gene Symbol: EHF
  Gene Name: ets homologous factor
  ENSP ID: ENSP00000432460
MILEGGGVMNLNPGNNLLHQPPAWTDSYSTCNVSSGFFGGQWHEIHPQYWTKYQVWEWLQHLLDTNQLDANCIPFQEFDINGEHLCSMSLQEFTRAAGTAGQLLYSNLQHLKWNGQCSSDLFQSTHNVIVKTEQTEPSIMNTWKDENYLYDTNYGSTV

SEQ ID NO: 28354 - protein, 166 aa, Homo sapiens
  Payload ID: 5565
  Gene Symbol: EHF
  Gene Name: ets homologous factor
  ENSP ID: ENSP00000432905
MILEGGGVMNLNPGNNLLHQPPAWTDSYSTCNVSSGFFGGQWHEIHPQYWTKYQVWEWLQHLLDTNQLDANCIPFQEFDINGEHLCSMSLQEFTRAAGTAGQLLYSNLQHLKWNGQCSSDLFQSTHNVIVKTEQTEPSIMNTWKDENYLYDTNYGSTVAESPDMKK

SEQ ID NO: 28355 - protein, 300 aa, Homo sapiens; identical to SEQ ID NO: 28351
  Payload ID: 5565
  Gene Symbol: EHF
  Gene Name: ets homologous factor
  Uniprot ID: Q9NZC4
  ENSP ID: ENSP00000433508

SEQ ID NO: 28356 - protein, 173 aa, Homo sapiens
  Payload ID: 5565
  Gene Symbol: EHF
  Gene Name: ets homologous factor
  ENSP ID: ENSP00000434395
MILEGGGVMNLNPGNNLLHQPPAWTDSYSTCNVSSGFFGGQWHEIHPQYWTKYQVWEWLQHLLDTNQLDANCIPFQEFDINGEHLCSMSLQEFTRAAGTAGQLLYSNLQHLKWNGQCSSDLFQSTHNVIVKTEQTEPSIMNTWKDENYLYDTNYGSTVDLLDSKTFCRAQISM

SEQ ID NO: 28357 - protein, 322 aa, Homo sapiens
  Payload ID: 5565
  Gene Symbol: EHF
  Gene Name: ets homologous factor
  Uniprot ID: Q9NZC4
  ENSP ID: ENSP00000435835
MGLPERRGLVLLLSLAEILFKIMILEGGGVMNLNPGNNLLHQPPAWTDSYSTCNVSSGFFGGQWHEIHPQYWTKYQVWEWLQHLLDTNQLDANCIPFQEFDINGEHLCSMSLQEFTRAAGTAGQLLYSNLQHLKWNGQCSSDLFQSTHNVIVKTEQTEPSIMNTWKDENYLYDTNYGSTVDLLDSKTFCRAQISMTTTSHLPVAESPDMKKEQDPPAKCHTKKHNPRGTHLWEFIRDILLNPDKNPGLIKWEDRSEGVFRFLKSEAVAQLWGKKKNNSSMTYEKLSRAMRYYYKREILERVDGRRLVYKFGKNARGWRENEN

SEQ ID NO: 28358 - protein, 300 aa, Homo sapiens; identical to SEQ ID NO: 28351
  Payload ID: 5565
  Gene Symbol: EHF
  Gene Name: ets homologous factor
  Uniprot ID: Q9NZC4
  ENSP ID: ENSP00000435837

SEQ ID NO: 28359 - protein, 126 aa, Homo sapiens
  Payload ID: 5565
  Gene Symbol: EHF
  Gene Name: ets homologous factor
  ENSP ID: ENSP00000436158
MILEGGGVMNLNPGNNLLHQPPAWTDSYSTCNVSSGFFGGQWHEIHPQYWTKYQVWEWLQHLLDTNQLDANCIPFQEFDINGEHLCSMSLQEFTRAAGTAGQLLYSNLQHLKWNGDSLFLCLSLPC

SEQ ID NO: 28360 - protein, 126 aa, Homo sapiens; identical to SEQ ID NO: 28359
  Payload ID: 5565
  Gene Symbol: EHF
  Gene Name: ets homologous factor
  ENSP ID: ENSP00000436357

SEQ ID NO: 28361 - protein, 459 aa, Homo sapiens
  Payload ID: 5566
  Gene Symbol: ETV1
  Gene Name: ets variant 1
  Uniprot ID: P50549
  ENSP ID: ENSP00000242066
MDGFYDQQVPYMVTNSQRGRNCNEKPTNVRKRKFINRDLAHDSEELFQDLSQLQETWLAEVAFHGLPLKIKKEPHSPCSEISSACSQEQPFKFSYGEKCLYNVSAYDQKPQVGMRPSNPPTPSSTPVSPLHHASPNSTHTPKPDRAFPAHLPPSQSIPDSSYPMDHRFRRQLSEPCNSFPPLPTMPREGRPMYQRQMSEPNIPFPPQGFKQEYHDPVYEHNTMVGSAASQSFPPPLMIKQEPRDFAYDSEVPSCHSIYMRQEGFLAHPSRTEGCMFEKGPRQFYDDTCVVPEKFDGDIKQEPGMYREGPTYQRRGSLQLWQFLVALLDDPSNSHFIAWTGRGMEFKLIEPEEVARRWGIQKNRPAMNYDKLSRSLRYYYEKGIMQKVAGERYVYKFVCDPEALFSMAFPDNQRPLLKTDMERHINEEDTVPLSHFDESMAYMPEGGCCNPHPYNEGYVY

SEQ ID NO: 28362 - protein, 374 aa, Homo sapiens
  Payload ID: 5566
  Gene Symbol: ETV1
  Gene Name: ets variant 1
  Uniprot ID: P50549
  ENSP ID: ENSP00000382293
MLQDLSASVFFPPCSQHRTLAQVPDNDEQFVPDYQAESLAFHGLPLKIKKEPHSPCSEISSACSQEQPFKFSYGEKCLYNVRFRRQLSEPCNSFPPLPTMPREGRPMYQRQMSEPNIPFPPQGFKQEYHDPVYEHNTMVGSAASQSFPPPLMIKQEPRDFAYDSEVPSCHSIYMRQEGFLAHPSRTEGCMFEKGPRQFYDDTCVVPEKFDGDIKQEPGMYREGPTYQRRGSLQLWQFLVALLDDPSNSHFIAWTGRGMEFKLIEPEEVARRWGIQKNRPAMNYDKLSRSLRYYYEKGIMQKVAGERYVYKFVCDPEALFSMAFPDNQRPLLKTDMERHINEEDTVPLSHFDESMAYMPEGGCCNPHPYNEGYVY

SEQ ID NO: 28363 - protein, 491 aa, Homo sapiens
  Payload ID: 5566
  Gene Symbol: ETV1
  Gene Name: ets variant 1
  ENSP ID: ENSP00000384085
MSGRGDGGQQQLLHSKFLAGFVCHIEKNESQRGRNCNEKPTNVRKRKFINRDLAHDSEELFQDLSQLQETWLAEAQVPDNDEQFVPDYQAESLAFHGLPLKIKKEPHSPCSEISSACSQEQPFKFSYGEKCLYNVSAYDQKPQVGMRPSNPPTPSSTPVSPLHHASPNSTHTPKPDRAFPAHLPPSQSIPDSSYPMDHRFRRQLSEPCNSFPPLPTMPREGRPMYQRQMSEPNIPFPPQGFKQEYHDPVYEHNTMVGSAASQSFPPPLMIKQEPRDFAYDSEVPSCHSIYMRQEGFLAHPSRTEGCMFEKGPRQFYDDTCVVPEKFDGDIKQEPGMYREGPTYQRRGSLQLWQFLVALLDDPSNSHFIAWTGRGMEFKLIEPEEVARRWGIQKNRPAMNYDKLSRSLRYYYEKGIMQKVAGERYVYKFVCDPEALFSMAFPDNQRPLLKTDMERHINEEDTVPLSHFDESMAYMPEGGCCNPHPYNEGYVY

SEQ ID NO: 28364 - protein, 437 aa, Homo sapiens
  Payload ID: 5566
  Gene Symbol: ETV1
  Gene Name: ets variant 1
  Uniprot ID: P50549
  ENSP ID: ENSP00000384138
MLQDLSASVFFPPCSQHRTLAQVPDNDEQFVPDYQAESLAFHGLPLKIKKEPHSPCSEISSACSQEQPFKFSYGEKCLYNVSAYDQKPQVGMRPSNPPTPSSTPVSPLHHASPNSTHTPKPDRAFPAHLPPSQSIPDSSYPMDHRFRRQLSEPCNSFPPLPTMPREGRPMYQRQMSEPNIPFPPQGFKQEYHDPVYEHNTMVGSAASQSFPPPLMIKQEPRDFAYDSEVPSCHSIYMRQEGFLAHPSRTEGCMFEKGPRQFYDDTCVVPEKFDGDIKQEPGMYREGPTYQRRGSLQLWQFLVALLDDPSNSHFIAWTGRGMEFKLIEPEEVARRWGIQKNRPAMNYDKLSRSLRYYYEKGIMQKVAGERYVYKFVCDPEALFSMAFPDNQRPLLKTDMERHINEEDTVPLSHFDESMAYMPEGGCCNPHPYNEGYVY

SEQ ID NO: 28365 - protein, 454 aa, Homo sapiens
  Payload ID: 5566
  Gene Symbol: ETV1
  Gene Name: ets variant 1
  Uniprot ID: P50549
  ENSP ID: ENSP00000385381
MDGFYDQQVPYMVTNSQRGRNCNEKPTNVRKRKFINRDLAHDSEELFQDLSQLQETWLAEAQVPDNDEQFVPDYQAESLAFHGLPLKIKKEPHSPCSEISSACSQEQPFKFSYGEKCLYNVSAYDQKPQVGMRPSNPPTPSSTPVSPLHHASPNSTHTPKPDRAFPAHLPPSQSIPDSSYPMDHRFRRQLSEPCNSFPPLPTMPREGRPMYQRQMSEPNIPFPPQGFKQEYHDPVYEHNTMVGSAASQSFPPPLMIKQEPRDFAYDSGCMFEKGPRQFYDDTCVVPEKFDGDIKQEPGMYREGPTYQRRGSLQLWQFLVALLDDPSNSHFIAWTGRGMEFKLIEPEEVARRWGIQKNRPAMNYDKLSRSLRYYYEKGIMQKVAGERYVYKFVCDPEALFSMAFPDNQRPLLKTDMERHINEEDTVPLSHFDESMAYMPEGGCCNPHPYNEGYVY

SEQ ID NO: 28366 - protein, 477 aa, Homo sapiens
  Payload ID: 5566
  Gene Symbol: ETV1
  Gene Name: ets variant 1
  Uniprot ID: P50549
  ENSP ID: ENSP00000385551
MDGFYDQQVPYMVTNSQRGRNCNEKPTNVRKRKFINRDLAHDSEELFQDLSQLQETWLAEAQVPDNDEQFVPDYQAESLAFHGLPLKIKKEPHSPCSEISSACSQEQPFKFSYGEKCLYNVSAYDQKPQVGMRPSNPPTPSSTPVSPLHHASPNSTHTPKPDRAFPAHLPPSQSIPDSSYPMDHRFRRQLSEPCNSFPPLPTMPREGRPMYQRQMSEPNIPFPPQGFKQEYHDPVYEHNTMVGSAASQSFPPPLMIKQEPRDFAYDSEVPSCHSIYMRQEGFLAHPSRTEGCMFEKGPRQFYDDTCVVPEKFDGDIKQEPGMYREGPTYQRRGSLQLWQFLVALLDDPSNSHFIAWTGRGMEFKLIEPEEVARRWGIQKNRPAMNYDKLSRSLRYYYEKGIMQKVAGERYVYKFVCDPEALFSMAFPDNQRPLLKTDMERHINEEDTVPLSHFDESMAYMPEGGCCNPHPYNEGYVY

SEQ ID NO: 28367 - protein, 459 aa, Homo sapiens; identical to SEQ ID NO: 28361
  Payload ID: 5566
  Gene Symbol: ETV1
  Gene Name: ets variant 1
  Uniprot ID: P50549
  ENSP ID: ENSP00000385686

SEQ ID NO: 28368 - protein, 123 aa, Homo sapiens
  Payload ID: 5566
  Gene Symbol: ETV1
  Gene Name: ets variant 1
  ENSP ID: ENSP00000391043
MDGFYDQQVPYMVTNSQRGRNCNEKPTNVRKRKFINRDLAHDSEELFQDLSQLQETWLAEAQVPDNDEQFVPDYQAESLAFHGLPLKIKKEPHSPCSEISSACSQEQPFKFSYGEKCLYNVSA

SEQ ID NO: 28369 - protein, 288 aa, Homo sapiens
  Payload ID: 5566
  Gene Symbol: ETV1
  Gene Name: ets variant 1
  ENSP ID: ENSP00000393078
MLQDLSASVFFPPCSQHRTLVAFHGLPLKIKKEPHSPCSEISSACSQEQPFKFSYGEKCLYNVSAYDQKPQVGMRPSNPPTPSSTPVSPLHHASPNSTHTPKPDRAFPAHLPPSQSIPDSSYPMDHRFRRQLSEPCNSFPPLPTMPREGRPMYQRQMSEPNIPFPPQGFKQEYHDPVYEHNTMVGSAASQSFPPPLMIKQEPRDFAYDSEVPSCHSIYMRQEGFLAHPSRTEGCMFEKGPRQFYDDTCVVPEKFDGDIKQEPGMYREGPTYQRRGSLQLWQFLVALLD

SEQ ID NO: 28370 - protein, 173 aa, Homo sapiens
  Payload ID: 5566
  Gene Symbol: ETV1
  Gene Name: ets variant 1
  ENSP ID: ENSP00000394710
MLQDLSASVFFPPCSQHRTLAQVPDNDEQFVPDYQAESLAFHGLPLKIKKEPHSPCSEISSACSQEQPFKFSYGEKCLYNVRFRRQLSEPCNSFPPLPTMPREGRPMYQRQMSEPNIPFPPQGFKQEYHDPVYEHNTMVGSAASQSFPPPLMIKQEPRDFAYDSEVPSCHSIY

SEQ ID NO: 28371 - protein, 477 aa, Homo sapiens; identical to SEQ ID NO: 28366
  Payload ID: 5566
  Gene Symbol: ETV1
  Gene Name: ets variant 1
  Uniprot ID: P50549
  ENSP ID: ENSP00000405327

SEQ ID NO: 28372 - protein, 20 aa, Homo sapiens
  Payload ID: 5566
  Gene Symbol: ETV1
  Gene Name: ets variant 1
  ENSP ID: ENSP00000406931
MDGFYDQQVPYMVTNSQRGR

SEQ ID NO: 28373 - protein, 95 aa, Homo sapiens
  Payload ID: 5566
  Gene Symbol: ETV1
  Gene Name: ets variant 1
  ENSP ID: ENSP00000410819
MDGFYDQQVPYMVTNSQRGRNCNEKPTNVRKRKFINRDLAHDSEELFQDLSQLQETWLAEAQVPDNDEQFVPDYQAESLAFHGLPLKIKKEPHSP

SEQ ID NO: 28374 - protein, 419 aa, Homo sapiens
  Payload ID: 5566
  Gene Symbol: ETV1
  Gene Name: ets variant 1
  Uniprot ID: P50549
  ENSP ID: ENSP00000411626
MLQDLSASVFFPPCSQHRTLVAFHGLPLKIKKEPHSPCSEISSACSQEQPFKFSYGEKCLYNVSAYDQKPQVGMRPSNPPTPSSTPVSPLHHASPNSTHTPKPDRAFPAHLPPSQSIPDSSYPMDHRFRRQLSEPCNSFPPLPTMPREGRPMYQRQMSEPNIPFPPQGFKQEYHDPVYEHNTMVGSAASQSFPPPLMIKQEPRDFAYDSEVPSCHSIYMRQEGFLAHPSRTEGCMFEKGPRQFYDDTCVVPEKFDGDIKQEPGMYREGPTYQRRGSLQLWQFLVALLDDPSNSHFIAWTGRGMEFKLIEPEEVARRWGIQKNRPAMNYDKLSRSLRYYYEKGIMQKVAGERYVYKFVCDPEALFSMAFPDNQRPLLKTDMERHINEEDTVPLSHFDESMAYMPEGGCCNPHPYNEGYVY
